United States Patent Application Publication US 2013/0332133 A1 - sequence listing, part 38

SEQ ID NO: 263284 - DNA, 2317 bp, Unknown
  Bacterial polypeptide expressing nucleotide sequence isolated from the Sargasso Sea
aatgaaatctgaagatataaaactaaaaatcaaaatgccaatgatccctttaagggatgttgttatctttccgaatactgtttcaaccttatttgtaggaagagaaaagtctattttttctttggaagatgcacttagaagcaataaaaaaatatttttaatagcacaaaattctccttcgaatgaagagccaacaattaaagacctccctaccattggaactatctcaactctattgcagatgataaaactaccagatggaacagtaaaaatattagttgaaggtattcaaagagcaaaattagatactgtctcaacttcagagggttattttgcagaaatagagaaaatagaagaaatgattgaagactcaaaatatgaaagagaccttctttcaactataaaaaatcagtttactgagtttgtttcagtatctcggaaagtttctcatgaaataattaatcaagttgaatcgatgggcaatttatcaaaggcagtggatataatttcttcaaatattcacctctcagtaaaagacaagcaagaaatattagaaaaagtgaatgtgattgaaagagccgaatttctctctagtttgcttgaagcgcagatagagcttattgaagtagaacagaggattagaggcagagttagaaaacaaatggagaaatctcaaaaggagtattttctaaatgaacagattaaagctgctcaaaaagagcttggagatataagtgatgaaaagaacgaacttgatgagcttcagaaaaagatcgaagagacaaaattatcaaaagaagccctagaaaaagtcagttcagaattttcaaaattaagacaaatgtctccaatgtcggctgaagctactgttgtaagaacttttatagagacattgctcgatgtgccatggagtaaaaccacaaaaattaatgtagacctaaacaaagctaaagagatattagatgaagatcattatggtttaaaagaagttaaagaaagaattcttgaatatcttgctgtacaaaaaagagtcaaaaagatgaaagctccagtgctatgttttgttggacctccaggggttggaaaaacatcactgggagagtcaattgcaagatcagttaacagagaatttacaagattatcacttggtggagtaagagatgaagctgagataagagggcatagaaaaacttatattggctccatgcctggcaaaattatacaaaaactatcaaaggggaaagtgaaaaatccactctttctattagatgaaattgataagattggaatggatcataggggagatccaagctcagctctattggaagtccttgatccagagcaaaataataaatttaacgatcattacttagaagttgattacgatttatccgaagtgatgttcatatgcactgcaaattcactaaacatacctccagctcttttagaccgaatggaaataattaggttgccaggatatatagaagatgaaaaattaaatattgcaaaaaattatttagttccaaggaacaaacagaagaatggattaaaagaaaatgaaattacttttagtgataattctattttaaaaattataagaaattatactcgtgaggcaggtgttagaagtttagacagagagataaataaagtctgcaggaagaaggtcaaagacctttctattggaggtaaggcaacaaagcttattgataacagggtcgtaagaaatattttaggcccagaaaaatttaaatatggcgaacatgatgatcaaaattcattaggccaagtaaatggtttggcatggacttcagtaggtggcgaacttttacaaattgaagcggcactaactgctggtaaaggcagaataataaaaacaggatcattgggtgatgtcatgcaggagtctatacaggctgctctaacggttgcaaaaaatatttttcaaaaaactaaaacgaaaaaagatctccttgaaaaacatgatttgcacattcatgttcctgaaggagcaactccaaaagatggtccgagtgcaggcataacaatgtgcacagccataacgtctttagcattaggaaaaaaagtaaaagcgaatcttgccatgactggagagataacattagcaggaaaggttctcaaaattgggggcctaaaagagaagctaatagctgccaagagaagtggtataactaatgtaataatacccaaagaaaatactggcgatttagaagaaatggaaactaatattttaagagacctaaatattattccagtaacaaatataactgaagtactgaaagaagcgcttgtataa

SEQ ID NO: 263285 - DNA, 1000 bp, Unknown
  Bacterial polypeptide expressing nucleotide sequence isolated from the Sargasso Sea
aatgcctgaagaagcagagaaagttgctttaaaagaaatggatcgtttatcaaaaatcccatcccaatcaccagaatatacagtctctcgaacttatctagattggttaacagaacttccatggtctaaaaagtctgaagacacaattgatgtaacagatgcaaaaaagatacttgatgatgatcactatggtttagaaaaagttaaagagagaatattagaatatcttgctgttagagcattgaaaatgaaaaaagatcccaatggagcaatccgtggacctattttatgttttgcaggtcctcctggagtaggtaaaacttcgctgggtagatctatagccagatctatgggtcgtgaatttgtaagaatctctcttggtggagtaagagatgaggctgagatcagaggacatagacgcacatatataggtgcgcttcctggtaggataattcagtcactaaagaaggcaggaacaaataacccggtatttatgctagatgaaattgataaattgggaatggattttagaggtgatccttcatcagccttattagaagttctagaccctgaacagaatagtacatttgctgatcactacctcgaagttgattttgatcttagcaatgtgatgttcatagcaacagcaaattatcaagacccaatacctccagcattaaaagataggatggaaataattgatttttcaggatatatccttgatgaaaaagttcaaattgctaaaaaacatttaattcctaaacaaatggaagagaatgcacttacaacaaaggatgttacccttgatgatattggagttaaggaactcataaattcatatactcgtgaagcaggcgtgagaaatttggaacgtgagatagcaaatgtttttagaaaagtagctcgagataagattgaaaaaaaatcaaagaaggttcgagtttcaaaaaagaaggtgacagaatatttaggtgcgccaaggttctattcagacattgca

SEQ ID NO: 263286 - DNA, 877 bp, Unknown
  Bacterial polypeptide expressing nucleotide sequence isolated from the Sargasso Sea
gtttaaagatggcgagttaacaattaaggacaatgcagttacatctttaattaggtattacactcgtgaagctggcgtaagaagtcttgagagagaaattgcaaacctcgctagaaaagctattaaaaagatcgttgctggagagattaaaaatcttaccatcaatgaagaaaatgttaatgaatatgctggtgttaaaaaatacaaatatggtgaaattgatgcggatgatcaagttggcattgtaacaggtcttgcatggactgaagtcggtggggatatacttccaattgaggcagtcattatgcccggcaaaggtattatgacgattactggtaagctaggagatgtgatgaaagagtctattcaagctgctaaatcatatgttcgttctaggtgtattgattttggtattaagccaacaatttttccgattagagatattcatattcacgtgcctgaaggcgcaattccaaaagatgggccatcagcaggtcttgcaatggttacttcaattgtctctgtgttaacaggtattcctgttagaaaagatattgctatgactggagaggtgactttgagaggcaaggctctaggaattggcggtttaaaagaaaagttattagctgcactaagagctggaacaaaaactgttattattccaaaagagaatgaaaaagacttagaagatattcctgacaatgttaaagaaggattggaattgatatttgtagacaacgtcgatgatgttcttaaaattgcccttactaaaccattaattccaattgagtgggatgaaagtgaatctgtaagtggcggcagtgaaatatcagaagatgatcaagaccaagatcaggatcctcttttaacacactga

SEQ ID NO: 263287 - DNA, 2161 bp, Unknown
  Bacterial polypeptide expressing nucleotide sequence isolated from the Sargasso Sea
tatgaacttaccagtattaccattaagaaatattgttgtttttccaaatatggttgttccactttttgttgggcgtgataaatcaataaatgcccttgagcaagtaatggataaggatcaagagttattatttctttctcaaaaaaattctgaagtagatgacccttctgaaaaagatctattcaagataggaacaagaggaaaaattcttcagcttctgaagcttccagatgggacagttaaagttcttgtcgaaggtttggctagatgcaaggtcaagaaaattgagtttacatcagattatatcactgccgatattgaagagtttgaaaatatcgaggtgatatctgacactattaaagctttaggtagatctgttgtttctaaatacgaaacttatgcaaatattaataataaaacttcatccgaagttttgacttctgtcaaagatattgaggatgaaaataaattagctgatactgttgctagtcaaattgcaattaatattcaagaaaaacaaaagattctcgaggagacagatcttgagaaaagattaaatatgattttgtcttacattgagggtgaactatcagttcttcaagttgaaaagaagattagaagaagagttaagaaccaaatggaaaagactcaaaaggaatattatctaaatgaacaaatgaaggctattcagaaagaattagaagatggcgaaggtggagcctcagaagatattgctgaattaacagagaaaattaataagactaaattatctaaagaagcaaaagaaaaagcacataatgagttaaaaaaacttaaacaaatgagtcctatgtctgcagaagcaacagtggtgagaaattatttagattggttgctagatataccttggggtaaaaagaaaagaataaagaaagatattaataaatctcaagaaatactagataaggatcattatgggcttgaaaaagttaaagatagaattacagaatatttggccgttcaaaaccgatcctcaaaggttaaaggacctattttatgccttgtagggcccccaggtgtaggtaaaacatctcttggaaaatcaattgctgctgcaaccggaagagaatttataagaatgtccctcggaggagtcagagatgaagctgagattcgaggtcacagaagaacttacattggttctatgccaggaagaataattcaagcattaaaaaaagtaaaaacgactaatcctatttttcttttagatgaaattgacaagctagggcaagattttagaggcgatcctgcttcagctcttctagaagttcttgatccagagcagaataatgcatttaatgatcactaccttgaagttgactatgatttatctcaagtaatgtttgtcactactgcaaatacaatgaatatacctggtccattattagacagaatggaaattataagaattgctggttatacagaagaagaaaaattagaaattgcaaaaagacatttgatagagaaggtgaaaagtaataatgcgcttactgataaggaattcaaaatttctgatgaagtcattcgttctataatacaaaattatacaagagaagctggcgtaagaaacttagaaagggaactaaattcacttggaaggaaagctgttaaagaaatatctcaaaataaaagtgattcgctaaatgtaagttctgataatatttctgaatatttaggtgtaaaaaagtttagatatggaaagaaagaaaatgacgatttagtaggtgttgtaacaggccttgcttggactgaagttggaggcgatattcttaatgttgaggcagtaatggttcctgggcaaggcaaaatccgcactacaggtaagcttggtgatgtcatgaaagaatctattgatgcggcatcatcatttgttagatctagagctgttaattatggaattgaaccgccaatttttcaaaggaaagatatccatgttcatgttcctgagggagctacaccaaaggacggaccctctgctggcgtcgctatgataatagctattatctcggtaatggcaggaatcccagtaaaaaacgatgttgcgatgactggtgaaatgtctttaagaggtcgtgtacttcctattggaggtctaaaagaaaaattattagctgctttacgg

SEQ ID NO: 263288 - DNA, 2419 bp, Unknown
  Bacterial polypeptide expressing nucleotide sequence isolated from the Sargasso Sea
atggttgaagacaaagaaaacatatcactcgacattgtaacggataagccgctcctgcctcttagggatgtggttgtgtatcctcacatggtaattccactctttgtagggagagaaaagtcaaagctcgctctagaagaagcaatgggtgaggacaagaaaattcttttatcgtcccaaaaaagatcagacattgatgatccatcaataaaagatatcaacactgtcggcacgctcgcaaatatactgcaacttgtcacacttcctgatggaactgtgaagttgctcgtggaaggagtttcaagagttgacctcttggatatccggtctgatcaatacttcaaagcagactactgcccacttgatgaaattggcgatgaaagcgataaagatattaaagcactcagaagaacaatgatatctcaggtagaaagttatgttcgcatgaccaagaaggttccagcagaggttgtgaacactctagcaagcatcaaggaaagcgggagactggttgatacgattgttgctcatatgtcacttaagttggatgagaaacaaaaaatattagagcaaatcaatatcaaagaacggcttgagtatgtcatcggcctgatagaagttgaaatagacatgattgaggttgagcaaaaagtcagaggtcgagtcaaagatcagatggaaaagagtcagaaagaatactatttgaatgaacagatgaaagcgattcagaaagaactcggtgatcttgacaatgccaacagtgaatttgatgaacttgaagaaaagattaaaaagtctggaatgacaaaagaagcagatgaaaaagcttcatctgagcttaaaaaattgcaaatgatgtcccccatgtctgccgaagccacagtcgtgagaaactttctggatgttttgctttctgcgccttggaaaaagaaaacaaaagcaaaagtatccttagatcaagctcataaaatccttgatgaggatcattatggattaaaaacagtaaaagaaagaatcatcgagtatcttgctgttcaaaaaagggtcaaaaaactcaaaggaccaatactttgtttggtaggtcctcccggggttggtaaaacctccttgggtgcaagcattgcaagagcaactggaagaaaatttgtgagaatgtctctaggtggtgtcagagatgaagcagagatcagaggtcatagaagaacttacataggggcaatgccaggtaagatcatgcagaacctgaataaggcgggcgttagaaacccactttttttgcttgatgaaattgataaaatgtcgatggacttcagaggcgacccatcatctgcacttcttgaagtattagatcctgagcaaaacaccacctttaatgaccactacatggaagtcgattttgacctttctgatgttatgttcatttgcactgccaatacacttaatatacctcctcctttactggatagaatggaagtaatacgaattgaaggttatacagaagatgaaaaaatgaatattgctgagaagtacttagttaataagcaaacagaagccaatggcctcaaagattcggagatcaaaataacaaatagcgcaattctttcaattattcgtcactatacccgtgagtctggagttagaaatctagaccgtgaaattgcaaaaatcgctaggaaagtggtgaagtcgttgatcatgaagtcaaaagatgaaacagtgcacgtaagacctggcagcctagaaaaatatcttggtgtcaaaaaatttaagtatggcatcgcagaaaaagacaatcagattggacaagtcaccggtttggcttggacacaggttggcggagagcttcttactattgaatccacagcgattgcaggtaaaggcaagttaatcaacacaggacagcttggcgatgtcatgaaagagtcaattcaagcagccacaacagtcgttagaagtcgcgccaaagcacttggtataaaagaggatttttatcagaaaaaagacatgcacattcacgtcccagagggcgccacgcctaaggatgggcccagtgcgggcatcggaatgtgtactgctttaatctcatcattgaccgatattccggtgaaagcaaacgtcgcaatgacaggagaaataaccttaagaggcgaggttcttccaattggtggtcttaaggaaaaattacttgctgcacacagaggtggaatagaggtggtaattattcctgaagagaataagaaagacctcactgaaatacccaagaatatcaaagaaaagctcgatattgtgcctgttcagtggattgatcaggttctagaaattgctctagaaaggatgccagaaatcaagattcagggctcaaaaggaaggcaaacctcgaagtcaaaaccttcatcagaaaaaaatcttcctcattaat

SEQ ID NO: 263289 - DNA, 2389 bp, Unknown
  Bacterial polypeptide expressing nucleotide sequence isolated from the Sargasso Sea
atggaagttaaattaacacagcctttattaccattaagagacatagtggtgtttccaagcatggtaattccactatttgttggaagagataaatctattactgctttaaatgaggtaatgaaaagtgacaaaaaaataatattagttactcaaaaaaattctgaggttgatgatccaaagaaaaatgatgtattttcttatggatgtgaaagcaatatattacaacttttaaaacttccagacggtacagtaaaggtattagtagaaggaattaaaagagtaaaaattattgattttaaggatgatgaaaaatttattacttgcacctacgaacatcaaaaagatgttctaaacaaagatgaagatctattacccctagctcttacagctgtaaaacgattagaaaaattaacgtctgtaaataaaaaaatttcatcagaaacaattaacaatattaaacaattaaaagatccatctaaaattgtagataatattgtttcaaacttaaatgcatcgatatctgaaaagcaacaaatttttgaaacattagatgttaagaaaagattaaatgcagccattaaaatgatggaaagtgaaacaagtattattggtgtagaaaaaagaattagaggcagagttaaaactcaaatggaaaaaactcaaagagagtattatttaaacgaacaactaaaagcaatccaaaaagaattgggtgaaattgaagatggcaaggatgaaactactaacttaaaaaaatcaattcaaaaagctaaaatgccaaaagaagttgagaagaagtgcatgtcagagcttaagaaattaaaaaatatgagtcctatgtctgcagaggcaacagttgtcagaaattacttagattggatgattgatcttccgtggtttaaaaaaaatgatgttgatattgatttaaataaaggtctcaaaattttagacgaagatcattttggtttagaaaaggttaaagagagaattattgagtttctagcagttcaaaaaagaatggaaaaaattaaaggaccaattttatgtttggttggacccccaggagttggaaaaacatcacttggaaaatctatagctaaagctactaatagacagtttatcagaatgtctttaggaggtgtcagagatgaagctgaaataagaggtcatagaagaacatacattggatctttaccaggaaaaataattcaaatgatgaagaaagctggtacaaaaaatcctttatttttattagatgaagttgataaaattggaaacgattatagaggagatccatcatctgctttattagaagcattagaccctgaacaaaatacagctttcaatgatcactatttagaagttgactatgatttatctgatgtaatgtttgtaacaacagcgaatactttgaatattttaccgccactacttgatagaatggaagttattagaattcctggatatacagaagatgagaaaataaatattgcaaacaagtatctattacctaaacaattaaaagagaacggtgtgaaagagggtgaactaaatttagaggatgggacaataaaagaaataattagaagctatacaagagagtctggtgttagaaacttggaaagagaaatttctaaagtaacaagaaaagttgttaaaaaagtagtaagtggtgaagtagaaaaagtacaagtaagtgacaaaaatattcctgactttttaggaattaaaaaattcaaatttggtgaagtagaagataaaaataaaactggaatagtaataggattagcgtggacagaagttggaggagaaattcttaaaatcgagactgttaatatgccaggaaaaggtagaatgcaaataactggaaaacttggtgatgtcatgcaagagtctgtcaaagctgcaaagtcatatgtcagatcaaaaagtttagaatatggaataattcctcctttctttgaaaaaaaagattttcatatccatgttcctgaaggagctacacctaaagatggaccatcagctggtatagctatggttacatctatagtatcatcaattacaaatattcctgtaaatagagagatagcaatgactggtgaagtaacaatcactggacaagttctgcaaataggaggtttgaaggaaaaattattagcagcgcacagagcaggggttaaaaaagtgttaatccctaaagaaaatgaaaaagatttaatagacattccaaaaaaggtgagagaagacattaaaatcattccagttgaaacagcagatgaggtgcttaaaattgcccttacaaaagagctaaaacctgtagaatggagtgaagtcgacaaaatttctgagggcaagaaggatgataaatctcaagccagtattcagtaat

SEQ ID NO: 263290 - DNA, 1216 bp, Unknown
  Bacterial polypeptide expressing nucleotide sequence isolated from the Sargasso Sea
aatagagaatttgtaagaatgtctgttggaggaatgagagatgaagctgaaatattaggtcatagaagaacttacattggatcgttaccaggcaaaataattcaaatgatgaaaaaagctggtactaaaaatccattaattttattggatgagattgataaagtaggaaacgattacagaggtgatccttcatcagccttattagaagctttagatccagaacaaaacactacttttaatgatcattatttagaggttgattacgatctgtcagatgtaatgtttgtaacaaccgcaaacacattaaatattcttccacctttattagatagaatggaagtaattagattagccggttatacagaagacgaaaaaataaatatagctaataaatacttattgccaaaacagataaaagataatggggttaaagataaagaaatgagtcttgaagatgatattattaaagaagtaataagaagttatacaagagagtcaggtgtcaggaatttagaaagggaaatatctaaattagcaagaaaagtagttaaaaaagttgtatctggagaagaaaaagaagttaaaattgataagaaaaatttatctgattttcttggtatacctaaacataaatcaggtgaattagaaactgaaaatagagtaggtatagttattggcttagcatggactgaatatggtggagaaattttaaaaattgagacagcaactatgcctggaaaaggacgaatgcagattacaggtaaattaggtgatgtaatgcaagagtctgttaaagccgctaaatcatttgtgagatcaaaatgtttagaatacggaattatacctccattatttgaaaagaaagattttcatattcatgttcctgaaggagcaacccctaaagatggtccttcagcaggaattggaatggtaacttctatagtttcatcaataacaaatattcctgtcaaaagagatgttgcaatgacaggagaagttacattaacaggtcaagtcttaccaattggtggattaaaagaaaaactaattgctgctcatagagcaggcataaaagaagtattaattccaaaagaaaatgaaaaagatttagttgatatgccaaaaaaaattatcgatgaagttaagattactccagttgaatttgctgacgatgttttaaaaattgctttaactaaagaactgaaaaaaacagaat

SEQ ID NO: 263291 - DNA, 1151 bp, Unknown
  Bacterial polypeptide expressing nucleotide sequence isolated from the Sargasso Sea
aatggaagttaaacatacatcgccattattacctttaagagacatcgttgtatttccaagcatggttatacctctatttgttggaagggataaatctattactgctttaaatgaagttatgaagaataataaaaaaataattctagtaactcaaaaaaattctgaagtcgatgatcccaaaaaaaatgatgtgtttttctatggatgtgaaagtacaatactccaacttttaaaattacccgatggaacagttaaagttttagtcgaaggattaaaaagagttaagattattgattttaaggatgacgaaaaatttattacttgttcttatgaatataataatgacattatttctaaagatgaagatttaatgcctttagctacaacagcaataagaagattagagaaacttacgtctataaataaaaaagtatcatcagatataatttcaaacattaaagaactaaaagacccagcaaaagttgctgacaacattgcttcacatttgaatgcaacaatatctgaaaaacagcaaatttttgaaacaacagatgtaaagaaaagattaaatggtgttattaaaataatggaaaatgaaactagtataattggtgtagaaaaaagaattagaggtagagttaaaacacagatggaaaaaactcaaagagagtattatttaaatgaacaattaaaagctatccaaaaagaattaggagaaatagaggatggaaaagatgaaacttcaaatctaaataaacttattcaaaaagctaaaatgccaaaagaagttcaaaagaaatgtatgtctgaacttaaaaaattaaaaaatatgagtccaatgtcagctgaagcaacagtagttagaaattatttggattggatgattgatataccttggtttaaaaaagataaagtagatatagatttaaataaagcattaaagcaactggatgaagatcattatggattagaaaaggttaaggagagaataattgaatttttagcagtccaaaaaagaatggataaaattaaaggtccaattttgtgtttgattggtcctcctggtgtaggaaaaacatctctaggaaaatctattgcaaaagcaactaacagacagtttgtaagaatgtctttaggaggtgttagagatg

SEQ ID NO: 263292 - DNA, 1155 bp, Unknown
  Bacterial polypeptide expressing nucleotide sequence isolated from the Sargasso Sea
tatgagcaagacctttcttgcaacaattaaaaatcaatttactgagtttgtttcggtttcaagaaaagtttcccatgaaataattaaccaagttcaatcaatggcaaatttatcaaaagcagttgatgtcattgcctccaacattcatctatcagttaaagataaacaaatgattttagaaaaagaaaatccttcagaaagaggggaggctctttcaggattgcttgaagctcaaatagagcttattgaagttgaacataggatcagaggaagagtaaagaaacaaatggagaaatctcaaaaggaatattttttaaatgaacaaatcaaagctgcacaaaaagaattaggcgacataagtgatgaaaaaaacgaattagaggaatttcagaaaaaaatcgaagaaacaaaattatcaaaagaagcactagaaaaaattaattcagaattttctaagttaaaacaaatgtctccaatgtcagcagaggcaacagttgtaagaacatatattgatactttattggaagttccatggagcaagagaacaaaaattaatcttgatttaacaaaagcaaaagaagttcttgatcaggaccactatggtcttaaggaagttaaagaaagaattcttgagtatctagcagtacaaaaaagggtgaaaaaaatgaaagctccagtcctttgttttgttggtccgcctggagttggtaaaacatcgttaggtgaatctattgccagatcagttaatagagaattcattaggctttctttaggaggcgtaagagatgaggctgaaataagaggacatagaaaaacctacattggctcaatgcctggaaaacttatccaaaaactttcaaaaacaaaagtaaaaaatccattatttttatttgatgagattgataaggttggaatggatcacagaggagatccatcgtctgcactactagaagttcttgatcctgagcaaaataatactttcaatgatcattatttagaggttgattatgatctttcagaagtgatgtttatatgtactgcaaattcattaaatataccacccgctcttttagatagaatggaaattatcagacttcctggttacatagaagatgaaaaattaaatatagcaaaaaattatttagtaccaagaaa

SEQ ID NO: 263293 - DNA, 986 bp, Unknown
  Bacterial polypeptide expressing nucleotide sequence isolated from the Sargasso Sea
tatggaagttaaacattcatcaccacttttaccgttaagggacatagtagtttttccaagcatggtaataccattatttgttggaagagataagtctatcaacgcattaaatgaggttatgaaaggtaacaaaaaaattgttttggtaactcaaaaaaattctgaagtagatgatccaaaaaaaacagatgtatttaccaatggttgtgagagttcaatattacaattactgaaattaccagatggaactgtaaaagtcttagttgaaggtattaaaagagtaaaaattgttgatttcaaagatgaaaaagaatttataagctgttcatttgaattcaacaatgatgttttgtcctctcaagacgacttacttgcattaggattgaccgcaataagaagattagaaaagttaacttctgtaaataagaaattatcatcagaaactataacaaatattaaaaatttaaaagatgcctcaaaaattgctgataatattgcttcccatttaaattgtacaatttctgagaaacaacaattatttgaaactttagatgttaaaaaaagacttaatagtgtgatcaaaataatggaaaacgagacaagtattattggtgtagaaaagagaataagaggtagagttaaaactcaaatggaaaaaactcaaagagaatattatttaaatgaacaattgaaggcaatacaaaaagaattaggtgaaatagaagatggaaaagacgaaacatcaaatttaaataaatcaattttgaaggcaaagatgcctaaagaagttcaaaaaaaatgtatgtctgaactaaaaaaattaaaaaatatgagcccaatgtcagctgaagcaacagttgttagaaactatctagactggatgatagatataccttggtctaaaaaagacaaagtcgacattgatttaaataaagctttacaacaattggacgaagatcattatggattagagaaagtcaaagaga

SEQ ID NO: 263294 - DNA, 1798 bp, Unknown
  Bacterial polypeptide expressing nucleotide sequence isolated from the Sargasso Sea
attacacccaaagatgaagatctatatccacttgcagcaacggcttttagaagattagaaaaattaacatcaataaataaaaaaatttctaatgaaacaattaattctatcaaacaattaaaagacccttcccagattgctgataatattgcatcacatataactgcaactatttcagaaaaacaacaaattttcgagaccatagacgttaagaaaagattgaatgcaataattaagataatggaaaacgaaacaagtataattggtgttgaaaaaagaattcgcggtagagttaaaacgcaaatggaaaaaactcaaagagaatattatttaaatgaacaattaaaagctattcaaaaagagttaggtgaaattgaagatggaaaagatgaaaatactagccttaataaagcaataattaaagcaagaatgcctaaagaggttgaaaagaaatgtttacaagaattaaaaaaattaaaaaacatgagtccaatgtcagcagaagcaacagttgtaagaaattatttagattggatgacagaacttccatggcataaaaaaagtgctgtagatattgatcttaaaaaagctttagaaattttagataaagatcactttggtctagaaaaagtaaaagagagaattattgaatttttagctgttcaaaaaagaatggaaaaaatcaaaggtcctattttatgtttggttggtccacctggtgttggtaaaacatctctaggaaaatcaatagcaaaagctactaacagagaatttgtaagaatgtcagttggtggtatgagagatgaagcggaaataagaggacatagaagaacatacataggttctctacctggtaaaataatccaaatgatgaaaaaagctggtacaaaaaatccattaattctcttagacgagattgataaaattggtaatgattatcgaggtgacccatcttcagccctactagaggcattagatcctgagcaaaacacgacttttaacgatcattaccttgaagttgattatgatctatctgatgttatgtttgttacaacagctaacactttaaatattcttccacctttattagatagaatggaagttataagacttgcaggttatacagaagatgaaaaaataaatattgcaaacaaatatttattaccaaaacaaattaaagataatggtgttaaagaaaaagagatgagtttacaaaatgatattattcaagaaattatcagaagttacacaaaggagtctggtgttagaaatttagaaagagaaatttctaaagttgctagaaaagtagttaagaaagttgtttctggagaggaaaaagaagttaagattaataaagaaaatttgtcagattttttaggtgttcccaagtttaaatcaggtgaattggaaactgaaaatagagtaggaatagttactggattggcatggactgaatatggtggagaaattttgaaaattgaaactgctacaatgccaggaaaaggaagaatgcaaataacaggtaagcttggagatgtaatgcaagagtcagtaaaagctgcaaaatcttttgttagatctaaatgcttagagtatggaataatacctccattgtttgagaaaaaagattttcatattcatgttccagagggtgctacaccaaaagatggtccatctgcaggtattggaatggttacttcaatagtatcttctataacaaatatcccagttaaaagagacgttgcaatgacaggtgaggttactttaacaggtcaagtattgccaattggtggctaaa

SEQ ID NO: 263295 - DNA, 1201 bp, Unknown
  Bacterial polypeptide expressing nucleotide sequence isolated from the Sargasso Sea
attgaaaaagaagatgaagatccggaaatcgttgccctaagcaaaaatgtaagaaacgaattcaaacgatatctgaaagaggtcaaacggcacactgaaggaattgagaagctagcaatcgacagtgaagccccccatcggttggctgaccggattgctccacttctgaatatggatctggagaaaaaacagaccctgcttgaaatcactgaacctcgtcgcaggctggaaatcgtttatgaacggatgcttgaggagagtgaattcaaaaaagtcgagcgcaagctcaaggaaagagttcaggggcaaattggtaagactcaaaaggagtattacttaaacgagcagattaaagccattcagaaagaacttggccagggtgaggatggaaaagcggaacaggaggaatatgaaaaacgtttggaagaaattcctctttcccaggaagcccgtgagattgccgaaaaagaactaaagaaacttaagatgatgccgcctatgtctgcagaagcaaacgtggtgcgaaactacatcgactggctgttggatatgccctggggcgataaaaccgaagatcggttcgatcttgatgcggcagaaaaaattctgaataaggggcactacggacttgaaaaaatcaaagagcggatcattgaataccttgcagtcgctcaaaaagtgggttccctgaaaggtccgatcatctgtctggttggacctcctggggttgggaaaacatcacttgcccgttccgtcgccgatgcgttaggtagaaattttgccagaatgagtctgggtggtgtaagggatgaggctgaaatccggggccatcgaagaacctacgttggtgcaatgccgggaaaaatcatccagtccctgcgcaaggttaaatcaaaaaatccactacttcttcttgatgaagtggacaaaatgacacgcggagtaatgggagatccctcatcagccttgcttgaggtcctggacccggaacagaatcacactttcatggatcattatctcgaggttgaattcgatctttcggatgtccttttcttctgcacggccaatgtggcacaggatattccgcctgcgctgcaggaccggatggaagtcatcaacctttcgggatataccgaactggaaaaagttcacattttgaaaagacatttgttgccgaaacagatcgaggaaaacgggctca

SEQ ID NO: 263296 - DNA, 1141 bp, Unknown
  Bacterial polypeptide expressing nucleotide sequence isolated from the Sargasso Sea
tttgttagacgaaattgataaggttggaagcgattatagaggtgacccatcttctgctttacttgaggcattagatcccgagcaaaataaacaatttaatgatcactatcttgaagttgattatgatttatctgatgtcatgtttgttacaacagcaaacactctaaatatattgcctcctttgctggacagaatggaaataataagaatacccggatatacagaagatgaaaaaactaacattgctcaaaaatatttaatacctaaacagagtaaagataatggattgaaagataatgaatggaaaatatctgagaatgttatcaaaaaaattataagagattatacaagagaatctggtgtaagaaatttagaaagggaaatttctaaaattgccagaaagacagttaaaaagatagattcaagtgaaaaaatagagaaagaattattggaaaaagatgtaaatagctttcttggagttaagaaatacaattatggtgaaatcgaaagtgaaaacaaaattggagtttcaaccggtcttgcttggactgaagtcggcggagaaatacttaaaatagagtcagtcaatatgcctggcaaaggaaaaatgcagattacaggtaagcttggtgaggttatgcaagagtcagtaaaagctgcaaaatcttttgttagatataaatctgtcgaatttggaatagtgccaccgctatttgaaaaaaaagatttccatattcacgtgcccgaaggagcgacccctaaagatggaccatctgctggtattgctatcgtaacttctataatatcttcaataactggtatcccggtcaataaagatgtagcgatgacaggcgaagtaactttaagaggaaatgttctacaaatcggtggtttgaaggaaaaattactagcagctcacagagctggtattaaaaaagttttaattccatacgataatcaaaaggatttaattgaaattccagaaacgataagaaatagtattgaaatagtaagtgtaaaaactgtcgaagaagtgcttaaacatgcgcttacaaaagaactcaaaccagtgaaatgggtagaaatagatcaagtttcaaataaaaacaaagaaaaatcagaagttacgagcgctcattaa

SEQ ID NO: 263297 - DNA, 2389 bp, Unknown
  Bacterial polypeptide expressing nucleotide sequence isolated from the Sargasso Sea
atggaagtaaaattaacacaacccttactacctctaagagacatagttgtatttccaagcatggtaataccactatttgtcggaagagataaatcaatcaccgctcttaatgaggtaatgaagagtgacaagaagataattcttgtaacccaaaaaaattcagaagtagatgatccaaaaaaaaatgacgtattttcttatgggtgtgaaagtaatattttacaacttttaaaacttcctgatggtacagttaaagttttagttgaaggcataaaaagagttaaaattatcgatttcaaagatgatgaaaagttcattacatgtacttatgaacatttaaaagatttaataaataaagatgaagatttattacctttagctttaacagctgtaagaagattagaaaaacttactgctgtgaataaaaaaatttcatctgatactataaacaatattaaacaattaaaagaaccatctaaaattgttgataacattgtttcgaatttaaattcatctatatccgagaaacaacaaatatttgagacgcttgatgtaaagaaaagattgaatgcagtaataaaaatgatggaaagtgaaactagtatcataggtgttgaaaaaagaattagaggtagagttaaaactcaaatggaaaaaacacaaagagagtattatttaaatgaacaattaaaagctattcaaaaagaattaggtgaaattgaagatggaaaagatgagacaacaaatcttaaaaaatcaattcaaaaagcaaaaatgcccaaagatgttgaaaagaaatgtatgtctgagcttaaaaaactaaaaaacatgagtccaatgtcagccgaagcaactgtagtaagaaattatttagattggatgatagatctaccttggtttaaaaaagacaacgtagatattgatttaaataaagctcttaagattttagatgaagatcatttcggtttagacaaagttaaagagagaattattgaatttttagcagtccaaaaaagaatggaaaaaatcaagggaccaattttatgtttagttggaccacctggagtcggaaaaacttcattgggtaaatcaatagctaaagctactaatcgacagtttataagaatgtccttgggaggtgttagagatgaagctgaaattagaggacatagaagaacttatataggctcattgccaggaaaaattattcaaatgatgaaaaaggctggaacaaaaaatccgctatttttattagatgaggttgataaaataggaaacgattacagaggagatccatcgtcagcgttattagaggctttagatccagaacaaaacacagcatttaatgatcattatttagaggttgattatgatttatctgatgtaatgtttgttacgactgcgaatactttaaatatactgcctccattactggatagaatggaagttataagaataccaggttatacagaggatgaaaaaataaacattgctaataaatatttattacccaaacaactaaaagacaatggtgtaaaagaaggagaattagatttaaaagatggcacaattaaggaaattataagaagctatacaagagagtcaggtgttagaaatttagagagagaaatctcaaaggtaacaagaaaagttgtaaaaaaagttgtaagtggtgaggtagaaaaagttcaagtaaatgataaaaatattcccgactttttagggattaaaaaattcaaatttggtgaagttgaaaataaagataaaactggaatagttattggactagcatggacagaggttggaggagaaatccttaaaattgaaacagttaacatgccaggcaaaggtagaatgcaaataactggaaaacttggagatgttatgcaagagtcggttaaagctgcgaaatcatttgtaagatcaaaaagtttagaatatgggataattcctcctttttttgaaaaaaaagactttcatatccatgttcctgaaggagctactccaaaagatggaccctcagcaggtatagcaatggtaacatccatagtttcgtcaattacaaatattcctgttaatagagaagttgccatgacaggagaggtgacaattacaggacaagtactgcagattggcggattgaaggaaaaattattagcagctcatagagctggtgttaaaaaagtgttaattccaaaagaaaatgaaaaagacttggtggacgtacctaaaaaagttagagaagatattaaaattatacctgttgaaactgctgacgaagttctaaaaattgcacttttaaaagagcttaaacctgtagaatggactgaagttgataaaatttcagaaggaaaaaaagacgacaaatctcaagctagtatacagtaat

SEQ ID NO: 263298 - DNA, 1236 bp, Unknown
  Bacterial polypeptide expressing nucleotide sequence isolated from the Sargasso Sea
gatggatataaaagtaacattgccgttattgccattaagagacattgttgtcttcccaagtatggttattcctttatttgttggaagagataagtccatcactgcattaaatgaagtgatgaaaggtgataaaaaaattgttcttgttacacaaaagaattcagaggtcgatgatcctaagaaaaatgatgtatttacatatggatgtgaaagcaacatattgcagctacttaagcttccagacggaacagttaaagtattagtagaaggtaccaaaagagtaaaaatagtagattttaaagatgatgaaaaatttattaaatgttcatttgagtatcaaaaggatattacatcaaaagatgacgatctgcttcctttaggcttaacagctataaaaagattagaaaagttaacaagtgtaaataaaaaaatatcctcagagacaatcaacaatataaagcaattaaaagatccatctaaaattgctgataatataatttcacatatcaatgctagcatctcagaaaaacaacaaatctttgaaactttagatgttaagaaaagattaaatagtgtcgttaaaataatggaaaatgaggcaagcattataggtgttgagaaaagaataagaggaagagttaaaactcaaatggagaagactcagagagaatattatttaaatgagcaactaaaagctattcaaaaggaattaggagaaattgaagacggtaaagatgagacaacaagtttaaagaaatcgatattaaaagcaaaaatgccaaaagaagtcgaaaagaaatgtatgtcagaattgaaaaaattaaaaaatatgagtccgatgtcggcagaggctactgttgttagaaactatctagactggatgatagatttaccgtggtttaaaaaagataaagttgacatagatttaaacaaagctttgaaaattttagaggaagatcactttggattagaaaaagttaaggaaagaattattgaatttttagcagtacaaaaaagaatggataaaattaaaggtcccatactttgtttggtaggtcctccaggtgtaggtaaaacttcattaggtaaatcaatagctaaggcaaccaacagacaatttgtaagaatgtctttaggtggagtgagagatgaagcggaagtaagaggtcatagaagaacttacataggttcacttcctggaaaaattattcagatgatgaaaaaagcaggtactaa

SEQ ID NO: 263299 - DNA, 2362 bp, Unknown
  Bacterial polypeptide expressing nucleotide sequence isolated from the Sargasso Sea
aatgcctctaaggaatacggttttatttcctcaacaagtaatacctatatatataggtcgtgaaaaatcgttaaaacttattgaagatttagggagcggtgataagcatatagttgtagtagcacaagaagatggttctattgaagaccctaaacctgaagatttatatgcatatggtactttaggtgtagtgcttaaagtttttgatatgccagataatagtaaatctgcaattgttcaaggtatcgaaagagttaagttacttagctttggggagcctaatccatattacaaggtagttgttgagaaagtaagcgatcaaccaattaaagatgatttagaagttgaagctctttctaaaaacttacgtaatacctttactgaattgattcaagttgcaccaaatttaactgaagaacattctggtatgttatctaatattcaaaaaccatcacgtctagcagatcgagcagtatctttacttactgttcctaaccaagaaaaacaagatgttcttgaagagcttgatgtgaaaagtagagtcgaaaaaaccattactttgcttactagagaaattcaacgaataaagcttggtgaggaaattcaaactgaagttcatgacgaaatttctaagactcaaagagaatattatttacgagagcaaatgaaagcaattaagagagagcttggtgaagatgaggaaactgtagatatcaaggagcttgaagatcgagtaaaagctgcaaaattacctgaagaagcagaaaaggtagcaatgaaagagttagagagattatcacgtattccaactcaatctcctgaatattctgtttcaagaacatatatagaatggttagctgatttaccatggagtaattctagtgaagaccagatagatgttaaaaaagctgaaaagattcttgatgaagatcactacggtctcgaaaaggtaaaagaaagaattcttgagtatctagctgtaagaaatttaaagcaggagcgtaaccctgacaaagtagtcagagggccaatcttatgtttttcggggcctccaggtgtaggtaaaacatctttaggaaaatctatagctagagcaatagggcgagaatttgtaagaatgtctttaggtggagttcgggatgaagcagaaatacgtggacatagaagaacatatattggtgcattaccaggtagagtaattcaatccatgaaaaaagcaggaacgaataatcctgtatttatgcttgatgaaatagataagcttggttctgattttcgaggagacccctcatctgcaatgcttgaggtgttagatcctgaacaaaacgatgcatttagtgaccactatttggaagtagactttgacttgagtaaagtaatgtttatcactactgctaattatcaagatgctattcctcctgcacttagagaccgtatggaaatacttgattttagtggctacatcgaagatgagaaaattaaaattgcacagcagcacttaattcctaaacaaattgaagagaatggtctaaataaaaaagaagtatcgttggataaggcagcaatcagtgagcttgtacgttcctatactagagaatcaggtgtaagaaatctagaaagagaaattgcaaatgtattacgtaaggttgcacgagatttagttgaaaagaccattaaaaagattagagttacaagtaaaaaagtgatagaatatttgggagctcctcgtttctattctgaaatagcagagagaacaacaaaaccaggagttgtaaccggcttagcatggactgctgccggaggagatattttatttattgaatcatcaaagatgaaaggaaagggtggtttaacgttaacggggcaattgggtgatgttatgaaagagtcagctactgctgctttaacatatgtacgatcacacactgatattttaggcataccagatgatttccatgaaaaaactgatattcatgtacatgttcctgcaggtgcaataccaaaagatggaccatctgctggtgtaagtatgttcacgtcaatagtttctttaatgacaggcaaacctgttaaagctaaagtagcaatgaccggagagattactctcaggggtaatgtattaccaattggaggagttaaagaaaaagtaacagctgcacatcgttcaggtattaaacatattattctacctgatcataataaaaaagatcttgaagatattcctgagcatatcaaaaaagatttaaatttttattttgcaaaagaaattatggatgttattgatgttgctatcccaggtttaaatggtcggaaaaaaagaacaccaagaaaaactacctcaaaagtaaaaaaagtgtcttaa

SEQ ID NO: 263300 - DNA, 1135 bp, Unknown
  Bacterial polypeptide expressing nucleotide sequence isolated from the Sargasso Sea
atacttttagatgagatcgataaagttggaaacgattatagaggagatccttcctcagctttattagaggctttagacccagagcaaaacactacttttaatgatcactatctagaagttgattatgacttatctgatgtaatgtttgtgactacagctaatacattaaatattttacctccactgttagataggatggaggttattagattagcaggctacacagaggatgaaaaaataaatattgcaaacaaataccttcttccaaaacaaataaaagataatggtgtgaaggaaaaagaaatgaatttgggcaatgatattataaaagaggtaattagaagttacacaaaggagtccggagtaagaaatcttgagagagaaatttctaaaattgcgagaaaagtagttaaaaaggttgtctctggagaagaaaaagaagttaatatcaccacgaaaaatctaccagactttttaggagttcctaaattcaaatcaggtgagttagaggctgaaaatagagttggtatagtaacaggattagcttggactgagtatggtggagaaattttaaaaatagagacagtaacaatgccaggcaaaggccgtatgcaaattactgggaagcttggtgacgtaatgcaagagtcggttaaagctgcaaaatcattcgtaagatcaaaatgcttagaatatggaattattcctccattatttgagaaaaaagatttccacattcatgttcctgagggagcaacaccaaaagatggcccatctgctggaataggaatggttacatcaatagtttcatcaattacaaacattccggtaaaaagagatgtggctatgacaggcgaagtaacattgactggccaagtattacctattggcgggttaaaagaaaagctattagcggcacatagagcaggtataaaagaggttttaattccgaaagaaaatgaaaaagaccttgtagacatgccaaaaaagattatcgatgagataaaaattaccccagttgagtttgctgatgaggttttaaaaattgccctaactaaagagctgaagaagacagaatgggttgaggttgatatgtctaaaaaagatgataaatctcaagctagcattcaataat

SEQ ID NO: 263301 - DNA, 878 bp, Unknown
  Bacterial polypeptide expressing nucleotide sequence isolated from the Sargasso Sea
aaacaaattaaagataatgggagttaaagaaggagagcttgatattaaagacggaactatcaaagaactaattagaagttatacaaaagaatctggtgtaagaaatttagaaagagaaatatctaaaattgcaagaaaatctgtgaaaaaaattgttaataatgaaacttccaaagttgaagtagatgaaaaaaacttaaaagactttcttggaattaaaaaattcaaatttggtgaattagaaaatgaaaataaagttggaattgttacaggtttagcatggactgaatttggaggtgaaattttaaaaattgaaacagttaacatgcccggaaaaggaaaaatgtcaattaccggcaaattaggtgatgtaatgcaagagtctgttaaagcagcaaaatcttttgtaagatctaaaagtcttgaatatggaataatacctccgatctttgaaaagaaagacttccatattcatgtacccgagggagctactcctaaggatggaccatcagctggtgttgctatggtaacatctatagtttcttctattactaaaatacctgtaaacagagaaatagctatgacaggcgaggtgactgttacaggtcaagttcttccaataggaggtttgaaagaaaaacttttagccgctcatagagctggaattaaaacagtacttataccaaaagataatgaaaaagatctagttgaaattccaaaaaaagttaaagaagatattaaactaatacctgttgaaacggcagatcaagttataaaaatagctcttacaaaagagttaaaaaaggttgaatggaatgatgttgaaaacatttcaaaaagtaaaagagacgaaaaaactcaagctagcattcaataac

SEQ ID NO: 263302 - DNA, 2104 bp, Unknown
  Bacterial polypeptide expressing nucleotide sequence isolated from the Sargasso Sea
gagagttaaaataaatgattttattgacaattcaaaatacataacttgcaaatttgaaaatttaaacgatgaaatagaaaatatcgatgagttaacaattttagcaactacagcattaaaacgattagaaaagttgtcctcaattaataaaaaaatatctaacgaaactattagtagcattaaagaattaaaggagccttcaaaaatcgctgataatatagcctcacacttaaatacctcaatttctgaaaaacaacaaatttttgaaacaatagatgttaaaaaaagattgaatgcagtcattaagataatggaaaacgaaacaagtattattggcgttgaaaaaagaattagaggtagagtaaaaactcaaatggagaaaactcaaagagagtattacttaaatgaacaacttaaggctatccagaaagaactaggtgaaatcgaggatggtaaagatgagacttcaaatctaaataaagcgattttaaaagctaaaatgcctaaagaggttcaaaaaaaatgtatggctgaactgaaaaaattaagaagtatgagtccaatgtcggcagaagctacggtggtaagaaattacttagattggatgattgacttgccttggtataagaaagacaaagttgatatagatttaaacaaggcattgaaaacgcttgatgaagatcattttggattagaaaaagttaaagagagaattgttgagttcttggctgtacagaaaagaatggaaaaaattaaaggacctattctttgtttggttggtcctccaggagtaggcaaaacatcacttggtaaatctatagcaaaagcaactaatagacaattcgttagaatgtctttaggcggaattagagatgaggctgaggtaagaggtcatagaagaacttatattggttcgctaccaggtaaaattattcaattgatgaaaaaagctggtactaaaaatccattaattcttttagatgagatagataaagttggaaatgattacagaggagatccatcatcagcattacttgaggctctagatccagagcagaatactaattttaatgatcactatcttgaagttgattatgatttgtcagatgtcatgtttgttactactgctaatacattaaacattcttccaccattattagatagaatggaagtgatcagaatccctggatacacagaagatgaaaaaattaatattgcaaacaaatatttattaccaaaacaaataaaagaaaatggtgtaaaaaataatgaactagatttaaaagatggaactataaaagaaataataagatcttacactagagagtcaggggtaagaaatcttgaaagagaaatttcaaaaattacaagaaaagttgttaaaaaagtagttaatagtgaagatacaaaagtacttgtaaaccctaataatattaatgattttttaggtgtgaaaaaatttaaatatggagaagttgaaacagaaaataaagttggaattgtaaccggtttagcctggacagaatttggtggagaaattttaaaaatcgagactgttaatatgcctggaaaaggtagaatgcaaatcacaggaaaattaggagacgtgatgcaagagtcagttaaagccgcaaaatcatttgttagatcaaaaagtttggagtatggaattattcctccaatattcgagaaaaaagattttcatattcatgtcccagaaggagccacaccaaaggacggcccttctgctggtatagcaatggttacttccatagtatcatcagtaacaaacaatccagttaacagagagattgcaatgactggagaagttacaattacagggcaagttttggctattggtggattgaaggaaaaattattagctgctcatagagctggaataaaacatgttttaataccaaaagataatgaaaaagatttaacagatattccagaaaaggttaaaaacgatattaaaattacgcctgtaaaacatgcagatgaagtattaaaagttgctctagttaaagagttaaaaaaaatagagtgggctgacgtcgatttgacaaaaaaagaggaaaaatctcaagcaagtattcaataa

SEQ ID NO: 263303 - DNA, 1498 bp, Unknown
  Bacterial polypeptide expressing nucleotide sequence isolated from the Sargasso Sea
ctgaacttccttgggcataaaaaaagtgaagtagatatagatttaaagaaagctctagatattcttgataaagaccattttggattagaaaaagttaaagagagaattatagaatttttagccgttcaaaaaagaatggaaaaaattaaaggtccaattttatgtttagttggacctccaggtgttggaaaaacctcattaggaaaatcaattgcaaaagctacaaacagggaatttgttagaatgtcggttggtggaatgagagatgaggcagaaatacgaggtcacagaagaacttatattggatctttgccaggaaaaattattcagatgatgaaaaaagctggaacaaaaaatccattaattttattagatgaaattgataaaattggaaatgattataggggagacccatcttcagcattattagaagctctagatcctgaacagaacacaacatttaatgatcattatctagaagttgattatgatttatctgatgtgatgtttgtaacgacagctaataccttaaatattttacctcctttattagatagaatggaagtaattagattagcgggttatactgaggatgaaaaaattagtatcgcaaacaagtatttattgccaaaacaaatcaaagataacggtgttaaagaaaaagaaatgaagctggacgatgatattattaaagaagttataagaggatacacaaaagagtcaggtgtaagaaatctagaaagagaaatttctaaactagcaagaaaggttgttaaaaaaattgtagctggagaagaaaaagaggttggaataaataataagaatttatctgattttttaggtgttcctaagtttaagtttggagaattagaagctgagaatagagtaggtatagtaacaggtctcgcttggactgagtatggtggagaaattttaaaaattgagaccgttacaatgccaggaaaagggagaatgcaaatcaccggtaaattaggtgatgttatgcaagaatctgttaaagccgcaaaatcttttgtaaggtcaaaatgtttagagtatggaattattcctccaatttttgagaaaaaagattttcatatccatgttcctgaaggagctacaccaaaagatggcccatcagctggtattggaatggtaacatcgatagtctcgtcaattaccagcattcctgtacgaagagatgttgctatgactggtgaagttactttaacaggtcaagtattgccaattggtggtttgaaagaaaaattattagctgcacatagagctggaataaaagaagttttaattcctaaagaaaacgaaaaagatctagtagatatgcctaagaaaattatagacgatattaagatcactccagttgaatatgctgatcaggttataaaaatagctttaacaaaagaacttaaacctacagagtgggttgaggtagatatatctaaaaaagacgataaatctcaagctagtattcaataat

SEQ ID NO: 263304 - DNA, 1687 bp, Unknown
  Bacterial polypeptide expressing nucleotide sequence isolated from the Sargasso Sea
cgcctctcatttatcaattaaattgtctgataagcaagagatattagaagcaattgatcttacagaaagatttgaaaaaattacgaactttattcaggctgaattagacgttatgcaagttgagaagaaaatcagaggtcgagtaaaaaatcaaatggaaaagactcaaagagaatattatttaaatgagcaaatgaaggccattcaaaaggagcttggagaaagtgaagatggcaaagatgatgtacaagaatacgaagaaaaaatagaaaagaccaagctatcgaaagaagcgagggaaaaatgttactcagaaattaagaagttgaaatcaatgagcccaatgtctgcggaatccagtgtaataagaaactaccttgattggattttatcaataccttggagtaaaaaaacaaaggtaaaaaaagatataaagtatgcagaaagtgtgcttaatgaagaccattacggactggagaaggtaaaagagagaattcttgaatatttggctgttcagcaaagaattaaaaagatgaagggcccgattctttgtttagttggtgctccgggcgttggaaagacttcacttggaaagtctattgcaagagcgacaggaagaaaatttgttagaatgtcacttggtggtgttagagatgaggctgagataagaggtcatagaagaacttatattggatcacttcctggaaaagttcttcaaatgatgaagaaagcaggttcatcaaaccctttgtttttgtttgacgaaattgataagcttggcgctgattatagaggagatccatcgtctgctcttcttgaggttcttgatcctgagcaaaataatacttttaatgaccattatttagaagtcgactacgacttatccgatacaatgtttataacaactgcaaacaccctaagaatgccacctgccttgttagatcgtatggagataattagaattgcaggctatacagaagacgaaaaagttgaaattgttaaacaacatcttgctcctcaaatgttagaaaaacatggcttaaaggaaggtgaattgatattaaatgactccgcaattattggattaattagatattacacaagagaggcaggagtaagaagtttagagagagaacttgccaatctagctagaaagactgtaaaaaaaattgtggcaggagattttacttccttgactgtagacaagaataatttgcaagactttgccggtgttaggaaatttaaatttggtgaaatagacaatgatgatcaagtaggaattgtgacaggactagcatggacggaggtaggaggagacattttgccaatagagtctgttataatgccaggtaaaggtcgaatgacgattacgggaaagttaggtgatgtaatgaaagaatcaattcaagccgccaagtcatacgttcgttcaaggtgtattgagtttggcattaagccaactattttccctctacgagacatacatatccatgttcctgaaggggcaataccaaaagacggtccatctgctggacttggtatggtaacttcaattgtctcagttttaactggcatacctgttagaaacgacattgcaatgactggagaggttacacttagaggtaaagctctgggaattggtggacttaaagaaaaattattagccgctctaagggcagggacaaaa

SEQ ID NO: 263305 - DNA, 1591 bp, Unknown
  Bacterial polypeptide expressing nucleotide sequence isolated from the Sargasso Sea
gacaaatgtaagaatgagttaaaaaaattaaaaaatatgagtcccatgtcagctgaagctactgttattagaaattatttagattgggtgttaagcataccttggaatactccttcagttatttcaaaaaacatcaataaagctaagaatattcttgactcagatcattatagtttagaaaaagttaaagaaagaatcattgaataccttgctgttcaaaaaagaatgaataaaattaaaggaccaattctatgtttagttggccctccaggagttggtaaaacttctcttggaaaatctattgcaacagcaactggtagaaattttgttagaatgtctctaggtggaataagagacgaggcagaaattagaggacatagaaaaacttatataggatcgatgccaggaagatttattcaagctatgaaaaaatccaaatcatcaaacccacttatattgttagatgaaattgataaacttggctctgactggagaggagatccttcttctgctcttttagaagttttagatcctgaacaaaataataaatttaatgatcattatcttgaactagactatgatttatctgatgttatgtttgtttgcactgcaaatacacttaacatacctctaccattaatggatagaatggaaattattagaattgcaggttatacagaaaaagaaaaaactgagatagcaaaaagatttatagtaccaaagcaattaatcgtccatggtttgaaaaaaaatgaagtctcttttacttctaaaacgattaatattattattcgacattatactcgtgaagcaggtgtaagaaacctcgaaaaagaagtagcaaaaatatgtagaaagacagtgaaaattcttgaaacaaccaaaaattctaaaataatattagataaaaaaaatattaataaatttcttggagtagaaaagtttagaaataatgaaattgataaaaaaaatttagttggaataacaaatggattagcatggactgaagtaggcggtgaaattttatcagttgaagttttaatctctatcggaaaaggtaaacttactattacaggtaaattaggcgatgtaatgaaagaatcaatccaagctgctgtttcttatgttagatctcaatcactttctcttggtattaatccaaaagtttttgataaaactgacatacatgttcatgtgccagaaggagctacacctaaagatggccctagtgctggagtcgcaatcttcaattctttagtatcatcccttactgcaataaaagtaaaaaaagatgtagcaatgactggagaaatcactttacgaggcagagtactcccaatcggtggtttgaaagaaaaactgtacgctgcagttagagcaggcattaaaactgttattatacctgaagaaaataaaaaagatttgaacgagttagataaagaaatattaaaaaatattaagattttccctatttctgaagcaaaatcaattttacaacatagtcttgcaaaaaaaattaaacctgtaaatacaagcgaatctgagacaattaaatctatagaatcatcaattcagcgtgataatctaagaa

SEQ ID NO: 263306 - DNA, 1252 bp, Unknown
  Bacterial polypeptide expressing nucleotide sequence isolated from the Sargasso Sea
aataaaaggacctatactttgtttagttggtccgcccggtgttggaaaaacctctttaggtaaatctattgctaaatctacaaatagacaatttgttagaatgtcactaggtggtgttagagatgaagctgaaataagaggtcatcgtagaacttatattggatccttgccaggtaaaatcatccaaatgatgaaaaaagctggaacaaaaaatccattaattcttttagatgagatagataaagttggaaatgattacagaggtgacccatcttctgctttactagaagctttagacccagagcagaacacatcctttaatgatcattatttagaagttgattatgacttatcagatgtaatgtttgtgacaactgctaacactttaaatattttacctcctttgttagatcgtatggaggttataagaattccaggatacaccgaagacgaaaaggttaatatatctaatagatttttattaccaaaacaaattaaagaaaatggtgttaaggatggggaattagatattaaagagggcaccattaaagaaatcataagatcttatactcgggagtctggagttagaaatttagagagagaaatatcaaaaataacaaggaaagctgttaaaaaagtagtcaacaatgaaacagacaaagttgaggtgaatgaaaataatgtgtctgattatcttggagttaagaaatttaagtacggagaaaaagatgaagaggatagagtaggtgttgttacaggattagcttggacagaatttggtggtgaaattcttaaaatagaaacagttaatatgcctggtaaaggtagaatgcaaattacaggtaaacttggtgacgtaatgcaagagtcagtaaaagctgcaaaatcttttgtaagatctaagagtttagatttcggcgtaatacctccgacttttgaaaaaaaagatttccatattcatgtacctgaaggtgcaacaccaaaagatggaccatctgccggtatagcaatggttacatctattgtgtcatcaattactgatattccagtaaatagacaaatagccatgacaggtgaggttacaattactggtcaagttcttcaaattggaggattgaaagaaaaacttctagcagcacatagagcaggaattaatcatgttttaatacctaaagataatgagaaggatttagttgatataccaaaaaaagttaaagaagatataaaaattactcccagtaaaagttgttga

SEQ ID NO: 263307 - DNA, 1752 bp, Unknown
  Bacterial polypeptide expressing nucleotide sequence isolated from the Sargasso Sea
atagaatcacagctagatgtagttgatgttgaaaaaaaggttcgagacagagtcaaaaagcaaatggaaaaatctcaaagagaatattatctcaatgagcaaattaaagccgcacaaaaagagcttggtgaaataggagaagagggagatgaactagagaatcttgagaaaaaaattcatgaagtaggcatgacaaaagaagccttaaaaaaagcaaagagcgagcttgcaaaatttaaacatatggcaccttcttcagctgaggcttcagttgtaagaacttatcttgattgtctagtggatgtgccatggaaaaagaagtctaaggttaaaactgatataaaagcctcaatggaaattctcgaagaagaccactatggccttgaagaggttaaagaaagaatcgttgagtatttagcagtccaaaaaagagttaagtcaatgaaggctcctgtcttatgtcttgttggtcctccgggtgtaggtaaaacatctttaggtgagtctattgctagggcaactaacagagaatttgtgagaatgtctcttggtggtgtaagagacgaatctgagatcaggggacacagaagaacttatattggatcaatgcctggaaaaattattcagaaactttcaaaagtgggtgtaaaaaatccattatttcttttagatgaaattgataaaattggcatggatcatagaggggacccagcatctgccttattggaggttcttgatcctgaacaaaacaatacctttagtgatcattatcttgaggtagattacgatttatctgaagttatgtttgtttgcactgcaaatagcctaaatattccaacacctcttttagatagaatggagattattagaattcctggttacatagaggatgaaaaaattaatattgcagaaaagtatttattgcccaagcagatgaatcgaaatggattgaaagatgaagaaattaagttaaacaaaaatgtaattctttcattgatcagatactacactcgagaggctggagttagaggtcttgaaagacaaatagcaagaattttgagaaaggttgttaaggaaaggttggtagaaaattcaactaaacaaaaacctacatctatttcttctaaaaatcttgaaaaatattctggggtcaagaaattcaaatatggagttgctgaaaaagataatgctgtaggacaagtcactggcctagcttggactgaagttgggggcgaacttctaacgattgaagcctcaaatattgatggtaaaggaagagttattaaaactggttctttgggtgatgtaatgcaggaatcaatacaagcagcacttacagtagttcgttcaagagcagaatctcttggaattcaaccaaatttttatgaaaaatatgatgtacatattcatgtgccggagggagcaactccaaaagatggtccaagtgctggtggcgcaatggctatctctttaatttcaatctttacaggtattccggtaagagcagatactgcaatgactggtgaaattacattaagaggtcaaatattaaaaataggtggattaaaagaaaaattacttgctgcaaaaagaggtggaattagaaatgtaatcatacctaaggagaatgaacctgatctccaagaaattcctaaacaaattactaaatcacttaacatcattccggttgaatggattgatgaagttatttcagctgcccttgttgaggagccaactcctaacactaaaaaa

SEQ ID NO: 263308 - DNA, 1381 bp, Unknown
  Bacterial polypeptide expressing nucleotide sequence isolated from the Sargasso Sea
taaggtcaaagagcgaattattgagtatctagctgttcgaaatctcaagcagaagaaagatccaagtggtaccgtccgtggtcccattttgtgttttggcggccctcctggtgtaggtaaaacatcccttggaaaatcaatagcacgcgcaatgggtagagagtttgtgcgcctttctcttggaggtgttagggacgaagctgaaataagaggtcacagacgtacctacataggcgcattgccaggacgtgtaatccaaagcataaaaaaagctggaaaaaataatcctattttcatgttagatgagattgataagcttggttcagattttcgaggtgacccgtcgtcagctctgttggaggtattggatcctgagcaaaaccattcatttagtgatcactacttggaagttgactttgatctcagcaatgttatgtttattgcaacagcaaattatcaggatgccattcctccagctcttagagataggatggagatcttagatttctctggttatatcgaagatgaaaaaattcagatagctaaaagacatattttaccaaaacaaatcgaagaaaatggtcttacaaagaaagaggtttcgttcgacatgccctcactcaaagaattggttcgttcatatacaagagaggcaggtgttagaaatcttgaaagggaagttgcaaatgtaataagaaaagtcgctcgtgatcttgttgaatcaaaaaacaaaagcattaagattacaaagaaaaaagtcggtgattacttgggcgctcctagatttcactctgaactagcagagaggtcaacaaagcctggcgttgttactgggcttgcttggacagctgccggtggtgatatcttatttgtagaatctacaagaatgacgggaaaaggaaaattgactctcactggacagttaggtgatgtaatgaaagaatccgcaactgctgcattaacttttgtacgagctaattcagataatctgggcatagaatccgatttcaatgacaaatcagatattcatgtccatgttccagctggagcaattccaaaggatgggccttcagctggggtaagtatggtgacttcactggtttcgcttcttacgggagtttcagtgaaagaaaaggttgcaatgactggagaaattaccctgagaggaaatgtgttacccatcggcggagttaaagagaaggtgacagctgcgcacagatctggaattaaagaagtgattttacctgaccataataaaaaggatcttgaggacgtacctccaaatgtcgcaaaagatatggtatttcactttgcaaaggagattaaagacgttttaaaggtagcagttccagatattaattctattgtaaaaaaaatctaa

SEQ ID NO: 263309 - DNA, 1078 bp, Unknown
  Bacterial polypeptide expressing nucleotide sequence isolated from the Sargasso Sea
agaagcattagaccctgagcagaatacagctttcaacgatcactatttagaggttgattatgatttatctgatgtaatgtttgtaacaacagcaaacactcttaatattttacctccacttcttgatagaatggaagtaataagaattcctggatatacagaagacgaaaagataaatattgcaaataagtatttgttacctaaacaagttaaagaaaatggtgttaaagagggtgaactaaatttagaagatgggacaataaaagagataattagaagttacacaagggagtctggtgttagaaatttagaaagagaaatttcaaaagtaacaagaaaagttgttaaaaaagtagtaagtggtgaagttgataaggttcaagtagacgataaaaatattccagactttttaggaattaaaaaatttaaatttggagaagtagaagataaagataaaactggtatagtaataggactggcttggactgaagtagggggagaaattcttaaaattgagactgtcaatatgcctggaaaaggtagaatgcaaataacaggaaaacttggtgatgtgatgcaagagtcagttaaagctgcaaaatcatatgtcagatcaaaaagtttagagtatggaataattccacctttctttgaaaaaaaggattttcatatccatgttccagaaggagctacacctaaagatggaccatcagcaggaatagcaatggtaacatccatagtttcatcaataacaaacattcctgtgaacagagagattgctatgactggtgaagtaacaattacaggacaagttttacaaattggtggtttaaaggagaaattattagctgcacatagagcaggggtcaaaaaagttttaatacctaaagaaaacgaaaaagatttagtagatattccaaaaaaagtgagagaagatatcaaaatcattccagtggaaacagcggatgaagtcttaaaaattgcacttacaaaagaacttaagccagttgaatggacagaggtagataaaatctcagagggtaaaaaggacgataaatctcaagctagtattcagtaa

SEQ ID NO: 263310 - DNA, 1318 bp, Unknown
  Bacterial polypeptide expressing nucleotide sequence isolated from the Sargasso Sea
ggtgatgaaattcaaacggaagtccatgatgaaatagcaaaaactcagagagaatattatttgcgagaacaaatgaaagcgattcaaaaagagttaggtgaagatgaaggtactgttgaattaaaagaactagaagatagaattaaatctgcaaaaatgcctgaagaatcggaattagttgctatgaaagaattagataggctatcaagaattccaacacagtcgcctgagtacaatgtttcaagaacttatatagagtggattgcagatttaccatggagtaagtcctcaaaagatagaattgatatcaaagaagcacttaaaattttagatgaagatcattatggtcttgataaggttaaagaaagaataattgagtatctcgcggtacgaaacttaaaacaaaaaagaaatccagatggaaatgtgcgtggtccaatactatgtttcggaggtcctcctggtgtaggaaaaacatctctagggaaatcaatttcaagagcaatgggaagagaatttataaggttatctcttggcggcgtaagggatgaagcagaaattagaggacatagaagaacttatattggcgctctcccagggaggatcatacaaaacataaaaaaagctggcaccaataatccagtttttatgcttgatgaagttgataaattaggatctgattttagaggggatccttcttcagctttacttgaagtattagacccagaacaaaatcattcatttaatgatcattatttagagcttgattttgatttaagcaaagttatgtttatagctacagcaaataattatggaaatattccacctgcattgcgtgatcgtatggaaattttagagttctcaggttatattttagatgaaaaagtacaaattgctaaacgacatcttattccaaaacagattaaagaaaatggtttaaaaaagactgaggtaactctagatgctaattcaataaaagagttaattagcgcatatacaagagaggctggtgttcgtcagcttgaaagacagatcgcgaatgttttgcgaaaagtggctagagacattgttgaaacaaagaaaaaacttataaaagtgacaaaaacaaaggttcatgatttgctaggtgcttctcggtttcactcagaattagctgagagatctactgagccaggcgttgtaactggattagcatggactgctgccggtggtgatattttatttatagaatcaacaaagatgcagggcaaggggaaacttacattaactgggcaacttggcgaagttatgaaagaatcagctaccgcaggattgactt

SEQ ID NO: 263311 - DNA, 1183 bp, Unknown
  Bacterial polypeptide expressing nucleotide sequence isolated from the Sargasso Sea
tttgtttgtaggaagagataaatcaataactgcacttaatgaagttatgaaagacaacaagaaaataattcttgttactcaaaaaaattctgaagtagatgatccaaaaaaaaatgatattttttcatatggttgtgaaagtaatattttgcagttattaaaattgccagatggaactgttaaagttttagttgagggtataaaaagagtaaaaattatcgaatttaaggatgacgaaaaatttatttcatgttcatttgaatatcaaaaagaaataatagagaagaatgaagaccttttgcctttagcactaacagctgttagacgattagaaaaacttacttctataaataaaaaaatttcaacagaaacaataaataatattaaacaacttaaagatccttctaaaatttctgataatattgcatctcatttaaactgtacaatttcagaaaaacaacaattgtttgaaaatctagatgtaaaaaaaaggttgaataacattattaaaataatggaaaatgaaacaagcattattggtgttgaaaaaagaattagaggcagagtcaaaactcaaatggaaaaaactcagagagagtattatttaaatgagcaattaaaagctattcaaaaagaacttggtgaaattgaagatggtaaggatgaaactactaacttaaaaaaatcaattcaaaaatcaaaaatgccaaaagaagttgaaaaaaaatgtatggcggaattaaaaaaattaaaaaatatgagtccaatgtctgctgaggctacagttgtaagaaactatcttgattggatgaccgatattccttggtataaaaaagataaagttgatataaatttaaacaaagcattaaaaactcttgatgaagaccattatggtttagaaaaagttaaagaaagaataattgaatttttagctgttcaaaaaagaatggaaaaaattaaaggaccaattttgtgccttgtaggacctccaggagtaggaaaaacttctttaggtaaatctatagcaaaagcaaccaacagacagtttattagaatgtcactcggtggtgttagagatgaagcagagataagaggtcatagaagaacttatattggatctttaccaggtaaaattattcaaatgatgaaaaaagctggaacaaaaaatcctcttttcttactt

SEQ ID NO: 263312 - DNA, 1015 bp, Unknown
  Bacterial polypeptide expressing nucleotide sequence isolated from the Sargasso Sea
agtgcaaaaaagagttaaatctatgaaagctccagttttatgtcttgtgggccctccaggtgttggaaaaacttcccttggtgaatcaattgctcgtgcgaccaatagaaagtttgtaaggatgtccttaggtggagtaagagatgagtcagaaattcgaggccacagaagaacatacattggatcgatgccaggtaagatagttcaaaaacttagtaaagtcggagtaaaaaatccattatttctcttagatgaaatcgacaagattggcatggatcacaggggcgatcccgcttctgctttattggaagttttagatcctgaacaaaacaatacatttagcgatcattatcttgaagtcgattatgatctttctgaagtcatgtttgtttgtacagctaacagcctaaacattccaactcctttactagacaggatggagattataaggatacctggctacatcgaagatgaaaaagtgaatattgcaaataaatatcttttacccaagcaaatgtctcgtaacggcgtaaaggataatgaaatcaaattaaataaagaagtaattttagctttaattagatactacactagggaagctggcgtcagaggtcttgaaagacaaattgccaaaattttaagaaaggtagttaaagaaagattaattgcgaagaaaccaaattcaaaagccactagcattacggcaagaaatcttgaaaaatattcaggagtaagaaaattcaaatatggcatagctgaaaaagataatgcagttgggcaagttactggcctggcatggacagaagttggtggagaacttttaactattgaagcttctaacattgatggtaaaggcagagtaattaaaactggttcattgggagatgttatgcaggaatcaattcaggctgcaatgacagttgttagatctagagcagattcgttaggaataaaacctaatttttatgaaaaatacgacatccatattcatgttccagagggagcaactcccaaa

SEQ ID NO: 263313 - DNA, 2092 bp, Unknown
  Bacterial polypeptide expressing nucleotide sequence isolated from the Sargasso Sea
cgcagactttttgccgttgcgcaaacagaaaatgttgacgatccgactccggagtacctttacacgattgggactgtggtccgaatcatccagacacaccgggtccggggtggcgttcagctcctagttcagggggaaggccgagcccaagcgatatcgtatgatgaggaaggagaggcgatgcttcaagccgtcctcctagaaatggaaacaatggagccgagggccaatcaggatcctggcttccaagcattagatcaggagttacgagatcgggcggcggaactaggcaccaggagaggggttccggcggaggcgctgaaccaactgatccaaggagtggacgagtcgggtccttttgcggacctcgttgcgttttatctcgagctcgaaacgcctgacaagcaggaacttcttgagttgcttgacgacgaagagaggatgcgagcctgcctactagcagttgagcgagagctagctcggctagatgctcaagaggacatccaagcgaaggtgcaatcggagcttggagagcgccaacgagagatgttacttcgtgaacaacttaaggccattcaaaaggagcttggagaagaggaggaacgggacgacgtagaggagatgagaagtcgcatctcggaactcgagctttctgaggagcagcgaagtgaggtagatcgggagttgcggcgacttgagcgcacgagccctcagtccgccgaataccaagtgatccgaacgttcctcgagtgggtcacagaactcccatggaacgagaggtctgaggaagagatcgacctcgagacggcggagcagatattaaatgatgatcactacggcctcgaagatgtaaaggatcgcgtactcgagttccttgcggtgcggaagctggcgctggatcgggctgctgctaaaggcaaggaagcggaagatgatgcggcagagggcggcgcagtctctgctgggcgtggaccgatcttgctgttcgtgggccccccgggggtgggaaagacgtcgattgcacagtctatagctagatcacttggcagggagtatgtccgaatctcacttggtggtgcgcgggatgaggcagatattcggggccataggcgcacttatgtgggggccatgccaggccgcatcatccaagggatgcgtcaagcgaagtccaaaaacccagttttcctgttggatgaggttgataagcttggtgtttcttttcagggagaccctagctcggcgctactcgaagtcctcgacccagcacaaaactcgacttttgtcgataattacttggggatcccgttcgacctttcagaggtgctgtttgttgcgaccgcaaattaccgggaccgcatacctggtccgctactggatcgaatggagcgagtagatttttctggatatacagaggcagagaagctcgaaatcgtgaagcgttatctgcttcgccgacagagggaggagaatagtctcacagaagacgaacttcacatgcgagacgaggctattctaacgatagtgcagaattacacgcgtgaagctggggttcggcagcttgagcgtgaggttgggaagttcgcacgcaaggttgctcgacggattgctgggggtaaactcaaaaagattgacgcttcagctgctgatgttcgcgagattttgggtcgtccacgggtccatcccgaacggatggcagagcatgacacgctcggggtcgcgacaggtatgttttacacccctatgggcggcgatatcatgttcgttgaggccagcgtgatgcccggcgaagcgggttttgtactaacgggccaactgggtgacgtgatgaaggagtctggccgagcagcactttcgttctctaaggcaaacgcaaaacatttggggattcctgaggacagcttgaacggtcgtgaggttcatatccacgttcctgcgggggctatcccgaaagacggaccgtcggctggcatcacgatggcgaccgcactcgtctcagccgtctcgggacgtaaggtgcgccgagatgtagcgatgacgggtgagttaactctgacaggccgtgtacttccgatcggtggtgtgaaggaaaagg

SEQ ID NO: 263314 - DNA, 2360 bp, Unknown
  Bacterial polypeptide expressing nucleotide sequence isolated from the Sargasso Sea
aaatattgttgtttttccaaatatggttgttccactttttgttgggcgtgataaatcaataaatgcccttgagcaagtaatggataaggatcaagagttattatttctttctcaaaaaaattctgaagtagatgacccttctgaaaaagatctattcaagttaggaacaagaggaaaaattcttcagcttctgaagcttccggatgggacagttaaagttcttgttgaaggtttggctagatgcaaggtcaagaaaattgagtttacagcagattatatcactgccgatattgaagagtttgaaaatagtgaagtaatatctgacactattaaagctctaggtagatctgttgtttctaaatacgaaacttatgcaaatattaataataaaacttcatccgaagttttgacttctgtcaaagatattgaggatgaaaataaattagccgatactgttgctagtcaaattgcaattaatattcaagaaaaacaaaagattctcgaggagatagatcttgagaaaagattaaatatgattttgtcttacattgaaggcgaactatcagttcttcaagttgaaaagaagataagacgaagagttaagaaccaaatggaaaagactcaaaaggaatattatctaaatgaacaaatgaaggctattcagaaagaattagaagatggtgaaggtggagcttcagaagatattgctgaattaacagagaaaattaacaagaccaaattatctaaagaagcaaaagaaaaagcatataatgaattaaaaaaacttaaacaaatgagccctatgtctgcagaggcaacagttgtgagaaattacctagattggttgctagatataccttggggtaaaaagaaaagaataaagaaagatattaataaatctcaagaaatactagataaggatcattatggacttgaaaaagttaaggatagaattacagaatatttggccgttcaaaaccgatcctcaaaggttaaagggcctattttatgccttgtagggcccccaggtgtaggtaaaacatctcttggaaaatcaattgctgctgcaacagggagagaatttataagaatgtccctaggcggtgtcagagatgaagctgaaattcgaggccacagaagaacttacattggttctatgccaggaagaataattcaggcattaaaaaaagtaaaaacaactaatcctgtttttcttttagacgaaattgataagctagggcaagattttagaggtgatcctgcttcagcccttctagaagttcttgatccagagcagaataatgcatttaatgatcactaccttgaagttgactatgatttatctcaagtaatgtttgtcactactgcaaatacaatgaatatacctggcccattattagacagaatggaaattataagaattgctggttatacagaagaagaaaaattagaaattgcgaaaagacatttgatagagaaggtaaaaagcaataatgcgcttaccaataaggaattcaaaatttctgatgaagtcattcgttctgtaatacaaaattatacaagagaagctggcgtaagaaacttagaaagggaattaaattcacttgggagaaaagcggttaaagaaatatctcaaaacaaaagtgattcgctaaatgtaagttctgataatatttctgaatatttaggtgtaaaaaagtttagatatggaaagaaagaaaatgatgatttagtaggcgttgtaacaggtcttgcttggaccgaagttggaggtgatattcttaatgttgaggcagtaatggttcctgggcaaggcaaaatccgtactacaggtaagcttggtgatgtcatgaaagaatctattgatgcggcatcatcatttgttagatctagagctgttaattatggaattgaaccgccaatttttcaaaggaaagatatccatgttcatgttcctgagggagctacaccaaaggacggaccctctgccggtgtagctatgataatagctattatctcggtaatggcaggaatcccagtaaaaaacgatgttgcgatgactggtgaaatgtctttaagaggtcgtgtacttcctattggaggtctaaaagaaaaattattagctgctttacggtctggaattaaaactgttttaattccttcagaaaatgatcgtgagttatcagaagttccggataatattaaagataagcttgatattaaactagtctcaacaattgatgaggcactagaattagctctagttagaaaacctgacgctattgattgggatgaagacgcatggcttgccgaacagagaaatctgtccaataataatccaaatttaaccgctcattaaa

SEQ ID NO: 263315 - DNA, 1171 bp, Unknown
  Bacterial polypeptide expressing nucleotide sequence isolated from the Sargasso Sea
aagaaagctggcacaaaaaatcctttatttttactagatgaagttgataaaatcggaaatgattatagaggagatccatcttctgccttattagaagcattagatcctgaacaaaatacagcattcaatgatcactatctagaagttgattatgatttgtctgatgtaatgtttgtaacaacagctaatactttaaatattttaccaccacttcttgatagaatggaagttataagaattcctgggtatacagaagatgagaagataaatattgctaataagtatctgttacccaaacaagtaaaagaaaatggcgtgaaagagggtgaactaaatttagaagatgggacagtaaaagagataattagaagttacacaagggagtctggtgttagaaatttagaaagagaaatttctaaagttacaagaaaagttgttaaaaaagtagtaagtggagaagtggaaaaagtaaaagtaaacgacaaaaatattcctgattttttaggaattaaaaaatttaaatttggtgaagttgaagataaagataaaactggaatagtaataggattagcctggactgaagtaggaggagagattcttaaaatcgaaacagttaatatgccaggtaagggcagaatgcaaataacaggaaaacttggtgatgtgatgcaagaatctgtcaaagctgcaaaatcatatgtcagatcaaaaagtttggaatatggtataattccacctttctttgaaaaaaaagattttcatatccatgtccctgaaggagctacacctaaagacggaccatcagctggtatagctatggttacatccatagtgtcatcaatcacaaatattcctgtgaatagagagattgctatgacaggtgaagtaacaatcacaggacaagttttacaaattggtggtttaaaagaaaaattattagctgcacacagagcaggggttaaaaaagtactaatacctaaagaaaacgaaaaagacttagcagacattccaaaaaaggtaagagaagacattaaaatcattccagtagaaacagcagatgaagtgcttagaattgcccttacaaaagagctaaaacctgtggaatggactgaagtcgataaaatatctgagggtaaaaaggacgataaatctcaagctagtattcagtaat

SEQ ID NO: 263316 - DNA, 1420 bp, Unknown
  Bacterial polypeptide expressing nucleotide sequence isolated from the Sargasso Sea
ggtaaaagaaaggattgtagagtatttagctgttcaaaaaagagttaagtcaatgaaagctcctgtcttatgtcttgttggccctccaggcgtaggtaaaacatctttaggtgagtctattgctagggcaactaatagaaagtttgtaagaatgtcacttggtggtgtgagagatgagtctgagattaggggacatagaagaacttatataggttcaatgcctggtaaaattattcaaaaactttcaaaagtgggtgtaaaaaatccattatttcttttagatgaaattgataaaattggcatggatcatagaggggatcctgcatctgcattgttggaagttctcgatcctgaacaaaacaatacttttagtgatcactatcttgaagttgactacgacttgtcagaagttatgtttgtttgtacggctaatagcttgaacattccaacacctcttttagacagaatggaaattatcagaattcctggttacatagaagatgaaaaaatcaatattgcagaaaagtatttattgcctaagcaaatgaaacgaaacggattgaaagatgaagaaattaaattaaacaaaaatgtgattctttcattgattagatactatactcgggaggctggtgttagaggtcttgaaagacaaatagcaagaattttgagaaagatcgttaaggaaagattggtagatagttcgactaaacaaaaacctacgtctatttcatctaaaaatcttgaaaaatactctggggttaagaaattcaaatatggagttgcagaaaaagataatgctgtgggacaagtaactggtctagcttggactgaagtagggggcgaacttttaacgattgaagcctcaaatattgatggtaaaggaagagttattaaaactggttctttgggtgatgtaatgcaggaatcaatacaagcagcacttacagtagttcgttcaagagcagaatctcttggaattcaaccaaatttttatgagaaatatgatgtgcacattcatgtgccggagggagcaactccaaaagatggtccaagtgctggtggtgcaatggccatctctttaatttcaatctttacaggtattccggttagagcagatactgcaatgacaggagaaataacattaagaggccaaatattaaaaattggtggattaaaagaaaaattacttgctgctaaaagaggtggaattaaaaatgtaattatacctaaggagaatgaacctgatcttcaagaaattcctaaacaaattaccaaatcacttaacatcattccagtagaatggattgatgaagttatttcagcagctttagttgaggagccaactcctaataataaaaaaattaagagtcaaaagtctaaaacttctagaaaatctgaaagtaaacaagctcactaa

SEQ ID NO: 263317 - DNA, 583 bp, Unknown
  Bacterial polypeptide expressing nucleotide sequence isolated from the Sargasso Sea
cacatcgaagcgcttaagttaccaggtaaaggcagaatgaagactactggtaaactgggagatgtaatgaaagaaagtattgatgcagcaaattcgtatgttcgctcaataagcgctgaagtcggaattaagccacccaaatttgacaaaactgatattcacgttcatgtgccagaaggcgctacaccaaaagatgggccaagcgccggtttagcaatggtaacatcaattgtgtccgtgttaaccggtattcctgtgaggaaagatttagcgatgacaggagaagttactttgcgaggaaacgcgctagcaataggtgggcttaaagagaagttacttgccgctctcagaggcggaatcaaaacagtacttattcccgaggaaaatgaaaaagatcttgtggacattcctgataatgtaaaatcttctctagaaattatagccgtcaagaatgtctcagaagttttgaagatcgcacttactgagtctccaagcccaatcgaatgggacgaagctgcagaagaggcagcggctgcaaaagctcttgaggaacagaaccaaagccagacaattaaacactaag

SEQ ID NO: 263318 - DNA, 1320 bp, Unknown
  Bacterial polypeptide expressing nucleotide sequence isolated from the Sargasso Sea
atcagccaactgaaaatagtatattcaaaactggtgttcttgctaatgtcctccaactactaaaattaccagacggcacagtgaaagtcttggtcgaaggacaaacaagggttttgataaccgatttcatagaaaatgaattattttttgaggcaaaatgcgaaaaaatcgatgaaacgctaggtgacgaaaaggccaatattgcacttttgaaaacagtatcccaagagtttgatcgatatgctaaagtaaagaaaaatatcccagatgaagcaattacaacaattgccggcaccaatgatccggctaaattatcagatttagtttctggtcatcttggaatagagattgaccagaagcaagatctgctggagacgctttcagtaagtgaaaggttagaaaaagttttctcactaatgcaaggcgaaatgggtgttttaaaagtagaaaagaaaattaagacacgcgtaaaatcgcaaatggaacgcactcaaagagagtattatttaaatgagcaaatgaaggctatccagaaagagctgggtgatggcgaggatggtcaaaatgaagccgccgagattggagagcttataaataataccaagtttacgaaagaagctcgcgaaaaagcagacgcggaactcaaaaaacttaaaaatatgagcccgatgtctgctgaagcaaccgtggtcagaaattatttagattggctactttctattccatggggaataaaatcaagagttaagaaagatttatataaagcggaaacagttctcgatagagatcactacagcttagaaaaagttaaagaaagaataattgaatacctagccgttcaaaaacgaagctctaaattaaagggaccaattatgtgcctcgttggtccaccaggcgtgggcaaaacatcactcggcaagtcagtagcaaaagctactggccgtgaatttataagaatttctcttggaggtgtcagagacgaaagtgaaattcgtggacacagaagaacatatatcggctcaatgcctgggaaaattatacaagcactcaaaaaggctaaaacaactaatccattgattttattggatgaaatagataaaatgggacaggattttcgtggagatccagctagtgctatgcttgaggttctcgatccagaacaaaatagtacttttacggatcactatttggaagtcgagtacgatctctctaatgtaatgtttattacaacggcaaatagctacaacatgccggcccccctattagatagaatggaaatcataccgctggcgggctatacagaagacgaaaaaaattgaa

SEQ ID NO: 263319 - DNA, 328 bp, Unknown
  Bacterial polypeptide expressing nucleotide sequence isolated from the Sargasso Sea
caacaagaagttgatagagttgctttgccagaagaccttcaaaataatggtgagcactatggccttaaagtaaaaggtgattcaatgattgaagcaggtattgctgacggtgatacagttattataaaaaaagtttccaatgtagataatggtcagattgcagtagtcttaatagatgaccaggaagctactttaaaaagagtaagaaaaaaaggaaacactatcgctcttgaagcagcaaatagaaactatggaactaaaatttacgctgctaatagaattaaaattcaaggtaaacttgtttctttatatagaaactttcattaaa

SEQ ID NO: 263320 - DNA, 871 bp, Unknown
  Bacterial polypeptide expressing nucleotide sequence isolated from the Sargasso Sea
ttatttttttctagccttaaaaaaattgtccttacattacaagaaaataatagaaccattaagaaggcaaaaaaatccaacccaaaaataagcaatgaacctcagataaaggagaatatagccgaagaaacaaaaaataataaacaacaggacttgctattacccaaagaaaacccattaaaagaagtacccaaagaaaatattgatgttaaatcagaagagcaaaaagaaaaaaatgtaatgccaagcactgagttattagacagagctcttgatgatggcgcctcattaactgaaagtgaattaagtcaaatagcatctttattagaagataaattagaagagtttggtatagaggctactgttgagtcagtattaccaggtcctgttgtaaccagatttgaaattcaacccgcacctggaaccaaagcaagcaagataaccaatattgctcaagatattgcacgatctctttcagtaagtagtgtcagggtggttgaagttatagaaggaaaatcttttgtaggcatagaaataccaaataacaatagaaaaatggttagactaactgaaattttatcttcaaaggcctttaaatcttcaccatcaaatctaagcgtagcccttggtcaagatatttctggcaatccaatagtggtcgatctttctaagatgccgcatatgcttgtagcaggaaccacaggatcaggtaaatctgtgggattaaatgcaatgttactaagtcttctgtttaaatctgatccagaagatgtgagattgattttagttgatccaaaaatgttagaacttgcagtttatgacggtattcctcatttgttaactcccgttataactgatagacagatgcagc

SEQ ID NO: 263321 - DNA, 643 bp, Unknown
  Bacterial polypeptide expressing nucleotide sequence isolated from the Sargasso Sea
atgcttactaaaaaacaaaaggagttatttgtttatttaaataattatatttcatccaatgacatatcaccgtcttttgaagaaatgaaaaatgcagttaatctcaaatctaaatcaggaattcatagattaattactagtttggagcagcgtggttatattaaacgcctaaaacacaaagctagggcaatggaaattaccaaagaccttcctaataaaaatgttaaatctataaattcttacaaagaagagagttttctcaacatccctctagttggttcaatcgctgcaggtgaagcaatagaagcaataaattcaccagattcaatgatttctgttcctagatctcttgtaagcaaaaattcaacctattttgggttaaaggtaaaaggtctttctatgatagatgaaggtatatttgatggagatattgcaattataaaaaaaacaaattcagcagaaaatggcaaaatagctgctgtacttacattggataaccaagttacattaaaaaaagttaaaatgactaatcaaaaaatatttttgatacctgctaataaagcatatcaaatcaaagaacatagtcttggagatgtacaaattcaaggcactttatctggcattataagaaaatataattaat

SEQ ID NO: 263322 - DNA, 459 bp, Unknown
  Bacterial polypeptide expressing nucleotide sequence isolated from the Sargasso Sea
tatgctaacaaaaaaacaaaaagaattatttgagttcttgaaaatttatatttccagcaatgaaatgtgcccttcttttgaggaaatgaaggaagcagtaaacctaaaatcaaaatcaggcattcatcgattaataacaagcttagaacaacgaggttatattaaaagattaaagcataaggctagagcggtggaaataactaaagatctgccaaattttaaaaacatttcaaaccaaactaatactgattccaactttataaatattcctctaattggttctattgctgctggtgatgctatagaagccattgaaaattctgatcaatttattacagttccaaacagtcttgtttctaaaaattttaaatactttggattaaaaataaaaggtctatcaatgattgatgaaggtatatttgatggagatatagcagtaattaaaaaaacaaataacat

SEQ ID NO: 263323 - DNA, 267 bp, Unknown
  Bacterial polypeptide expressing nucleotide sequence isolated from the Sargasso Sea
ggttaaaagtcgagggtgactccatgattgaagcaggtataaatgatggcgacacagtaattgtcaagaaaacagacgttgctgataacggaaaaatagtagtagcactaatagatgaccatgaagctatgttaaaaagaattagaagaaaaggtaaaactgtagctttagaaagtgcaaataaaaattacgaaacaaaaatatttggcccagatagagttaaagtgcaaggtatacttgtatctttatatagaaactttcaataaa

SEQ ID NO: 263324 - DNA, 139 bp, Unknown
  Bacterial polypeptide expressing nucleotide sequence isolated from the Sargasso Sea
tatgcttactaaaaaacaaaaaaacctactgttatttatcaacaaaaagttgagatcatctggagtttcaccttcttatgaagaaatgaaacaatcattaaacctaaaatctaaatcaggaattcatagattgataagt

SEQ ID NO: 263325 - DNA, 139 bp, Unknown
  Bacterial polypeptide expressing nucleotide sequence isolated from the Sargasso Sea
atgttaacaaaaaaacaaaaaaacctgcttttatttatcaacaagaagttgagatcttctggtgtgtctccatcttatgaggaaatgaaagattctttaaacctaaaatcgaaatcaggaattcatagattaataagtg

SEQ ID NO: 263326 - DNA, 387 bp, Unknown
  Bacterial polypeptide expressing nucleotide sequence isolated from the Sargasso Sea
aagatgctgatataccagtactaggtagtattgcagcgggaacgcctatcgaagctattcaaaacgaagtgactagaattccactgcctgagaatattgaaaaaaaaggagaattttttggtttaaaagttagtggagattcaatgattgaggctggaattaatgatggtgatactgttataatcaaaaaaactgatacagcagaaaatggaaaaattgttgttgcgttaattgatggccacgaagccatgttaaaaagattaagaataaaaggtaaaactgttgctcttgaaagtgcaaatagaaattacgaaactaaaatattcggtccagatagagtaaaagttcaaggtattctagtatctttatatagaaacttccattaaa

SEQ ID NO: 263327 - DNA, 170 bp, Unknown
  Bacterial polypeptide expressing nucleotide sequence isolated from the Sargasso Sea
tatgctaactaaaaaacaaaaaaatttgctattatttattaataaaagtttaagatcatcaggtgtgtcaccatcttacgacgaaatgaaaaaatcattaaatttaaagtcaaaatcaggaattcataggttaattagtgctctacaagaaagaggcttcatcaaaagac

SEQ ID NO: 263328 - DNA, 301 bp, Unknown
  Bacterial polypeptide expressing nucleotide sequence isolated from the Sargasso Sea
cctgaagatttacaaaataataggtgaacattatggattaaaagtgaaaggtgactcaatgattgaagctggtatcaatgatggtgatacagtaattgttaagaaaacttcaaatgtagatagtggtcagattgcagttgttttaattgatgaccaagaagcaactttaaaaagagttaggaaaaaaggaaatactattgctcttgaagctgcgaatagaaactacggtacaaaaatctacgctgcaaatagaattaaaattcaaggtaaacttgtttctttatatagaaactttcactaa

SEQ ID NO: 263329 - DNA, 157 bp, Unknown
  Bacterial polypeptide expressing nucleotide sequence isolated from the Sargasso Sea
atgttaacaaaaaaacaaaaaaacctgctattatttatcaacaagaagttgagatcttctggtgtgtcgccttcttatgaagaaatgaaacaatcattaaatcttaaatcaaaatctgggatacatagattaataagcgctttagaagaaagaaggt

SEQ ID NO: 263330 - DNA, 421 bp, Unknown
  Bacterial polypeptide expressing nucleotide sequence isolated from the Sargasso Sea
gtaatcaaaggaggtttagacaagtcaaaaagaaattcatctaaggtttctgtcttaggaagcattgcagcaggtaccccaatagaagcaatacaacatgaagttgataaagttgctttgccagaagatttgcaaaaaaatggtgaatattttggactaaaagttaaaggagactctatgattgaagctggaataaatgatggtgatacagttattataaaaaaaacatctacagctgacacagggcaaattgctgtggtgcttattgatgaacaagaagctacactgaagagaataagaaaaaaaggtaatacaattgctttggaggctgctaacaaaaattatgatactaaaatatacgcctctaatagaataaaaatccaaggaagattaatttctttatatagaaactttcactaaa

SEQ ID NO: 263331 - DNA, 394 bp, Unknown
  Bacterial polypeptide expressing nucleotide sequence isolated from the Sargasso Sea
gataataaatctacagatgtatcagtattaggcagtatcgctgctggtacaccaattgaagctattcaacaagaagttgatagagttgctctgccagaagatcttcaaaataatggtgagcactacggtctaaaagtaaaaggtgactcaatgatcgaagcgggaattgctgacggtgatacagtaattataaaaaaagtttctaatgtagataacggtcagattgcagtagtcttgatagacgaccaggaagctactttaaaaaggataagaaaaaaaggaaacactatcgctcttgaagcagcaaatcgaaactacggaactaaaatttacgctgcaaatagaataaaaattcaaggtaaactagtttctttatatagaaactttcattaaa

SEQ ID NO: 263332 - DNA, 403 bp, Unknown
  Bacterial polypeptide expressing nucleotide sequence isolated from the Sargasso Sea
gatgcaaataaaataaataaaaatgagatatccgttttaggtagtattgcagcaggcactcctattgaggctattcaaaatgaagtttcaagaattcctttgccatcaaacatagaaaataatggtgagttttttggattaaaagttaaaggagattcaatgatagaggctggaattagtgatggcgatacagttataataaaaaaagctgataaagcagaaaatggaaaaattgtggttgctttaattgatgatcatgaggcaatgttaaaaagaataagaattaaaggtaaaactgttgcattagaaagtgctaacagaaattacgaaacaaaaatttttggcccagatagagtaaaagttcaaggtgtgttgatatctttatatagaaacttcaactaaa

SEQ ID NO: 263333 - DNA, 146 bp, Unknown
  Bacterial polypeptide expressing nucleotide sequence isolated from the Sargasso Sea
tatgcttacaaaaaaacaaaaaaacctgctattatttataaataaaaaaattagatcctcgggtgtatctccttcctatgaagaaatgaaaaattctttaaatctaaaatcaaaatctggaatacatagacttattacagcattag

SEQ ID NO: 263334 - DNA, 289 bp, Unknown
  Bacterial polypeptide expressing nucleotide sequence isolated from the Sargasso Sea
atgctaacaaaaaaacaaaaaatactatttgaatatcttgataaatacattgatggctcaggtatatcaccttcatttgaagaaatgaagcaggcattaggtttgaagtcaaaatcaggaattcacaggcttattacgagcttagaagaaagaggctatataagaagaattaaacataaagcaagagcaatggaaatagtaaaaaatcaaaaagaatcatcagaaaaatatgaaaattttaaaaatcaaaataccttaattcctctgcttggatcaataccagcaggaa

SEQ ID NO: 263335 - DNA, 337 bp, Unknown
  Bacterial polypeptide expressing nucleotide sequence isolated from the Sargasso Sea
aatggatctagatgaaatcactttatcagagaaaataccaattgtagaacctgcttatgttcccaacgattctttatgggaggaactttacggtctatctcagataaaggcagacctagcatttgacctatgggatatcgatggtggtgaaattccagggcagatggaaaatggagagatagtggttgcgattcctgatattggactaaaatgggaccatcctgatcttatcgataatgtatggcaaaatttaggtgaggacgtagatggcgatggtgttgtacttgaatttattaataatgaatgggtatttgatccagatgatgagaatggggta

SEQ ID NO: 263336 - DNA, 637 bp, Unknown
  Bacterial polypeptide expressing nucleotide sequence isolated from the Sargasso Sea
atgttaactaaaaagcaaaaagagctattcgtttatctaagagattatatatattcaaacgatatctctccgtcttttgaggaaatgaagaatgccgttaatttaaaatctaaatcaggaattcatagattgattactagtttagaacaaagaggctacattaagcgcttaaagcataaagcaagagcaatggagataacaaaagaacttcaaaataatagctcaaatgttaatccgacggaaaacagctttttaaatattccattggttggctcaatagccgctggtgaggcgattgaagctataaattcttccaactccatgatttctgtaccaaaatcactagtctcaaaacattccacctattttggattaaaagtcaaaggtttatcaatgatagatgagggtatttttgatggagatatagctattataaaaaaaactacctctgctgaaaatggcaaaatcgcagcagtgttaacattagataatgaaataactcttaaaaaaattaaaatgactaatcaaaaaatttatctaattcctgcaaataaggcatacgacattaaagaacacaaaattggggaagtacaaattcaaggtactatatctggcattataagaaaatataattaat

SEQ ID NO: 263337 - DNA, 275 bp, Unknown
  Bacterial polypeptide expressing nucleotide sequence isolated from the Sargasso Sea
acacttcggtttaaaagtttctggagattcaatgattgaagccggaattaacgatggagataccgtaattgtaaaaaaaacaaacactgctaataatgggcaaatagttgtagcacttattgatgatcatgaggctatgcttaaaagaataagaaaaaaaggtaaagttgtagctcttgaaagcgctaataaaagatatgagaccaaaatttttggtcctgaccgcgtaaaagttcaaggtgttttagtatctttgtatagaaacttccagtaaa

SEQ ID NO: 263338 - DNA, 145 bp, Unknown
  Bacterial polypeptide expressing nucleotide sequence isolated from the Sargasso Sea
atgcttacaaaaaaacaaaaaaacttattaatttttattaataaaaaaattagatcttctggaatttcaccttcctacgaggagatgaagaactcactcaacctaaagtcgaaatctggaatacatagattgattcagctctaga

SEQ ID NO: 263339 - DNA, 331 bp, Unknown
  Bacterial polypeptide expressing nucleotide sequence isolated from the Sargasso Sea
atgttaacaaaaaaacaaaaagaattattaaattatatacataagttccaaagcaaaaatggtgtcactccttcttatgaggagatgaagtctgcgcttaatttgaaatcgaaatcaggaatacacaggctagttttagcactagaagaacgagggtttgtgaaaagattagcgcacaaagcaagagcgcttgaaataattaaagacggaatatcaaatataaaagtttctgaaaaaagaaaagataaccttgtggtaggcaattttataaataattcaaatgaggacaaccataaattaagcactcttccactcttaggaaaaattgctg

SEQ ID NO: 263340 - DNA, 135 bp, Unknown
  Bacterial polypeptide expressing nucleotide sequence isolated from the Sargasso Sea
catgcttactaggaaacagctagagttatttaattttctaaaaaaacaccttagcgctagtgacattgcgccatcttttgacgaaatgaaagatgccttaaaccttaaatctaaatcgggcattcacaggctggt

SEQ ID NO: 263341 - DNA, 458 bp, Unknown
  Bacterial polypeptide expressing nucleotide sequence isolated from the Sargasso Sea
tgctaatgatatttataattctttttcacctagtgtgattaaaggtggtttaagcgaaacaaataaaacaaataaaaatgatatatccgttttaggtagtattgcagcaggtactcctattgaggctattcaaaatgaagtttcaagaattcctttgccatcaaacatagaaaataatggcgagttttttggattaaaagttaaaggagattcaatgatagaggctggaattagtgatggcgatacagttataataaaaaaagctgatagagcagaaaatggaaaaattgtagttgctttaattgatggccacgaagcaatgttaaaaagaattagaatcaaaggtaaaactgttgcattagaaagtgctaacagaaattatgaaacaaaaatcttcggcccagatagggtaaaagttcaaggtgtattgatatctttatatagaaacttcaactaaa

SEQ ID NO: 263342 - DNA, 452 bp, Unknown
  Bacterial polypeptide expressing nucleotide sequence isolated from the Sargasso Sea
tgatatatataatagtttttcaccaagtgtaataaagggtgggttggatgaggagaaacctatttctgatgacacagaagttccagttttgggaaaaatagcagctggtacacctgttgaagctatacaaaatgaggtttcaagaattcctttaccaagtaatttagaaaaaaatggtgattatttcggtcttaaagttcagggagattcgatgattgacgctggcattaatgagggtgatacagtaataattaaaagagctgatacggcagataatggaaaaatagttgttgcgttaattgatgaacaagaagcgatgctcaagaggattagaaaaaaaggcaaagttgttgccctcgaaagtgcaaataagaactatgaaactaaaatttttggtccagatagagttaaagtacaaggcatattagtatctttatatagaaacttctagt

SEQ ID NO: 263343 - DNA, 270 bp, Unknown
  Bacterial polypeptide expressing nucleotide sequence isolated from the Sargasso Sea
ttgtcgttaaagccacgggagagtcgatgagagatgcgggtatttttcctaatgatttattggttgtcgatcgcagcataacgccaaagtcaggacatgttgtcattgcatgtatccagtcagaactgcttgttaaacgtttaaaaataattcgtgataaatgttttttagtcgcagaaaataaagcgtttgatccgattgaagttaaagacgatgacgaactgattatttggggtgtcgtcacaagagtcattcactctttaacttaaa

SEQ ID NO: 263344 - DNA, 157 bp, Unknown
  Bacterial polypeptide expressing nucleotide sequence isolated from the Sargasso Sea
tatgttaactaaaaaacaaaaaaacctgcttctctttatcaacaaaaaattgagatctactggtgtgtcaccttcatatgaagagatgaaagaatcgttaaatttaaaatcaaaatctgggatacacagacttattagtgcattagaagaaaggggc

SEQ ID NO: 263345 - DNA, 478 bp, Unknown
  Bacterial polypeptide expressing nucleotide sequence isolated from the Sargasso Sea
tatgttaacctctaaacaagctaaattgttagactatttaacaaacacattaaagaataataatatatccccttcatttgacgaaatgcggaaatatctaggcttaagttcaaaatcaggagtccataggctgataagctctttagaagaaagaggttttattatgagattacataataaagcaagagctataaaaattattaaagaagataagcttgcacctaatttccatgataaagtttctaatagttatagcaacaattataaaatatttatttatggctctatatctgctggcactccactagaagctatacaaaattctgaagggcatttgaatgttcctacgggcatgatcaagaataataatcaacattatgctttaaaagtgtctggggagtcaatgataaatgctggaattttagatggagatatagctgttttaaaaaaactaatgatgttgttaatggtgacatag

SEQ ID NO: 263346 - DNA, 142 bp, Unknown
  Bacterial polypeptide expressing nucleotide sequence isolated from the Sargasso Sea
tatgctaacaaaaaaacaaaaaaacctgcttttatttataaacaagaagttgaggagttcaggtgtatctccttcttatgaggaaatgaaacaatctcttaatttgaaatctaaatcaggaattcacagattgatcagtgct

SEQ ID NO: 263347 - DNA, 523 bp, Unknown
  Bacterial polypeptide expressing nucleotide sequence isolated from the Sargasso Sea
ttttataagaagactccctcataaagcaagagcactagaggtggttaaattaccagaaacggcttcagcaaatgatatttataatactttttcgccaagcgtaattaaaggtggtttagatcaagaaaatcctaatgataaagatgcagaaataccagttttaggtaaaatagcggctggcacacctgtagaagctattcagaatgaggtcgcaagaattcctattccagttaacttagaaaaaaatggagagtattttggtcttagagttgaaggagattcaatgattgaagcaggaattagtgagggtgatacagtaattatcaaaaaaactgacactgcagacaatggaaaaattgttgttgcattaattgataatcatgaggctatgctgaaaagaataagaagaaaaggcaagacagttgcgcttgaaagtgcaaataggaattacgaaactaaaatttttggcccagatagggtaaaagttcaaggtgttttggtatctttatatagaaacttctaa

SEQ ID NO: 263348 - DNA, 385 bp, Unknown
  Bacterial polypeptide expressing nucleotide sequence isolated from the Sargasso Sea
taaaaaaatttttaatattaatagtttaggaaagatttctgctggagggccaatagaagcagttccagaccaagatattcttgaacttgaacatatgttttcgaatgaaaaatgttatgcattaaaagttcagggtgattcaatgatagatgctgggatccatgataatgattgggttatcgtagaaaaaactaataaaatctctaattctaaagtagcagtcatactaattgataaccaagatgtaacattaaaatattataaactattaaataaagatacagttgagctcatacctgcaaataaaaaatttgattctacaatatatcatataagcagaatatcaattcagggtattgtaataggtcaaataagagtctattaa

SEQ ID NO: 263349 - DNA, 526 bp, Unknown
  Bacterial polypeptide expressing nucleotide sequence isolated from the Sargasso Sea
ggatttattaaaagattagctcataaagctcgcgcacttgaggtggtaaaattaccagaaactgcctctgcaaatgatatttataattctttttcgccaagtgtaattaaaggcggattaagtgatgtgaatacatcaaagaataatgaaatatctgtattaggaagcattgcagctggaacaccaatagaagcaattcagaatgaaatttctagaattcctctaccctcaaatattgaaaataatggggagtttttcggtttgaaagttaaaggtgactcaatgatagaagctggtattaatgatggtgatacggtaataattcaaaaagccgacagagcagaaaatggaaaaatagtagttgcgctaattgatgatcacgaggctatgttaaaaagaataagaattaaaggaaaaacagttgctttagaaagtgcaaacagaaattacgaaacaaaaatctttggaccagatagagttaaagttcaaggtgttttggtatctttatatagaaacttcaattaaa

SEQ ID NO: 263350 - DNA, 575 bp, Unknown
  Bacterial polypeptide expressing nucleotide sequence isolated from the Sargasso Sea
tatgctaactaaaaaacaaaaagaattgtttgattatttaagtgattacatgaaaaataatcaaatttctccttcatttgaagaaatgaaagaggcagttaacctcaaatcaaaatctggaattcatagacttatttcgagcctcgaagaaagaggatttattaaacgattgaagcataaagcaagggcaatggaaattatagataaaaacgtaactattaatgaaaatgtttcaaatagcattgaaattccattaattggatcaatagctgcaggagaggcgattgaagctatagaaaatactagtgaattaatttcagttccaatctccatgacatcaccaaatgcgaaatattttggtttaaaagttagggggttatctatgatagatgaaggaatttttgatggtgacatagctgtcattcgcaaaacaaataacgttgaaaatggtaaaattgcagcagtgttaactttagataatgaagtaacattaaaaattatcaaatttaacaaagatagtgttgccttaatacctgcaaaacaaacatttgaaacaaaagaatataaaactgggt

SEQ ID NO: 263351 - DNA, 373 bp, Unknown
  Bacterial polypeptide expressing nucleotide sequence isolated from the Sargasso Sea
cctgttcttggtagcattgccgcaggaacacctattgaagctattcaaaatgaagttactcgaattcctttgcctgagaatatcgaaaaaaatggtgaattttttggtttaaaagttagtggagattcaatgattgaagcaggaataaacgatggcgatactgttattattaaaaaaacagatgcggcagaaaatggtaaaattgtagttgctttgattgatgaccatgaagcaatgttaaaaagattgagaagaaaaggtaaaactgttgcactcgaaagtgcaaatagaaattacgaaactaaaatctttggtccagatagagtaaaagttcagggtattctggtatctttatatagaaacttccattaaa

SEQ ID NO: 263352 - DNA, 466 bp, Unknown
  Bacterial polypeptide expressing nucleotide sequence isolated from the Sargasso Sea
cgcatcagcaaatgatatttataattcattctctcctagtgtaataaagggaggactcgatgagggtaattcttcaaataaagataccgaaatttcagttcttggaaatattgctgcaggaacacctattgaagcaattcaaaatgaagtgtctagaattccactgcctgagaatattgaaaaaaatggtcaattttttgggttaaaagtgagcggagattcaatgattgaggcaggaataaacgatggtgatacagtcattataaaaaaaacagacactgcagaaaatggaaaaattgtggttgctttaattgatgatcatgaagcaatgttaaaaagattaagaagaaaaggcaaaactgttgctcttgaaagtgcaaataaaaattatgaaactaaaatttttggacctgatagagtaaaagttcaaggtattttagtatctttatatagaaactttcactaa

SEQ ID NO: 263353 - DNA, 170 bp, Unknown
  Bacterial polypeptide expressing nucleotide sequence isolated from the Sargasso Sea
tatgctaacaaaaaaacaaaaaaacctgcttttatttatcaacaaaaagttgagaagttctggagtttcgccatcttatgaagaaatgaaggattctctaaatcttaaatctaaatcaggaatacatagacttattagtgccctagagggaagaggttttatcaaaagac

SEQ ID NO: 263354 - DNA, 595 bp, Unknown
  Bacterial polypeptide expressing nucleotide sequence isolated from the Sargasso Sea
ttgacgacatctatatctgagatcaataatattttaaaagaccagggcattaattcaatagctcagtggttacctaatgcacgtcctagtgatcggaatggaaatatatttttaaatagatattatgtagttgagtttgaaagcgttaaaagtgacatggataagatcattaataatctcatggcactggatgttatcatggtatcagagagaataccaattgtagagcctgcttatgttccaaatgattctttatgggatgaactgtatggtctatcccagatcaaggcacacttagcatttgacctatgggatatcgatggcggtgaaattccagggaagatggaaaatggagaaatagttgtagcaatccccgatattggattaaagtgggaccaccctgatctaattgataatgtgtggcaaaatttaggtgaagatgttgatggtgatggtgttgtacttgaattaattaataatgaatgggtatttgacccagatgatgagaatggggtagatgatgatggtgatgggtatgtagataactttgttggttatgatgtagcaattggcgacaataaccctatcccatacg

SEQ ID NO: 263355 - DNA, 313 bp, Unknown
  Bacterial polypeptide expressing nucleotide sequence isolated from the Sargasso Sea
aaagttgctctaccagaagatttgcagaaaaatggtgaatattttggattaaaagttaaaggtgactcaatgattgaggcaggaattaacgacggtgacacagtaattattaaaaaaacttcaacggctgacacaggtcaaatcgctgtagtgctaattgacgaacaagaagctactcttaagagaataagaaaaaaaggtaacacaattgctttagaggctgctaacaaaaattacgatactaaaatatacgcttctaatagaataaaaatccaaggaagattaatttctttatatagaaactttcactaaa

SEQ ID NO: 263356 - DNA, 364 bp, Unknown
  Bacterial polypeptide expressing nucleotide sequence isolated from the Sargasso Sea
catgcttacaaaaaaacaaaaagaattatttgagttcttgaaaagttatatttccagcaatgaaatatgcccttcatttgaagaaatgaaagaagcagtaaatctaaaatcaaaatcaggcattcatcgattaataactagtttagaacaacgaggctatattaaaagattaaagcataaagcaagagctatggagataactaaagatcttccaaattttaaaaatatttcaaaccaaaatgataatgatttcaactttataaatattcctctaattggttcaattgctgcaggtgaagctatagaagccattgaaaattctgatcaatttattacagttccaaacagtctgtttctaaaaatt

SEQ ID NO: 263357 - DNA, 580 bp, Unknown
  Bacterial polypeptide expressing nucleotide sequence isolated from the Sargasso Sea
atgctaactaaaaaacaaaaagaattacttgagtatattcaaaactatcaagtgaaaagtggcgtaacgccatcttatgaagagatgaaagctgcgcttaatcttaaatctaaatcaggtattcatagacttgtaatagcattagaagaaagagggtttgtaaggagactagctcacaaagcaagagcattggaagttataaaagatgcgatatctaatgtgaaggtttcagagaaaacaaataaaaatattattgtgggtgattttacaggtagcagtaatgatgaaaatggaaaactaagtaccctacctttgcttggtaaaatagcagctggaacaccaatcgaagctattcaacataacgattcatctgtagatgttcctaaagaaatgatgcccatcggtgaaagttatgctttaacagttgaaggtgagtctatgattaatgaaggcatttatgacggggatactgttttaataaaaaaaactaatcttgttgaaaacggtgatattgccgttgctctaattgatgaatcagaagcaacgttaaaaagaataagaaaaaaaggtcatagtatcg

SEQ ID NO: 263358 - DNA, 328 bp, Unknown
  Bacterial polypeptide expressing nucleotide sequence isolated from the Sargasso Sea
tgacgttgaagaaaatttggatatttcagatgtccttaataaaaaaaatgtgtttgcattaactgtgaatggagattcaatgatagatgcttgtatagctgatggagatatggttttaatggaaccagttgcagattcctctttcttaaaaaatgggacaattgtaagtgcaatggttccaggacttggtacaaccttaaaatactttgtaaaaagaggtgggcaaatatttcttgaggccgctaatcctaattatgaacctattgttgttgatttaaatcaaatttcaattcaaggcaaattattggctgtatggagaaaggtttaa

SEQ ID NO: 263359 - DNA, 190 bp, Unknown
  Bacterial polypeptide expressing nucleotide sequence isolated from the Sargasso Sea
tatgttaactagaaaacaaaaagaattatttgattacttaaagaactatatatctaataatcaaatttcaccttcatttgaagaaatgaagatagctgttaatttgaaatcaaaatcaggaattcacagacttatcactagtcttgaacaaagaggattcattaaaagattaaaacacagagcaagagca

SEQ ID NO: 263360 - DNA, 628 bp, Unknown
  Bacterial polypeptide expressing nucleotide sequence isolated from the Sargasso Sea
aatgcttacaaaaaaacaaaaagagctatacgattatttaaaaaattacatttcaagtaatgaaatttccccttcttttgaggaaatgaaaagtgcagttaatttaaaatcaaagtcaggaattcatagattaattacaagtctagaagaaagaggttttattaaaagattaaagcacaaagcaagagcaatggaaattattaataaagataatattgataatgaaaattctttgtcaaatagcattaatataccattaataggtgcaatagctgcaggtgaagcaatagaagctattgaaaacactgatgaatttgtttctgtaccctcttcaatgacttctccaaatgctaaatattttggactaaaagtaagaggcttatctatgatagataagggaatatttgatggtgatattgcagtaataaaaaagacaaataatgttgaaaatggaaaaattgcagctgtgataacagaagataatgaggttactctaaaaactattaaatttgatagaaacaaggtcttattaatacctgctaatcaaagttttcagacaaaggaatataaagcaggtgaaatccaagtacaagggactttatctggtattataagaaaatataattaa

SEQ ID NO: 263361 - DNA, 242 bp, Unknown
  Bacterial polypeptide expressing nucleotide sequence isolated from the Sargasso Sea
aatgataaatgcgggaataaacgacggtgatgtggttgtaattaaagaaactaatagagctatgaacggagatatcgtcgtggcgcttattgaagatcaggaagcaacgttgaagaggtttttcgtgagaggcgaagctattgctttagaagctgctaacccagcttatgaaacacgaacctttccacacgaaaaaatcaaggtccaaggtcgtcttgttggcctcttaagaacttactgat

SEQ ID NO: 263362 - DNA, 419 bp, Unknown
  Bacterial polypeptide expressing nucleotide sequence isolated from the Sargasso Sea
taaaggtggactagatgaagaacaaactaattctgatgaagtggaagtaccagtgcttggaaaaattgcagctggaacacctgttgaagcaatacaaaatgaggtttctagaattccactaccaaataatttagaaaaaaatggtgattactttggattaaaagttcaaggtgactccatgatagatgcagggattcatgaaggtgatactgttattattaaaagaacagatactgctgataatggtaaaattgtcgttgcattaatagatgagcatgaagcaatgttaaaaagaatccgaaaaaaaggtaaagttgtggcgcttgaaagtgctaatagaaactatgaaactaagatttttggacctgatagagtaaaagttcaaggagttttagtatctttatatagaaacttctaaa

SEQ ID NO: 263363 - DNA, 496 bp, Unknown
  Bacterial polypeptide expressing nucleotide sequence isolated from the Sargasso Sea
atgctgacacgcaagcagaaagagcttctcgattatctcacggcgcatgccgaaaagagcgaggtatcgccgtcattcgacgaaatgcgcgtcgccctgggcctcgcgtccaagtcgggcattcaccggcttgtctccggacttgaggagcgtggccatatccgccgccttgccaaccgcgcccgcgcgatcgaaatcctgaagcctgtgacctcggcagcggctgatcttggccgcagcgtcgccgccgcggcagatgccgtcagcctgccgcttctcggcaagattgccgctggcaccccgatcgaggcgctgagcgacccgagcaaccagctcgaggtgcctgccagcatgcttggccggggcgagcatttcgcgctggagattgtcggtgactccatgatggaagcaggcattctcgacggcgacacggtggtcatcgaacgtgccgagacggccaatcatggcgacatcgtcgtcgccctgatccagaggc

SEQ ID NO: 263364 - DNA, 420 bp, Unknown
  Bacterial polypeptide expressing nucleotide sequence isolated from the Sargasso Sea
cagagcctacgactcactacagtattccgttgtacgagagcaaaatccctgctggctttccttcgcctgcgcaggactatgtggagcaaacgctggatttaaacgagctttgcatcaagcgacctgcggccacttactttgtgcgagtggagggggattcgatgattgaggcgggcatccatcctgacgatattctggtggtagaccgctcagtcacacctttacatggcgatattgtgattgcacaggtgaatggcgagtttactgtgaaagagctggctttagtgcctgaagtgcaactcatcccgcgtaacaaagcctatccacctatcacctttacggatgatgcagaattaaccttatttggtgtagtaaccaacattgtcaggcagatgagccgttcaaaacgagccctgtagt

SEQ ID NO: 263365 - DNA, 610 bp, Unknown
  Bacterial polypeptide expressing nucleotide sequence isolated from the Sargasso Sea
atgagaactatactaaccgataaagaaaccaaggtttataattttatcttaaaatatcaagaaaaatatggtagaagcccattactgaaagagattgcaaaaggaataggtattaaatctaaaggcgttgctcatcgttatatcaaatcattggaaaagtctaagttaatcagtaaagatcataataagcataggggattacatacaataaattctttttatagcattaattctctcaaattaaagatttttggaaaaattgcggctggtgggccaatagaggcagtacaggataaaaatatattagagctagagcacatatttgcaaatgaaaaatgctatgcattgaaagtacaaggggactctatgattgacgcaggtatatatgatggagattgggtaattattgaaaaacaaaataaaatagcaaagtcaaagattgccgtaatcctaattgataatcaagatgtaactttaaagtatataaaacaagtagataagaattatatggaattaatacctgcaaataaaaaacatacctcaaaaaaatataatattaacaggatagcaatacaaggtattgttattggtcaaataagagtttattgat

SEQ ID NO: 263366 - DNA, 181 bp, Unknown
  Bacterial polypeptide expressing nucleotide sequence isolated from the Sargasso Sea
gcggtacacaagacccaggaggtgcgcaacggccaggtggtggtggcgcggctggacgaggatgtcaccgtcaagcgcttccagcgcaagggcagccaggtgtggctgctgccggagaatgaagagctctcccccatcgaggtagatctctcctgccagcagctcaccatcgaggggatgg

SEQ ID NO: 263367 - DNA, 628 bp, Unknown
  Bacterial polypeptide expressing nucleotide sequence isolated from the Sargasso Sea
aatgcttacaaaaaaacaaaaagaactctacgattttttaaaaaattatatttcaaataatgaaatctccccttcttttgaggagatgaaaagtgccgttaatctgaaatcaaaatcaggtattcatagattaattacaagcctagaagaaagaggttttattaaaagattaaagcacaaagcaagagcaatggaaattattaataaagataatattgctgatgaaaattctttttcaaatagcattaatatcccattaattggtgcaatagctgcaggtgaagcaatagaagctattgaaaatgctgatgaatttgtttctgtgccctcttcgatgacatcaccaaatgctaaatattttggattaaaagtaaaaggtctatctatgatagataaaggaatatttgacggtgatattgctgtaataaaaaagacaaataatgttgaaaatggaaaaattgcagctgttattacacaagataacgaggttactctaaaaactattaaatttgatcgagacaaggtcttgttaattcctgccaatcaaagttttcaaacaaaggaatatgaagcaggtgaaatccaagtccaagggactttatctggtattataagaaaatataattaa

SEQ ID NO: 263368 - DNA, 628 bp, Unknown
  Bacterial polypeptide expressing nucleotide sequence isolated from the Sargasso Sea
atgttaacaaaaaaacaaaaagagctgtacgattatttaaaaaattatatttcaaataatgaaatctcgccttcttttgaagaaatgaaaagtgcagttaatctaaaatctaagtcaggtattcatagattaattacaagtctagaagaaagaggttttattaaaagattaaagcacaaggcaagagcaatggaaattattaataaagataatttttctgatgaaaattctttttcaaatagtattaatattccattaattggtgcaatagctgcaggtgaagcaatagaggctattgaaaatgcggatgaatttgtttctgtaccctcttcgatgacatcaccaaatgctaaatattttggattaaaagtaaaaggcctatctatgatagataagggaatatttgacggtgatattgctgtgataaaaaagacaaataatgttgaaaatggaaaaattgcagctgttattacacaaaataacgaggttactctaaaaactattaaatttgatagaaacaaggtcttattgattcctgctaatcaaagttttcagacaaaggaatatgaagcaggtgaaattcaagttcaagggactttatctggtattataagaaaatataattaat

SEQ ID NO: 263369 - DNA, 513 bp, Unknown
  Bacterial polypeptide expressing nucleotide sequence isolated from the Sargasso Sea
aaagattagcacacaagccaagagctcttgaagtggttaaattacctgagaacgcaagtgctcacgatttattcaacaacttcacaccaagtgtaattaaaggcggattggataaaagcacgggtaaatctactaaagtttctgttcttggtgcaatagctgctggaacacctattgaggcaatacaacatgaagttgataaagtaaatttaccagcggactttaacaaaaatgatgatcattttggattaagagtaaaaggcgattcaatgattgaggcaggcatcaatgacggggatacagtgattattaaaaaaaccacacacgcagataatggtcaaatagccgttgttcttatagataacgaggaagctactttaaaaaaaattagaaaaaaagggaacacaattgcccttgaaagtgcaaataaaaaatacgatacaaaaatatacgcagcaaaaagaattaagattcagggaaaattagtttctttatatagaaacttcaattaaa

SEQ ID NO: 263370 - DNA, 898 bp, Unknown
  Bacterial polypeptide expressing nucleotide sequence isolated from the Sargasso Sea
tatggctaatcatgctccagttttatctgaattaacaaatggagagcttcagattgaaggtttgcctacaaagtcagtagtaccacacagagaaactattgatgctgttgcaaatggaatacttgatggagatttcaatgctatagcatattttgcaggtagagatcctgcatttgcaattatgggagacttgattgcaggttatgatacaccaaagcagtatcaagaatattgtatgcatggtggcggcaaagaaatgcttcaaaaaatctatgatagtgtattaccaaataaaattcatgtcttaggttgtggaccatatggaaaagaagctcttgtctctaaggtgccaattaatggagttgctgatcttaaaggtgtaaaaattagatcaccagaaggtttagctgctgatgttttcagaagagcaggtgcttcaccttcttcaattcctttctctgaggtttatacttctctagaaaaaggtattgttgatgccgctgatgcttctgtttatatcaataatcatgcaagtggtttccataaaattgctaagtatccattgtatccgggtattcactcaatggctaacctacagactattattaacaagaaagtttttaataagttgagtaagcaaaatcagacagctttaacaatttggacctactggacttggacagctaaactaagagatgctggccttgatggtagagctcaggttgctaaagataaagctgcaggtgatttaacaatcatcgactggcctgtgtctgaaagagctaagttcagaaaaattgctgttgaagcgtggaactctgctgcttcaaaaagtccgctcgcaaaagaggctttggagtctaatctatcttatatgaagaaaataggtttactttaa

SEQ ID NO: 263371 - DNA, 625 bp, Unknown
  Bacterial polypeptide expressing nucleotide sequence isolated from the Sargasso Sea
tatgcttacaaaaaaacaaaaagagttattcgattatttaaaaaaatacatctcgaataatcaaatttctccttcttttgaagaaatgaagaaagcaattaatctaaaatcaaagtctggcattcatagattaattacaagtttagaagaaagaggtttcattaagagattaaagcacaaagcaagagcaatggaaattatctataaagataatcttgataatacttctttatcaaatagcataaatattccattaattggtgtaattgctgcaggtgaagcaatagaggctatagaacaaactgatgaatttgtttcggtgcctatttcaatgacatcccccaatgctaaatattttggactcaaagttaatggtttgtcaatggtagataaaggaatatttgatggtgatattgctgtaataaaaaagacaaataatgttgaaaatggaaaaattgctgcagttttaacacaaaataatgaagtaactcttaaaacaattaaatttgaaaaaaataaggttttgctcattccagctaaccaaagttttcaaactaaagagtatgatttgggtgaaattcaagtacaagggagtttatctggcattataagaaaatataattaa

SEQ ID NO: 263372 - DNA, 622 bp, Unknown
  Bacterial polypeptide expressing nucleotide sequence isolated from the Sargasso Sea
aatgttaacaaaaaaacaaaaagaattatttgattatttaaaagaatatatttcaaataaccaaatttccccttcatttgaagaaatgaaagaagccgttaaccttaaatctaaatctgggattcatagacttatttcgagtcttgaagaaagaggatttattaaacgtttgaaacataaagctagggcaatggaaattgttgataaagaaattaaaaataatatctctatagatagtatcaatattccattgataggtgcaattgctgcaggtgaagcaatagaggcaatagaaaatacaaatgactttatttctgtccctgtttctatgacttctccaaatgcaaaatattttggattaaaagtaaaggggctgtcaatgattgatgaaggtatctttgatggagacatagctgtaattcgtaaaactaataatgttgaaaatggaaaaattgctgcaattttaactcaagataatgaggtaactcttaaaactattaaattcgataaagataaagttattttaataccagcaaaccaatcatatcaaacaaaagagtataaagttggtgaaatacaagtacaaggtactttatctggaattataagaaaatatatttaa

SEQ ID NO: 263373 - DNA, 679 bp, Unknown
  Bacterial polypeptide expressing nucleotide sequence isolated from the Sargasso Sea
atgttaacaaaaaaacaaaaagaactattagagtacattcaaagctatcagataaaaagtggcgtgacgccatcttatgaagaaatgaaagctgcgcttaaccttaaatctaaatcaggaattcatagacttgtaatagccttagaagaaagagggtttgtaagaagacttgctcacaaagctagggcattggaagttattaaggatgcaatatccactttaaaagtatcggataaaactaataaaaatattattgtgggggattttacaggaagcaataaagatgaaaacagcaaattaagcacccttccattacttggaaaaatcgcagcaggtaccccaattgaagctattcaacacaacgatacatcagtagatgttccaaaagaaatgatgcctatcggagaaagttacgctttaacagtcgaaggtgagtctatgattaatgaaggtatttatgatggagataccgtgttaattaagaaaactaatcttgttgaaaatggtgacattgcagttgcactaattgatgactctgaggcaacattaaaaagaatcagaaaaaaaggtcaaagtatcgcattagaaagtgccaaccctatttatgaaacaagaattctatctgcacatagagttaaaattcagggaaagcttataggtctgttaagaaaatattaat

SEQ ID NO: 263374 - DNA, 196 bp, Unknown
  Bacterial polypeptide expressing nucleotide sequence isolated from the Sargasso Sea
tatgcgcccattaactaaacgccaagctcaaatactcgaattaattaaagtgtttattaaagacactggtatgccgcctacacgtgccgaaatagcacaaacgttagggtttaaaagtgcaaatgccgctgaggaacatttaaaagcccttgccaaaaaaggggtgattaaaatgaaacctggcgcaagccgtgga

SEQ ID NO: 263375 - DNA, 2170 bp, Unknown
  Bacterial polypeptide expressing nucleotide sequence isolated from the Sargasso Sea
ttgacaacatctatatctgaaatcaataatattttaaaagaccaaggcgttaattcaatagcgcagtggttacctaatgcacgtcctactgatcggaatggaaatatatttttaaatagatattatgtagttgagtttgaaagcgttaaaaatgatatggatgagatcattaatgatctcatggtactggatgtgatcatggtatcagagagaataccaattgtagagcctgcttatgttccaaatgattctttatgggatgagttatatggtctatcacagatcaaggcacacttagcatttgacctatgggatatcgatggcggtgaaattccagggcagatggaaaatggagaaatagttgtagcaatccctgatattggactaaagtgggaccacccagatctaattgataatgtgtggcaaaatttaggtgaagatgttgatggtgatggtgttgtactcgaatttattaataatgaatgggtatttgatccagatgatgagaatggggtagatgatgatggtgatgggtatgtagataactttgttggttatgatgtagcaattggggacaataaccctattccattacgcttgaaccatgtccacggtacaaaagtagcaggtaatgtttctgcaatgacaaataatgggattggtttagcatctgttggatactctgtcaaactcatgggtgtaaatgcaaataataatattgatgagccttggtaccttacccatacaaatcaagcggtactcgcttctgcacaaatgggtgcagacataatcaattgtagttgggtaagtggttatagcactgccaacgacaacttttatcaaagtattcataatggatatgactccattattttaggcgctgcaggtaatggggtctacaatggtggtgttagtgatacaacagattttaatcctagataccctgcaggctatgataatgtagtatctgtgacagcaatgggagatgacgatagttttaattgctggtcgaatgtccatgagacagtagatatcagcgctcctggtgaatttattatttgtgcatatacatacgatgatacactttatgctcttggtacaggcacatcttatgcaacacccttaactgctggagcaattgcattggtaaaatcagtgattcctgatgctgataatgagaccattatctcaaaggtcataaatactgcggtgccttatccagacatggatagaagttgtgggggacagtcaatagagggacttgtaggttcaggtcagctcaatattcatcgagcaattttggcttgtacatatcctgaactgattccaagcgagatccaataccagacggatgatggtttcattaatcccggcgatacagtaatagtggacattactattacaaatagcttgggttttgagcctgcctctaatgtggttgtgaccttatccactactgacccaagttttaacattatcaatggccagttcgcgggggatgatggaacgctatacgctggtgaagaattaacaggacagtttatttttacatcagatcataatgcatcgctaggagatatcccctttaacattcattttgatgcaattcttgaaaatggctcctcttatgagaatgatgtggagctatggatatcattgtctttagatctatttggatttccaatcgaaggtgtaaatgtccaagggggaactataataaccgatcttgatggaaatacatttaatgagatctattatggctctgatagtgtagtgtatggtaagtggatgggtgggcttgatgttaatggctttccatttgatgcgggtgctgagataagcacaagtatttcatcaggtgatcttgatggtgatggtgataaagaagttgtttttggtacatctaatggatttgtctatgcaatcacaaaaactggcacagtacatatgagctatcaacaagaagatcatatagttgatgttcccgtactatctgaccttgaccaagatggagatatggaggttatatttatttctagtaacgactcaagtagtacgctgtatgccttacatgatacaggagataatgtaacaggatttccagttattttttctgaaaaaattgcagcttgtccaagtattgctgacctgaataataatatggtattag

SEQ ID NO: 263376 - DNA, 484 bp, Unknown
  Bacterial polypeptide expressing nucleotide sequence isolated from the Sargasso Sea
agtaattagaaaagaggtacataaagatgcattcaaaaatgtaaaaattattgacattataaattcaatgagagatgcaggaataaacgtagctgcaaattatatttttggattaccagaggaaacaaaagaaagtttagagtttacttataattttgcagaggaaacgaatacagaaatggttaacttttatagtgcaatggcataccctggtagccctttatatttggagtcaaaaaaaaataatgtattgctacctaaaacgtattctggatatagtcagcactcatacgatactcaaaatttgccttcaaaacatctaagtgctgcagaaattttagcatttagagataaatcttgggataaatatcatactaaccctaaatatttaaaattattagaaaaaaaatttggattgaacgctgtaaataatttaaaagaaacaacaaaaatcaaattaaaaagaaagctactaggtgattaa

SEQ ID NO: 263377 - DNA, 478 bp, Unknown
  Bacterial polypeptide expressing nucleotide sequence isolated from the Sargasso Sea
taaattaccagaaacagcttctgctaatgatatttataatagcttttcacctagtgtgattaaaggtggactagatgaagaacaaactacttctgatgaagtagaagtaccagtgcttggaaaaattgctgcaggaacacctgttgaagcaatacaaaatgaggtttctagaattcctctaccaaataatttagaaaaaaatggtgattactttggtttaaaagttcaaggtgactctatgatagatgcaggtattcatgaaggtgatacagttattattaaaagaacagatactgctgataatggtaaaattgttgttgcattaatagatgagcatgaagcaatgttaaaaagaattagaaaaaaaggtaaagttgtagcccttgaaagtgctaatagaaactatgaaactaagatttttggacctgatagagtaaaagttcaaggagttttagtatctttatatagaaacttctaa

SEQ ID NO: 263378 - DNA, 564 bp, Unknown
  Bacterial polypeptide expressing nucleotide sequence isolated from the Sargasso Sea
gaatacacagattaataaatgctcttgaagaaagaggatttataagaagattagctcatagagctagagctattgaaattatcaaattacctacttcaagcactataaacccaaaaggtaattttcagcctgaagtaattgaaggcaataaagaaaaagatctttttagcctaaatgaagagtccatagaggttagaatgatgggtaaaatagcagcaggaactccaattgcagcaattgagtatgaaaaaaataaaatatctgttccgggtagtatggttggtactggagatcattatgcactagaaattgaaggtgactcaatgattggagcaggtattcttgataaggataaagccattataaaaaaggttgatgatgccttatcaggtcagatagttgtggcactagttgatggagaggaagctacattaaaaagacttagaaaaaaaggaaatactattgctcttgagcccgctaattctgcatatgaaacaaaaatttatggacctgaaagaattcaaattcaaggtattctggttggcatattaagatcttattagt

SEQ ID NO: 263379 - DNA, 497 bp, Unknown
  Bacterial polypeptide expressing nucleotide sequence isolated from the Sargasso Sea
agcaagagctcttgaagtggttaaattaccagaaaatgcaagtgcacacgatttgtttaatagtttcactccaagcataattaaaggcggattagataaaagcgctagtaagtctagcaaagtttcagttcttggttcaatagctgcaggaactccaatagaagcaatacaacaagaagttgataaagttaatttgcctgctgactttaataaaaatgatgaccactttggattaagagtaaaaggagactctatgattgaagcgggaattaatgatggagatacagttataattaaaaaaagttcaaatgcagataatggtcagatagcggtagttctaattgataatgaagaagcaactttaaaaagaattagaaaaaaaggaaataccattgctctagaaagtgctaacaagaaatacggtactaaaatatacgcagcaaaaagaattaagattcaaggaaaattggtttctttatatagaaacttcaattaaa

SEQ ID NO: 263380 - DNA, 676 bp, Unknown
  Bacterial polypeptide expressing nucleotide sequence isolated from the Sargasso Sea
atgcctgcccatgttcccgaactcatcaccctggccagcgatccgaacgttgaaatcactaagttgctgcgcatggcaaaggtggtggcacgtctgctccaacagcccgaggcaatcatctggcttgaccatgagctacagggctatcctgacggctgcggtgtgccccgttatcgccagcggcgcgggaatctggcgtactggcaggcagggtcccaccacttgctgtcagttgccaacaccgagcgggcggtacagtggcaaacttgcccgctctcgctgcccgcaagcgagctggctgagctggccgcaaccggcaaagcactgagggtccgattcccccctgagctcatgagcttgctgatggccgaaatcggtaccgaacgggaggtggagatttgtatgccgacggtccaggtgcgggccctcatcgcggcggtgcaggagcgggtgctagactgggcactcgctttggccgcttccggtgttcagggggacagcatgagcgtcactccgcaagaacggcaggtggcgccggtgagcatacacatcggagggaatgcgactggtgttcaaattcagctgaactcgcccgggggccatcaacagcagacagtgtccggcgagcaaaagaccgatgctctgtcttcttgctggcctggctccagcaggtgaa

SEQ ID NO: 263381 - DNA, 313 bp, Unknown
  Bacterial polypeptide expressing nucleotide sequence isolated from the Sargasso Sea
atgttaaccaaaaaacaaaaagagttatatgattatttagatcattatatcaaatctaatcaaatatctccttcttttgaagagatgaaaaaagctgtaaacttaaaatcaaaatcaggaattcacagattaattactagcttagaacaaagaggtttcataaaaagacttaaacacaaagccagagcaatggaaataactaaaaagttataccaaaatgattcaaatgaatcatcttatgaaattcctttgttgggagcaattgcagctggaaatccaatggaagctatgaaaacccagatgaatatataag

SEQ ID NO: 263382 - DNA, 643 bp, Unknown
  Bacterial polypeptide expressing nucleotide sequence isolated from the Sargasso Sea
tatgcttactaaaaaacaaaaagaattatttgtttatttaaataattatatttcatcaaatgaaatatccccttcttttgaggaaatgaaaaatgcagttaatctcaaatctaaatcaggaattcatagattaatcacaagtttagagcaacggggatatattaaacgtttgaaacacaaagcgagagcaatggaaattactaaagatcttcctaacaaaaacattaaatcaataaattctgctaaagaagaaagctttctaaatataccactagttggttcaatcgctgcaggtgaagctatagaggcaataaattcatcagattcaatgatttctattcctaaatctctagtaagcaaaaattcaacatatttcggactaaaggtaaaaggcctatctatgatagatgaaggtatttttgatggagatgtagcaattataaaaaaaacaaattcagcagaaaatggcaaaatcgctgctgtgctaacattagataacgagattacactaaaaaaagttaaaatgactaatcaaaaaatatatttgatacctgctaataaagcgtatcaaatcaaagaacataatcttggagatatacaaattcaaggcactttatctggtattataagaaaatataattaa

SEQ ID NO: 263383 - DNA, 454 bp, Unknown
  Bacterial polypeptide expressing nucleotide sequence isolated from the Sargasso Sea
tatgcttacttttcaacaggaaaaattattaaaatttataattgactatcaaaaacaaaataatgttacgcctagctttgatgaaatgaaagacggtttgggtttgaagtcaaaatcaggaattcatagaatagtgtcagcccttgaagaacggggatatattaaaaaacttaataacagagctcgagcaatagaaataataaaaaacgtaaatttaattgatacagaaagtggcaataataaaaataatattatttcaattccaattttgggcaaaatagctgcgggacttcccattgaagcaatatctgataatacaaattatatagaattacctgaaacattattaaaaaaaggtgaatattttatacttaatgttgagggtgattcaatgattgaagcaggaatatttgatggtgatcaggttgttattagaaaagctaatgatgccaat

SEQ ID NO: 263384 - DNA, 443 bp, Unknown
  Bacterial polypeptide expressing nucleotide sequence isolated from the Sargasso Sea
tatgttaactaaaaaacaaaaaaacctgcttctctttatcaacaaaaagttgagatctacaggcgtgtccccttcatacgaggaaatgaaagaatcgttaagtttaaaatcaaaatctggcattcacagacttattagtgcattagaagagagaggttttattaaaagattagcccacaaagcgagagcattggaagtaataaagttacctgaaactgcatctgcaaacgatatttataacagtttttctccaagcgttattaagggaggattagacgaggaaaatttaaataattctaacgatacagaaatccctgttcttggaaaaattgctgcaggaaccccagttgaagctatacagaatgaagtttcaagaattccactaccagcaaatattgaaaaagatggagaattttttggtttaaaggttcaagggggattct

SEQ ID NO: 263385 - DNA, 460 bp, Unknown
  Bacterial polypeptide expressing nucleotide sequence isolated from the Sargasso Sea
tatgttaaaccttactgcacaacagatcaaagtatttgatgttatcaaagaatcgctacagagcaatggttatccaccaacaagagctgaaatagcaaaaattttagattttaaatcagtgaatgctgctgaatcgcatattaaagcccttgttaaaaaaggtgtaattgaaaaagtgccaggctcatcaagaggaataaaattagttgaagaaatttctggtatccctctcataggtagtgttgctgccggtagtccaataacggcttacgagaatgttgaaaaaactatacattcaaatcctctcaataaatcggtcgatttttttctaagggttcaaggagaaagcatgatagatgctggcatattggacaatgaccttgttggtgttcgaaaaacaaagaatgcagaaaatggggaaatagttgttgcaaggctagaagatgaagtaactctgaaa

SEQ ID NO: 263386 - DNA, 328 bp, Unknown
  Bacterial polypeptide expressing nucleotide sequence isolated from the Sargasso Sea
aatacaaaatgaagttgcaagaatacctttgccaaacaatctagaaaagaatggggattacttcggtttgaaggttcaaggtgactctatgattgaagctggtattcatgaaggagatactgttattataagaagaacagatattgcagataatggaaaaattgtcgtcgctctaattgatgagcatgaggcaatgcttaaaagaattcgaaaaaaaggtaaagtagtcgctttagaaagtgcaaacagaaactatgaaactaagatttttggtcctgacagagttaaagtccaaggtgttttagtatctttatatagaaacttctaa

SEQ ID NO: 263387 - DNA, 406 bp, Unknown
  Bacterial polypeptide expressing nucleotide sequence isolated from the Sargasso Sea
tatgctaactaaaaaacaaaaaaacttgttaatttttatcaataaaaagttgagatctactggaatatctccttcttatgaagaaatgaagcaatctttaaatttaagatcaaaatcaggtattcatagattaattagcgccttagaagaaagaggatttatcaaaaggttagctcataaagctagagctcttgaggttgtaaaattacctgaaactgcttctgctaatgatatttataatagtttttcgcctagcgtaattaaaggtggtttggatgaagaaaattcaactagcaaaggaactgaagtacctgttttaggaaaaatagcagctggaacacctgttgaagcaatacaaaatgaagttgctagagttcctttgcctgaaaatatagaaaaaaaaggt

SEQ ID NO: 263388 - DNA, 193 bp, Unknown
  Bacterial polypeptide expressing nucleotide sequence isolated from the Sargasso Sea
tatgcttacaaaaaaacaaaaaaacttgcttttatttatcaacaagaggttgagaagctctggtgtatctccttcttatgaagaaatgaaagagtcactaaatttaaagtctaaatcaggaattcacagattaatcagtgcattagaagaaagaggattcattaaaagacttgctcataaagcaagagcatta

SEQ ID NO: 263389 - DNA, 293 bp, Unknown
  Bacterial polypeptide expressing nucleotide sequence isolated from the Sargasso Sea
taatttagagaaaaatggagattattttggtttaaaagttcaaggggactcgatgattgaagctggaattcatgaaggtgatactgtaattattaaaagaacagatacagctgataatggaaaaattgttgttgctctaattgatgagcatgaggcaatgttaaaaagaattaggaaaaaaggtaaagttgttgctttagaaagtgccaacaaaaattacgaaactaaaatatttggacctgatagagtaaaagttcagggtgtattagtatctttatatagaaacttctaaa

SEQ ID NO: 263390 - DNA, 261 bp, Unknown
  Bacterial polypeptide expressing nucleotide sequence isolated from the Sargasso Sea
tatgctaacaaaaaaacaaagaaatttactaattttcattaataaaaaaattagatcgactggtgtatctccttcttacgaggaaatgaaaaattcgctcaaccttaagtcgaaatctggaattcatcgattaatatcagcattagaagaaagaggttttataaaaagattagctcacaaagcaagagctcttgaagtaattaaacttcctgaaaatgcaagcgctcacgatttgtttaatagtttcacgccaagtgtaat

SEQ ID NO: 263391 - DNA, 329 bp, Unknown
  Bacterial polypeptide expressing nucleotide sequence isolated from the Sargasso Sea
aatatctgataatacaaattatatagaattacctgaatcattattaaaaaaaggagaatattttatacttaatgttgagggtgattcaatgattgaagcaggaatatttgatggtgatcaggttgttattagaaaagctaatgatgccaataatggcgaaattgtagttgcgctaattgataataatgaagcaacattaaaaagaatattcaaacgcgggcagcaagttgctttacaaccagaaaacagtaactataaaacagtcatttatggtccagatagaatccaaattcaaggtgtattaaaacatttaattagaggctattaat

SEQ ID NO: 263392 - DNA, 673 bp, Unknown
  Bacterial polypeptide expressing nucleotide sequence isolated from the Sargasso Sea
aaaaacttgcttttatttatcaacagaaagttgagatcttctggtgtatctccctcatatgaggaaatgaaaaattctttaaatcttaaatcaaaatcaggaattcacaggttaataagcgcattagaagaaagaggatttattaaaagattggcacataaagctagagctttagaggttataaagcttcctgaaacagcatctgctaatgatatttacaatagtttttccccaagtgtcataaaaggaggcctggatgaagagaatttaaaaaaaactgatgttaatgatagctctgaaattccagttttgggtagcatagccgcaggaactcccattgaagcaattcaaaacgaggtaagtcgaattcctttgccaaacaatattgaaaaaaatggagaattttttggactaaaagtaaccggcgactcaatgatagatgcgggtataaacgatggagatacagtgatcgtaaaaaaaacagaaacagctgacaatggaaaaattgttgttgcattaattgatgataatgaagctatgctaaaaagaattagaagaaaaggtaaaacagttgcactggaaagcgcaaacagaaattatgaaactaaaatatttggtcctgatagagttaaagttcaaggtatactagtatctttatatagaaacttttaat

SEQ ID NO: 263393 - DNA, 376 bp, Unknown
  Bacterial polypeptide expressing nucleotide sequence isolated from the Sargasso Sea
atgcttacaaaaaaacaaaaaaacttgttactttttataaataagaaaatcagatcgactggtgtgtctccgtcttatgaggaaatgaaaaactcactcaaccttaagtcgaaatctggaattcatagattaatatcagctttagaagaaagaggttttataaagagactcgcccataaagctagagctcttgaggtgatcaaacttcctgaaaacgctagtgcacacgatttgtttaatagttttacgccaagcgttatcaaaggtggattagataagaatgctaataagtctactaaaatttctgttctaggatctattgctgcaggaacaccaatagaagcaattcaacaggaagttgataaggttaatttac

SEQ ID NO: 263394 - DNA, 358 bp, Unknown
  Bacterial polypeptide expressing nucleotide sequence isolated from the Sargasso Sea
atgctaacaaaaaaacaaaaaaatttattaatttttataaataaaaaaattagatcaagtggagtttctccctcttatgaggaaatgaaaaattcactcaaccttaagtcgaaatcaggtattcatcgattaatttcagctttagaggaaagaggatttataaaaagattggcacacaaagcaagggcgcttgaagtaatcaaattaccagaaaatgctagtgcacacgacttattcaatagttttacccctagcgttatcaaaggtggtttggacaaaggtgtaagcaaatctaccaaagtttcagttcttggatctatagctgcatggaacaccaatagaagcaatacaacacgaa

SEQ ID NO: 263395 - DNA, 160 bp, Unknown
  Bacterial polypeptide expressing nucleotide sequence isolated from the Sargasso Sea
tatgcttacaaaaaaacaaaaaaacttattaatttttattaataaaaaaatcagatccacgggaatttctccgtcatacgaggaaatgaaaaattcactcaaccttaagtcgaaatctggaatacatagattgatcagcgctctagaagaaaggggtttt

SEQ ID NO: 263396 - DNA, 589 bp, Unknown
  Bacterial polypeptide expressing nucleotide sequence isolated from the Sargasso Sea
aatgctcactaaaaaacaaaaagaattactagattatataactttggttaataaaaaatttggtatatccccttcttatgatgaaatgaaagacaaattaaaattaaagtctaaatctggtattcatagaatcatctcagcattagaagaaagagggtttattagaaaattagctaataaagctagagcaatagagataatacaaaataataaaaatatttctccaactaatgagccaatgaacaaaattatagaaatacctttatatggtaaaattgctgctggaacaccaatagaagcaatatctaatgcgtcaagctatattccaactccaactaatatggtgaataagggagaacattatgctcttgagatatctggtgagtcaatgattggatcaggaattaatgataaagatatagcaattattaaaagaaccaccatggctaataatggacaaatagtagtagcattaatagataaaacagaggctacactaaaaaaatttaaaaaaacctcctcaaagattgtacttattccctcaaatgatttatatcaatctcaatcatatgatctacctagagtcaaa

SEQ ID NO: 263397 - DNA, 422 bp, Unknown
  Bacterial polypeptide expressing nucleotide sequence isolated from the Sargasso Sea
tatgcttacaaaaaaacaaaaaaacctacttttatttatcaacaaaaagttgagaagctcaggtgtatctccttcttatgaagaaatgaagcaatctttaaatcttaaatcaaaatcaggtattcacagattaattagtgcattagaagaacgaggatttattaaaagacttgctcataaagcaagagccttggaagtaatcaaattaccagagacagcttcggctaatgatatttataatagtttttcacctagtgttataaaaggtggcttagatgatgaaaaacctgtgtctgacgagatggaagtgcctgttttaggaaaaatcgcagcaggaacacctgttgaagctattcaaaatgaagtttctagaataccattaccaaataatttagaaaagaacggtgactattttggactta

SEQ ID NO: 263398 - DNA, 421 bp, Unknown
  Bacterial polypeptide expressing nucleotide sequence isolated from the Sargasso Sea
tatgcttacaaaaaaacaaaaaaacctgcttttattcataaataagaaaattcgatcatcaggtgtatctccttcctatgaagaaatgaaaaattctttaaatcttaagtcaaaatctggaattcacagacttatttcagctttagaagaaagaggttttataaaaaggttagcacataaagctagagcattagaagtattaaagttgcctgaaacagcaagcgctaatgatatatataattctttttccccaagtgtaataactggaggtctagattcccacaaacccaaaaaaaatattcatgaaattcctgttttgggtaacattgctgctggaacaccaattgaagctatacaaaatgaggtaaaccgtatcgctattcctgaagaattagcaaaggaggggaacattttggtttaa

SEQ ID NO: 263399 - DNA, 518 bp, Unknown
  Bacterial polypeptide expressing nucleotide sequence isolated from the Sargasso Sea
taaaagattggctcataaagccagagctttagaggtagtaaaattgccagaaacagcttcagctaacgatatttacaatagtttttcaccaagcgttatcaaaggtggtttagatgaagaaattaacaattcagatgaaatggaagtgccagtattaggaaaaattgcggcaggtactcctgttgaagcaattcaaaatgaagtttcaagaataccattaccaaataatttagaaaaaaatggagattattttggattgaaagttcaaggagactcaatgattgaagctggaatccacgaaggagatacagttattattaaaagaacagatacagcagataatggaaaaattgtagtcgcattaattgacgaacacgaggcaatgttaaaaagaattcgtaaaaaaggtaaagttgttgcattagaaagtgcaaatagaaactatgaaaccaaaatatttggccctgatagagttaaagttcagggtgttttggtatctttatatagaaacttctaaa

SEQ ID NO: 263400 - DNA, 274 bp, Unknown
  Bacterial polypeptide expressing nucleotide sequence isolated from the Sargasso Sea
gactattttggtctaaaggttcaaggtgactcaatgatagaggcaggaattaacgaaggtgatacagttataatcaaaagaacagatactgcagataatggaaaaattgtagtagccttaatagatgaacatgaggctatgcttaaaagaattagaaaaaaaggcaaggttgttgcattagaaagcgctaataaaaactacgaaaccaaaatttttggtccagatagagttaaagttcaaggtgttttggtatctttatatagaaacttctagt

SEQ ID NO: 263401 - DNA, 322 bp, Unknown
  Bacterial polypeptide expressing nucleotide sequence isolated from the Sargasso Sea
atgctaacaaaaaaacaaaaaaacctattattatttatcaacaaaaagttgagaagttctggtgtatctccctcttatgaagaaatgaaagactctttaaatttaaagtcgaaatctggaattcatagattaattagtgcattagaagaaagaggatttataaaaaggcttgctcataaagctagagctttggaggtaattaaacttccagaaacagcctcagctaacgatatttacaacaatttttcacctagtgtaattaaaggtggtttagatgaagataaaactacttctgacgagtatgaagtacccagttttagga

SEQ ID NO: 263402 - DNA, 284 bp, Unknown
  Bacterial polypeptide expressing nucleotide sequence isolated from the Sargasso Sea
aaagaatggggactattttggtctaaaagttcaaggtgattcaatgatagaagcaggaattaatgaaggtgatacagttattatcaaaagaacagatactgcagataacggaaaaattgtagtagccttaatagatgaacatgaagctatgctcaaaagaattagaaaaaaaggtaaagtagttgcattagaaagcgctaataaaaactacgaaactaaaatttttggtccagatagagttaaagttcaaggcgttttagtatctttatatagaaacttctagt

SEQ ID NO: 263403 - DNA, 507 bp, Unknown
  Bacterial polypeptide expressing nucleotide sequence isolated from the Sargasso Sea
tatgataaacctaaccgaacaacagttcaaaattttcgatgtaattaaaggacatgtcaatgattatggctatccgccaacgagagcagaaatagcaaaaataatgggttttaaatcggtaaacgctgcagaatcacatataaaagctcttgttaagaaaggtgttctattaaaggttcctgattcatctagagggcttaaattagtcgaagaatattctggtattccaattgttggcagagtggcagcaggttcacctatatctgcagttgaaaatattgaaaaatatattcctacaaatccaatatcatctccggtggactttttcttgagagttaaaggtgacagcatgaaagatattggaattatcgaaaacgatcttgtaggtgtaaaaaaagcatcaaccgcagagaacggctcggttgttgttgccagactagaggatgaagtacacttaaagattttgtacagaaatggcacaattaaacttgtagctgaaaataaaaa

SEQ ID NO: 263404 - DNA, 316 bp, Unknown
  Bacterial polypeptide expressing nucleotide sequence isolated from the Sargasso Sea
tatgttaactaaaaaacaaaaaaacttgttaatctttatcaacaaaaagttgagatcaaccggtatatccccttcttatgaggaaatgaaagaatctttaaatttaagatcaaaatctggaatacatagacttataagtgctttagaagagcgagggtttataaaaagactagcacataaagctagagctctcgaagttgtaaaactaccagaaacagcatccgcaaacgatatatataacaatttttcaccaagcgtaatcaaaggtggattggatgaaaataattcaacaaaagaaggaacagaagtgccggtt

SEQ ID NO: 263405 - DNA, 460 bp, Unknown
  Bacterial polypeptide expressing nucleotide sequence isolated from the Sargasso Sea
ctgcaaacgatatttataatagcttttcaccaaagtgtaataaaaggtggattagatgaaacagcgaataaaacaaatgacacagaaatccctgtcttaggtaaaattgctgctggaacaccagttgaagcaatacagaacgaagtagcaagaattcctttgccagaaaatatagaaaaaaagggtgaatattttggattgaaagttcaaggtgattctatgattgaggcaggaattaatgatggtgatacagttgttataaaaaaaacagatacagcagataacggaaaaattgtagttgctctaattgatgaccatgaagcaatgcttaagagaataagacgaaaaggcaaaactatagccttagagagcgcgaatagaaattacgagactaaaatatttggcccagatagggtaaaagttcagggtgtgcttgtatctttatatagaagtttctaaa

SEQ ID NO: 263406 - DNA, 281 bp, Unknown
  Bacterial polypeptide expressing nucleotide sequence isolated from the Sargasso Sea
tatgttaactaaaaaacaaaaaaacctgcttttattcattaacaaaaagttgaggtcttcaggaatatcaccttcttatgaagaaatgaaacaatcattaaatcttaaatctaaatcaggaattcatagactgattagtgctttagaagaaagaggatttataaaaagactggcccataaagcaagagctttagaagtggtcaaattacctgagactgcttcggcaaatgacatatataacagcttttctcctagtgtaattaaaggtggtttagatactg

SEQ ID NO: 263407 - DNA, 520 bp, Unknown
  Bacterial polypeptide expressing nucleotide sequence isolated from the Sargasso Sea
ataaaaagacttgctcataaagcaagagctctagaagttatcaaattgccagaaactgcatcagctaatgatatttataacagtttttctcctagcgttataaaaggtggtttagatgaagaaaaacctttatctgacgacgttgaagtgccagttttaggtaagatagcagcggggacacctgttgaagctatacaaaatgaggtttcaagaattcccttaccaagtaacttagaaaagaacggggactattttggtctaaaagttcaaggtgactcaatgatagaagcaggaattaacgaaggtgatacagttattatcaaaagaacagatactgcagataatggaaaaattgtggtagccttaatagatgaacatgaagctatgcttaaaagaattagaaaaaaaggcaaggtggttgcattagaaagcgctaacaaaaactatgaaactaaaatttttggtccagatagagttaaagttcaaggtgttttagtatctttatatagaaacttctagt

SEQ ID NO: 263408 - DNA, 357 bp, Unknown
  Bacterial polypeptide expressing nucleotide sequence isolated from the Sargasso Sea
aaattgctgctggaacaccggttgaggctatccaaaatgaagttagtagaatacctttgccaaataatctagaaaaaaatggagattactttggtcttaaagttcaaggtgactcaatgatagaagctggtattcatgagggtgatacagtaattataagaagaacagatactgcagacaatggaaaaattgtggttgctttgattgacgaacatgaagcaatgcttaaaagaattcgtaaaaaaggtaaggttgtcgctttagaaagtgcaaatagaaactacgaaactaaaatttttggtcctgatagagttaaagttcagggtgtattagtatctttatatagaaacttctaaa

SEQ ID NO: 263409 - DNA, 467 bp, Unknown
  Bacterial polypeptide expressing nucleotide sequence isolated from the Sargasso Sea
caccacaatatctgatatgccttctagtaccagacctgttgtcagtgcaaatagccctacagcaccaattgaaagcgtttatgcaaatgaaatacctgttatgggccgaatagcggctggtgtgcctatagaagcaataagcgaaatatctcataatgttgctgttccaggtcaaattcttcgaggtggaggagatcattttgccttagaagtaaaaggtgactcaatgataaatgcgggaataaatgacggtgatgtagttgtaattaaagaaacaaatagagctatgaacggagatatcgtcgtagcgcttattgaagatcaggaagcaacgttgaagagatttttcgtgagaggcgaagcgattgctttagaagctgctaacccagcttatgaaacacgaacctttccacatgaaaaaattaaggttcaaggtcgtcttgttggcctcttaagaacttactgat

SEQ ID NO: 263410 - DNA, 574 bp, Unknown
  Bacterial polypeptide expressing nucleotide sequence isolated from the Sargasso Sea
gaagtcaaatcttggtattcatcgactaatcagcgcattagaagaaagaggatttattaaaagactagctcataaagctcgtgcgctagaggtggtaaaattaccagaaaccgcctctgcaaatgatatttataattctttttcaccaagtgtaattaagggtggattaagtgatgtgaataattcaaaaaataatgaaatatctgtattaggaagcattgcagctggaacaccaatagaagcaattcagaatgaagtttctagaattcctctgccctcaaatattgaaaataatggggagtttttcggtttgaaagttaaaggtgactcaatgatagaagctggtattaatgatggtgatacggtaataattcaaaaagccgatagagcagaaaatggaaaaattgtagtcgcgctaattgatgatcatgaggctatgttaaaaagaataagaattaaaggaaaaactgttgctttagaaagtgcaaacagaaattacgaaacaaaaatctttggaccagatagagttaaagttcaaggtgttttggtatctttatatagaaacttcaattaa

SEQ ID NO: 263411 - DNA, 325 bp, Unknown
  Bacterial polypeptide expressing nucleotide sequence isolated from the Sargasso Sea
atgctaacaaaaaaacaaaaaaacctactaatatttattaataagaagattagatcttcaggtatctctccttcttacgaggagatgaaaaattcgctcaaccttaagtcgaaatcaggaattcatagattaatatctgctcttgaagaaagaggttttgtaaagagattagctcataaagctagagctttagaggttgtaaagctgcctgaaaatgcgagcgcaaacgatatttttaattcatttactcctagcgtaattaaaggcggattagatcaaaacaaaaacaaatctactgatgtatctgttttaggtagtatgctgc

SEQ ID NO: 263412 - DNA, 559 bp, Unknown
  Bacterial polypeptide expressing nucleotide sequence isolated from the Sargasso Sea
atgcttacaaaaaaacaaaatgaattattgatatatatacatcaaaatttaagagaaactggtgttgctccttcttatgaagaaatgaaggatgcgttagatttaagatctaaatctggaatacatagattaataaacgctcttgaagaaagaggatttataagaagattggctaatagagctagagctattgaaattatcaaattacctacctcaagcactataaacccgaaaggcaattttcagcctgaagtaattgaaggtaataaagaaaaagatctttttagccttaacgaagagtcaatagaagttagaatgatgggtaaaatagcagcaggaactccaatcacagcaattgagtatgaaaaaaataaaatatctgttcctggaagtatgcttgggactggagatcattatgcattagaaatcgaaggtgattcaatgattggagcaggcattcttgataaagataaagctattataaaaaaggttgatgatgccttgtcagggcagatagttgtagcactagttgatggagaagaagctacattaaaaagac

SEQ ID NO: 263413 - DNA, 337 bp, Unknown
  Bacterial polypeptide expressing nucleotide sequence isolated from the Sargasso Sea
gaagctatacagaatgaagtttcaagaattccactgccagcaaatattgaaaaagatggagaattttttggtttaaaggtccaaggggactctatgattgaagctggaatcaatgatggtgatactgttattgttaaaaaagcagatactgcagataatggaaaaattgtagtagctttaattgatgatcatgaggctatgttgaaaagaattagaagaaaaggtaaaactgttgcattagaaagtgcaaatagaaattacgaaacaaaaatttttggcccagatagagtgaaagttcagggaattcttgtatctttatatagaaactttcagtaaa

SEQ ID NO: 263414 - DNA, 344 bp, Unknown
  Bacterial polypeptide expressing nucleotide sequence isolated from the Sargasso Sea
tatgctaacaaaaaaacagaaaaatttattaatttttattaataaaaaaattagatcttcaggaatatctccgtcttatgaggaaatgaaaaattcactcaaccttaagtcgaaatctggaatacataggctaatttcagctctagaggaaagaggttttgtaaagcgattagctcataaagctagagctttagaggtgataaaattacctgaaaatgcaagcgcaaatgatatttttaataccttcactccaagcgtaattaagggtggtttagataaaaataataataaatctactgatatttctgttttgggaagtattgcggccggaacaccaattgaag

SEQ ID NO: 263415 - DNA, 265 bp, Unknown
  Bacterial polypeptide expressing nucleotide sequence isolated from the Sargasso Sea
atgctaacaaaaaaacaaaaaaacctgcttttatttatcaacaagaagttgagaagctctggtgtttctccatcttatgaggaaatgaaagcttcattaaaccttaaatctaagtcaggaattcatagacttataagtgcattagaggaaagaggttttattaaaagacttgctcataaagcaagagcattagaagtaattaaactacctgaaacggcttctgcgaacgatatttataacagtttttcgccaaagtgttattaag

SEQ ID NO: 263416 - DNA, 451 bp, Unknown
  Bacterial polypeptide expressing nucleotide sequence isolated from the Sargasso Sea
atgcttacaaaaaaacaaaaaaacttacttttatttattaataaaaaaatcagatcaagtggtgtttcaccttcttatgaggagatgaaaaattcattaaatttaaaatcaaaatctggaattcacagacttatatctgctcttgaagaaagaggttttataaagagattagcgcacaaagctagagcgctagaggttcttaaattacctgagaccgcaagtgcaaatgatatatataactctttttcgccaagcgtaataaaaggcggactagatacggaaaaccaaaaaaatgatgttagcgaaattcctgttttaggtaaaatcgctgccgggacacccatcgaagctattcaaaacgaagtaagcagagtagctttgcctgagtctcttagtaaaaatggcgaacattttgggcttaaagtatcgggagactcgatgatcgaggctg

SEQ ID NO: 263417 - DNA, 565 bp, Unknown
  Bacterial polypeptide expressing nucleotide sequence isolated from the Sargasso Sea
attcatagacttattagtgcattagaggaaagagggtttattaaaagattggcccacaaggcgagagcattagaagttattaagttacctgaaactgcatctgcaaacgatatttataacagtttttctccaagtgttataaagggaggactagatgaggaaaatttaaataattctaacgatacagaaatccctgttcttggaaaaattgctgcaggaactccagttgaagctatacagaatgaagtttcaagaattccactgccagcaaacattgagaaagagggagaattttttggtttaaaggtccaaggggactctatgattgaagctggaattaatgatggtgatactgttattgtcaaaaaagcagatactgcagataatggaaaaattgtagtagctttaatagatgaccacgaggctatgttgaaaagaattagaagaaaaggtaaaactgttgcattagaaagtgcaaatagaaattacgaaacaaaaatttttggcccagatagagtgaaagttcaaggaattcttgtatctttatatagaaactttcagtaaa

SEQ ID NO: 263418 - DNA, 385 bp, Unknown
  Bacterial polypeptide expressing nucleotide sequence isolated from the Sargasso Sea
atgctaacaaaaaaacaaaaaaacctgcttttatttatcaacaagaagttgagatcttcgggcatttctccttcttatgaagaaatgaaatcttcattaaacctaaaatcaaaatcaggaattcatagattgattagtgctttagaagaaagaggatttataaaaagacttgcacacaaagcaagggctctagaggttttaaaactacctgaaactgcatctgccaatgatatttataattcgttttctccaagtgttataaaaggtggactggatgaagtaaattcaaaaaataatggcactgaattaccagttctaggaaatattgctgccggaactcctatagaagcaattcaaaatgaagttacaagaataccttgcctca

SEQ ID NO: 263419 - DNA, 556 bp, Unknown
  Bacterial polypeptide expressing nucleotide sequence isolated from the Sargasso Sea
tcacagactaataagtgctttagaagaaagaggttttattaaaagactagctcataaagcaagggcactagaagttgttaagctgcctgaaaccgcttccgcaaatgatatatataatagtttttcaccaagtgtaattaaaggtggtttggatgaagagaatcaaaattcagatagtaaagaagttcctgttttaggaaaaatagcagcaggtacacctattgaagcaattcaaaatgaggtgtctagagttcctttgccaagtaatattgaaaaaaatggagaatattttggcctaaaggttcaaggtgattcgatgatagaagctggcattaacgaaggtgatacagtaatagttaaaaaaacaaataccgcagacaacggcaagattgtggttgctttaatagatgatcatgaagctatgctaaaaagaattagaagaaaaggtaaaaccgtagcacttgaaagtgcaaataaaaactacgaaactaaaatatttggtcctgatagagtaaaagttcaaggtatactagtatctttatatagaaacttttaa

SEQ ID NO: 263420 - DNA, 595 bp, Unknown
  Bacterial polypeptide expressing nucleotide sequence isolated from the Sargasso Sea
tatgataaaccttactgaacaacagttcaaaattttcgatgtaattaaaggacatgtcaatgattatggctatccgccaacaagagcagaaatagcaaaaataatgggttttaaatcggtaaatgctgctgaatcacatataaaggctcttgttaagaaaggtgttttattaaaggttcctgattcatcaagagggcttaaattagtcgaagaatattcaggcattccaattgtgggtagagtggcagcaggttcacctatatctgcagttgaaaatattgaaaaatatattcctacaaatccaatttcgtctccagtggattttttcttgagagttaaaggcgacagcatgaaagatattggaattattgaaaacgatcttgtaggtgtaaaaaaagcatcgaccgcagagaatggttcggttgttgttgctagactagaggaagaagttacgctaaaaagatttgtacaagaaaatggcaaaattaaacttgtagcggaaaataaaaattataacgacattctaatagatcagaattcaggcttttctttagaaggtatagctgtaggagttgttagagaaggcgtcttataa

SEQ ID NO: 263421 - DNA, 643 bp, Unknown
  Bacterial polypeptide expressing nucleotide sequence isolated from the Sargasso Sea
tatgttaacaaaaaaacaacatgagcttttattgttcctagaggaacgaatatctttgtctggtgttacaccatcttttgaagaaatgaaaaaaaaagttggtctgaaatcaaaatcgggtattcaccggcttatttctggtcttgaggagagaggttttataaaaaagttaccctttaaggcaagagctatagaaatattaaaaccatctaacacaaagcaaagattgtcagatcataaaaacgcaaagaataaagatcatattgtcaagttgcctgtagttggaagaatagctgctgggttaccaatagaagctattgagtctggcgagaattgtttgcatgttccaaaaaaattgacgaaaggagcagacagttttgttcttgaaataaaaggcgaatcaatgatcgatgctggcataaatgatggggattttgcaattattaagaagcaaagcatagcgatcaatggagatattgtggtcgctttgacaaatgaaaatgaagctacactaaaaagattcagaaaacgtggagacactattgccttagaggctgcgaatgaagcatttgaaaccagaatatattcagcgggtcaaattactattcaaggaattttgattggcttgattaggcaatattaa

SEQ ID NO: 263422 - DNA, 364 bp, Unknown
  Bacterial polypeptide expressing nucleotide sequence isolated from the Sargasso Sea
attaggaaaaatagctgccggaacacctgttgaagcgattcaaaatgaagtttcaagaattccattgccaaataatttagaaaaaaatggtgaatattttggtttaaaagttcaaggagattcaatgatagaagctggtataaatgaaggtgatacagttattgtaaaaaaatctgatacagctgaaaatggaaaaattgtagttgccttgattgatgatcatgaagcaatgctaaaaaggattagacgaaaaggcaaaactatagcccttgaaagtgccaatagtaactatgaaactaaaatcttcggtccagatcgagtaaaagttcaaggtgttttggtatctttatatagaaacttctaa

SEQ ID NO: 263423 - DNA, 220 bp, Unknown
  Bacterial polypeptide expressing nucleotide sequence isolated from the Sargasso Sea
atgttaactaaaaaacaaaaaaacctacttttatttatcaacagaaagttaagatcttctggtgtgtctccctcatatgaagaaatgaaaaattctctaaatcttaaatcaaaatctggaatacatcgattaataagcgcattagaggaaagaggctttattaaaagattggcgcataaagctagagctttagaggttataaaactcccagaaacagcat

SEQ ID NO: 263424 - DNA, 450 bp, Unknown
  Bacterial polypeptide expressing nucleotide sequence isolated from the Sargasso Sea
tatgctaacaaaaaaacaaaaaaacctgcttttatttattaataaaaaaatcagatctactggtgtttctccttcatatgaagaaatgaaaaactccttaaatttaaagtcaaaatctggcattcataggctaatctcagcattgcaagaaagaggttttattaaaagacttgctcataaggcgagagctttagaagtgttaaaattaccagaaacagcaagcgcaaatgatatttataactctttttcccctagtgtaatccaaggtgggctagacactacaaataataaaaaaaatacaaacaatattcctgttctaggcaagattgctgcaggcactcctattgaggctatacagaatgaagtcagcaaagtagcaattcctgaagaacttagtaagaacggtgaacattttggtttaaaagtttccggcgactcaatgatcgaggc

SEQ ID NO: 263425 - DNA, 279 bp, Unknown
  Bacterial polypeptide expressing nucleotide sequence isolated from the Sargasso Sea
tatgttaactaaaaaacaaaaaaatttgctaatctttatcaacaagaagttgagatctactggaatatctccttcttatgaagaaatgaagcaatcattgaatttaaagtcaaaatctggaattcatagattgataagtgctttagaagaaagaggttttattaaaagattagctcataaagctagagccctagaagttgtaaaattaccagaaactgcttcagcaaatgatatttataacagtttttcacctagtgttattaaaggtggtttggatga

SEQ ID NO: 263426 - DNA, 553 bp, Unknown
  Bacterial polypeptide expressing nucleotide sequence isolated from the Sargasso Sea
acatagattaatttctgcattagaagaaagaggttttgtaaagcgattagcacataaagctagagcattagaggtagtaaaattgccagagaacgctagcgctaatgatatatttaatacatttacaccaagtgtaataaaaggtggattagataaaaataataataaatctactgatgtttcggtattaggaagtattgccgctggtacaccaattgaagctattcaacaagaagttgatagagttgctttaccagaagatcttcaaaataatggtgagcactatggtctcaaagtaaaaggtgactcaatgattgaagcaggtattgctgatggtgatactgttattataaaaaaagtttctaatgtagataatggtcagattgcggtagtcttaatagatgaccaggaagctactttaaaaagagtaagaaaaaaaggaaacactatcgctcttgaagcagcaaatcgaaactacggaactaaaatttacgctgcaaatagaataaaaattcaaggtaaacttgtttctttatatagaaactttcattaa

SEQ ID NO: 263427 - DNA, 559 bp, Unknown
  Bacterial polypeptide expressing nucleotide sequence isolated from the Sargasso Sea
tcatagacttatttcagctcttgaagaacgtggatttataaaaagactagcacataaagcgagagctttagaagtattgaaacttcctgaaactgctagtgcaaatgacatttataattctttttctccaagcgtaataaaaggtgggcttgacactgaaaatacaaagaaaagtgtaaacgaaattcctgtattaggcaaaattgcagctggaacaccgatagaagcaattcaaaatgaggttagcaaagtttcaattccagaagaactaagcaaaaacggtgagcattttggcttaaaaatttcaggagattctatgatagaagccggaataaatgacggtgatacagtaatagtgaaaaaaacaaacacagcagataatggtcaaattgttgttgctcttatagatgatcatgaggctatgcttaaaagaataagaaaaaaaggtaaagttgttgctcttgaaagtgcaaataaaaaatacgaaactaaaatttttggacctgatagagtaaaagttcagggcattctagtatctttatatagaaacttccaataa

SEQ ID NO: 263428 - DNA, 439 bp, Unknown
  Bacterial polypeptide expressing nucleotide sequence isolated from the Sargasso Sea
atgttaacaaaaaaacaaaaaaacctgcttttatttattaacaagaagttgagaagttctggtgtttctccgtcctatgaggaaatgaaagcttctttaaacctgaaatctaaatctggaattcatagacttataagtgctttagaggaaagaggttttattaaaagacttgctcataaagctagagctttagaggtaattaaattgccggaaacggcctctgcgaatgatatttataataatttttcaccaagcgttattaaaggtggtttagatgaggaaaatttatcctcagatgatgctgaggtgccagttttaggaaaaattgctgctggaacacctgttgaagctattcaaaatgaggtttcaagaatacctttgccaagtaatttagaaaaaaatggagattattttggtttaaaagttcaaggggactcaa

SEQ ID NO: 263429 - DNA, 497 bp, Unknown
  Bacterial polypeptide expressing nucleotide sequence isolated from the Sargasso Sea
aagagcattagaagtaatcaaacttccagaaacagcatctgcaaacgatatttataacagtttttcgcctagtgttattaaaggtggtttagatgaagaaaaaccaatgtctaatgaagcagaggttccagttttaggaaaaatagctgctggtacacctgttgaagctattcaaaatgaagtttcaagaattcctttgccaaacaatttagaaaaaaatggagactattttggtcttaaagtacaaggagattcaatgattgaagctggtataaacgagggtgacactgtaatcattagaagaacagatacagctgataatggaaaaatagttgttgcattaattgatgaacaagaagcaatgcttaaaagaattagaaaaaaaggcaaagttgtagcgttagaaagtgccaacaaaaattatgaaactaaaatttttggtccagatagagtaaaagttcaaggggttctggtatctttatatagaaacttctaat

SEQ ID NO: 263430 - DNA, 682 bp, Unknown
  Bacterial polypeptide expressing nucleotide sequence isolated from the Sargasso Sea
atgctaacaaaaaaacaaaaaaacctgcttttatttataaataaaaagatcagatctactggtgtttctccttcatacgaagagatgaaaaactcactgaatttaaaatcaaaatctggaatacatagacttatttcagctcttcaagaaagaggatttataaaaagattggcacataaagcaagagcattagaagttttaaaattacctgaaacagctagtgctaacgacatttataactctttctcaccaagtgtaatcaaaggtggcttagatgttgaaaatgataggcaaaacctaaacaaaattccagtgttaggtcagatcgctgctggtacacccatcgaagctatacaaaatgaagtgagtaaagtatctattccagaagagttaagtaaaaatggtgaacattttggtctaaaagtttctggtgactcaatgattgaagccggaataaatgatggtgatacagtaatcgtcaaaaaaagcaacacagccgataatgggcaaatagttgttgctctaattgatgaccaagaagcaatgcttaaaagaataagaaaaaaaggtaaagttgtagcacttgaaagcgcaaataaaagatatgagaccaaaatttttggtcctgacagagttaaagttcaaggcattctggtatcattgtatagaaaattccactaaa

SEQ ID NO: 263431 - DNA, 429 bp, Unknown
  Bacterial polypeptide expressing nucleotide sequence isolated from the Sargasso Sea
tatgctaactaaaaaacaaaaaaacctacttttatttatcaacaagaagttgagaagttctggtgtctcaccctcttatgaagaaatgaaacaatcacttaatttaaagtcgaaatcaggaattcatagattaattagcgcattagaggaaagaggatttattaaaagattagctcacaaagcaagagctttagaggtaattaaattgccagaaaccgcatctgcaaatgatatttacaacagtttctcacctagtgtaattaaaggtggtttggatgaagttaataataattctgatgaaatggaagttcctgttcttggaaaaatagctgctggtactccagttgaagccatacaaaatgaagtatcaagaattcctctgccaagtaatctagaaaaaaatggtgattattttggattaaaagttca

SEQ ID NO: 263432 - DNA, 430 bp, Unknown
  Bacterial polypeptide expressing nucleotide sequence isolated from the Sargasso Sea
cctggtggttggtaattttataaataattcgaatgatgataatcataaattaagtactcttccactcttaggaaaaatagctgccggtactccaattgaagctatccaacaaaatgatacatctgttgatgttccaaaagaaatgatgccaataggtgaaagttatgcattaactgttgagggcgactcaatgatcaatgaaggtattcacaatggagacactgttttaattaaaaaaactaatttagcagataatggtgaaatcgttgtcgctctaattgatgacagtgaagcaactctaaaaagaattagaaaaaaaggtcaaagcattgcacttgaaagtgctaaccctatatatgaaacaagaatcttgtctgctcatagagttaaaattcaaggtaaactaattggtcttttaagaaaatattaa

SEQ ID NO: 263433 - DNA, 247 bp, Unknown
  Bacterial polypeptide expressing nucleotide sequence isolated from the Sargasso Sea
tatgcttactaaaaaacaaaaaaacctgcttttatttatcaacaagaagttgagatctactggtgtttcaccttcatacgaagaaatgaaacagtccttaaatcttaaatcaaaatcaggaatacacagattgataagtgctttagaggaaagaggttttattaaaagattagctcataaagcaagagctttggaggttattaaacttcctgaaacagcatcagcaaatgatatttacaattcattc

SEQ ID NO: 263434 - DNA, 565 bp, Unknown
  Bacterial polypeptide expressing nucleotide sequence isolated from the Sargasso Sea
atgcttacaaaaaaacaaaaaaacttgttaatattcataaataaaaaaatcagatctactggtgtgtccccatcttatgaagaaatgaaaaattctcttaatttaaaatcaaaatcaggaatccataggttaatttctgctttggaagaaagaggatttattaaaagattagcgcataaagcgcgggctttagaggttttaaaacttccagaaacggcaagcgccaatgatatatataactctttttcaccaagtgtaataaaaggtggattggactctgacaatacaaaaaaaggtataaaagaaattccagtactaggtaatattgctgcgggaacaccgattgaagcaatacaaaatgaggtgagtaaagtcactcttccagaagaacttagcaaaaatgacgaacattttggcttaaaaatttcaggagattcaatgattgatgctggaattaatgatggtgatacagtaattgtaaagaaagccaacacagcaaacaatggacaaatagttgtcgctttaattgatgatcaagaagctatgcttaaaagaataagaaaaa

SEQ ID NO: 263435 - DNA, 263 bp, Unknown
  Bacterial polypeptide expressing nucleotide sequence isolated from the Sargasso Sea
tatgttaactaaaaaacaaaaaaatctgcttttatttatcaacaagaagttgagatctagtggtgtatctccttcttatgaagaaatgaaagaatcactaaacctaaagtctaaatctggaattcatagattaattagtgccttagaagaaagaggttttatcaaaagattggcacataaagcaagagctttggaagtcattaaattacctgaaacagcttcagcaaatgatatttacaacaactttttcaccagtgtaatta

SEQ ID NO: 263436 - DNA, 343 bp, Unknown
  Bacterial polypeptide expressing nucleotide sequence isolated from the Sargasso Sea
atgctaacaaaaaaacaaaaaaatttattaatgtttatcaacaagaagttgagaagttctggtgtatctccttcttatgaggagatgaaagaatcgttaaatttgaagtcaaaatctggaattcatcgtttaataagtgccttggaagaaagaggttttataaaaagattagcacataaagctagagctttagaggttgttaagctacctgaaaccgcttctgcaaatgatatttataactctttttcacctagtgtaataaaaggtggtttagatgatgaaggtatagaaaaaaatgaagttcctgtcctcggtaaaatagctgcgggaacgcccagttgaa

SEQ ID NO: 263437 - DNA, 245 bp, Unknown
  Bacterial polypeptide expressing nucleotide sequence isolated from the Sargasso Sea
tatgcttacaaaaaaacaaaaaaacttattaatttatataaataagaagattagatcgtcaggaatttctccttcttacgaggaaatgaaaaattccctcaaccttaagtcgaaatcaggtattcatagattaatttctgcactagaggaaagaggatttgtcaaaagactagctcataaagctagagctctcgaagttgttaaattacctgaaaatgcaagtgctaacgacattttcaattcat

SEQ ID NO: 263438 - DNA, 409 bp, Unknown
  Bacterial polypeptide expressing nucleotide sequence isolated from the Sargasso Sea
atgcttacaaaaaaacaaaaaaacttattaatatttattaataaaaaaatcagatcttcaggtatttctccatcttatgaggaaatgaaaaattcactcaacttgaagtcgaaatctggtattcacagattaattagtgccctagaagaaaggggctttgtaaaaagattagctcacaaagcaagggctttggaagtggttaagctcccagaaaatgctagtgctaatgatatttttaattctttcacaccaagcgtaattaaaggtggtttagataaatctaaaagcaactcttctaaagtttctgtcttgggaagtattgcagctggtactccaatagaagctatacaacatgaagttgataaagttgctttacctgaagattgcaaaaaaatggtgaatattttgg

SEQ ID NO: 263439 - DNA, 199 bp, Unknown
  Bacterial polypeptide expressing nucleotide sequence isolated from the Sargasso Sea
atgttaactaaaaaacaaaaaaatctgcttctatttatcaacaaaaagttgagatccacgggtgtttccccttcgtatgaagaaatgagagaatcattgagtttaaaatcaaaatctggaattcacagacttattagtgcattagaggaaagaggctttattaaaagattagcccataaggctagagcattagaagtaa

SEQ ID NO: 263440 - DNA, 293 bp, Unknown
  Bacterial polypeptide expressing nucleotide sequence isolated from the Sargasso Sea
tatgctaacaaaaaaacaaaaaaacttattaatatttatcaataagaagatcagatcttcaggtatttcgccgtcttatgaggagatgaaaaattcactcaaccttaagtcgaaatcaggaatacatagattaatttctgctttagaagaaagaggttttgttaagagattagcacataaagcaagagcgttagaagtggttaaattaccagaaaacgcgagcgctaatgatatatttaatacattcacaccaagtgttatcaaaggtgggttagataagaataataaaaaat

SEQ ID NO: 263441 - DNA, 133 bp, Unknown
  Bacterial polypeptide expressing nucleotide sequence isolated from the Sargasso Sea
aaaaaaggtaatttagtctacctacatgccgagaatgaagactattcaccgattaaagtcgatttgagtttccaaagtctaacaattgaagggctcgccgtaggggtgatccgcaatggagattggctatgaa

SEQ ID NO: 263442 - DNA, 691 bp, Unknown
  Bacterial polypeptide expressing nucleotide sequence isolated from the Sargasso Sea
atatttgttcttatgcttacaaaaaaacaaaaaaacctactcttatttataaacaaaaaattaagaagttcaggtgtgtcaccttcttacgaagaaatgaaagaatcactcaacttaaaatctaaatcaggtattcatagattaattagtgcacttgaagaaaggggctttataaagaggctagctcataaagcaagagcattagaggtaattaaactgcctgaaacagcttcagcgaatgatatttataacagtttttctcctagtgttataaagggtggtctagacacaaatagtcatgataatggaaatgatttacctgttcttggcagtatagctgcgggtacaccaatagaagctattcagaatgaagtaacaagaattcccttgccagaaaacattgagaatgatggagaattttttggtcttaaagtaagtggagactctatgattgacgctggaattaatgatggagatacagttgtaataaagaaaactgaaaccgcagaaaatggtaaaatagttgtcgcgttaatagatgaccacgaagctatgcttaaaagattgagaagaaaaggtaaaaccgtagctttggaaagtgccaatagaaattacgaaacgaagatatttggtccagatagagtaaaagtacaaggtgttcttgtatctttatatagaaactttcactaaa

SEQ ID NO: 263443 - DNA, 352 bp, Unknown
  Bacterial polypeptide expressing nucleotide sequence isolated from the Sargasso Sea
atgctaacaaaaaaacaaaaaaacttgcttttatttatcaacaagaagttgagaagctccggtgtttctccatcttatgaggaaatgaaagcttctttaaacctgaaatctaaatctggaattcatagacttataagtgcattagaggaaagaggttttattaaaagacttgctcataaggcaagagcattagaagtaattaaattgccagaaacggcctcagcaaacgatatttataacagtttttccccaagcgttattaagggtggtctagatgaggaaaatttatcttcagatgatttagaagtgccagttctaggaaaaattgctgctggaacacctgtgaagctat

SEQ ID NO: 263444 - DNA, 532 bp, Unknown
  Bacterial polypeptide expressing nucleotide sequence isolated from the Sargasso Sea
ggttttattaagaggttggctcataaagctagagctctagaagttataaaacttccagaaacagcttctgcaaatgatatttataatagtttttcacctagcgtaataaaaggtgggctagatgatactaattcaaaaaataaagacgaacaagatatacctgttcttgggaatatagctgctggtagtcctgtagaagcaattcagaacgaagtatctagaattcctttacctagcaatatagaaaaaaatggtgagttttttggattaaaagttcaaggtgactccatgatagaagcaggtattaatgatggggatactgtaattgttaaaaaaacagatacagctgataatgggaaaattgttgtagctttaattgatgaccatgaagcaatgttaaaaagaattagaagaaaaggcaaaactattgctttagaaagcgcaaatagaaactacgaaactaaaatatttggtccagatagagtaaaagtacaaggtatacttgtatctttatatagaaactttcagtaaa

SEQ ID NO: 263445 - DNA, 196 bp, Unknown
  Bacterial polypeptide expressing nucleotide sequence isolated from the Sargasso Sea
tatgcttacaaaaaaacagaaaaatttattaatatttataaataaaaaaattagatcctcaggtatttctccgtcatatgaggaaatgaaaaattcactcaacttgaagtcgaaatctggtattcacagattaataagcgccttagaagaaaggggatttgtaaaaagattagctcataaagcaagagccttagaa

SEQ ID NO: 263446 - DNA, 340 bp, Unknown
  Bacterial polypeptide expressing nucleotide sequence isolated from the Sargasso Sea
cctggtggaagcaattcaaaacgaagtatcaagaatacctctacctattaatttagaaaaaaatggtgattattttggattaaaagtccaaggtgattcaatgattgaggctggaattaatgaaggtgatactgttattattaaacgaacagacactgctgataatggaaaaatagtagtagctttaattgatgaacatgaagctatgcttaaaagaattagaaaaaaaggtaaagtggtagcacttgaaagtgcaaacaaaaactacgaaactaaaatttttggcccagatagggttaaagtacagggcgtattagtatctttatatagaaacttctag

SEQ ID NO: 263447 - DNA, 406 bp, Unknown
  Bacterial polypeptide expressing nucleotide sequence isolated from the Sargasso Sea
ttcaaatcaaaataagacagatgaaaatgaaatacctgtattaggtaaaattgctgcgggcacacctgttgaagcaattcaaaacgaagtttctagaatacctttgcctaccaatattgagaaaaacggagaattttttggactaaaagtgcaaggagattcaatgattgaggccggaataaatgatggtgatacagtaatagtgaaaaaagccgatacagccgaaaatggaaaaatagtagtcgcgttaattgacgatcatgaagcaatgctaaaaagaataagaagaaaaggtaagactgtagctttggaaagcgctaatagaaattatgaaactaaaatatttggtcctgatagagtaaaagttcaaggaattctagtatctttatatagaaacttttcctaa

SEQ ID NO: 263448 - DNA, 490 bp, Unknown
  Bacterial polypeptide expressing nucleotide sequence isolated from the Sargasso Sea
agaagtaataaagcttccagaaactgcatctgcaaacgatatttataattctttttcaccaagcgtaataaaaggaggcttggatgatagtaatttacaaaaaaataatacagatattcctgttttaggaaatatagcggcaggaactccaatagaagcaattcaaaatgaagttactagaatacctcttcctgaaaatatagaaaaaaatggagaattttttggtctaaaagtccaaggagactcaatgattgaagcaggtatcaatgatggtgacacagtaatagtcaaaaagacagatactgcagaaaatggaaaaattgtggtagcattaatagatgatcaagaagctatgttaaaaagaataagacgaaaaggcaaaacagtagcgctagaaagtgcaaatagaaattatgaaactaaaatatttggtccagatagggtaaaagttcagggtattttagtatctttgtatagaaacttccattaa

SEQ ID NO: 263449 - DNA, 547 bp, Unknown
  Bacterial polypeptide expressing nucleotide sequence isolated from the Sargasso Sea
ataagtgctttagaggaaagaggttttattagaaggttagcgcataaagctagagctctagaagtaataaaattaccagaaaccgcttctgcaaatgatatttataatagtttctctccaagtgtaattaggggtggattagatgaggaaacacaaaataatgaaaatcctgaaataccagttttaggaaaaattgctgctggaactccaattgaagctatacaaaatgaagtttccaggatacctctgccatctaatttagaaaaaaatggtgaattttttggattaaaagttcaaggagactcgatgatagaggctggtataagtgaaggtgatactgtaattattaaaaaaacagatactgcagacaacggcaagattgtagttgcgctaatagatgaccatgaagcaatgttgaaaagaattagaagaaaaggaaaaacagttgctttagagagtgccaataaaaattacgagacaaaaatatttggcccagatagagttaaagttcaaggtgttcttgtatctttatatagaaacttttaat

SEQ ID NO: 263450 - DNA, 589 bp, Unknown
  Bacterial polypeptide expressing nucleotide sequence isolated from the Sargasso Sea
tatgttaacaaaaaaacaaaaacaacttctaaattatattggcacttttcaaagtagaaatggcgtcactccatcgtatgaggaaatgaaagatgcgttggcacttaaatctaaatcaggtattcatagattgatattggcacttgaagaaagaggctttgtcaaaagacttgctcacaaggcgagagcccttgaaattataaaagatggtattaccaacttagatctatcttcctatagaaagaatgttgttattgcagattttaaagaacaatctcttaatctatctgaaaacaaagtaagcacaattccgatgcttggaaaaatagctgctggaactccaattgaagcaatccaacataatgaagatatgattgatgtgccgagagaactcatgtcagtaggtgaatcttatgccctaaaagttgagggagactcaatgattaatgagggaatacatgatggggacactgttttaatcaaaaaaactaaccttgctgaaaatggagatattgttgttgcactaattgatgatcatgaagcgactttaaaaagattaagaaaaaagggtcaaagtattgccctgaaa

SEQ ID NO: 263451 - DNA, 460 bp, Unknown
  Bacterial polypeptide expressing nucleotide sequence isolated from the Sargasso Sea
ctctgcaaatgatatttacaacaacttttctccaagtgttataaaaggtggtttagacgaagatcaagcaccatctgatgaagtagaagtaccagtgcttggtaaaatcgctgctggaacaccagttgaagcaatccaaaacgaagttgctagaatacctttgccaaataatttagagaaaaatggggattactttggtttaaaagttcaaggcgactctatgatagaagctggcattcatgagggtgatacagttattatcagaagaacagatactgcagacaatggaaagattgtagttgctttgattgatgaacatgaagcaatgcttaaaagaattcgcaaaaaaggtaaagtagtcgctttagaaagcgcaaatagaaattacgaaaccaaaatttttggacccgatagagttaaagttcagggtgtattggtatctttatatagaaacttctaa

SEQ ID NO: 263452 - DNA, 607 bp, Unknown
  Bacterial polypeptide expressing nucleotide sequence isolated from the Sargasso Sea
aatgctaacaaaaaaacaaaatgaattgctgatatatatacatcagaatttaagagaaactggtgtcgctccttcttatgaagaaatgaaggaagctttagatttaagatccaagtcaggaatacatagattaattaatgcacttgaagaacgaggatttataagaagattagctcatagggcaagagccatagaaattataaaattgcctacttcaagtactgtaaattccaaaggtaattttaaacctgaagttattgagggcaataaagaaaaagatctttttagtctgaatgaagagtcaattgaagttagaatgatgggaaaaattgctgcaggtacacctatagctgcaattgagtacgaaaaaaataaaatctctgttccgggaagtatgattggtactggagaccattatgctctagaaattgaaggtgactcaatgattggtgcaggtattcttgataatgataaagctattatcaaaaaagttgatgatgcactatcagggcaaattgtcgttgcacttgttgatggtgaagaggctacattaaaaagacttaaaaaaaagggaaacactattgctcttgaacctgccaatccagca

SEQ ID NO: 263453 - DNA, 210 bp, Unknown
  Bacterial polypeptide expressing nucleotide sequence isolated from the Sargasso Sea
tatgcgtccattaacaccacgacaagccgaaattctgcaattgcttaaagattatcaggccgcctcaggtatgccgccaacacgggctgaaattgcgacccagcttgggtttaagtctgccaatgccgcggaggagcatttaaaagcactggcgaaaaaaggttttatcgaaatgatgcctggcacctcccgtggtatccgtttggttga

SEQ ID NO: 263454 - DNA, 581 bp, Unknown
  Bacterial polypeptide expressing nucleotide sequence isolated from the Sargasso Sea
catgcctgataatccactaacaaaaagacagtcccagatcttggaatacatagacagcgcaattcgtgataaaggctaccctcccactgtgcgtgaaatcgggcaagctgttggactcaattctccatctactgtccacaatcaccttaatacccttcaagataagggctaccttcgtcgggacccaacaaaaaacagggccatcgaagtccattgggatgctggttcaggagctgtgattgacaggcgacccgttactcatgtacctcttgttggcgatgtcgcggcaggatctggcgttctcgccgcgcaaaatgttgaagaagtcatgcctctcccctcagacctgaccggagagggcgatttatttatgctaagagtacgtggtgactcaatgattgaagctggaatttttgatggtgactttgtcgtggcaagaaaacaggaaacagccgatccaggtgagatagtcgttgcagggatatccggcgaagaagcgaccgtaaagacttttaatagagaagggtcttgcatagttctcgaaacagcaaatgcaacgatgtcacctatgcgatttgaaa

SEQ ID NO: 263455 - DNA, 391 bp, Unknown
  Bacterial polypeptide expressing nucleotide sequence isolated from the Sargasso Sea
tatgctaactaaaaaacaaaaaaatttgcttttatttatcaataagaagttgagatcttcagggatttcaccttcgtatgaggaaatgaaggaatctttaaaccttaaatcaaaatctggaatccatagattaattagtgcacttgaagaaagaggttttatcaaaagattagctcataaggctagggcgctagaggtagttaaacttcctgagacagcttcagcaactgatatttataatagtttttctcctagtgttataaaaggcggtttagacgaagataatttaaaaaacggtgatgctatcgaagtctctgtattgggtaacatagctgctggaacacctatagaggctattcaaaatgaggtttctagagttcctttgccaagt

SEQ ID NO: 263456 - DNA, 202 bp, Unknown
  Bacterial polypeptide expressing nucleotide sequence isolated from the Sargasso Sea
atgttaactaaaaaacaaaaaaacctgcttctctttatcaacaaaaagttgagatctacaggtgtgtccccttcatacgaggaaatgaaagaatcgttaaatttaaaatcaaaatccggcattcacagacttattagtgcattagaagaaagaggcttcattaaaagattagcccacaaagcgagagcattagaagtaatta

SEQ ID NO: 263457 - DNA, 331 bp, Unknown
  Bacterial polypeptide expressing nucleotide sequence isolated from the Sargasso Sea
gcaattcaaaatgaagttgccagaattccattaccagaaaatatagagaaaaaaggcgaatattttggattgaaagttcaaggagattctatgattgaggcaggaattaatgatggcgatacagttgttataaaaaaaacagaaacagcagataacggaaaaatcgtagttgctctaattgatgaccatgaagcaatgcttaagagaataagaagaaaaggcaaaactatagctttggaaagcgcaaatagaaattacgagactaaaatatttggtcctgatagagtaaaagttcagggtgtgcttgtatctttatatagaagtttctaaa

SEQ ID NO: 263458 - DNA, 372 bp, Unknown
  Bacterial polypeptide expressing nucleotide sequence isolated from the Sargasso Sea
ttccagttttaggaaagattgctgctggtacgccagttgaagctattcaaaatgaagtgagcagaattccccttccggcaaatattgagaaaaatggagaattttttggccttaaagttcaaggtgactctatgatagaagctggaataaataatggtgatacagttattgtaaaaaaagctgatactgctgagaatggaaaaattgtggttgcattaattgatgaccatgaagcaatgctgaaaagaattagaagaaaaggtaaaactatagcgttagagagtgcaaatagaaatttcgaaactaaaatttttggtcctgatagagtaaaggttcaaggtgttctagtatctttatatagaaacttctaaa

SEQ ID NO: 263459 - DNA, 256 bp, Unknown
  Bacterial polypeptide expressing nucleotide sequence isolated from the Sargasso Sea
gttcaaggcgactcaatgattgaagcgggtattagtgagggtgacacggtaattgttaaaaaaactgatacagcagaaaatggaaaaattgttgttgcgttaatagatgaccatgaagctatgcttaaaagaataagaagaaaaggaaaaacaatagcacttgagagtgcaaacaaaaattacgagaccaaaatctttggtccagatagagtaaaagtccagggtgttctagtatctttgtatagaaacttctaaa

SEQ ID NO: 263460 - DNA, 433 bp, Unknown
  Bacterial polypeptide expressing nucleotide sequence isolated from the Sargasso Sea
agcgttattaagggaggactagatgaggaaaatttaaataattctaaagatgtagaaatccctgttcttggaaaaattgctgcaggaactccagttgaagctatacagaatgaagtttcaagaattccactgccagcaaatattgaaaaaggtggagaattttttggtttaaaggtccaaggggattctatgattgaagctggaattaatgatggtgatactgttattgtcaaaaaagcggatactgccgataatggaaaaattgtagtagcattaatagatgatcatgaggctatgttgaaaagaattagaagaaaaggtaaaactgttgcattagaaagtgcaaatagaaattacgaaacaaaaatttttggcccggatagagtgaaagttcaaggaattcttgtatctttatatagaaactttcagtaaa

SEQ ID NO: 263461 - DNA, 331 bp, Unknown
  Bacterial polypeptide expressing nucleotide sequence isolated from the Sargasso Sea
atgctaacaaaaaaacaaaaaaacttattaatattcataaataagaagataagatcttcaggaatttctccgtcttacgaagaaatgaaaaattcactcaacctcaagtcgaaatcaggaatacatagattaatttctgcattagaagaaagaggttttgttaagcgattagcacacaaagctagagcattagaggtagtaaaattgccagagaatgctagcgcaaatgatatatttaatactttcacaccaagcgttatcaaaggtggattagataaaaatatcaataaatctactgatgtttcggtaataggaagtatgccgctggtac

SEQ ID NO: 263462 - DNA, 321 bp, Unknown
  Bacterial polypeptide expressing nucleotide sequence isolated from the Sargasso Sea
atgaagtttcaagaattccattaccgaataatttagaaaaaaatggagattattttgggttgaaagttcaaggagattcaatgattgaagctggtatccacgaaggagatacagttattattaaaagaacagatacagcagataatggaaaaattgtggtcgcattaattgacgaacatgaggcaatgttaaaaagaattcgtaaaaaaggtaaagttgttgcattggaaagtgcaaatagaaactatgaaaccaaaatatttggacctgatagagtaaaagttcaaggtgttttagtatctttatatagaaacttttaaa

SEQ ID NO: 263463 - DNA, 175 bp, Unknown
  Bacterial polypeptide expressing nucleotide sequence isolated from the Sargasso Sea
tatgcgtccactaacaccacgacaagccgaaattttgcaactgcttaaagattatcaggccgcttcaggtatgccgccgacccgtgctgaaattgctactcagttgggatttaagtctgccaacgctgctgaagagcatttaaaagcgctggcgaaaaagggtttattgaaatga

SEQ ID NO: 263464 - DNA, 471 bp, Unknown
  Bacterial polypeptide expressing nucleotide sequence isolated from the Sargasso Sea
tatgctaacaaaaaaacaaaaaaacttattaatttatataaataagaaaattagatcttctggaatttctccttcatatgaggaaatgaaaaattctctcaacctgaagtcgaaatctggtattcatagattgatttcagctcttgaagaaagaggatttgttaaaagacttgctcataaagcaagagctcttgaggtagttaaattgcctgagaatgcaagcgccaatgatattttcaattcttttacaccaagtgtaataaaaggtggtttagataaaagtaagaaaaattcaagcaaagtttctgtgttaggtagtattgcagcaggaactcctatagaggcaatacaacaagaagttgataaagttgctttacctgaagacctacaaaataacggagaacattttggtctaaagataaaaggagactctatgatcgaagcaaggattaaatatggagacacagttat

SEQ ID NO: 263465 - DNA, 379 bp, Unknown
  Bacterial polypeptide expressing nucleotide sequence isolated from the Sargasso Sea
atgcttacaaaaaaacaaaaaaatttattattatttattaacaagagattaagatcctctggtgtttccccctcttatgaagaaatgaaacattctttaaatttaaaatcaaaatcaggtattcatagattgataagcgctttagaagaaagaggttttataagaagattggcccataaagcaagagctttagaggtaataaaacttccagaaacagcttcagcaaatgatatttataatagcttttctccaagcgtaattaaaggtgggttagataatgatgatagagataaagagaatacggaaatacctgttttaggaaaaattgctgctggaacaccagttgaagcaatacaaaatgaagtttctagaatacctt

SEQ ID NO: 263466 - DNA, 265 bp, Unknown
  Bacterial polypeptide expressing nucleotide sequence isolated from the Sargasso Sea
tatgttaactaaaaaacaaaaaaaccttttactttttataaataaaaagattagaggcactggtgtgtctccttcttatgaggaaatgaaatcctcattaaatttaaaatctaaatcaggaatacataggttaataagtgctttagaggaaagaggattcattaaaagattagctcataaagctagagccttagaggttgtaaagttaccagagactgcttctgcaaatgatatttataactctttttcacctagtgtaattagg

SEQ ID NO: 263467 - DNA, 553 bp, Unknown
  Bacterial polypeptide expressing nucleotide sequence isolated from the Sargasso Sea
atgcttactaagaaacaaaaagagctactaacttacattcaaagctttcaaaataaaaatggggtcacaccttcttatgaggagatgaaaatggccctgaatttaaagtccaagtctgggatccatagattaattatagcattggaagaaagaggttttgttaaaagacttgctcataaagcaagagcgcttgaaataattaaggatggtatatcaaatattaaattatcgaataataataaaaagaatttaattattggcaacttcacaaataagaatatcgatacatcaaacagcaaattaagtactttaccattattagggaaaatagctgccggcacacccattgaagcaatacaagataacgacacatctgttgatgtacctaaagaaatgatgcctattggtgaaagctatgcattaactgttgagggagactcaatgattaatgagggaatacatgacggtgatacggtgctcattaaaaaaactaatttagcagaaaatggagatataatagtagctttgattgatgataatgaggcaacttaaa

SEQ ID NO: 263468 - DNA, 649 bp, Unknown
  Bacterial polypeptide expressing nucleotide sequence isolated from the Sargasso Sea
atgctaacaaaaaaacaaaaaaacctgctcttatttataaataaaaaaatcagatccacaggtgtttctccgtcctacgaagaaatgaaaaactcacttaatttaaaatcaaaatctggaattcataggcttatttctgctcttcaagaaagaggatttataaaaagattagcgcataaagcaagagcattagaagttttaaaactacctgagacagctagcgcaaacgatatttataactctttttccccaagtgtaattaaaggtggtttggatattgaaaatgataaacaaaacctaaataaaattccagtactaggccaaattgctgcgggaacaccaattgaagctatacaaaatgaagtaagtaaagtagctattccagaagagctaagcaaaaatggagaacattttggtctaaaagtttctggagactctatgattgaagctggaataaatgacggtgatacagtaatcgtcaaaaaaagcaacacagccgataatggacaaatagtcgttgctctaattgatgaccaggaagcgatgcttaaaagaataagaaaaaaaggtaaagttgtagcgcttgagagtgcaaataaaagatatgagactaaaatttttggccctgacagagtaaaagttcaaggca

SEQ ID NO: 263469 - DNA, 379 bp, Unknown
  Bacterial polypeptide expressing nucleotide sequence isolated from the Sargasso Sea
tatgctaacaaaaaaacaaaaaaacctgcttttatttatcaacaagaagttgagaagttctggtgtatctccttcttatgaagaaatgaaagagtcattaaatctaaaatctaaatctgggatacatagactaattagcgctttagaagagagaggttttattaaaagattagctcacaaagcaagagctttagaggttattaaattaccggaaactgcttctgctaacgatatttataatagtttttctccaagtgtaattaaaggtggtttagacgaagaaaaaccaatgtctgatgatgtagaagtgcctgttttaggaaaaatagctgcaggaacacctgtagaagctattcaaaatgaggtttccagaattcca

SEQ ID NO: 263470 - DNA, 394 bp, Unknown
  Bacterial polypeptide expressing nucleotide sequence isolated from the Sargasso Sea
tatgcttacaaaaaaacaaaaaaacctgcttttatttatcaacaaaaagttgagaagttctggtgtttctccatcttatgaggaaatgaaagcttcattaaaccttaaatctaagtcaggaattcatagacttataagtgcattagaagaaagaggttttattaaaagacttgctcataaagcaagagctttagaggtgatcaaattaccagaaacagcttcagcaaacgatatttataatcatttttcacccagtgtaataaaaggcggtctagatactgaaaaaaatttatcctctgaaacagaggttccagttttaggcaaaatcgctgctggaactccagtggaagcaattcaaaatgaagtttcgagaatacctttgccagctatttag

SEQ ID NO: 263471 - DNA, 679 bp, Unknown
  Bacterial polypeptide expressing nucleotide sequence isolated from the Sargasso Sea
aatgttaacaaagaaacaaaaagaattattaaattatattcagaagttccaaagtaaaaatggtgtaactccttcttatgaggagatgaagtctgcacttaatttgaaatcaaagtcaggaattcacagattaattttagcacttgaagaaagaggatttgtaaaaagattagctcataaagcaagagcacttgaaataataaaagatggaatatcaaacattaaggtttctgaaaaaaataaaaataaccttgtggttggtaattttataaataatgtaaaagaggatagtcataaattaagcactcttccacttttgggtaaaattgcagctggtactccaattgaagccattcaacaaaatgatacatctgttgatgttccaaaagaaatgatgccaataggtgaaagttatgcattaacagttgaaggtgactcaatgatcaatgaaggtatccacaatggagatactgttttaattaaaaaaactaatatagcggataatggtgacattgttgttgccttaattgatgacaatgaagcaactttaaagagaattagaaaaaaaggtcaaagtatagcacttgaaagtgctaaccctatttatgaaacacgaatcttatctgctcatcgagtcaaaattcagggtaaattaataggtcttcttagaagatattaa

SEQ ID NO: 263472 - DNA, 613 bp, Unknown
  Bacterial polypeptide expressing nucleotide sequence isolated from the Sargasso Sea
tatgaaaaatttaacggtgaaacagcagcagattcttgagtatattaaagatcacttgaatttaactggttttcccccaacaaggtcagatattgctaatgagatgggatataaatctcccaatgcagcagaagatcatttgagagctttggcccgcaaaggagcaatagagattataccgggtacatcgaggggtatacgtcttcctatcaatgaacaactaggcttaccaataatagggcaagttgccgctgggttccctattctagcggaagaatcgatcgcgggttactcagaggtcccatcaagtttctttacaccttccgccgactacctattgactgttaaaggcagcagcatgatagatattggtatatttgaggatgacttgttagctgttcataaaactgaccaggctataaacggcgatattgtagttgcacgtatcgacaacgaggtcaccgtaaagcgcttcgagtatcaaaaagggaactctaaaataagactcatagctgaaaatccagacttcgcacccattaatgttaatttggaagaagatgatttttctattgagggaatatccgtaggtgttattcgccgttcaatgtcataa

SEQ ID NO: 263473 - DNA, 595 bp, Unknown
  Bacterial polypeptide expressing nucleotide sequence isolated from the Sargasso Sea
tatgataaaccttactgaacaacagtttaaaattttcgatgtaattaaaggacatgtcaatgattatggctatccgccaacaagagcagaaatagcaaaaataatgggttttaaatcggtaaatgctgcagaatcacatataaaggctcttgttaagaaaggagttttattaaaggttcctgattcatcaagagggctcaaattagtcgaagaatattcaggtattccaattgtgggtagagtggctgcaggttcacctatatctgcagttgaaaatattgaaaaatatgttcctacaaatccaatttcatctccagtggattttttcttgagagttaaaggtgacagcatgaaagatattggaattattgaaaacgatcttgtaggtgtaaaaaaagcatcaaccgcagaaaatggctcggttgttgttgctagacttgaggatgaagttacgcttaaaagatttgtacaagaaaatggcaaaattaaacttgtagctgaaaataaaaattatgacgacattcttattgatcagaattcaggcttttctttagagggtatagctgtaggagttgtcagagaagacgtcttctaa

SEQ ID NO: 263474 - DNA, 412 bp, Unknown
  Bacterial polypeptide expressing nucleotide sequence isolated from the Sargasso Sea
atgctaacaaaaaaacaaaaaaacctgcttttatttatcaacaagaagttgagaagttccggtgtatctccctcatatgaggaaatgaaacaatcattaaatttaaaatctaaatcgggtattcacagattaattagtgctttagaagaaagaggatttattaaaagactagctcataaagcaagagcattagaggtaattaaattaccagaaacagcatcagcaaatgatatttacaacagcttttcacctagtgttattaaaggtggtttagatgaagaaaaacctatgtctgatgacatagaagtgcctgttttaggaaaaatagctgcaggaacacctgtagaagcaattcagaacgaagtgtcaagaatacctctacctagtaatttagaaaaaaatggtgattatt

SEQ ID NO: 263475 - DNA, 535 bp, Unknown
  Bacterial polypeptide expressing nucleotide sequence isolated from the Sargasso Sea
agaggattcatcaagagacttgctcataaggcaagggccttagaagtagttaaactaccagaaactgcttcagcaaatgacatttataatagcttttctccaagtgttattaaaggaggtttagacgattctaatctaaaaaataaagatggaagtgatatacctgttttaggaaatatcgcggctggaacacccgttgaagccattcaaaatgaagttactagaatacctttgccaagtaatattgaaaaaaatggagaatattttggactaaaagttcaaggggattctatgatagaagccggtatcaatgatggtgatactgttattgttaaaaaaacagatacagcagataatggaaaaattgtagtagcactaattgatgaccatgaagcaatgttaaaaagaataagaagaaaaggtaaaacagtagcattggagagtgctaatagaaattacgaaacaaaaatattcggtcctgatagagtaaaagttcaaggaatacttgtatctttatatagaaactttcaataaa

SEQ ID NO: 263476 - DNA, 607 bp, Unknown
  Bacterial polypeptide expressing nucleotide sequence isolated from the Sargasso Sea
atgaaaactttaactaatagacagaaagaaatattagatttaatcaaatcatatatcgtggattatggctttcctcctactcgagctgaaatctctaaaatactgggatttaagtcagctaatgcagctgagcagcacctcagagcaattgaaaagaaaggatacattcaaatattgtctggtgcttcaagaggtatcgtcctaagtgaagacgaagaaatgggtataccagttattggtcttgtagctgccggtggtcctattttggctcaagaaaatattgaaaaaagagtgcctgtatcacaaagccttttaacagaaagtgttgattattatcttagagtgaaaggcgacagcatgattgatgttggtatatacgaagaagatcttattggtgttaagaaaactgctgatatcaaagtaggtaaagtggtcgtggcgaggattaatgacgaagtgacagtaaaaactcttaagaaattttcttcagaagaagttattttaaaagcagaaaataagaattattctgatataaaagttaacccattgatagataaattaaacttcgaaggtacttgtgttggtttgttaagaaatctttcttagc

SEQ ID NO: 263477 - DNA, 613 bp, Unknown
  Bacterial polypeptide expressing nucleotide sequence isolated from the Sargasso Sea
atgaatgatttgactccaaaacaacgtatcgtcctgaatatgataagagattttatggatgaatacggtatacctcccacgaggatggaaattgcgactgagctaaaatttaaatcacctaactctgcagaagaacacttgagagcacttcagaaaaaaggtgtaattgaattgataaaatcttcgtccagaggaataagactcaaagattcattaagagagcagattggtcttccattaatagggcaggtagcagcaggaaatccagtatttgcagaagaaaattttgaatcttatgtgaatattgatccgaattactttagtccgaagcctcactatttgcttaggataaatggaatgagcatgaaagatgccggtatttttgataatgatattgttgctgttcatagaaccagtgaaataagaagtcgtcaaattgttgtagccagaataaatgatgaggttactgtaaaaagatatactcaaaataactcgatagtcacattgctccctgaaaatgatgaatttttaccaatcaatgttgatctagaatcagaagaaatggttatagagggcgtagtagttggggtgcttagatcaaatgttgaataac

SEQ ID NO: 263478 - DNA, 328 bp, Unknown
  Bacterial polypeptide expressing nucleotide sequence isolated from the Sargasso Sea
tatgctaacaaaaaaacaaaaaaacctgcttttatttatcaacaagaagttgagaagttctggtgtttctccatcttatgaagaaatgaaagcttcattaaaccttaaatctaagtcaggaattcatagacttataagtgctttagaggaaagaggttttataaaaagacttgctcataaagctagagctttagaagtaattaaattgccagaaacagcttctgcgaatgatatttataataatttttcaccaagcgtgatcaaaggtggtttagatgaggaaaatttatcctcagatgatgctgaggtgccagttttaggaaaaatt

SEQ ID NO: 263479 - DNA, 679 bp, Unknown
  Bacterial polypeptide expressing nucleotide sequence isolated from the Sargasso Sea
atgttaacaaaaaaacaaaaaaacctgttactttttataaataaaaaaattagaggcactggtgtgtctccttcttacgaagaaatgaagtcttctttaaatttaaaatctaaatctggtattcacagactaattagtgcgttagaagaaagaggttttattaaaagattagcacataaggctcgtgcactagaagttgtaaaattgccagaaacagcttctgctaatgatatttataattctttttcaccgagtgtaatcaggggcggtttaagcgatataagtaaaagcaaaaaaaacgaaatatctgtattaggaagtattgcagctggaactcctatagaagctatccaaaatgaagtttcaagaattcctttaccatcaaacatagaaaataatggtgaattttttggcttgaaggtaaaaggagactcaatgacagaggctggaattaatgatggcgatacagtaattattaaaaaggctgataaagccgaaaacggaaaaattgtagttgctttaattgatgaccatgaggcaatgttaaaaagaataagaattaaaggtaaaactgttgcattggaaagtgctaacaaaaattacgaaacaaaaatctttggcccagatagggtaaaagtccagggtgtgttgatatctttatatagaaacttcaactaaa

SEQ ID NO: 263480 - DNA, 196 bp, Unknown
  Bacterial polypeptide expressing nucleotide sequence isolated from the Sargasso Sea
caccccgacggcgcgagatggccagattgtggtcgcgcgaatggaggatgaagtgactgttaaacgaatcaagcggtctgggcaacacaccttgaagttactgccggaaaataaggacttcgagcccatcgtggtggacctgcgtagcaccgaatgcgccatcgaaggcatcagtgtcggcattattcgtcattag

SEQ ID NO: 263481 - DNA, 363 bp, Unknown
  Bacterial polypeptide expressing nucleotide sequence isolated from the Sargasso Sea
tatgcttacaaaaaaacaaaaaaacttattaatttttattaataaaaaaattaggtcaactggtgtttctccttcatatgaggaaatgaaaaattcgctcaaccttaagtcgaaatctggtattcatcgcttaatatcagcgttagaagaaagaggttttattaaaagattagcacataaagctagagctctcgaggtcatcaagcttccagaaacagcaagtgcacatgatttattcaacagttttactccaagtgtgataaaaggtggtctcgaccagagttcaaataaatctactaaagtttcaattcttggctctatagcggctggtactcctatcgaggcaatacaacatgaagttga

SEQ ID NO: 263482 - DNA, 270 bp, Unknown
  Bacterial polypeptide expressing nucleotide sequence isolated from the Sargasso Sea
attttggtcttaaagtgcaaggagactcaatgattgaggcaggaattaatgaaggtgatactgtaattataaaaagaactgatacagccgataatggaaaaatagtagtagcactaattgatgagcatgaagctatgctaaaaagaattaggaaaaaaggcaaagttgtagcacttgaaagtgcaaataaaaactacgagactaaaatttttggtccagatagagttaaggtacaaggcgtattagtatctttatatagaaacttctagt

SEQ ID NO: 263483 - DNA, 349 bp, Unknown
  Bacterial polypeptide expressing nucleotide sequence isolated from the Sargasso Sea
tatgctaactaaaaaacaaaaaaacttactcttatttatcaacaagaggttgagatcgacaggtgtatccccttcatatgaagaaatgaaggaatctctaaatcttaaatctaaatcggggatacatagacttataagtgctttagaggaaagaggtttcatcaaaagattagctcacaaagcaagagctcttgaagtagtcaaattaccagaaactgcttctgcaaatgatatttataatagtttttcaccaagtgtaattagaggtggattagatgataaaaatctagagaataaatctggtagtgaaataccagttttgggaatattgcagcgggcactcccgtag

SEQ ID NO: 263484 - DNA, 266 bp, Unknown
  Bacterial polypeptide expressing nucleotide sequence isolated from the Sargasso Sea
tatgcttacaaaaaaacaaaaaaacttattaatatatataaataaaaaaattagatcctcaggtatttctccatcttatgaggaaatgaaaaattcactcaacttgaagtcgaaatctggtattcacagattaattagtgccttagaggaaagaggatttgtaaaaagattagctcataaagcaagagctttggaggtagttaagctcccagaaaatgctagcgctaatgatatttttaattctttcacacccagtgtgataaaag

SEQ ID NO: 263485 - DNA, 610 bp, Unknown
  Bacterial polypeptide expressing nucleotide sequence isolated from the Sargasso Sea
aatgttaactccaagcgaaaccaaaaccttaaaattcattcaaaagtactgcattgagaagggctgctcgcctacccttacagaaattgccgatggaattggtattaaatccaggggcgttgtgcatagatacatcaagtctcttgagtccaaaaaattactcagcgtagcatccaatagaaaaagaggtatatgcctcaatctggaagcctatgaaaatcagtccatcgctcccattattccgctgttggggcgtatagcagccgggcaaccaatcgaagcaattgaggatagacatgaaatcaaccttgcggactttatcatggatcccgatcgatttgccttacaggtaactggtgagtcaatgatggatgctggcatccttgatggggacacggtcatcattaagcatcaaaacaccgcaaacaatggcgatattgttgttgcccttatcgatggtcttgaggcaacactgaagcgctttaaaagacttcccaaaggaatgatacttttaattccagaaaataaatccatggaagcaattgcatatgaggctgagcgtattcagatacaaggagtagttgttggccaacttagaagctaccaataa

SEQ ID NO: 263486 - DNA, 682 bp, Unknown
  Bacterial polypeptide expressing nucleotide sequence isolated from the Sargasso Sea
aatgctaacaaaaaaacaaaatgaattattgatatatatacatcaaaatttaagagaaactggtgttgctccttcttatgaagaaatgaaggatgctctagatttaagatctaaatctggaatacacagattaataaatgctcttgaagaaagaggatttataagaagattagctcatagagctagagcgattgaaattatcaaattacctacttcaagcactataaacccaaaaggtaattttcagcctgaagtaattgaaggcaataaagaaaaagatctttttagcctaaatgaagagtccatagaggttagaatgatgggtaaaatagcagcaggaactccaattgcagcaattgagtatgaaaaaaataaaatatctgttccgggtagtatggttggtactggagatcattatgcactagaaattgaaggtgactcaatgattggagcaggtattcttgataaggataaagccattataaaaaaggttgatgatgccttatcaggtcaaatagttgtggcactagttgatggagaggaagctacattaaaaagacttagaaaaaaaggaaatactattgctcttgagcctgctaattctgcatacgaaacaaaaatttatggtcctgaaagaattcaaattcaaggtattctggttggtatactaagatcttattag

SEQ ID NO: 263487 - DNA, 388 bp, Unknown
  Bacterial polypeptide expressing nucleotide sequence isolated from the Sargasso Sea
aatgatacagaaatccctgcttcttggaaaaattgctgcgggaactccagttgaagcaatacataatgaagtttcaagaattccactgccagcaaacattgaaaaagatggagaattttttggtttaaaggtccaaggggattctatgattgaagctggaattaatgatggtgatactgttattgtcaaaaaggcagatactgcagataatggaaaaattgtagtagctttaattgatgatcatgaggctatgttgaaaagaattagaagaaaaggtaaaactgttgcattagaaagtgcaaatagaaattacgaaacaaaaatttttggcccagatagagtgaaagttcaaggaattctcgtatctttatatagaaactttcagtaa

SEQ ID NO: 263488 - DNA, 610 bp, Unknown
  Bacterial polypeptide expressing nucleotide sequence isolated from the Sargasso Sea
atgttaacaccaagcgaaaccaaaaccttaaagttcattcaaaagtactgcattgaaaagggctgttcacctacccttacagaaattgccgatggaatcggcattaaatccagaggtgttgtacacagatacattaagtctcttgagtccaaaaaattactgagcatagcatccaatcgaaaaagaggtatatgccttaatcttgaagcttatgagaatcaatccatcgctcccatcattccactattgggacgtatagcagctggacaaccgatcgaagcaattgaagacaggcatgagatcaatcttgcagacttcattatgaatccagatagattcgccttacaggtaaccggtgagtcaatgatggatgctggcatcctcgatggagatacagtcattatcaaacatcaaaatactgcaaataatggtgatattgttgtcgctcttattgatggcattgaggcaacattgaaacgtttcaaaagactgcccaaaggtatgatacttctcattccagaaaataaatccatggaagcaattgcatatgaggctgagcgtatacagatacaaggagtagttgttggccaacttagaagctatcaataaa

SEQ ID NO: 263489 - DNA, 271 bp, Unknown
  Bacterial polypeptide expressing nucleotide sequence isolated from the Sargasso Sea
tactttgggttgaaagttcaaggtgattcaatgattgaagccggaattaatgaaggtgatacagtcattgtaaaaaaatcagatacagctgaaaatgggaaaatcgttgttgcactaattgatgaccatgaagcaatgcttaaaagaatcagaagaaaaggtaaaacagtagcccttgaaagcgcaaataagaactatgagaccaaaatctttggtccagatagagtaaaagttcaaggtgttctagtatctttatatagaaacttttaaa

SEQ ID NO: 263490 - DNA, 283 bp, Unknown
  Bacterial polypeptide expressing nucleotide sequence isolated from the Sargasso Sea
atgcttacaaaaaaacaaaaaaacttactagtatttattaataagaagataagatcttctgggatttctccatcttatgaggagatgaaaaattcactcaaccttaagtcgaaatcaggaattcatagactaatctcagctttagaggaacgtggatttgtaaaaagattagcccacaaagcaagagctttagaagttgttaaattaccagaaaacgccagcgctaatgatatttttaatactttcacaccaagcgttataaaaggtggacttgataaagaaa

SEQ ID NO: 263491 - DNA, 283 bp, Unknown
  Bacterial polypeptide expressing nucleotide sequence isolated from the Sargasso Sea
tatgttaacaaaaaaacaaaaaaatttgcttttattcatcaacaaaaagttgagatctacaggtgtttcaccttcttatgaagaaatgaaagagtctctaaacctcaaatcaaagtctggaattcacagactaataagtgctttggaagaaagaggttttataaaaagattagcccacaaagcaagagctttagaggtgattaagctgcctgagacagcatctgcaaatgatatttataatagtttttctccaagcgttattaaaggaggattagatgaagaa

SEQ ID NO: 263492 - DNA, 394 bp, Unknown
  Bacterial polypeptide expressing nucleotide sequence isolated from the Sargasso Sea
atgctaacaaaaaaacaaaaaaacctacttttatttatcaacaagaagttgagaagttctggtgtttctccttcatatgaagagatgaaacaatctcttaatttaaaatctaaatcgggtattcatagattaattagtgctttagaggaaagaggttttattaaaagattagctcacaaagcaagagctttagaggtaattaaattaccagaaacagcctctgcaaatgatatttataatagtttttcacctagtgtgattaaaggtggactagatgaagaacaaactacttctgatgaagttgaagtgccagtacttggaaaaattgcagctggaactcctgttgaagcaatacaaaatgaggtttctagaattccactaccaaataattaga

SEQ ID NO: 263493 - DNA, 721 bp, Unknown
  Bacterial polypeptide expressing nucleotide sequence isolated from the Sargasso Sea
atgagaacttttatagaacatgaatgtacgatatttgttcttatgctaacaaaaaaacaaaaaaacctgcttatttttattaataaaaagttaaggaattctggagtatctccttcttatgaggaaatgaaagattctctaaatcttaaatctaagtcaggtattcatagattaataagtgctttagaggaaagagggtttattaaaagactcgcacataaagcaagagctttagaagtaataaaattgccagaaactgcttctgcaaatgatatttataacagtttctcacctagtgttattagaggtggtttagatgataataataacttaaatgaaaatgctgtaccagttttaggtgatatcgctgctggaactcctatagaagcaattcaaaacgaagtaacaagaattccactacctgataatattgaaaaaaaaggtgagtattttggattaaaagttagtggagactcgatggtagaggcgggcattaacgatggcgacaccgtaattattaaaaaaacagatacagcggaaaatggtaaaattgtagttgcattaattgatgatcatgaagcaatgcttaaaagattaagaagaaaagggaaaacaatagctcttgagagtgccaacagaaactatgaaaccaaaatatttggcccagatagagttaaagttcaaggtgtgcttgtatctttatatagaaactttcactaaa

SEQ ID NO: 263494 - DNA, 455 bp, Unknown
  Bacterial polypeptide expressing nucleotide sequence isolated from the Sargasso Sea
tatgcttacaaaaaaacaaaaaaacttattactttttattaataagaaaattagatcgactggagtttctccttcatatgaggaaatgaaaaattcactcaaccttaagtcgaaatcaggaattcatcgactaatatcagccctagaggaaagaggatttataaaaagattagcacataaagctcgtgctcttgaagttgtaaagcttcccgaaaacgctagcgctcacgatttattcaacagctttactccaagtgttattaaaggtggtttagataagaactcagcaaaatcaactaagatctcggttttaggctcgattgcagctggtacgcctattgaagccatacaacaagaagttgataaagtgaatttaccagctgactttaataaaaatgatgatcactttggattgaaagttaaaggagactctatgattgaggctggtatcaacg

SEQ ID NO: 263495 - DNA, 703 bp, Unknown
  Bacterial polypeptide expressing nucleotide sequence isolated from the Sargasso Sea
catgcttacacgaaaacagctcgatttattaaattatataaacaagcatttgaataaagacggaataccaccctcttttgacgaaatgaaggaggctttggatttacgctcaaagtctggaattcacagacttataaccgctctagaggaacggggcttcattcgaaggcttgctcacagagcgcgcgccatagaaatcgttaagctgccagattcactagaaacaaacaataaagtaaccaaaataagccgcgtttctaccataaatccggcaagcaatgaagacgtaaatcctcgacttatttccgactcagtacatgcgagcgagcttccagtaatgggacgaatagcagccggagttcccattgaggctataagtcaaatttcccataacgtagccgttccaaggcacatgctaaggaatggaggcgaccattatgcgctagaagtaaagggtgactccatgattgaagaaggaattaacgatggggatattgtcgtaataaaagaaacaaaaacagcggtaaatggcgatattgttgtagcactcgtgaaagatagtgaggcaacattaaagagatttttttacagaggcaatgcaatagccttggaagcagccaacccggcatatgaaaccagaatactgccaagtggtgacgtaaaagtccaagggcgactggttggtctgataaggtcttactag

SEQ ID NO: 263496 - DNA, 616 bp, Unknown
  Bacterial polypeptide expressing nucleotide sequence isolated from the Sargasso Sea
tatgcttactaaaaaacaaaaaaacttattaatattcatcaataagaaaattagatcttcaggtatttctccgtcttatgaggaaatgaagaattcactcaaccttaagtcgaaatcaggaatacatagattaatttctgcattagaagaaagaggttttgttaagcgattagcacataaagcaagagcgttagaagtggtcaaattaccagaaaacgctagcgcaaatgatatatttaacacatttacaccaagtgtaattaaaggtggattagataagaatgataataaatctacggatgtatcagtgttaggcagtatcgctgctggtacaccaattgaggctattcaacaagaagttgatagagttgctttgccagaagaccttcaaaataatggtgagcactatggccttaaagtaaaaggtgattcaatgattgaagcaggtattgctgacggtgatacagttattataaaaaaagtttccaatgtagataatggtcagattgcagtagtcttaatagacgaccaggaagctactttaaaaagagtaagaaaaaaaggaaacactatcgctcttgaagcagcaaatagaaactacggaactaaaattacg

SEQ ID NO: 263497 - DNA, 355 bp, Unknown
  Bacterial polypeptide expressing nucleotide sequence isolated from the Sargasso Sea
atcgcggctggtaccccgatcgaagcactgcgcgacagttcccgttctttcgatgtgccgccggggatgctcggccgcggcgatcactatgcgctggaaatcgagggtgactcgatgatcgaggcaggtatcctcgacggcgatgtcgtactgatcaagcgtaccgacaccgccgataacggagaaatcgtggtcgcgctcgtcgaggggcatgaagcgaccctgaaacgcctgcgccgaaaaggcgcctcgatcgcgctggaaccggcaaacgccgcgcacgaaacccgcatcttcggcccggaccaggttcgcgttcagggccggcttgtcgggcttgtccgcaagtactgac

SEQ ID NO: 263498 - DNA, 481 bp, Unknown
  Bacterial polypeptide expressing nucleotide sequence isolated from the Sargasso Sea
tatgcttactaaaaaacaaaaaaacttgttaatgttcatcaataagaaactgagatcatcaggtgtttctccttcttatgaagaaatgaaacaatcgttaaatttaaaatcaaaatctggaattcatagattaattagtgcgttagaagaaagaggtttcataaaaaggcttccacataaagctagagctttagaagtagtaaaattacctgaaacagcatctgctaatgatatttataatagtttttcaccaagtgtaattaaaggtggtttagatgaaaataatacagttaatgaaagtccagaaattccagttttaggtaagatagctgctggaactccaattgaagcaattcaaaatgaagtttcaaaaataccattgcctgcaaatatagaaaaaaatggtgaattttttggccttaaagttcaaggagattctatgattgaagctggtatttatgaaggagacactggttgtata

SEQ ID NO: 263499 - DNA, 568 bp, Unknown
  Bacterial polypeptide expressing nucleotide sequence isolated from the Sargasso Sea
gaagtcaaaatctggaattcatcgtttaataagtgccttggaagaaagaggttttataaaaagattggcacataaagctagagcattagaggttgttaagctacctgaaaccgcttctgcaaacgatatttataactctttttcacctagtgtaataaaaggtggtttagatgatgaaggtatggaaaaaaatgaaattccggtcctcggtaaaatagctgcaggaacgccagttgaagcaatacaaaatgaggtttcgagagttcctttacctaataatattgaaaaaaatggagagtactttggtttgaaagtgcaaggagactcaatgattgaagcgggtattagtgagggtgacacggtaattgttaaaaaaactgatacagcagaaaatggaaaaattgttgtagctttaattgatgaccatgaagctatgcttaaaagaataagaagaaaaggaaaaacaatagcacttgagagtgcaaacaaaaactatgagaccaaaatctttggtccagatagagtaaaagtccagggtgttctagtatctttgtatagaaacttctaa

SEQ ID NO: 263500 - DNA, 709 bp, Unknown
  Bacterial polypeptide expressing nucleotide sequence isolated from the Sargasso Sea
aatgctgacacgcaaacaacaggaattgctgtatttcattcatgaacggatgaaagagaccggtattccgccgtccttcgacgaaatgaaggaagcgctggacctcgcgtcgaaatccggcattcaccgcctgatcaccgcgctggaggaacgcggcttcatccgccggctccccaaccgcgcccgcgcgctcgaaatcctgcgcatgccagacagcgcgatcggccagcagccgcgccggggcttctcgccaagcgtgatcgagggctctctcggcaagaagcaggaagagccgaaggcgccggccagcgccaatgacggcggctcggcgggcattccggtcatgggccggatcgccgccggcgtgccgatttcggcgatccaggaaaatacccatcagatcaccgtgccggcggaaatgctgggcgcgggcgaacattacgcgctggaggtgcagggcgattcgatgatcgaggccgggattttcgacggcgacacggtgatcatccgcaatatcgccaccgcttcgcccggcgatatcgtcgtggcgctcgtcaatgacgaggaagcgacgctgaagcggtttcgccgcaagggcgcctcgatcgcgctggaggcggccaatccggcctacgagacccgtattttttcggcaaaccaggtcaaggtgcagggcaagctggtcggcctgatccgtcgttaccactga

SEQ ID NO: 263501 - DNA, 616 bp, Unknown
  Bacterial polypeptide expressing nucleotide sequence isolated from the Sargasso Sea
tatgctaacaaaaaaacaaaaaaacctgcttttatttatcaacaagaagttgagaagctctggtgtttctccatcttatgaggagatgaaagcttcgttaaaccttaaatctaagtctggaattcatagacttataagtgcattagaagagagaggttttattaaaagacttgctcataaagcaagagcattagaagtaattaaattgccagaaacggcttctgcaaatgatatttataacagtttttcaccaagtgttattaaaggtggtttagatgacgaaaatttatcgtcagatgatgctgaggtaccagttttaggaaaaattgctgctggaacacctgttgaggctattcaaaatgaagtttcaagaatacctttgccaagtaatttagagaaaaatggagattattttggtttaaaagttcaaggggactcgatgattgaagctggaattcatgaaggtgatacagtaattattaaaagaacagatacagctgataatggaaaaattgttgttgctctaattgatgagcatgaagcaatgttaaaaagaattaggaaaaaaggtaaagttgttgctttagaaagtgccaacaaaaattacgaaactaaa

SEQ ID NO: 263502 - DNA, 512 bp, Unknown
  Bacterial polypeptide expressing nucleotide sequence isolated from the Sargasso Sea
tatgttaactaaaaaacaaaaaaacctacttttatttatcaacaagaagttgagatcttctggcgtttcaccttcatatgaagagatgaaacattcactaaatttaaaatctaaatcaggaattcatagattaataagcgctttagaagaaagaggatttattaaaagattggcgcacaaagcaagagctttagaggtgataaaacttccagaaactgcttcagcaaatgatatatataacagtttttcaccgagtgtaatcaagggaggtttagacgaaagtaattcaaaaaataaaaatgcagatatagctgtgctaggaagtattgctgccggaacaccaattgaagctattcaaaatgaagttactagaattcctctacctaacaatatagaaaaaaatggtgaattttttggtctaaaagttcaaggagactcaatgatcgaagctggaatcaatgatggagatacggtaataataaaaaaaacagatacagctgacaatggaaaaa

SEQ ID NO: 263503 - DNA, 645 bp, Unknown
  Bacterial polypeptide expressing nucleotide sequence isolated from the Sargasso Sea
tatgctaacaaaaaaacaaaaaaatttattaatattcattaataagaagataagatcttcagggatttctccctcttatgaggaaatgaagaattcactcaaccttaagtcgaaatcaggaatacatagattaatttctgcattagaagaaagaggttttgttaagcgattagcacataaagctagagcattagaggtgattaaattgccagagaacgctagcgcaaatgatatatttaatactttcactccaagcgttatcaaaggtggattagataaaaataataataaatctactgatgtttcggtattaggaagtattgccgctggtacaccaattgaagctattcaacaagaagttgatagagttgctttaccagaagatcttcaaaataatggagagcactatggtcttaaagtaaaaggagactcaatgattgaagcaggtattgctgacggtgatactgttataataaaaaaagtttctaatgtagataatggtcagattgcagtagtcttgatagacgaccaggaagctactttaaaaagagtaagaaaaaaaggaaacactatcgctcttgaagcagcaaatcgaaactatggaaccaaaatttacgctgcaaatagaataaaaattcaaggtaa

SEQ ID NO: 263504 - DNA, 460 bp, Unknown
  Bacterial polypeptide expressing nucleotide sequence isolated from the Sargasso Sea
atgcttacaaaaaaacaaaaaaacctgcttttatttatcaacaagaagttgagaagctctggtgtttctccatcttatgaggaaatgaaagcttcattaaaccttaaatctaagtcaggaattcatagacttataagtgcattagaggaaagaggttttattaaaagacttgctcataaagcaagagctttagaggtaatcaaattaccagaaacagcctcagcaaacgatatttataatcacttttcacccagtgtaataaaaggcggtcttgatagtgaaaaaaatttatcctctgaaacagaggttccagttttaggcaaaatcgctgctggaactcccgtggaggcaattcaaaatgaagtttcgaggatacctttaccagccaatttagaaaaaaacggcgattatttcggactgaaagttcaaggcgattcgatgattgaggcaggtattaacg

SEQ ID NO: 263505 - DNA, 565 bp, Unknown
  Bacterial polypeptide expressing nucleotide sequence isolated from the Sargasso Sea
atgttaactaaaaaacaaaaaaacctgcttttatttatcaacaagaagttgagatctacaggtgtgtctccttcttatgaagaaatgaaacactcattaaatcttaaatcgaagtcaggtatacacagattaataagcgctttagaagaaagaggctttattaaaagattagctcacaaagcaagagctttggaagttattaagcttcctgaaacagcatcggcaaatgatatttataattcattttctccaagtgttataaaaggaggacttgatgagactaattccttaaatgatgataaagatattccggttcttggtagcattgctgcgggaacacctattgaagctattcaaaatgaagtaactagaattccactacctgaaaatattgaaaaaaatggtgaattttttggtttaaaagtaagtggagattcgatgattgaagctggtataaacgatggtgatactgttataataaaaaaaacagatacagctgaaaatggaaaaattgttgttgctttaattgatgatcatgaagcaatgttaaaaagattgagaagaa

SEQ ID NO: 263506 - DNA, 676 bp, Unknown
  Bacterial polypeptide expressing nucleotide sequence isolated from the Sargasso Sea
tatgcttacaaaaaaacaaaaaaacttattaatatttattaataaaaaaatcagatcttcaggtatttctccgtcttatgaggaaatgaaaaattcactcaacttgaagtcgaaatctggtattcacagattaattagtgccctagaagaaaggggctttgtaaaaagattagctcacaaagcaagagctttggaagtagttaagctcccagagaacgctagtgctaacgatatttttaattctttcacaccaagtattattaaaggtggtttagataaatcaaaaagcaactcttcaaaagtttctgtcctaggaagcattgcagctggtactccaatagaagctatacaacatgaagttgataaagttgctctaccagaagatttgcaaaaaaatggcgaatattttggtttaaaagtaaaaggtgactcaatgattgaagccggaataaatgatggtgatacagtaattataaaaaaaacatctacagctgacacagggcaaattgctgtagtgctaatagacgaacaagaagctacccttaagagaataagaaaaaaaggtaatacaattgctttagaggctgctaacaaaaattacgatactaaaatatacgcttctaatagaataaaaatccaaggaagattaatttctttatatagaaactttcactaa

SEQ ID NO: 263507 - DNA, 635 bp, Unknown
  Bacterial polypeptide expressing nucleotide sequence isolated from the Sargasso Sea
tatgttaacaaaaaaacaaaaaaacctacttttatttatcaacaagaagttgagatcttctggtgtgtcaccttcttatgaggaaatgaaagaatctttaaatcttaaatcaaaatcaggaattcaccgtttaataagcgctttagaagaaagaggttttataaaaaggttggctcataaagcaagagcactagaagtaatcaaacttcctgaaactgcctcagcaaatgatatctataattcattttctccaagtgttattaaaggaggattggatgagactaattcaccaaataaagataaagatattccagttcttggtagtattgctgcaggaacacctattgaggccattcaaaatgaagtaactagaatacaactacctgaaaacatcgaaaaaaatggtgaattttttggtttaaaagttaatggagattcaatgattgaagctggcataaatgatggggatacagttataataaaaaagactgatacagcagaaaacggaaaaattgttgttgctttaattgatgatcacgaagctatgttaaaaagattaagaagaaaaggaaaaactgttgctcttgaaagtgctaatagaaattacgaaactaaaatttttggcccagataggg

SEQ ID NO: 263508 - DNA, 585 bp, Unknown
  Bacterial polypeptide expressing nucleotide sequence isolated from the Sargasso Sea
ttaatcttaaatcaaaatctggaatacacagattaataagcgctttggaagaaagaggatttattaaaagattggctcataaagctagagcactagaagtaataaaacttcctgaaacagcttcagcaaacgatatttataacagtttttctcctagcgttattaaaggaggattggatgatgcaaatgaaaataataatgagggttctgaaattcctgttttaggaagcatagcagcaggaacacctattgaagcaattcaaaacgaagtgagtagaattcctttacccagtaatatagaaaaaaatggagaattttttggtttaaaagtaaaaggagactcgatgattgaggctgggataaacgatggggatacagttattgttaaaaaaacagaaatagccgataatggaaaaatcgttgtggctttaattgatgataatgaagcaatgttaaaaagaattagaagaaaaggtaaaacagtagccttggaaagcgcaaatcgaaattatgagactaaaatatttggtccagacagagtaaaagttcaaggaattctagtatctttatatagaaacttctaaa

SEQ ID NO: 263509 - DNA, 666 bp, Unknown
  Bacterial polypeptide expressing nucleotide sequence isolated from the Sargasso Sea
aacaaaaaaacctgcttttatttatcaacaagaagttgagaagttctggtgtgtctccttcttatgaagaaatgaaagagtctttaaatttaaagtccaaatctgggattcacagactaataagtgctttagaagagagaggttttattaaaagactagctcataaagcaagggcactagaagttgttaagctgcctgaaaccgcttccgcaaatgatatatataatagtttttcaccaagtgtaatcaaaggtggtttggatgaggacaatcaaaattcagatagtaaagaagttcctgttttaggaaaaatagcggcaggtacaccaattgaagcaattcaaaatgaggtgtctagagttcctctgcccagtaatattgaaaaaaatggagaatattttggccttaaagttgaaggtgattcgatgatagaagctgggattaatgaaggtgatactgtaatagtaaaaaaaacaaatactgcagacaacggcaagatagtggttgctttgatagatgatcatgaagctatgttaaaaagaattagaagaaaaggtaaaaccgtagcacttgaaagtgcaaataaaaactacgaaactaaaatatttggtcccgatagagtaaaagttcaaggcatactagtatctttatatagaaacttttaaa

SEQ ID NO: 263510 - DNA, 664 bp, Unknown
  Bacterial polypeptide expressing nucleotide sequence isolated from the Sargasso Sea
aaaacaaaaaaatttattaatatttatcaataaaaagattagatcttcagggatttctccttcttatgaggaaatgaagaattcactcaaccttaagtcgaaatcaggaatacatagattaatttctgcattagaagaaagaggttttgttaagcgattagcacataaagctagagcattggaggtggttaaattgcctgagaacgctagcgcaaatgatatatttaatactttcactccaagcgttatcaaaggtggattagataaaaataataataaatctactgatgtttcggtattaggaagtatcgccgctggtacaccaattgaagctattcaacaagaagttgatagagttgctttaccagaagatcttcaaaataatggtgagcactatggtcttaaagtaaaaggagactcgatgattgaagcaggtattgctgacggtgatactgttattataaaaaaagtttctaatgtagataatggtcagattgcagtagtcttgatagacgaccaggaagctactttaaaaagagtaagaaaaaaaggaaacactatcgctcttgaagcagcaaatcgaaactatggaactaaaatttacgctgcaaatagaataaaaattcaaggtaaacttgtttctttatatagaaactttcattaa

SEQ ID NO: 263511 - DNA, 676 bp, Unknown
  Bacterial polypeptide expressing nucleotide sequence isolated from the Sargasso Sea
atgctaacaaaaaaacaaaaaaacttattaatattcataaataaaaagattagatcttcagggatttctccctcttatgaggaaatgaagaattcactcaaccttaagtcgaaatcaggaatacatagattaatttctgcattagaagaaagaggttttgttaagcgattagcacataaagctagagcattggaggtggttaaattgcctgagaacgctagcgcaaatgatatatttaatactttcactccaagcgttatcaaaggtggattagataaaaataataataaatccactgatgtttcggtattaggaagtattgccgctggtacaccaattgaagctattcaacaagaagttgatagagttgctttaccagaagatcttcaaaataatggtgagcactatggtctaaaagtaaaaggagactcaatgattgaagcaggtattgctgacggtgatactgttattataaaaaaagtttctaatatagataatggtcagattgcagtagtcttgatagacgaccaggaagctactttaaaaagagtaagaaaaaaaggaaacaccatcgctcttgaagcagcaaatagaaactacggaactaaaatttatgctgcaaatagaattaaaattcaaggtaaacttgtttctttatatagaaactttcattaaa

SEQ ID NO: 263512 - DNA, 679 bp, Unknown
  Bacterial polypeptide expressing nucleotide sequence isolated from the Sargasso Sea
tatgcttacaaaaaaacaaaaaaacctgcttttatttatcaacaagaagttgagaagctctggtgtatctccttcttatgaagaaatgaaggaatctcttaatttgaagtctaaatcaggaattcatagattaatcagtgcattagaagaaagaggatttattaaaagattggctcataaagcacgagccttagaggtaataaaattaccagaaactgcttcagcaaatgatatttataacaatttttcaccaagtgttattaaaggtggattagatgaggtaaaaaatttatctactgaaactgaagtttccgtattaggtaaaattgctgctggaacaccagtggaagctatacaaaatgaagtttctagaatacctctgccaagcaatttagaaaaaaatggtgattattttggtcttaaagttcaaggagattcaatgattgaagctggaattaacgaaggtgatactgttattatcaaaagaactgatacagctgataatggaaaaatagttgttgcattaattgatgaacatgaagctatgcttaaaagaattagaaaaaaaggtaaagttgtagcacttgaaagtgcaaataaaaactacgaaactaaaatttttggcccagatagagttaaagtgcagggcgtattagtatctttatatagaaacttctag

SEQ ID NO: 263513 - DNA, 589 bp, Unknown
  Bacterial polypeptide expressing nucleotide sequence isolated from the Sargasso Sea
gaatcattaaatttgaagtcaaaatcaggaattcatagattgataagtgcactagaagaaagaggatttattaaaagactagctcataaagcaagagcattagaagtaataaaattaccagaaacagcttcagcaaacgatatttacaatagtttttctcctagtgttatcaaaggtggattggatgcgggtaaaccaatctctgatgaagccgaagttccagttttaggaaaaatagctgcaggaactcctgttgaggcaattcaaaacgaagtatccagaataccccttcctagtaatttagaaaaaaatggtgactactttggtctaaaagttcaaggagactcaatgatcgaagctggtattaatgaaggagatactgttattattaaacgaactgactcagctgataacggaaaaattgttgttgctttaattgatgaacatgaagcaatgcttaaaagaataagaaaaaaaggtaaagtaatagcgctagaaagcgcaaataaaaactacgaaactaaaatttttggcccggatagagttaaagtacaaggcgtattagtatctttatatagaaacttctagt

SEQ ID NO: 263514 - DNA, 573 bp, Unknown
  Bacterial polypeptide expressing nucleotide sequence isolated from the Sargasso Sea
tatgctaactaaaaaacaaaaaaacttactattatttatcaacaagaagttgagatcttcgggtgtatctccttcttatgaagaaatgaaaaattctttaaacttaaggtctaaatccggaatacataggttgattagtgcattggaagagagaggttttattaaaaggcttgctcataaagctagagctttagaggttataaaattaccagaaacagcttctgcaaatgatttatataacagtttttctcctagtgtaattaaaggtggattagatgaagataatttaaaaaataatgatggtagtgatatacctgtattaggtaatattgctgcaggtacaccaatagaagcgatacaaaacgaggtaagtagaatacctcttccaagtaatatagaaaaaaatggtgaatattttggtttgaaagtctctggagattctatgattgaagcaggtattaacgatggagatacagttatagttaaaaaaacggacatagcagataatggaaaaatagttgtagcattgattgatgataatgaagcaatgttaaaaagaattaggagaaaagg

SEQ ID NO: 263515 - DNA, 620 bp, Unknown
  Bacterial polypeptide expressing nucleotide sequence isolated from the Sargasso Sea
tatgcttacaaaaaaacaaaaaaatcttttaatgtttatcaacaagaagttgagaagctccggtgtatctccatcttatgaagagatgaaagagtcgttaaatttaaaatcaaaatctggaattcatagattaattagcgccctagaagagagaggttttataaaaaggttggctcataaagctagagctttggaggttgtaaaacttcctgagaccgcatctgccaatgatatatataactccttttcaccaagtgtaataaaaggtggtttggatgaagaaggtgtcgagacaaacgaaattccagtattaggtaaaattgcagcaggcacgccagttgaagcgatacaaaatgaagtttcaagggttcctctacctaacaatttagaaaaaaatggtgaatattttggtttaagagttcaaggtgactcaatgatcgatgctggtataagtgaaggtgatacagtaattgttaaaaaaactgatacagcagagaatggaaaaattgtagtagctttaattgatgaccatgaagctatgcttaaaagaataagaagaaaaggaaaaactatagctctggagagtgcaaataaaaactacgaaactaaaatctttggcc

SEQ ID NO: 263516 - DNA, 679 bp, Unknown
  Bacterial polypeptide expressing nucleotide sequence isolated from the Sargasso Sea
atgttaacaaaaaaacaaaaaaacctgcttttatttatcaacaagaagttgagaagctctggtgtttctccatcttatgaggaaatgaaagcttctttaaaccttaaatctaagtctggaatccatagacttataagtgcattagaagagagaggttttattaaaagacttgctcataaagcaagagcattagaagtaattaaattgccagaaacggcctctgcaaatgatatttataacagtttttcaccaagtgttattaaaggtggtttagatgacgaaaatttatcatcagatgatgctgaggtaccagttttaggaaaaattgctgctggaacacctgtcgaggctattcaaaatgaagtttcaagaatacctttaccaagtaatttagagaaaaatggagattattttggtttaaaagttcaaggggactcgatgattgaagctggaattcacgaaggtgatacagtaattattaaaagaacagatacagctgataatggaaaaattgttgttgctctaattgatgagcatgaagcaatgttaaaaagaattaggaaaaaaggtaaagttgttgctttagaaagtgccaacaaaaattacgaaactaaaatatttggacctgatagagtaaaagttcagggtgtattagtatctttatatagaaacttctaaa

SEQ ID NO: 263517 - DNA, 600 bp, Unknown
  Bacterial polypeptide expressing nucleotide sequence isolated from the Sargasso Sea
aagaaatgaaacaatctctcaatttaaaatctaagtcaggaatacatagattgataagtgcattagaagaaagaggttttatcaagagacttgctcataaagcaagagcgttggaggtaataaagcttcctgaaacagcgtctgcaaacgatatttacaacaacttttcaccaagtgttataaaaggtggtctagataaggatcaaattaatcctgaagagttagaattaccagttcttggtaaaattgctgctggaacacccgttgaggcaattcaaaatgaagtggctagaatacctttgccaaataatctagaaaaaaatggagattattttggtttaaaagttcaaggtgactcaatgatagaagctggtattcatgaaggtgataccgttattatcaaaagaacagatacagcagacaatggaaagatcgttgttgctttaattgatgaacatgaagcaatgcttaaaagaatccgtaaaaaggggaaagtcgttgctttagaaagtgcaaatagaaattacgaaactaagatttttggaccagatagagttaaagttcagggagttttagtatctttatatagaaacttttaaa

SEQ ID NO: 263518 - DNA, 499 bp, Unknown
  Bacterial polypeptide expressing nucleotide sequence isolated from the Sargasso Sea
tatgttaacaaaaaaacaaaaaaacctacttttatttatcaacaaaaagttgagatctagtggtgtatctccctcttatgaagaaatgaaagaatcccttaatttaaagtctaaatctggaattcataggttaattagtgccttagaggaaagaggatttattaaaagattagctcataaagcaagagctttagaagtcattaagttgcccgaaacagcttcagcaaatgatatttataatagtttttcaccaagtgtaattagaggtggacttgatgaaagttcaaatcggaataattctgacgaaaatgaaattcctgtattaggtaaaattgctgcgggtacacctgttgaagcaattcaaaacgaagtttctagaatacctttgccttctaatattgagaaaaatggagaattttttggactaaaagttcaaggagattcaatgattgaggcaggaataaatgatggtgatacggtaattgtgaaaaaagtagat

SEQ ID NO: 263519 - DNA, 679 bp, Unknown
  Bacterial polypeptide expressing nucleotide sequence isolated from the Sargasso Sea
tatgctcacaaaaaaacaaaaaaacttattactttttatcaacaaaaagttgaggtcttctggaatatctccatcctatgaagaaatgaaagaatctcttaatttaaagtctaaatctggaatacatagattaattagtgctctagaggaaagaggtttcattaaaaggttggctcataaagcaagagctttagaagttgtaaaattgccagaaactgcatcagcaaacgatatttataacagcttttctcctagcgtaataaaaggaggcttggatgaaactgtgaataacgaaaatgggtcagaaataccagttttaggtaaaattgcagcaggtacaccagtagaagctattcagaacgaggttgctagaattcctttgcctgaaaacattgaaaaaaaaggtgaatattttggattaaaagttcaaggtgattctatgattgaggctggaattaatgatggagatactgttgtaatcaaaaaaacagatacagctgataatggaaaaatagtagttgctttaatagatgaccatgaagcaatgcttaaaagaataagaagaaaaggtaaaacagtggctctcgaaagtgcaaatagaaactacgaaacaaaaatatttggtccagatagagtaaaagttcaaggtgttcttgtatctttatatagaagtttctaa

SEQ ID NO: 263520 - DNA, 559 bp, Unknown
  Bacterial polypeptide expressing nucleotide sequence isolated from the Sargasso Sea
ggcattagaagaaagaggttttattaaaagacttgcaaatcgcgcaagagcaatagaaatcgtaaaaatacctaattctccagaatttaagagtacaaccttatctgatatgccttctagtaccagacctgttgtcagtgcaaatagccctacagcaccaattgaaagcgtttatgcaaatgaaatacctgtcatgggccgaatagcggctggtgtgcctgtagaagcaataagcgaaatatctcataatgttgctgttccaggtcaaattcttcgaggtggaggagatcactttgccctagaagtaaaaggtgattcaatgataaatgcgggaataaacgatggtgatgtggttgtaattaaagaaacaaatagagctatgaacggagatatcgtcgtagcgctgattgaagatcaggaagcaacattgaagaggtttttcgtaagaggcgaagcgattgctttagaagcggctaacccagcttatgaaacacgaacatttccacatgaaaaaatcaaggtccaaggtcgtcttgttggcctcttaagaacttactga

SEQ ID NO: 263521 - DNA, 679 bp, Unknown
  Bacterial polypeptide expressing nucleotide sequence isolated from the Sargasso Sea
atgctaacaaaaaaacaaaaaaacctactattatttatcaacaagaagttgagaagttcaggcgtatctccttcttatgaggagatgaaacaatctcttaatttaaaatctaaatcaggaattcacagattaattagtgctttagaagaaagaggttttataaaaagattagctcacaaagcaagagctttagaagtaattaaattaccagaaacagcttctgctaatgatatttataatagcttttcacctagtgtgattaaaggtggactagatgaagaacaaactacttctgatgaagtagaagtaccagtgcttggaaaaattgctgcaggaacacctgttgaagcaatacaaaatgaggtttctagaattcctctaccaaataatttagaaaaaaatggtgattactttggtttaaaagttcaaggtgactctatgatagatgcaggtattcatgaaggtgatacagttattattaaaagaacagatactgctgataatggtaaaattgttgttgcattaatagatgagcatgaagcaatgttaaaaagaattagaaaaaaaggtaaagttgtagcccttgaaagtgctaatagaaactatgaaactaagatttttggacctgatagagtaaaagttcaaggagttttagtatctttatatagaaacttctaaa

SEQ ID NO: 263522 - DNA, 591 bp, Unknown
  Bacterial polypeptide expressing nucleotide sequence isolated from the Sargasso Sea
tatgcttacaaaaaaacaaaaaaacctgcttttatttataaataaaaaaattaggtctactggtgtttctccttcatatgaagaaatgaaaaattcactaaatcttaaatcaaaatctggaatacacaggcttatttcagctctagaagaacgaggatttatcaaaagacttgctcacaaggcaagagctttggaggttttaaaacttcctgaaactgccagtgcaaatgatatttacaacactttttcgccgagcgtgataaagggcggtttagattctgataatacgaaaaaaagtgtccatgagataccagtattaggaagaatagcagcaggtacacctattgaagccatacaaaacgaagttagcagagtaactatacctgaggaactaagcaaaggcggagatcattttggtcttaaagtttcaggggactctatgatagaggctggtataaatgatggagatactgtaattgttaaaaaatctagtacagcaaataatggtcaaatagttgttgcgttgattgatgatcatgaagcaatgttaaagagaataagaaaaaaaggtaaagttgtagctctagaaag

SEQ ID NO: 263523 - DNA, 679 bp, Unknown
  Bacterial polypeptide expressing nucleotide sequence isolated from the Sargasso Sea
atgcttacaaaaaaacaaaaaaacctgcttttatttatcaacaagaagttgagaagttcaggtgtatctccgtcttacgaggagatgaaacaatctcttaatttaaaatctaaatcaggaattcacagattaatcagtgctttagaggaaagaggttttataaaaagattagctcacaaagcaagagctttagaggtaattaagttacctgaaacagcttcagcaaatgatatttataatagtttttcaccaagtgtaattaaaggtgggttagatgaagaacaaactaattctgatgaaatagaagtacctgttcttggaaaaattgctgcaggaacacctgttgaagcgattcaaaatgaagtttctagaattccgttaccaaacaatttggaaaaaaatggggattacttcggattaaaagttcaaggcgactctatgatagacgcaggtattcatgagggtgatacagtaattattaaaagaacagaaactgcagataacggtaaaattgttgttgctttaatagatgaacatgaggcgatgttaaaaagaattcgaaaaaaaggtaaagttgtagcccttgaaagtgctaatagaaactatgaaactaagatttttggacctgatagagtaaaagttcaaggtgttttagtatctttatatagaaacttctaaa

SEQ ID NO: 263524 - DNA, 679 bp, Unknown
  Bacterial polypeptide expressing nucleotide sequence isolated from the Sargasso Sea
tatgctaacaaaaaaacaaaaaaacctacttttatttatcaacaagaagttgagaaactctggtgtatctccttcttacgaagagatgaaacagtccttaaacttaaaatcaaagtcaggtattcatagattgattagtgccttagaggaaagaggatttattaaaagattggctcataaagcaagggctttagaagtagtaaaattgcctgagacagcctctgcaaatgatatatataacagtttttcacctagcgttatcaaaggtggcttagatgaagaaattaataattcagacgatatagaagtgccggtattaggaaaaattgctgccggtacgcctgttgaagcaatacaaaatgaaatttcaagaattccattaccaaataatttagagaaaaatggagattattttggattgaaagttcaaggagattcaatgattgaagctggaatccacgaaggagatacagttattattaaaagaacagatacagcagataatggaaaaattgtagtcgcattaattgacgaacacgaggcaatgttaaaaagaattcgtaaaaaaggtaaagttgtagcattggaaagtgcaaatagaaactatgaaaccaaaatatttggccctgacagagtaaaagttcagggtgttttagtatctttatatagaaacttttaa

SEQ ID NO: 263525 - DNA, 638 bp, Unknown
  Bacterial polypeptide expressing nucleotide sequence isolated from the Sargasso Sea
tatgctaacaaaaaaacaaaaaaacctgcttttatttatcaacaagaagttgagaagttctggtgtatctccttcatatgaggaaatgaaacaatcattaaatttaaaatctaaatcaggtattcacagattaattagcgctttagaagaaagaggatttattaaaagactggctcataaagcaagggcattagaagtaattaaattaccagaaacagcttcagcaaatgatatttacaacagtttttcacctagtgttattaaaggtggtttagatgatgaaaaacctatgtctgatgacatagaagtgcccgttttaggaaaaatagctgctggaacacctgtagaagcaattcaaaacgaagtatcaagaattgcgttgcctaacaacctagaaaaaaatggtgactattttggtcttaaagtccaaggagactcaatgattgaagctggaattaacgaaggtgatactgttattatcaaaagagcagacactgctgataatggaaaaatagttgttgcattaattgatgaacatgaggcaatgcttaaaagaattagaaaaaaaggtaaagttgtagcactcgaaagtgcaaataaaaactacgaaactaaaatttttggtccagatcgcgtaa

SEQ ID NO: 263526 - DNA, 493 bp, Unknown
  Bacterial polypeptide expressing nucleotide sequence isolated from the Sargasso Sea
atgcttacaaaaaaacaaaaaaacttattactttttattaataagaaaattaggtcaactggcgtgtctccttcttacgaggagatgaaaaactcactcaacctcaagtcgaaatcaggaattcatcgactaatatcagcgttagaagaaagaggttttataaaaagattagctcacaaagcaagagctcttgaagtggtgaagcttccagaaaacgcaagcgcacatgatttatttaacagttttacaccaagtgtaattaaaggtggattggataaaaattctggaaagtccagcaaagtttcagtgcttggatcaatagctgcgggtacccctatagaggcaatacaacaagaagttgataagattaatttgcctgccgactttggtaaagatgaagatcattttggactaaaggtaaaaggtgactccatgatagaggcaggtattaatgatggtgatacggttatcatcaaaaaaagttctaatgcag

SEQ ID NO: 263527 - DNA, 448 bp, Unknown
  Bacterial polypeptide expressing nucleotide sequence isolated from the Sargasso Sea
tatggctgaccacacaatcacagatcgccaaagagcgattctcgaattcatagaatcgacaatgcgggaacgtggttatcccccagcggtacgcgaaatcggggccgccgtgggcctcaactctcccagcaccgttcattcacatctggcgcagttagaaagtgcgggctacctgcggcgagacccaacaaaacctcgggccattgaagtgtgtttcgacgcctcctcgggtgccatagctgagcgtcgacccactcgccatgttccactcgtgggtgaggttgctgctggaaccgacgtgctggcgcaagagaacgttgaagaacttgttcccgttccggaagatttcacaggggacggcgaactcttcatgctgaaggtgagaggcgactcgatgattgaagcgggcatcttggatggagacttcgtcgtagttaaccggcaaaat

SEQ ID NO: 263528 - DNA, 601 bp, Unknown
  Bacterial polypeptide expressing nucleotide sequence isolated from the Sargasso Sea
atgcaaaatctgacagcgagacaggaagaagttctatctcttataagaaattatcttgaggagacagggtacccgcccacaagagcggacatagcaaagcacttaggtttcaagagtgccaatgccgctgaggagcacctaaaagctctggcaaaaaagggtgcaatagaaataattccaggcacatcgcgaggaataaaactggcaaatgaagtggaaggaattcccataataggtaatgttgcggccgggaatcctattttagctgaggagaatattgaagattattgcgaactttccccatctttcttcaaacctaacgctgactattttttgcgggttcgaggagattcaatgaaagactcggggatattagacggggacttattagcggttcataagaccgcggatgctaataatggagatatcgtagtagctaggatcgacaacgaagttacagttaagcggctaaaaaaatctggaacaaaacagtttttgagtctcttacccgaaaactctgattactctccaataaaaatagacctcagagaaaatgattttgctattgaaggccttgccgttggagtaataagaaattaaa

SEQ ID NO: 263529 - DNA, 543 bp, Unknown
  Bacterial polypeptide expressing nucleotide sequence isolated from the Sargasso Sea
tatgttaactaaaaaacaaaaaaacctgcttttattcatcaataaaaagttgagatcctcaggaatatctccttcgtatgaagaaatgaaaggatctttaaaccttaagtctaaatcaggaattcatagattaattagcgctttagaagaaagaggatttattaaaagactagctcataaagcaagagctttagaggttattaagttaccagagactgcttctgcaaatgatatttataatagtttttctccgagtgtaattaaaggaggtttagacgatactaatttaaagagtaatgatggaaatgatatacctgttttaggaaatattgcagcaggaacaccagttgaagccattcaaaatgaagtaactagaatacctttgccaagtaatatcgaaaaaaatggagaatatttcggattaaaagttcaaggtgactctatgatagaagcgggcataaacgatggtgatactgttattgtgaaaaagacagatgtagcagataatggaaaaattgtagtagccttaattgatgaccatga

SEQ ID NO: 263530 - DNA, 577 bp, Unknown
  Bacterial polypeptide expressing nucleotide sequence isolated from the Sargasso Sea
cttaaaatcaaagtcaggtattcatagattaattagtgccttagaggaaagaggatttattaaaagattggctcataaagccagagctttagaggtagtaaaattgccagaaacagcttcagcaaacgatatttacaatagtttttcaccaagcgttatcaaaggtggtttagatgaagaaattaacaattcagatgaaatggaagtgccagtattaggaaaaattgcggcaggtactcctgttgaagcaatacaaaatgaagtttcaagaataccattaccaaataatttagaaaaaaatggagattattttggattgaaagttcaaggagactcaatgattgaagctggaatccacgaaggagatacagttattattaaaagaacagatacagcagataatggaaaaattgtagtcgcattaattgacgaacacgaggcaatgttaaaaagaattcgtaaaaaaggtaaagttgttgcattagaaagtgcaaatagaaactatgaaaccaaaatatttggccctgatagagttaaagttcagggtgttttggtatctttatatagaaacttctaa

SEQ ID NO: 263531 - DNA, 451 bp, Unknown
  Bacterial polypeptide expressing nucleotide sequence isolated from the Sargasso Sea
atgcttactaaaaaacaaaaaaatttgctcttatttatcaacaaaaagttgagatcctcaggaatttcaccttcttatgaggaaatgaaagaatctttaaatctaaaatctaaatctgggattcatagattaattagtgcccttgaagaaaggggttttattaaaagattagctcataaagcaagggctttagaagttgtaaaactgcctgaaacagcatctgcaaatgatatttataacagtttttcgccgagtgtgattaagggtggattagatgaggaaaataatgaaaacgaagcctctaatgaaataccagtgttagggaaaatagctgcaggaacacctgtagaagccatacaaaatgaggtttctagagttccattgcctacaaatttagaaaaaaatggtgaatatttcggattaaaagttcaaggcgactcaatgatagaag

SEQ ID NO: 263532 - DNA, 676 bp, Unknown
  Bacterial polypeptide expressing nucleotide sequence isolated from the Sargasso Sea
tatgctaacaaaaaaacagaaaaatttactaatttatataaacaaaaaaattagatcttccggtatttctccttcatacgaggaaatgaaaaactcactcaacttaaagtcgaaatctggcattcatagattaatttcggcccttgaagaaagaggatttgtaaaacgattagcacataaagcaagagctttagaagttgtaaaactacctgaaaatgcgagcgcaaatgatatttttaactcatttacaccaagtataattaaaggtggcttagataaagcaaataaaaattctagcaaagtttctgttttaggaagtattgctgctggaactcctattgaagctatacaacaagaagttgataaagtagcccttcctgaagacctacaaaaaaatggagaacatttcggtcttaaaataaaaggtgattcaatgattgaagctggtattaatgatggagacactgttataattaaaaaggcttcaaatgcagataacggtcaaatagcagtagttttaattgatgatcaagaagctactttaaaaagaataagaaaaaaaggaaatactatagctctcgaaagtgctaataaaaattatggcacaaaaatttatgctgcaaatagaataaaaattcaaggaaaattaatctctttgtatagaaacttccactaa

SEQ ID NO: 263533 - DNA, 598 bp, Unknown
  Bacterial polypeptide expressing nucleotide sequence isolated from the Sargasso Sea
ttatgaggaaatgaaaagttctttgaatcttaaatctaagtcaggaatacatagattaataagcgctttagaagaaagaggtttcattaaaaggttagctcataaagcacgagcattagaggttgtaaaactacctgaaacagcttcagcaaatgatatttataattcattttcaccaagtgtaataaagggaggacttgatgaaacgtcagataatgaaaacgaaattccagttttagggaaaattgcagccggtactccagttgaagctattcaaaatgaagtgagtagaataccccttccagcaaatattgagaaaaatggagaattttttggccttaaagttcaaggtgactctatgatagaagccggaatcaataatggtgacacagttattgtaaaaaaagctgacactgctgaaaatggaaaaattgtggttgcattaattgatgaccatgaagcaatgctaaaaagaattagaagaaaaggtaaaactatagcgcttgagagtgcaaataaaaattacgaaactaaaatttttggtcctgatagagtaaaagttcaaggagttctggtatctttatatagaaacttctaa

SEQ ID NO: 263534 - DNA, 552 bp, Unknown
  Bacterial polypeptide expressing nucleotide sequence isolated from the Sargasso Sea
tatgctaacaaaaaaacaaaaaaacttattattatttattaataagaagattagatcttcaggtatctctccatcatacgaggaaatgaagaattcactcaaccttaagtcgaaatcaggaatacatagattaatttctgcattagaagaaagaggatttgttaagcgattagcacataaagctagagcattagaggtggttaaattgccagagaacgctagcgcaaatgatatatttaatactttcactccaagcgttatcaaaggtggattagataaaaataataataaatctactgatgtttcggtattaggaagtattgccgctggtacaccaattgaagctattcaacaagaagttgatagagttgctttaccagaagatcttcaaaataatggagagtactatggtcttaaagtaaaaggagactcaatgattgaagcaggtattgctgacggtgatactgttattataaaaaaagtttctaatgtagataatggtcagattgcagtagtcttgatagacgaccaggaagctactttaaaaagata

SEQ ID NO: 263535 - DNA, 548 bp, Unknown
  Bacterial polypeptide expressing nucleotide sequence isolated from the Sargasso Sea
cgtgccagacacaggctacccgccgacccgggcggatatcgcccgcgaactgggctttaagtcggcaaattctgccgaggaacacctgcgggcattggcccggaagggcgccatcgagatgattgcgggcgcatcacgaggcattcgactgacggaaagctcgggcctgcccattgtgggtcgggttgcagcgggctccccggtcctcgccacagagcacgtagaggattactgcgaattgtctcccggcttcttctcgccgcaggcagattatttgctaagggtgaccggtgacagcatgagagatgtgggcatcctcgacggagacctgctggcagtgcacagcaccccgacggcgcgagatggccagattgtggtcgcacgaattgaggatgaagtgaccgttaaacgactcaagcggtcggggcaacacaccctgaagttactgccggaaaatgaggacttcgagcccatcgcggtggacctgcgctgcaccgagtgcaccatcgaaggcatcagtgtcggcattattcgaaagaaagtttaag

SEQ ID NO: 263536 - DNA, 629 bp, Unknown
  Bacterial polypeptide expressing nucleotide sequence isolated from the Sargasso Sea
tatgctaacaaaaaaacaaaaaaatttattaatattcattaataagaagataagatcttcagggatttctccctcttatgaggaaatgaagaattcactcaaccttaagtcgaaatcaggaatacatagattaatttctgcattagaagaaagaggttttgttaagcgattagcacataaagctagagcattagaggtggttaaattgccagagaacgctagcgcaaatgatatatttaatactttcactccaagcgttatcaaaggtggattagataaaaataataataaatctactgatgtttcggtattaggaagtattgccgctggtacaccaattgaagctattcaacaagaagttgatagagttgctttaccagaagatcttcaaaataatggagagcactatggtcttaaagtaaaaggagactcaatgattgaagcaggtattgctgacggtgatactgttataataaaaaaagtttctaatgtagataatggtcagattgcagtagtcttgatagacgaccaggaagctactttaaaaagagtaagaaaaaaaggaaacactatcgctcttgaagcagcaaatcgaaactatggaaccaaaatttacgctgcaaatagaa

SEQ ID NO: 263537 - DNA, 679 bp, Unknown
  Bacterial polypeptide expressing nucleotide sequence isolated from the Sargasso Sea
atgttaacaaaaaaacaaaaaaacctgttactttttataaacaaaaaaattagaggcactggagtgtctccttcctacgaagaaatgaaatcttcactaaacttaaaatctaaatctggaattcatagattaataagtgcgttagaagaaagaggtttcatcaaaagattagctcataaagctcgtgcattagaagttgtaaaattgccagaaacagcctctgctaatgacatttataattctttttcacctagtgttatcaggggtggtttgagcgatgtaagtaaaacaaaaaaaaatgagatatcagtattaggtagtattgcagcaggaactccaattgaggctattcaaaatgaagtttcaagaattcctttaccagcaaatatagaaaataatggagagttttttggcttaaaagtaaaaggagattcaatgatagaagctggaattagtgatggagatacagtcataataaaaaaagctgatcgagcagaaaatggaaaaattgtcgttgctttaattgatgaccacgaagcaatgttaaaaagaataagaattaaaggtaaaaccgttgcattggaaagtgctaatagaaattacgaaacaaaaatattcggcccagatagagtaaaagttcaaggtgtattgatatctttatatagaaacttcaactaaa

SEQ ID NO: 263538 - DNA, 340 bp, Unknown
  Bacterial polypeptide expressing nucleotide sequence isolated from the Sargasso Sea
ccgattggcgccgatgccgaggtgcacagccgcttgcaactggaccccgccactttcgccaaaacccccgattacctgctgcgggtgcagggcgattcgatgattgaagatggcattctcgatggcgacctggtgggcgtgcgccgcagtgccgaagccttgaacgggcagattgtggtggcgcgcctggacggcgacgtcactatcaagcgtttcgagcgcaacggcgacagggttcgcttgttgccgcgcaacccggcctatcaacccatcgtggtcgggcccgagcaggacctggccatcgaaggcgtgttctgcggcctggtgaggcaaggctgat

SEQ ID NO: 263539 - DNA, 588 bp, Unknown
  Bacterial polypeptide expressing nucleotide sequence isolated from the Sargasso Sea
taagcttaaaatctaaatctggaattcatagacttattagtgcattggaggaaagaggttttattaaaagattagctcataaagctagagctttagaggtaattaaattgccagaaactgcatcagcgcatgatatttataataatttttcgcctagtgtaataaaaggtggattagatgaagataatttaaataactctaaagaaaatgaaatccctgtgcttggaaaaattgctgcaggaacccctgttgaagctatacaaaatgaagtttcaagaattccgcttccagcaaatattgaaaaggatggagaattttttggattgaaagttcaaggagattccatgatagaggctggtatcaatgatggtgatacagttatagtaaaaaaagcaaatactgcagacaacggtaaaattgtagttgccttaattgatgatcatgaagctatgttgaagagaataagaagaaaaggcaagactgttgcgttagaaagtgctaacagaaattacgaaactaaaatctttggtcctgatagagtgaaagtacaaggaattcttgtatctttatatagaaactttcagtaaa

SEQ ID NO: 263540 - DNA, 694 bp, Unknown
  Bacterial polypeptide expressing nucleotide sequence isolated from the Sargasso Sea
atgcttacgcgcaaacaacaccaacttctgacctacatcgataatcatctcaacgccaacggcgtgccgccatcctatgacgaaatgaaggacgcgctgggcctgaaatcgaaatccggtattcacagacttgttaccgcccttgaggaacgtggctttatccggcgcctcccccacaaggctcgggcgctcgaagttcttaaaaagccccagaacatgatagacgacccacccgcaaaggggtctttcgagccccgcatcgtcgacgataatttcgaagcaatacccacgccccaggcatcaaatgtgaatgcgaaagaaacagtcggcctgcctttttacggaaagattgccgccggcactccgattgaagctctgcgggacaattcccgcagctttgaagtaccacccgatatgttaggtcgcggagaccattacgcccttgaaattgagggagattccatgatcgaagccggaatcctagatggcgatgtagtcctggtccagcgaaccgacactgctgataacggcgaaatcgtcgtcgcgcttatcgaaggacatgaggctactctcaagcgccttcgcagacgcggtgcgtccatcgcgctagaacctgcgaatgcgacccacgaaacacgaattttcggaccggatcaggtaagggttcagggccgcttggtcggcctcgtgcgca

SEQ ID NO: 263541 - DNA, 649 bp, Unknown
  Bacterial polypeptide expressing nucleotide sequence isolated from the Sargasso Sea
tctatttatcaacaagaagttgagaagttctggtgtgtccccttcatatgaggaaatgaaacaatctttaaatttaaagtctaaatcaggaattcatcgattaataagtgctttagaagagagaggattcattaaaagactagctcataaagctagagcattagaggtaatcaaacttccagaaacagcatctgcaaacgatatttataacagtttttcgcccagcgttattaaaggtggtttagatgatgaaaaatcaatttctgatgaggcagaagttccagttttaggaaaaatagctgcaggtacaccagtagaggctattcaaaatgaagtttcaagaattcctttgccaaataatttagaaaaaaatggagactattttggtcttaaagtccaaggtgattcaatgattgaggctggtataaacgagggtgacacggttatcattagaagaacagatacagctgataatggaaaaatagttgttgctttaattgatgaacaggaagcaatgcttaaaagaattagaaaaaaaggcaaagttgtagcattagaaagtgccaacaaaaattatgaaactaaaatttttgggccagatagagtaaaagttcaaggggttctggtatctttatatagaaacttctaa

SEQ ID NO: 263542 - DNA, 464 bp, Unknown
  Bacterial polypeptide expressing nucleotide sequence isolated from the Sargasso Sea
tatgttaactaaaaaacaaaaaaacctgcttttatttatcaacaagaagttgagatcttctggtatatcaccgtcttacgaagaaatgaaagattctttgaatcttaagtcaaaatcgggaattcatagattgattagcgcattagaagaaagaggatttattaaaagacttgcgcacaaagctagagccctagaagttgtaaaattacctgaaacagcatctgcgaatgacatttataataatttttctccaagtgttataaaaggtggacttgatgagacaaattcaaagaaaagtgataatcgtgatttccctgtattgggaaatattgctgctggtacacctgttgaagcgattcaaaatgaggtaaccagaatacctctaccaagtaatatagaaaaaaacggtgaatattttggactaaaagtacagggtgactccatgattgaagcaggcataaatg

SEQ ID NO: 263543 - DNA, 685 bp, Unknown
  Bacterial polypeptide expressing nucleotide sequence isolated from the Sargasso Sea
tatgttaactaaaaaacaaaaaaacctgcttttattcatcaacaaaaaattgagatcttcaggaatatcgccttcgtatgaagaaatgaaagaatcattaaatcttaagtctaaatcaggaattcatagactaattagcgctttagaagaaagaggatttattaaaagactagctcataaagctagagctttagaagtggtcaaattacctgagactgcttcggcgaatgacatatataacagcttttctccaagtgtaattaaaggtggtttagatactgataattcaaataataatgatggtagcgaagtcccagttcttggtaatatagcggcaggaactcctgttgaagcaattcaaaatgaagtgaatagaatacccttgccaaacaatatagagaaaaatggagaatattttggtttaaaagttcaaggagactctatgattgaagcaggtattaacgacggtgatactgtaattgtaaaaaagacagacacagctgataatggaaaaatcgtagtagcattaattgatgatcatgaagcaatgttaaaaagaattagaagaaaaggcaaaacagtagcattagaaagtgctaatagaaattacgaaacaaaaatatttggcccagatagagttaaagtgcaaggaattctagtatctttatatagaaactttcaataa

SEQ ID NO: 263544 - DNA, 631 bp, Unknown
  Bacterial polypeptide expressing nucleotide sequence isolated from the Sargasso Sea
tatgcttacttttcaacaggaaaaattattaaaatttataattgactatcaaaagcaaaataatgttacgcctagttttgatgaaatgaaagacggtttagatttgaagtcaaaatcaggaattcatagaatagtatcagccctcgaagaacgtggatatattaaaaaacttaataacagagctcgagcaatagaaataataaaaaatgtaaatttaattgatacagaaagtggcaaaaataaaaataatattatttcaattccaattttgggcaaaatagctgcaggcctgcctattgaagcaatatctgataatacaaattatatagaattacctgaaacattattaaaaaaaggtgaatattttatacttaatgttgagggtgattcaatgattgaagcaggaatctttgatggtgatcaggttgttattagaaaagctaatgatgccaataatggtgaaattgtagttgccctaattgataataatgaagcaacattaaaaagaatattcaaacgcgggcagcaagttgctctacaaccagaaaacagtaactataaaacagtcatttacggtccagatagaatccaaaattcagggtgtattaaagcattaaatagaagctattaa

SEQ ID NO: 263545 - DNA, 583 bp, Unknown
  Bacterial polypeptide expressing nucleotide sequence isolated from the Sargasso Sea
aatgttaacaaagaaacaaaaagaattattaaattatattcagaagttccaaagtaaaaatggtgtaactccttcttatgaagaaatgaagtctgcgcttaatttaaaatcaaagtcaggaatccacagattaattttagctctcgaagaaagaggatttgtaaaaagattagctcataaagcaagagcgcttgaaattattaaagatggtatatcaaacataaaagtttctgaaaaaaacaaaaataacctcgtagttggtaattttataaataattcaaatgaagataatcataaattaagcactctaccactcttgggaaagattgcagctggtacccctattgaagccattcagcaaaatgatacgtctgttgatgttccaaaagaaatgatgccaattggtgaaagttatgcattaacagttgagggtgattcaatgatcaatgaaggaatacacaatggagataccgttttaataaaaaaaactaacatagcagataatggtgaaatagttgttgccttaattgatgatagtgaagcaactttaaaaagaataagaaaaaaaggccaaagcatagca

SEQ ID NO: 263546 - DNA, 679 bp, Unknown; identical to SEQ ID NO: 263524
  Bacterial polypeptide expressing nucleotide sequence isolated from the Sargasso Sea

SEQ ID NO: 263547 - DNA, 467 bp, Unknown
  Bacterial polypeptide expressing nucleotide sequence isolated from the Sargasso Sea
tatgctaacaaaaaaacaaaaaaacctgcttttatttattaataaaaaaatcagatctactggtgtttctccatcatatgaagaaatgaaaaattcgttaaatttaaaatcaaaatctggaattcatagattaatttctgctttagaagaacgtggcttcataaagagattagcgcataaagcgagagctttagaggtaataaaactacctgaaactgctagtgctaatgatatttacaactctttttccccaagtgtaattaaaggaggattggataattctaacaacaaaaaaaatattagcgaagttcctgttctaggaaaaattgctgctggtacaccaatagaagctattcaaaatgaagtaagtaaagtaattctgcctgaagaaatgagtaaaaaaggagagttgtttggattaagagtttctggagattcgatgatagaagccggtataaatgatggag

SEQ ID NO: 263548 - DNA, 670 bp, Unknown
  Bacterial polypeptide expressing nucleotide sequence isolated from the Sargasso Sea
aaacaaaaaaacctggcttttatttatcaacaagaagttgagatcttctggtgtttctccctcatatgaagaaatgaaacaatcattaaatcttaaatctaaatctggaattcatagattaataagtgctttagaagaaagaggttttattaaaagattagctcataaagcaagagctttagaagttattaaacttccagaaactgcctcggcaaatgatatttataattcgttttctccaagcgttataaaaggaggcttggatgaaactaatttgacaaacaaagatacagatattccagttcttggtagtatagcagctggaacacccattgaagctattcaaaatgaagtgactagaattccactgccagaaaatattgaaaaaaatggtgaattttttggtttaaaagtaagtggagactctatgatagaagctggcataaatgatggtgatacagttataataaaaaagagcgatactgcagaaaatggaaaaattgttgttgctttaattgatgatcatgaagcgatgctaaaaagattaagaagaaaagggaaaactgttgctcttgaaagtgctaacagaaattatgaaacaaaaatatttggtcctgatagagtaaaagttcaaggtattctagtatctttatatagaaacttccattaa

SEQ ID NO: 263549 - DNA, 616 bp, Unknown
  Bacterial polypeptide expressing nucleotide sequence isolated from the Sargasso Sea
atgagaccgttaacgccacgccaagcagaaattttagacctaattaaaaacaatattgccgaaaccggtatgccaccgactcgtgctgaaattgcaaaacgtcttggctttaaaagtgcaaatgctgccgaagagcatttaaaagcattagccaaaaaaggctttatcgagatcatgcctggtacttcaagaggtatccgcttacctcatgaagaagagcaagaatctggtttaccgcttattggtcaagttgccgcaggcgagccaattttagcgcaagaacatgttgagcaatattatcaagttgacccaagcatgtttaaacccgccgcagattttttattgcgagtacgtggtgacagtatgaaagacattggcattttagaaggcgacttactggccgttcataaaatgcaacaagcacgtaatggccaagttgttgtggcccgcgttgaagacgacgttacggttaaacgtttcgagaaaaaaggcaatgtggtgtatctacatgctgaaaacgaagcatataacccgattaaagtagacttaagttgccaaagcctcaccattgaagggcttgccgttggcgttatccgtaatggagattggttatgaa

SEQ ID NO: 263550 - DNA, 592 bp, Unknown
  Bacterial polypeptide expressing nucleotide sequence isolated from the Sargasso Sea
atgctaacaaaaaaacaaaaaaacctgcttttatttatcaacaagaagttgagaagctctggcgtatctccttcttacgaagaaatgaaagaatcactaaatttaaaatctaaatcaggaattcatagattaatcagtgcgttagaagaaagaggatttattaaaagactagcccataaagcaagggcattagaggtaattaaattaccagaaacagcttcagcaaatgacatttataatagtttttcaccaagtgttattaagggtggcttagatgatgaaaaacctatgtctgatgatgaagaagtacctgttttaggaaaaatagcagctggaacacctgtagaagctattcaaaatgaagtttcaagaattccattgccaaataacttagaaaaaaatggtgattattttggtcttaaagtacagggagactcaatgattgaagctggaattaacgaaggtgatactgtaattatcaaaagaaccgatactgctgataatggaaaaatagttgttgcattaattgatgagcatgaagccatgcttaaaagaattagaaaaaaaggtaaagttgtagcactagaaagtg

SEQ ID NO: 263551 - DNA, 610 bp, Unknown
  Bacterial polypeptide expressing nucleotide sequence isolated from the Sargasso Sea
atgctaaaactgacgccacgccaagctgagattctggcttttatcaagcgctgccttgatgacaatggttacccgcctacccgtgcggagattgccctggaattggggttcaagtccccgaacgccgccgaggaacacctcaaggccctcgctcgcaaaggtgcgatcgagatgacccccggtgcttcgcggggtattcgcatccctggcttcgaagccaaggcagacgagtcgacattgccgatcatcggtcgcgtcgccgcaggtgcgccgatcctggcgcagcagcacgtcgaggaatcctgcaacatcaacccgaccttcttccatccgcgtgccgactacctgttgcgtgtgcacggcatgagcatgaaggacgtgggcatcttcgacggtgacctgctggccgtgcataccacccgcgaagcccgtaatggccagatcgtcgttgcccgtatcggcgacgaggtcacggtcaaacgcttcaagcgcgaaggcagcaaggtctggctcctggccgaaaaccctgagtttgccccgatcgaagtcaacctgaaagaccaggacctggtgatcgaaggcttgagtgtcggcgtcattcgccgttaag

SEQ ID NO: 263552 - DNA, 679 bp, Unknown
  Bacterial polypeptide expressing nucleotide sequence isolated from the Sargasso Sea
atgcttactaaaaaacaaaaaaacctgctgttatttatcaacaagaagttgagaagctcaggtgtatctccctcatatgaagagatgaaagagtcattaaatttaaagtctaaatcaggaatccatagattaattagtgcattagaagaaagaggatttattaaaagacttgctcataaagcaagagctctagaagttatcaaattgccagaaactgcatcagctaatgatatttataacagtttttctcctagcgttataaaaggtggtttagatgaagaaaaaccattatctgacgacgttgaagtgccagttttaggtaagatagcagcagggacacctgttgaagctatacaaaatgaggtttcaagaattcccttaccaagtaacttagaaaagaacggggactattttggtctaaaagttcaaggtgactcaatgatagaagcaggaattaacgaaggtgatacagttattatcaaaagaacagatactgcagataatggaaaaattgtagtagccttaatagatgaacatgaagctatgcttaaaagaattagaaaaaaaggcaaggtagttgcattagaaagcgctaacaagaactatgaaactaaaatttttggtccagatagagttaaagttcaaggtgttttagtatctttatatagaaacttctagt

SEQ ID NO: 263553 - DNA, 469 bp, Unknown
  Bacterial polypeptide expressing nucleotide sequence isolated from the Sargasso Sea
tatgcgcccactcacagctcgacaaactgaagttttagaacttataaaatcaaacatgcaagaaacgggaatgccgcctacgcgtgcagaaatagcccgtcacctaggttttaggtctgctaacgctgctgaagaacatctaaaggcacttgcgcgtaaaggcgttattgaaattttgccaggaacgtctcgcggtatcaaactgactgttcctattgaagaagaagtggttgaagaggaaggattaccgttaattggtagagtcgccgctggtgagcctattcttgctcaagagcacgtagagtcgcactataaagtggatcctgccctattccagcctcatgcagactttttactacgcgtaaacggcatgagtatgaaagacattggtattctagatggcgacttgttagcggtacatcgcacaaccgatgttcataacggggcagttgtagttgcaagagtagac

SEQ ID NO: 263554 - DNA, 592 bp, Unknown
  Bacterial polypeptide expressing nucleotide sequence isolated from the Sargasso Sea
atgcttactaaaaaacaaaaaaacttgcttttatttatcaacaagaagttgagatcatcaggcatttctccatcgtatgaggagatgaaagactcactaaatcttaagtcaaagtcaggaattcatagattgattagcgccttagaagaaagaggttttattaaaagactagctcataaagccagagctttagaggttgtaaaactacctgaaacagcttcagctaatgatatatataatagtttttctccaagtgtaattaaaggtggattagacgaaacaaatataaaaaatgatagcggtagtgatcttcctgttctgggaaatattgcggcagggacaccggttgaagccattcaaaatgaagtagctagaattcctttaccaagtaatatagaaaaaaatggagattattttggtttaaaagttcagggagactcaatgattgaagcaggaattaatgatggtgatactgttattgtaaaaaaaacagatactgcagataatggaaaaattgtagtagcattaattgatgaccatgaagctatgttaaaaagaattagaagaaaaggtaaaacagttgcattagaaa

SEQ ID NO: 263555 - DNA, 676 bp, Unknown
  Bacterial polypeptide expressing nucleotide sequence isolated from the Sargasso Sea
tatgctaacaaaaaaacaaaaaaacctacttttatttatcaacaagaagttgagaagctctggtgtatctccttcttatgaagaaatgaaagcttcacttaatctaaaatccaaatctggaattcatagactaattagtgctttggaggaaagaggatttataaaaagactggcccataaagcaagagctttagaagtaataaaattacctgaaacagcttctgctaatgatatttataatagcttctcaccaagtgtaataaaaggtggcttagacagtgagcaggaaattggtggagtagaaataccagtattaggtaaaattgctgctggaactcctgtagaagcgatacaaaatgaggtttctagaattccacttcctgaaaatattgaaaaaaaaggtgaatattttggattaaaagttcaaggtgactctatgattgaagcaggtattaatgatggagatacggttgttattaaaaagaccgatacagctgataatggaaaaatagttgttgctcttattgatgatcatgaggcaatgttaaaaagaattcgaaaaaaaggtaaaactgtagctcttgaaagtgctaataaaaattacgaaactaaaattttcggacctgatagagtaaaagttcaaggtgttctagtatctttatatagaagtttctaa

SEQ ID NO: 263556 - DNA, 679 bp, Unknown
  Bacterial polypeptide expressing nucleotide sequence isolated from the Sargasso Sea
tatgctaacaaaaaaacaaaaaaacctgcttttatttatcaacaagaagttgagaagttctggagtctctccttcatatgaagagatgaaacagtctcttaatttaaaatctaaatcaggtattcacaggttgatcagtgctttagaagaaagaggttttattaaaagattagctcacaaagcaagagctttagaggtaattaaattaccagaaaccgcttctgcaaatgatatttataatagcttttcaccaagtgtaattaaaggtggattagatgaagaacaaactaattctgatgaaattgaagtaccagttcttggaaaaattgctgcaggaacgcctgttgaagcaatacaaaatgaagtttctagaattcccctgccaaataatttagaaaaaaatggagattactttggattgaaagttcaaggtgactctatgatagatgcaggtattcatgaaggtgatacagttattataaaaagaactgacactgccgataatggtaaaattgttgtagcattgattgatgagcatgaggctatgttaaaaagaattcgaaaaaaaggcaaagttgtagcccttgaaagtgccaatagaaactatgaaactaagatttttggacctgatagagtaaaagttcaaggagttttagtatctttatatagaaacttctaa

SEQ ID NO: 263557 - DNA, 673 bp, Unknown
  Bacterial polypeptide expressing nucleotide sequence isolated from the Sargasso Sea
tatgttaacaaaaaaacaaaaaaacctacttttatttatcaacaagaagttgagaagctctggtgtttctccatcttatgaggaaatgaaaacatcattgaaccttaaatctaaatcaggaattcatagattaataagtgctttagaagaaagagggtttatcaaaagacttgctcataaagcaagagcattagaggtgattaaattgccagaaacagcttctgctaatgacatctataatagtttttcaccgagcgttataaagggtggtttagatgaggaaaatttatcaccagatgatgctgaggtgccagttttgggaaaaattgctgctggaacacctgttgaagctattcaaaatgaggtttcaagaatacctttgccaagcaatttagagaaaaatggagattattttggtttaaaagttcaaggagactcaatgattgaagctggaattcatgaaggtgatacagtaattattaaaagaactgatacagctgataatggaaaaattgttgttgctctaattgatgagcatgaagcaatgttaaaaagaattagaaaaaaaggtaaagttgttgcattagaaagtgctaacaaaaattacgaaactaaaatatttggacctgatagagttaaagtacagggcgtattagtatctttatatagaaac

SEQ ID NO: 263558 - DNA, 498 bp, Unknown
  Bacterial polypeptide expressing nucleotide sequence isolated from the Sargasso Sea
tatgcttacaaaaaaacaaaaaaacttattaatatttatcaataagaagattagatcttctggcatttctccatcatacgaggaaatgaagaattcactcaacctcaagtcgaaatctggaatacataggttaatttctgctttagaagaaagaggtttcgtcaaaagattagcacataaagcaagagcgttggaagtagtaaaactgcctgaaaatgctagcgctaacgatatatttaatacatttactccaagtgtaattaaaggtggtctagacaaaaacgacaataaatctacagatgtttctgtattaggaagtatcgctgctggtacgccaatagaagctatccaacaagaagttgatagagttgctctaccagaagatttacaaaataatggtgaacattatggtttaaaagtaaaaggtgactcaatgatagaagcaggtatcgctgatggagatacagtaattatcaaaaaggtttctaatgtcgataa

SEQ ID NO: 263559 - DNA, 676 bp, Unknown
  Bacterial polypeptide expressing nucleotide sequence isolated from the Sargasso Sea
tatgcttacaaaaaaacaaaaaaacttattaatttttattaataaaaaaattagatcttcaggaatttcaccatcttatgaggagatgaaaaattcactcaacttgaagtcgaaatctggtattcacagattaattagtgctctagaagaaaggggctttgttaaaagattggctcacaaagcaagagctttagaagtagtaaagctcccagaaaatgcaagtgctaatgatatttttaattctttcacaccaagcgtgattaaaggtggtttagataaatctaaaagcaactcttctaaagtttctgtcttgggaagtattgcagctggtactccaatagaagctatacaacatgaagttgataaagttgctttaccagaagatttgcaaaaaaatggcgaatattttggtttaaaagttaaaggcgactctatgattgaagctggaataaatgatggtgacacagtaattataaaaaaaacttctactgctgacacagggcaaattgctgtagtgctaattgatgaacaagaagctaccctgaagagaataagaaaaaaaggtaacacaattgctttggaagccgctaacaaaaattacgatactaaaatatacgcttctaatagaataaaaatccaaggaagattaatttctttatatagaaactttcactaa

SEQ ID NO: 263560 - DNA, 676 bp, Unknown
  Bacterial polypeptide expressing nucleotide sequence isolated from the Sargasso Sea
atgctaactaaaaaacaaaaaaacttattaatattcatcaataagaagattagatcttcagggatttctccttcttatgaggaaatgaagaattcactcaaccttaagtcgaaatcaggcatacatagattaatttctgcattagaggaaagaggttttgttaagcgattagcacataaagctagagcattggaggtggttaaattgccagagaacgctagcgcaaatgatatatttaatactttcactccaagcgttatcaaaggtggattagataaaaataataataaatctactgatgtttcggtattagggagtattgccgctggtacaccaatcgaagctattcaacaagaagttgatagagttgctttgccagaagatcttcaaaataatggtgagcactatggtcttaaagtaaaaggtgactcaatgattgaagcaggcatttctgatggtgatacagtcattataaaaaaagtttctaatgtagataatggtcaaattgcagttgtcttaattgacgaccaagaagctactttaaaaagagtaagaaaaaaaggaaacactatcgctcttgaagcagcaaatcgaaactacggaactaaaatttacgctgcaaatagaataaaaattcaaggtaaacttgtttctttatatagaaactttcattaaa

SEQ ID NO: 263561 - DNA, 402 bp, Unknown
  Bacterial polypeptide expressing nucleotide sequence isolated from the Sargasso Sea
cgctggaagagagtggtctgccgctgatcggcaaggtggccgccggcgagcccatcctggcgcaggaacatatcgagagccactaccaggtggatccggccctgttccacccgcgggccgacttcctgctgcgggtgcagggcatgagcatgaagaacatcggcattctggatggcgacctgctggcggtacacaagacccaggaggtgcgcaacggccaggtggtggtggcgcggctcgacgaggatgtcaccgtcaagcgcttccagcgcaagggcagccaggtgtggctgctgccggagaacgaagagctctcccccatcgaggtggatctctcctgccagcagctcaccatcgaggggctggcggtcggtgtcattcgcaacgccgactggatgtaat

SEQ ID NO: 263562 - DNA, 688 bp, Unknown
  Bacterial polypeptide expressing nucleotide sequence isolated from the Sargasso Sea
tatgttaactaaaaaacaaaaaaatctgcttttatttatcaacaagaagttgagatctagtggtgtatctccttcttacgaggaaatgaaagagtcactaaatctaaaatctaaatctggaattcatagattgattagtgccctagaagaaagaggttttattaaaagattggctcataaagcaagagctttggaagtcattaaattacctgaaacagcatcagcaaatgatatttacaatagcttttcaccaagtgtaattaaaggtggacttgatgaaagttcaaatagaaataattctaatgaaaatgaaatccctgttttgggaaagattgctgcaggtacacctgttgaagcaattcaaaacgaagttgctagaatacctttgccttcaaatattgagaagaatggagaattttttggacttaaagtccaaggagactccatgattgaagctggaataaatgatggtgatacagtaattgtgagaaaagctgatactgcagaaaatgggaaaattgtagttgctttaattgacgatcatgaggcaatgttaaaaagaattagaagaaaaggtaaaactgtagctttagaaagcgctaatcgtaattacgagacgaaaatatttggtcctgatagagttaaagttcaaggaattctagtatctttatatagaaacttttcctaa

SEQ ID NO: 263563 - DNA, 486 bp, Unknown
  Bacterial polypeptide expressing nucleotide sequence isolated from the Sargasso Sea
tatgttaacaaaaaaacaaaaaaatttattattgtttataaacaaaaaattaagaagcacaggtgtgtccccttcttatgaagagatgaagcagtcattaaatctaaaatcaaagtcaggaattcacaggttaattagtgctctagaagaaagaggatttataaaaagattagctcacaaagctagagctttagaagttgtaaaactgcccgaaactgcttcagcaaacgatatttataacagtttttctccaagtgtcattagaggtggtttagatgatgataataatattgataaaaatgaaattccagttttaggtaagatagcagccggcacaccgattgatgctattcaaaacgaagtatcaagaatacctttgccttcaaatattgaaaaaaaaggagagttttttggactaaaagttcaaggagattcaatgattgaagctggtattaatgaaggggacacagtagtaattaaaaaaac

SEQ ID NO: 263564 - DNA, 508 bp, Unknown
  Bacterial polypeptide expressing nucleotide sequence isolated from the Sargasso Sea
atgctgaaactgacgccacgccaagccgagattctcgccttcatcaaacgctgcctggaagacaacggctacccacccacccgcgcggaaatcgctcaggaactggggttcaaatcgcccaacgccgcagaagagcacctcaaggccctcgcccgcaagggggctatcgagatgactccaggcgcttcacgcggcattcgcattcccggcttcgaggcaggtgccgcgaacgaggatgcgggcctcccggtaatcggccgtgtcgccgccggcgcaccgatccttgcacagcaacatgtcgaggaatcctgccagatcaatccggcgttctttcagcccaaagccgactatctactgcgtgtacgcggcatgagcatgaaagacatcggcatcttcgatggcgatctgctcgccgtgcacaccacccgtgaagctcgtaatggccagattgtcgtcgcccgtatcgacgatgaagtgacggtcaaacgcttcaagcgcgagggcaaca

SEQ ID NO: 263565 - DNA, 649 bp, Unknown
  Bacterial polypeptide expressing nucleotide sequence isolated from the Sargasso Sea
atgaccaaactcaccgcccgtcagcagcaagtgttcgacttgatccgtcgcgcgatcgagcgctccggattcccccccacccgtgccgagatcgcggccgaactgggcttcagctcgccgaatgccgccgaggagcacctgcgcgcgctggcgcgcaagggtgtcatcgagctggccgccggcgcgtcgcgcggcatccgcctgctcggcatcgacgatgccccgcaccagttcacgctgccgcacgccggcctgatgcagttgtcgctgccgctcgtcggccgcgtcgcggccggtagcccgatcctggcgcaggagcacatctcgcagcattacgcgtgcgatcccgcgctgttctccagcaagcccgactacctgctgaaagtgcgcggcctgtcgatgcgcgacgccggcatcctcgacggcgacctcctcgccgtgcagaagcgcacggaagcgaaggacggccagatcatcgtcgcgcgtctcggcgacgacgtcacggtcaagcgcctgatgcgccggcctggcggtctcgagctgatcgcggagaaccccgattacgaaaacatcttcgtcaaggccggcagcgcggaattcgcgctggaaggcatcgccgtcgggctgatccgctcgggcgaactctgac

SEQ ID NO: 263566 - DNA, 628 bp, Unknown
  Bacterial polypeptide expressing nucleotide sequence isolated from the Sargasso Sea
tatgcgcccactcacagctcgacaaaccgaagttttagaacttattaaaacaaccatgttagaaacgggaatgccgcctactcgtgcggaaatagcccgtcagcttggctttcgttctgctaatgcagcagaggaacatttgaaagcattggcgcgtaaaggcgtgattgaaattttgcctggtacgtctcgtggcattaagctcaatatccctcttgataacgacgcacaagaagaagaaggcctaccgttaattgggcgtgttgcagccggtgagccgatcttggcgcaagagcatgttgaatcgcactacaaagtcgatcctgcactgtttcaaccccatgccgactttttgctacgcgttaacggtatgagcatgaaagacattggtattttagacggtgatcttctcgctgttcatcgcaccactgatgtacacaacggtcaggtggttgtggcgcgtgtagatgaagacgtcaccgtaaagcgtctagagaaacgcgggcgtgaagtattgcttcatgctgagaatgatgagtttgcaccaataaaagttgatttggcgactgaacattttgcgatagaaggcattgcggtgggtgtgatcagaaacgctgactggatgtag

SEQ ID NO: 263567 - DNA, 631 bp, Unknown
  Bacterial polypeptide expressing nucleotide sequence isolated from the Sargasso Sea
atgcttacttttcaacaggaaaaattattaaaatttataattgactatcaaaaacaaaataatgttacgccaagctttgatgaaatgaaagacggtttagatttgaagtcaaaatcaggtattcatagaatagtgtcagctcttgaagaacgaggatatattaaaaaacttaacaatagagctcgagcaatagaaataataaaaaaagtacatttaattgatactgaaagtggcaaaaataaaaataatattatttcaattccaattttgggtaaaatagctgcaggcctccccatagaagcaatatctgataatacaaattatatagaattgcctgaaacattattaaaaaaaggtgaatattttatacttaatgttgagggtgattcaatgattgaagcaggaatatttgatggtgatcaggttgttattagaaaagctaatgatgccaataatggcgaaattgtagttgcgctaattgataataatgaagcaacattgaaaagaatattcaaacgcggtcagcaagttgctttacaaccagaaaacagtaactataaaacagtcatttacggtccagacagaattcaaattcaaggtgtattaaagcatttaattagaagctattaat

SEQ ID NO: 263568 - DNA, 532 bp, Unknown
  Bacterial polypeptide expressing nucleotide sequence isolated from the Sargasso Sea
tatgttaactaaaaaacaaaaaaacctacttctctttatcaacaaaaagttgagatctacaggtgtgtccccttcatatgaggaaatgaaagaatcattaagtttaaaatcaaaatcaggaattcacagacttatcagtgcattagaggaaagaggctttattaagagattagcccacaaggctagagcattagaagtaattaagttgcctgaaacagcatctgcaaacgatatttataatagtttttctccaagcgttattaggggaggattagatgtggaaaatttaaataattctaatgatacagaaatacctgtgctaggaaaaatcgctgcagggactccagttgaagctatacagaatgaagtttcaagaattccactaccagcaaacattgaaaaagatggagaattttttggtttaaaggttcaaggagactctatgattgaagctggaattaatgatggtgatactaaaatggtaaaaaaagcagatactgcagataatggaaaaatcgtagtagctttaatt

SEQ ID NO: 263569 - DNA, 682 bp, Unknown
  Bacterial polypeptide expressing nucleotide sequence isolated from the Sargasso Sea
atgttaactaaaaaacaaaaaaacctgcttttatttatcaacaagaagttgagatctactggagtctctccttcttatgaagaaatgaaacactcattaaatcttaaatcgaagtcaggtatacacagattaataagcgctttagaagaaagaggctttattaaaagattagcacacaaagcaagagctttggaggttattaaacttcctgaaacggcatcagcaaatgatatttataattcattttctccaagtgttataaaaggaggacttgatgagactaattcattaaatgaagataaagatattccagttcttggtagcattgctgcaggtacacctattgaagctattcaaaatgaagttgctagaatccctctacctgaaaatattgaaaaaaatggcgaatttttcggtttgaaagtaagtggagattcgatgattgaagctggaataaacgatggtgatactgttataataaaaaaaacagatacagcggaaaatggaaaaattgttgtagctttaattgatgatcatgaagcaatgttaaaaagattgagaagaaaaggtaaaacggttgcccttgaaagtgctaacagaaattatgaaacaaaaatttttgggccggatagagtaaaagtacaaggtattctagtatctttatatagaaactttcattaaa

SEQ ID NO: 263570 - DNA, 622 bp, Unknown
  Bacterial polypeptide expressing nucleotide sequence isolated from the Sargasso Sea
atgagaccgttgacgccacgccaagccgaaattttagagctgattaaacgtaatattgccgagactggcatgccacccacccgggccgaaatcgccacccgtttgggttttaaaagtgcaaatgccgccgaggaacaccttaaggcattggcgaaaaaaggctgcatcgagatcatgccaggcacttcccgcgggatccgcctcccagttgaggaagaagataacagcgaatcaggcttaccactgattggccaagtggctgcgggcgaaccaatcctcgcccaagagcatgtcgaacagtattaccaagtcgaccctagcatgttccaccctgccgccgatttcttactgcgcgtcagaggcgacagtatgaagaacatcggtatcctcgagggggatctgctcgccgttcataaagtacagcaagcgcgcaatggccaagtagttgttgctcgcgttgacgatgatgtaacagttaaacgctttgaaaagaaagggaatctagtttatctacatgcagagaatgaagattactccccaattaaagtcgatttaagtttccaaagtctaacaatagaagggctcgccgtaggggtgatccgcaatggagattggctatgaa

SEQ ID NO: 263571 - DNA, 682 bp, Unknown
  Bacterial polypeptide expressing nucleotide sequence isolated from the Sargasso Sea
atgctaacaaaaaaacaaaaaaacctgcttttatttatcaacaagaagttgagatcttcgggtgtatccccttcttatgaagaaatgaaacattcactaaatttaaaatctaagtccggcatacatagattaataagtgctttagaggaaagaggttttataaaaagattagctcataaagctagagcattagaggtaattaaactaccagagactgcctcagctaatgatatatataatagtttttcacctagtgttataaaaggtggattagacgaatctaataatattggcaaagaaagcgagattcctgtgttaggaactattgcagcaggaactccaattgaagcaatacaaaatgaagtgacaagaattcctctaccagaaaatatagaaaaaaatggagaatattttggattaaaagtaaatggagattctatgatagaggctggaataaacgatggtgacacagttataattaaaaaaacagatacagccgaaaacggaaaaattgttgtagcattaatagatgatcatgaagcaatgcttaaaagattaagaagaaaaggtaaaactgtagctttagaaagtgcaaatagaaattatgaaacaaagattttcgggccagatagagtaaaagttcaaggtattctagtatctttatatagaaactttcattaaa

SEQ ID NO: 263572 - DNA, 628 bp, Unknown
  Bacterial polypeptide expressing nucleotide sequence isolated from the Sargasso Sea
tatgcgcccactcacagctcgacaaacagaagttttagaacttatcaaaactaccatgcaagaaacggggatgccgcctacgcgtgcggaaatcgctcgtcaacttggttttcgttctgccaacgctgcagaagaacatttgaaagccttggcgcgtaaaggcgtgatagaaattctgccgggtacctctcggggtatcaaactcaatattcccctcgaaaatgacgtacctgaagaagaaggcctacctctcatcgggcgtgtggcggcgggtgagccaattttggcgcaagagcacgtagaatcacactacaaggtagaccctgcactgtttcaacctcaagcagactttttactgcgtgttaacggcatgagcatgaaggacataggtattttagatggtgatctccttgctgtgcatcgcaccaccgatgttcacaatggccaggttgttgtggcacgtgtagacgaagacgttacggtaaagcgtttagagaaacgtggtcgtgaagtattacttcatgccgaaaacgaagaattcgcacctattcgagtagacctagccaacgaaccttttgctattgaggggatcgcagtgggcgttataagaaacgcggattggatgtaa

SEQ ID NO: 263573 - DNA, 679 bp, Unknown
  Bacterial polypeptide expressing nucleotide sequence isolated from the Sargasso Sea
tatgctaacaaaaaaacaaaaaaacctacttttatttatcaacaagaagttgagaaattctggtgtatctccttcatatgaagagatgaaacagtctcttaatttaaaatctaaatcaggtattcatagattgattagtgctttagaagaaagaggttttattaaaagattagctcacaaagcaagagctttagaggtaattaaattaccagagacagcttctgccaatgatatttataatagcttttcacctagtgtcattaaaggtggactagatgaagaacaaactgattctgatgaagtagaagtaccagtacttggaaaaattgctgcaggaacacctgttgaagcaatacaaaatgaggtttctagaattccactaccaaataatttagaaaaaaatggtgattactttggattaaaagttcaaggtgactctatgatagacgcaggtattcatgaaggtgatactgttattataaaaagaactgatactgctgataatggtaaaattgtagttgctttaatagatgagcacgaggcaatgttaaaaagaattcgaaaaaaaggcaaagttgtagcacttgaaagtgctaatagaaactatgaaactaagatttttgggcctgatagagtaaaagttcaaggagttttagtatctttatatagaaacttctaa

SEQ ID NO: 263574 - DNA, 651 bp, Unknown
  Bacterial polypeptide expressing nucleotide sequence isolated from the Sargasso Sea
tatttatcaacaagaagttgagaggctcaggtgtatctccatcatatgaggaaatgaaggattcactaaatttaaaatcaaaatcaggtattcatcgtttaattagcgcattagaagaaagaggatttattaaaagacttgcccataaagcaagagctttagaggtaatcaaattacccgaaactgcttctgctaacgatatttataatagtttttcgccaagtgtaattaaaggtggtttagatgaaaatacaaatagcactgaaggacctgaagtacctgtgctagggaaaattgctgctggaacgcccgttgaagctattcaaaacgaggtttcgagagttcctttaccaagtaatttagaaaaaaatggaagttattttggacttaaagtgcaaggtgactcaatgatagaagcaggtataaatgagggggatactgtaattattaaaaaaacagaaactgctgaaaatgggaaaatagttgttgctttaattgatgatcatgaggcaatgctgaaaagaattagaaaaaagggtaaaactgtagcgctagaaagtgctaatagaaactacgaaacaaaaattttcggtcctgacagagttaaagttcaaggtatattggtatctttatatagaaacttttcataaa

SEQ ID NO: 263575 - DNA, 256 bp, Unknown
  Bacterial polypeptide expressing nucleotide sequence isolated from the Sargasso Sea
gctgtccatgcgcgacgcgggtatcttcgacggcgacctgctcgcggtacagaagaaaagcgaagccaaagacggccagatcatcatcgcgcgccttggcgacgacgtgacggtcaagcgcctgaagcgccggccgaacggtatcgagttgatcgccgagaaccccgattacgacaacatcttcgttgaaaccggcagcgcggaatttgcgctcgagggtatcgccgtcggcctgatccgcccgggtgagttctaa

SEQ ID NO: 263576 - DNA, 676 bp, Unknown
  Bacterial polypeptide expressing nucleotide sequence isolated from the Sargasso Sea
atgctaacaaaaaaacaaaaaaacttacttatattcattaataagaagattagatcttctgggatctctccatcatatgaggagatgaaaaattcactcaaccttaagtcgaaatcaggaattcatagattaatctcagctttagaggagcgagggttcgtaaaaagattagcgcataaagctagagctttagaagttgttaaattacctgaaaatgcaagtgctaatgatatttttaatacttttacaccaagtgttattaaaggtggattagataaagacaaaacaaaatcaactgatgtatctgttttaggaagtattgcagctggaactcctattgaagctattcaacaagaagttgatcgagtagctttacctgaagatttgcaaaataacggtgagcattatggtttaaaagtaaaaggtgactcaatgattgaagctggtatcaatgatggtgatacagtaattgttaagaaaacttcaaatgtagatagtggtcagattgcggttgttttaattgatgaccaagaagcaactttaaaaagagttagaaaaaaaggaaacactatagctctagaagctgcaaatagaaactacggtacaaaaatctacgctgcgaatagaataaaaattcaaggtaaacttgtttctttatatagaaactttcactaaa

SEQ ID NO: 263577 - DNA, 682 bp, Unknown
  Bacterial polypeptide expressing nucleotide sequence isolated from the Sargasso Sea
tatgttaactaaaaaacaaaaaaacctgcttttatttatcaacaagaagttgagatccagtggcgtatctccctcttatgaggaaatgaaggaatccttaaatctaaagtctaaatcaggaattcatagattaattagtgctttagaagaaagaggctttattaaaagattggctcataaagcaagagctttggaagtcattaagttacctgaaacagcttcagcgaatgatatttacaatagtttttcaccaagtgtaattaaaggtggacttgatgaaagtccaaatcgaaataattcagatgaaaatgaaatacctgtattaggtaaaattgctgctggtacacctgttgaagcaattcaaaatgaagtttctagaatacctttgccttccaatatagagaaaaatggagaattctttggactaaaagtgcaaggagattcaatgatcgaggctggaataaatgatggtgatacagtaattgtgaaaaaagctgataccgctgaaaatggaaaaatagttgttgcgttaattgatgatcatgaagcaatgctaaaaagaataagaagaaaaggtaagaccgtagctttagaaagtgcaaatagaaattacgaaactaaaatatttggtcctgatagagtaaaagttcagggaattctagtatctttatatagaaacttt

SEQ ID NO: 263578 - DNA, 694 bp, Unknown
  Bacterial polypeptide expressing nucleotide sequence isolated from the Sargasso Sea
atgcttactaaaaaacaaaaaaacttgcttttatatatcaacaaaaagttgagatcatcaggtgtgtctccttcttatgaagaaatgaaacattcattaaatcttaagtcaaaatctggaatacatagattaataagcgctttagaagaaagaggttttataaaaaggttagctcataaagctagggctctagaagttattaaacttcctgaaactgcttcagcaaatgatatttataattctttttcaccgagtgtaattaagggaggattagatgaagcaaatcaatcatctaaggacactgatataccggttctaggaagtattgcggcaggtacaccaatagaagcaatacaaaacgaagtaactcgaattccattacctgaaaatattgaaaaaaatggtgaattttttggattaaaagtgagtggtgattcaatgatagaagctggaatcaatgatggtgatactgtaataattaaaaagacagatactgctgaaaatggaaaaattgtggttgctttaattgatgatcatgaggcaatgttaaaaagattaagaagaaaaggtaaaactgttgctcttgaaagcgcgaatagaaattttgaaactaaaatttttggccctgacagagtaaaagttcaaggtattctagtatctttatatagaaactttcatttaaatagtctaaaca

SEQ ID NO: 263579 - DNA, 679 bp, Unknown
  Bacterial polypeptide expressing nucleotide sequence isolated from the Sargasso Sea
atgctaacaaaaaaacaaaaaaacctacttttatttatcaacaataagttgagaagttcaggtgtatctccttcatacgaagagatgaagcagtcacttaatttaaaatctaaatcaggtattcatagattgattagtgctttagaggaaagaggttttataaagaggttggctcataaagcaagagcattagaggtaattaaattaccagaaacagcctctgctaatgatatttataatagcttttcccctagtgtaatcaaaggtggactagatgaggaacaaactaattctgatgaaatagaagttccagtccttggaaaaattgctgcaggaacacctgttgaagcaatacaaaatgaggtttctagaattccattaccaaataatttagaaaaaaatggtgattactttggattaaaagttcagggtgactctatgatagatgcaggtattcatgagggtgatacagtaattattaaaagaacagacactgctgataatggtaaaattgttgttgctttaattgatgagcatgaggcaatgttaaaaagaattaggaaaaaaggcaaagtagttgcccttgaaagtgctaataggaactatgaaactaagatttttggacctgatagagtaaaagttcaaggcgttttagtatctttatatagaaacttctaaa

SEQ ID NO: 263580 - DNA, 676 bp, Unknown
  Bacterial polypeptide expressing nucleotide sequence isolated from the Sargasso Sea
tatgcttacaaaaaaacaaaaaaatttattaatctttattaataaaaaaataagatctacgggaatatctccttcatatgaagaaatgaagaattcgctcaaccttaagtcgaaatctggaatacatagattaatttctgctttagaagagagaggttttgtcaaacgtttggctcataaagccagagctttagaggtcataaaattacctgaaaatgccagtgcaaacgatatttttaatactttcactccaagtgtaataaaaggaggtttagataaaaatagtaatagatctacagatgtatctgttttgggaagtattgccgctggaacacccattgaagcaattcaacaagaagttgatagagttgctttaccagaggatttgcaaaataaaggtgaacactacggtttaaaagttaaaggcgactcaatgatcgaagctggaatagcggatggcgatactgttattgttaaaaaaacttcaaatgttgatagtggtcaaattgcagtagtgttaatagatgatcaagaagcaacactaaaaagaattagaaaaaaaggaaacacaatagcacttgaagctgcaaatcgtaactatggaacaaaaatatacgcagctaatagagtaaaaattcaaggtaaacttgtttctttatatagaaactttcattaa

SEQ ID NO: 263581 - DNA, 688 bp, Unknown
  Bacterial polypeptide expressing nucleotide sequence isolated from the Sargasso Sea
tatgttaacaaaaaaacaaaaaaacctgcttttatttatcaacaaaaagttgagatctagtggtgtgtccccttcttatgaagaaatgaaggagtcacttaacttgaagtctaaatctggaattcatagattaattagtgccttagaggaaagaggctttattaaaagattagctcataaggcaagggctttggaagttattaagttgcctgaaactgcttcagcaaatgatatttataacagtttttctccaagtgtaattagaggtggacttgatgaaagttcaaatcgagataattcagatcaaaatgaaattcctgtattaggtaaaattgctgcaggtacacctgttgaagcaattcaaaacgaagtttctagaatacctttgccttctaatattgagaaaaatggagaattttttggactaaaagtgcaaggagattcaatgattgaggctggaataaatgatggtgatacagtaattgtgaaaaaagctgatacagctgaaaatggaaaaatagttgtcgctttaattgacgatcacgaagcaatgctaaaaagaattagaagaaaaggtaagaccgtggctttggaaagtgctaatcgaaattacgagacgaaaatatttggtcctgatagagtcaaagttcaaggaattctagtatctttatatagaaactttttctaa

SEQ ID NO: 263582 - DNA, 628 bp, Unknown
  Bacterial polypeptide expressing nucleotide sequence isolated from the Sargasso Sea
tatgcgtccattaacaccaagacaagccgaaattttgcaactgcttaaagattatcaggcagcttcaggtatgccaccgacccgtgctgaaattgctactcagctgggatttaagtcagccaacgctgctgaagagcatttaaaagcgctggcaaaaaaaggttttatcgaaatgatgccgggcacgtcccgtggtatacgtttggttgaagatgaagctgccaatgatgttgaagaagagccgggtttgccattgattggcaaagtggctgctggccaacctattctggcagcagaacatattcagcagcgttatcaactcgatgccagtttatttaaacccaatgccgactttttattaaaagtgcagggcatgagtatgaaagacattggtattctggatggcgatttattggctgtgcacaaaaccacagaagctcgtcagggtcagatcgtagtcgcccgggttgaagatgaggtcacagtaaagcgttttcgccgtgaaggccagatggtttacctgcatccggaaaacggtgattttgacgtgattaaagtggacttaagccaacagcattttgccattgaaggcctcgccgttggtgtgatccgcactagtagctggtaa

SEQ ID NO: 263583 - DNA, 673 bp, Unknown
  Bacterial polypeptide expressing nucleotide sequence isolated from the Sargasso Sea
tatgttaactaaaaaacaaaaaaacttattaatttttattaataaaaaaattagaagcagtggtgtttctccttcttatgaagaaatgaaacattctttaaatttaaaatctaaatctggaattcatagattaataagcgcattagaagaaagaggatttatcaaaagattagctcacaaagcaagagctcttgaagtaataaaattgcctgaaactgcatcggctaatgacatttataatagtttttcacctagtgttataaaaggtggattagacgaagatagcaatcaagatagtgatataccagttttagggaaaatagcagctggaacacctgttgaagctatccaaaatgaagtttcaagaatacctctgccaagtaatattgaaaaaaatggagaatttttcggacttaaagttcaaggagattctatgatagaagctgggattaatgaaggtgatactgttataatcaaaaaaactgaaactgcagataatggaaaaatcgttgttgctttaattgatgatcatgaagctatgcttaaaagaataagaagaaaaggcaaaacaatagctcttgaaagtgcaaacagaaattatgaaactaaaatttttggccccgatagagtaaaagtacaaggtgttttagtatctttatatagaaacttctaa

SEQ ID NO: 263584 - DNA, 676 bp, Unknown
  Bacterial polypeptide expressing nucleotide sequence isolated from the Sargasso Sea
atgcttacaaaaaaacaaaaaaacttattactttttattaataagaaaattagatcgactggagtttctccttcatatgaggagatgaaaaattcactcaaccttaagtcgaaatcaggaattcatcgactaatatcagccctagaggaaaggggatttataaaaagattagcacataaagctcgtgctcttgaagttgttaagcttcccgaaaacgctagcgctcacgatttattcaacagctttactccaagcgtaattaaaggtggcttagataaaaactcaggaaaatctagtaagatctcagtgttaggttcaattgctgcaggtacaccgattgaagccatacaacaagaagttgataaagtaaatttaccagctgacttcaataaaaatgacgatcacttcggattaaaagttaaaggtgactctatgattgaagcaggtatcaacgatggggacactgttatcattaaaaaaagttcaaatgcagataatggtcaaattgcggttgttttgattgataacgaagaagctactttaaaaagaattagaaaaaaaggtaatacaattgcattagaaagtgccaacaaaaaatatggtacaaagatatacgcagcaaaaagaattaagattcaaggaaaattggtttctttgtatagaaacttcaattaaa

SEQ ID NO: 263585 - DNA, 679 bp, Unknown
  Bacterial polypeptide expressing nucleotide sequence isolated from the Sargasso Sea
tatgcttacaaaaaaacaaaaaaacttacttttatttatcaacaagaagttgagaagctcaggtgtatctccttcatatgaagagatgaaacaatctctaaatttaaaatctaagtcaggaatacacagattgataagcgctttagaagaaagaggttttataaaaagacttgcgcataaagctagagccttagaggtaataaaacttcctgaaactgcctctgcaaacgatatttataataatttttcacctagcgttataaaaggtggtttagatgaagagttagttaattctgacgaggtagaggtaccagttcttggtaaaattgcagctggaactccagttgaagcaatacaaaatgaagttgctagaatacctttgccaaacaatttagaaaaaaatggagattactttggtttgaaagttcaaggtgattctatgatagaagctggtattcatgaaggtgatacagtaattatcagaagaacagatactgcagacaatggaaagattgtagttgctttgattgatgaacatgaggcaatgcttaaaagaattcgtaaaaaaggtaaagttgtcgctttagaaagtgcaaatagaaactacgaaactaaaatttttggaccagatagagttaaagttcagggtgttttagtatctttatatagaaacttctaa

SEQ ID NO: 263586 - DNA, 679 bp, Unknown
  Bacterial polypeptide expressing nucleotide sequence isolated from the Sargasso Sea
tatgctaacaaaaaaacaaaaaaatttattattatttattaataaaaaactgagaagttctggtgtttctccctcttacgaagaaatgaaagattctcttaatttaaaatctaaatcaggaatacataggttaattagcgccttagaagagagaggatttataaaaagattagcacataaagctagagctttagaggtaataaaactacctgaaactgcttcagctaacgatatttataataatttttcaccaagcgtaattaaaggtggtttagatgaaagtaataaattcactgaaaatggagtgccagttcttggagatatagctgctggaacaccaatagaagccattcaaaacgaagtcactaggatccctttgccagataatattgaaaaaaaaggtgaattttttggattaaaagtaagtggagactcaatgatagaggcaggtataaatgacggtgatacagtaattattaaaaaaacagacacagcagaaaacggtaaaattgttgttgcattaattgatgatcacgaagcaatgcttaagagaataagaagaaaaggcaaaacaattgcactagagagtgctaataggaattatgagaccaaaatatttggtcctgacagagttaaagtacaaggtgttctcgtatctttatatagaaactttcactaa

SEQ ID NO: 263587 - DNA, 682 bp, Unknown
  Bacterial polypeptide expressing nucleotide sequence isolated from the Sargasso Sea
atgcttacaaaaaaacaaaaaaacctacttttatttatcaacaagaagttgagatcttctggtgtttctccctcatatgaagaaatgaaacaatcattaaatcttaaatctaaatctggaattcatagattaataagtgctttagaagaaagaggttttataaaaagattagcccataaagcgagagctttagaggttattaaacttcctgaaactgcatcagcaaatgatatttataattcgttttctccaagcgtcataaaaggaggccttgatgatagcaattcatcaaataaaaacacagatattcctgtgcttggaagtattgctgcaggtacacctattgaagctattcaaaacgaagtgactagaattcctctgcctgagaatattgaaaaaaatggtgaattttttggtttaaaagtgagtggagattcaatgattgaagcaggaataaatgatggtgatacagtcgttattaaaaaaactgatactgctgaaaacggaaaaattgtagttgcattaattgatgatcatgaagcaatgttaaaaagattaagaagaaaaggaaaaaccgttgctcttgaaagtgcaaatagaaattacgaaactaaaatctttggtcctgatagagtaaaagttcaaggtattctggtatctttatatagaaacttccattaaa

SEQ ID NO: 263588 - DNA, 484 bp, Unknown
  Bacterial polypeptide expressing nucleotide sequence isolated from the Sargasso Sea
actgtataaaagaacagagaccgacatgatcaagctgacgcctcgccagacggaaatcctcgcgttcatcaagcgctgcctggaagacaatgggtatccacccactcgcgcagagatcgctcaggaactcggcttcaagtcacccaacgctgccgaagaacatctcaaggcacttgcccgcaaaggcgctatcgagatgacgcctggggcgtctcgcgggatacgtattccggacttcgagcccgccgcatccgaaaatggcctgccgatcatcggccgcgttgctgccggcgcgccgattctggcgcagcaacatgtcgaagaatcctgccagatcagccccgcgtttttccatccgcgcgcggattatctgctgcgtgtccacggcatgagcatgaaggacgtcggcatttttgatggcgacctgctggccgtgcacaccacccgcgaggcccgcaacggccagatcgtggtgctcgcgtcg

SEQ ID NO: 263589 - DNA, 679 bp, Unknown
  Bacterial polypeptide expressing nucleotide sequence isolated from the Sargasso Sea
tatgcttacaaaaaaacaaaaaaacttacttttatttatcaacaagaagttgagaagctcaggtgtatctccttcatatgaagagatgaaacaatctctaaatttaaaatctaagtcgggaatacacagattgataagtgctttagaagaacgtggttttataaagagactagctcacaaagctagagccctagaagtgataaagcttcctgaaacagcctctgcaaacgatatttataataatttttcacctagcgttataaaaggtggtttagatgaagagcgagtaaattctgatgaagtagaagtatcagttttaggtaaaattgcagctggaactccagttgaggcaatacaaaatgaagttgcaagaatacctttgcctaataatctagaaaagaatggagattactttggtttgaaggttcaaggtgactctatgattgaagctggtattcatgaaggagatactgttattataagaagaacagatactgcagataacggaaaaattgttgtcgccctaattgatgaacatgaggcaatgcttaaaagaattcgtaaaaagggtaaagtagtcgctttagaaagtgcgaatagaaactacgaaactaagatttttggtcctgacagagttaaagtccaaggtgttttagtatctttatatagaaacttctag

SEQ ID NO: 263590 - DNA, 679 bp, Unknown
  Bacterial polypeptide expressing nucleotide sequence isolated from the Sargasso Sea
tatgttaacaaaaaaacaaaaaaacctgttactatttataaataaaaaaattagaggcactggcgtgtctccttcttacgaagaaatgaaatcttctctaaatttaaaatctaaatctggaattcacagacttataagcgcattagaagaaagaggttttattaaaagattagcacacaaagctcgtgcactagaagttgtaaagttgccagaaacagcttctgctaatgatatttataattctttttcacccagtgttattaaaggtggtttaagtgacttaagtaaaacaaaaaaaaatgaaatatctgtattaggtaatattgcagcaggtactcctattgaagctattcaaaatgaagtttcgagaattcctctgccgtcaaacatagaaaacaatggtgaattttttggtttgaaagttaaaggagactcaatgatagaggctggaattaatgatggagataccgttataattaaaaaagctgaaaaagcagataatggaaaaattgtagttgctttaatcgatgatcatgaagcaatgttaaaaagaataagaattaaaggaaaaacagttgctttagagagtgctaatagaaattacgaaacgaaaatttttggcccagatagagtaaaagttcaaggtgttttgatatctttatatagaaacttcaactaa

SEQ ID NO: 263591 - DNA, 679 bp, Unknown
  Bacterial polypeptide expressing nucleotide sequence isolated from the Sargasso Sea
atgcttacaaaaaaacaaaaaaacctgcttttatttatcaacaagaagttgaggagctctggtgtatccccttcttatgaagaaatgaaggagtctctaaatcttaaatcaaaatctgggattcacagattaattagcgccttagaggaaagaggtttcattaaaaggcttgctcataaagctagagctttggaagttataaaattaccagagactgcttctgcaaatgatatttacaataatttttccccaagtgtcattaaaggaggtttggatgaagaaaaacctttatccgacgatgcagaggtgccagttttaggtaaaatagcagctggaacacctgttgaagcaattcaaaatgaagtttctagaattccattaccaaataacttagaaaaaaatggagattattttggccttaaagttcaaggagattcaatgattgaagctggaattcatgaaggtgacacagtcatcatcaaaagaaccgatacagccgataatggaaaaatagtggtagctttaattgacgaacacgaagctatgcttaaaagaattagaaaaaaaggtaaagtagtagcgttagaaagtgctaataaaaactatgaaaccaaaatttttggccctgatagagtaaaagttcaaggtgttttagtatctttatatagaaacttctaaa

SEQ ID NO: 263592 - DNA, 673 bp, Unknown
  Bacterial polypeptide expressing nucleotide sequence isolated from the Sargasso Sea
atgctaactaaaaaacaaaaaaatttattaatgttcatcaataagaagtttagaagcagtggtgtttccccatcttatgaagaaatgaaaagctctttaaatcttaaatctaagtcaggaatacatagattaataagtgcgttagaagagagaggttttattaaaagattggctcataaagcaagagcattagaggttgtaaaattacctgaaacagcttctgcaaatgatatttataattcattttcgccaagtgtaataaagggaggacttgatgaaacgacagacaatgaaaacgaaattccagttttaggaaaaattgcagccggtacaccggttgaagctattcaaaatgaagtgagcagaattccccttccagcaaatattgaaaaaaatggagaattttttggccttaaagttcaaggtgattctatgatagaagctggaataaataatggtgatacagttattgtaaaaaaagctgatactgctgaaaacggaaaaattgtggttgcattaattgatgatcatgaggcaatgctaaaaaggattagaagaaaaggtaaaactatagcgcttgagagtgcaaataaaaattacgaaactaaaatttttggacctgatagagtaaaagttcaaggtgttctagtatctttatatagaaacttttaaa

SEQ ID NO: 263593 - DNA, 679 bp, Unknown
  Bacterial polypeptide expressing nucleotide sequence isolated from the Sargasso Sea
atgctaacaaaaaaacaaaaaaacctgcttttatttatcaacaagaagttgagaagctctggtgtttctccatcttatgaggaaatgaaagcttctttaaaccttaaatctaagtcaggaattcatagacttataagtgctttagaggaaagaggttttattaaaagacttgctcataaagctagagctttagaagtaattaaattgccagaaacggcttctgcaaatgatatttataatagtttttcaccaagcgtgatcaaaggtggtttagatgaggaaaatttatcctcagatgatgctgaggtgccagttttaggaaaaattgctgcggggacacctgttgaagctattcaaaatgaggtttcaagaatacctttaccaagcaatttagagaaaaatggagattattttggtttgaaagttcaaggggactcaatgattgaagctggaattcacgaaggtgatacagttatcattaaaagaacagatacagctgataatggaaaaattgttgttgctctaattgatgaacatgaagcaatgttaaaaagaattagaaaaaaaggcaaggttgttgcgcttgaaagtgccaacaaaaattacgaaactaaaatatttggtcctgatagagtaaaagttcagggtgttttagtatctttatatagaaacttctaaa

SEQ ID NO: 263594 - DNA, 517 bp, Unknown
  Bacterial polypeptide expressing nucleotide sequence isolated from the Sargasso Sea
atgctaactaaaaaacaaaaaaacctgcttttatttatcaacaagaagttgagatcttctggagtttctccttcttatgaagaaatgaaagactctttaaatcttaaatctaaatcaggtattcatagattaattagcgctcttgaggagagaggttttataagaaaacttccacataaagcaagagctttagaagtagttaaacttccagaaacagcttcagctaacgatatatataatagtttttcaccaagtgtaattaagggtggactagatgaaaccaatacaaaacaaggaaatagtgaaattccagttttaggaagtattgcagctggtactccaatagaagccattcaaaatgaggtaaaaagaatacctttgcctgcaaatattgagaaaaatggagaatattttggtttacaagttaaaggcgattcaatgatagaagctggaatcaatgaaggtgatacagtaattgtaaaaagatctgatacagcagaaaatggaaaaattgtag

SEQ ID NO: 263595 - DNA, 622 bp, Unknown
  Bacterial polypeptide expressing nucleotide sequence isolated from the Sargasso Sea
catgagaccgttgacgccacgccaagccgaaattttagagctgattaaacgtaatattgccgagactggcatgccacccactcgggccgaaattgccacccgtttggggtttaaaagtgcaaatgccgcagaagaacaccttaaggcattggcgaaaaaaggctgcatcgagatcatgcctggtacttcccgcgggatccgtctccctgtagaggaagaagataaccgcgaaacaggcttgccacttatcggccaagtggcagcgggtgaacctattctcgcccaagagcatgtcgaacagtattaccaagtcgaccccagcatgttccaccctgctgccgatttcctgctgcgcgtaaaaggcgacagtatgaagaatatcggcatccttgagggtgacctgcttgccgttcataaagtacaacaagcacgcaatggacaagttgttgttgctcgcgttgatgatgatgtaaccgtaaaacgctttgaaaaaaaaggtaatttagtctacctacatgccgagaatgaagactattcaccgattaaagtcgatttgagtttccaaagtctaacaattgaagggctcgccgtaggggtgatccgcaatggagattggctatga

SEQ ID NO: 263596 - DNA, 685 bp, Unknown
  Bacterial polypeptide expressing nucleotide sequence isolated from the Sargasso Sea
tatgttaactaaaaaacaaaaaaacctgcttctttttatcaacaaaaagttgagatctacaggtgtgtccccctcatatgaggaaatgaaagaatcattaagtttaaaatcaaaatctggtattcacagacttattagtgcattagaagaaagaggcttcattaaaagattagcccacaaagcgagagcattagaagtaattaagttacctgaaactgcatctgcaaacgatatttataatagtttttctccaagcgttattaagggaggattagatgaggaaaatttaaacaattctaacgatacagaaatccctgttcttggaaaaattgctgcaggaactccagttgaagctatacaaaatgaagtttcaagaattccgctgccagcaaacattgaaaaagatggagaattttttggtttaaaagtacaaggggactctatgattgaagctggaattaatgatggtgatactgttattgttaaaaaagcagatactgcagataatggaaaaattgtagtagctttaattgatgatcatgaggctatgttgaaaagaattagaagaaaaggtaaaactgttgcattagaaagtgcaaatagaaattacgaaacaaaaatttttggcccagatagagtgaaagttcaaggaattcttgtatctttatatagaaactttcagtaa

SEQ ID NO: 263597 - DNA, 535 bp, Unknown
  Bacterial polypeptide expressing nucleotide sequence isolated from the Sargasso Sea
tatgttaactaaaaaacaaaaaaatctgcttttatttatcaacaagaagttgagatcttctggggtgtctccttcatatgaggaaatgaaactttctcttaatttaaaatctaaatcaggaatacataggcttataagcgctctagaagaaagaggttttataaaaaggttagctcataaagctagagccttggaagtaattaaacttcctgaaacagcttcagctaatgatatttataatagtttttcaccaagtgttatcagaggtggattagatgattctagtgctgcaaataaagaaagtgaagtaccagttttaggtaatattgcagctggaacaccaatagaagcaatacaaaatgaggttacaagaattcccttaccatcaaatattgaaaaaaatggtgaatattttggattaaaagttaatggtgattccatgattgaggctggaataaatgatggtgatacggtcataataaaaaaaactaatacagcagaaaatggaaaaattgttgttgcacttatagatgat

SEQ ID NO: 263598 - DNA, 703 bp, Unknown
  Bacterial polypeptide expressing nucleotide sequence isolated from the Sargasso Sea
gatgtacttaatttgttctatgttaactaaaaaacaaaaaaacttgcttctctttatcaacaaaaagttgagatctacaggtgtgtccccttcatacgaggaaatgaaagagtctttaaatttaaaatcaaaatctggcattcacagacttattagtgcattagaagaaagaggcttcattaaaagattagcccacaaagcaagagcattagaagtaattaagttacctgaaactgcatctgcaaacgatatttataacagtttttctccaagcgttattaagggaggactagatgaggaaaatttaaataattctaacgatacggaaatccctgttcttggaaaaattgctgcaggaactccggttgaagctatacagaatgaagtttcaagaattccactgccagcaaatattgaaaaagatggagaattttttggtttaaaggtccaaggggattctatgattgaagctggaatcaatgatggtgatactgttattgtcaaaaaagcagatactgcagataatggaaaaattgtagtagctttaattgatgatcatgaggctatgttgaaaagaattagaagaaaaggtaaaactgttgcattagaaagtgcaaatagaaattacgaaacaaaaatttttggcccagatagagtgaaagttcagggaattcttgtatctttatatagaaactttcagtaa

SEQ ID NO: 263599 - DNA, 454 bp, Unknown
  Bacterial polypeptide expressing nucleotide sequence isolated from the Sargasso Sea
atgaaattaaataaaaatataattatagataacattaaaactatcttttatgcacttgttatagcaataatcataaggtcactcattattcagcctttctatattccttcgtcgtccatggagcctaatttattagtgggtgacaggctctttgtaacaaaatattcttatggctttagcaaacactcttttccatttagtccacctttttttaaaggaagaatttttaacaattcaccaagtagaggggatgtagtagtttttaaaactccagccgataatcgaactgactatattaaaagattaattggattacctggagacaaaatacaatttatagatggagatttatacataaacaataatcaagtattgaaaacaattaaatcaaaaaatgaacttatatattgtggaaatcaaaatattaagactaataaatttgaagaaaaactcc

SEQ ID NO: 263600 - DNA, 600 bp, Unknown
  Bacterial polypeptide expressing nucleotide sequence isolated from the Sargasso Sea
agcaatctttatagctttagtaattagatcatttatatttgagccattcaatataccttcaggatcaatgaaaccaaatcttcttgtgggtgattttatttttgtttcaaaatattcatatggcttttctaaacattcccttccattttcaatacctttaatacctggaaaaatattttcaaatatacctgaaagaggtgacatagtagtatttaaaacccctcaaaataataggactgattatataaaaagagtaattggcctgcctggtgataaaatagaaattaaaaatggtattatttttattaatggatctgaaatcttaagaaaaaaattaaatgattttatagatacggataataagacaactaataaaagagtcaggatgtataatgaatatttttttaataaagagatcaatatacttgatataacagataatggtatagcagataatactcagttatttaatgtcccagaaaatcatttttttgtaatgggcgataatagagataattcacaagatagtagatttataagtacagttggatttattccttatgaaaatttagtaggtaaagcacagtttattttcttttc

SEQ ID NO: 263601 - DNA, 664 bp, Unknown
  Bacterial polypeptide expressing nucleotide sequence isolated from the Sargasso Sea
tatggattttacagtactactaattttaattacatttataagcggcatttgtctcttgttgtctaaatcaaaaaattcttcaaatactctttatagtgcttttcaattctttggatctttatttcctatattatttattgttttatttattagatcttttatagtcgaaccatataaaatcccatctgggtctatgatacccactttactcataggtgactttattctggttaaaaagtaccagtatggaataagagctcctgtaattaataaggtaattttggaaaatgaaaaaccaaactacggcgatataattgtttttcaatatcctcaaaataaaaaaatcaattatattaaaagagttgtagctttaccaggagacagcattagatacatagaaaaagaattatttgtgaatgggaaaaaatatactcaaaagcaagagataatgtatccctctagttctcaatatagcactaaagacgtttacaaagaaactaacacatataattcttataatattttaaagagcactaatccttctcagaactttgagtatcaagttcctgaaggaacttattttgttttaggtgataaccgagacaacagtaatgatagtagatattgggggccagttccatatgagaatcttattggtaaggct

SEQ ID NO: 263602 - DNA, 651 bp, Unknown
  Bacterial polypeptide expressing nucleotide sequence isolated from the Sargasso Sea
tacaaccattttatattccatcctcatccatggaacctactttgttagtaggtgataggttgtttgtaacaaaatatacctatggttatagtaagcattcatttccttttagccctccaatattaaacaaaagaattatgtttagtgcaccagaaaggggcgatgtaattgtgtttaaaactcctgcagataatagaacagactatattaaaagattaattggtttgcctggtgataaaattcagttcattgactctaatttatatttaaataattctgaaattcttaaatctaaaattaataacaaaactactattttctgtggagataaaagcattgatgtttataggtttgaggaaaagctttcaaatggaaaaaagtttcatactgtttatctaaaagattatacctatcaaaattctgatgtgtttactgtgccaaaagataattatttctttttaggggacaacagggattgttctaaagatagcagatacttaacaagtgtaggatatgtgcacaaagataatttagtaggaaaagctcaatttatatttttttcttctgataaaaaaataggcagttttatagaattttggaaatggcataagtcaataagatttaatagaacatttaataaaattaattaat

SEQ ID NO: 263603 - DNA, 522 bp, Unknown
  Bacterial polypeptide expressing nucleotide sequence isolated from the Sargasso Sea
tacctggaaaaatattctcaaatatacctgaaagaggtgatgttgtagtttttaaaacccctgaaaataatagaactgattatataaaaagagtaattggtctgcctggtgataaaataaaaattaaaaatggtattatttttattaacggatcagaaatcttaagaaaaaaaataaatgattttatagatacagataataacacgagtaataaaagagttaggatgtataatgaatatttttttaacaaagagatcaatatactcgatataacagataatggtatggctgataatactcagttatttaatgtcccagacaatcatttctttgtaatgggtgacaatagagataattcacaagatagtagatttataagtaccgttggcttcattccttatgaaaatttagttggtaaagcgcagtttattttcttttctttagaaaatgcaagatttttacaattatggaaatggccaaactcaataagatatgaaagaatttttcaaaaaattcaatgat

SEQ ID NO: 263604 - DNA, 571 bp, Unknown
  Bacterial polypeptide expressing nucleotide sequence isolated from the Sargasso Sea
tatgggtattcaagatattctttcccctttggtattgttccattaccagaaaatagagtttttgcttcagagcccaaaagaggtgatgtagcagtttttaaattaccatcgaatacaaatataaattatataaagcgagttatgggtttaccaggagataaaatacaaatgaaatctggaaaactttttataaatggtagtttagtaattcaggaggaagatggtttttatagacatattattaagaacaagtttgaacaaattcttgagcaaaaaaaagaaagattaaatgaagataaatcatacgcaatattaaatttgaatgattatcaagtgatggataacacaaaagagtttgtggtgcctaatgataaatactttgttatgggtgataacagagacaactcattagatagtagagcaaatggtggttggtttgtacctttagaaaattttgttggcaaagcaaatattattttcttttcaattactgatgatacgaggttttggcaaatttggaaatggccatttaatataagatataacagaattttcaaaaaaataagctaag

SEQ ID NO: 263605 - DNA, 700 bp, Unknown
  Bacterial polypeptide expressing nucleotide sequence isolated from the Sargasso Sea
acaattttttatgctttaattattgccgttttaattagatcaattattattcaaccattttatataccttcatcatcaatggaacccaatttattaattggagacagattatttgtatctaaatattcttatggttatagcaaacattcatttcctttcagtccgccattattcaaaggtagaattttaaaatcccttcctaaacgaggtgatgtagttgtttttaaaactccatctgataatagaacagattatataaaaagattgataggattaccgggagataaaattaaatttattgatggagatttgcatataaatggtaatcagattttaaaaacaagaatttcaacaactaataatgtatattgtggttcaaaagctatttcagttaacacatttgttgaaaaattacctaatggtaaaaaatataattctgtttatgcaaaaaggtacatatataaaaattcagataattttgtagttccaaataatcattattttttcttaggagataatagagattgctctaaagatagcagatttttatcagaagttggctacgtccacgaagataatttagtaggaaaagctcaatttatttttttttcctctgattatcgtaaaggaagtatatttaaattctggaaatggcctgatattttacgtatgaaaagattttttaaaaaaattaattaat

SEQ ID NO: 263606 - DNA, 730 bp, Unknown
  Bacterial polypeptide expressing nucleotide sequence isolated from the Sargasso Sea
ttggattccctccggttcaatgaaggatacgcttcttataggggattttctttttgtgaataaaatggcgtacgggtactcttatgcctcttgtcccagtataataattcctagatttggtattaatgttgacgcagaagatttttgtggattcgtaaaaagaaacaatgaacgcttatttggaggacagccacaaagaggtgacgtggttgtatttaggcacccagtaactggaagagattatatcaagcgccttattggcctgcccggagataaggttcaaataaaagatggtaaaataagtattaatgaccaaaaagttgagacagtggatgcgggaattttcgttgagacttatgcgccgcaagggcctttccgaaaccaaccgagatgttccaataatccaaaaaaatttggtgaagattgtgaaaagttccgaataaaatccactttaccagatggccgttccttttttaatttggagacatttaagggcgaaaatataggtaacagcatttataatgttccttctggccattatttttttatgggtgataaccgagataactctctcgatagtagagtagggcaagtccaagggggcgtaggctttgtaccttatgagaacctagtaggaagagctgatcgtgttatgttttcatcagctggtcgttccatgttgtttttctggacatggagaagcaatcgatttttcaaggcagttcagtga

SEQ ID NO: 263607 - DNA, 700 bp, Unknown
  Bacterial polypeptide expressing nucleotide sequence isolated from the Sargasso Sea
ttgaagtcaatacttatagcaatctttatagctttactgattagatcatttatatttgagcctttcaatataccttcaggatcaatgaagccaaatcttcttgtaggagattttatttttgtttcaaaatattcatacggtttttcaaaacattctcttccattttccatacctttaatacccggtaaaatattttcaaacacacctgagagaggcgatgtagtagtttttaaaactcctgaaaataatagaactgattatattaaaagagttattggtctgcctggagataaaatagaaattaaaaatggtattatttttattaatggatcagaaattttaagaaaaaaactaaatgattttatagatacagataacaaaaccagtaacaaaagagttagaatgtataatgaatatttttttaaaaaagaaatcaaaattcttgatatcacagacaatggtatagcggataatactcagttatttaatgtcccagacaatcatttctttgtaatgggtgataatagagataattcacaagatagtagatttataagtacagttggattcattccttatgaaaacttagttggtaaagcacagtttattttcttttctttggaaaatgcaagatttttacagatatggaaatggcctaattcaattagatatgaaagaatttttcaaaaaattcaatgat

SEQ ID NO: 263608 - DNA, 234 bp, Unknown
  Bacterial polypeptide expressing nucleotide sequence isolated from the Sargasso Sea
aatgatatttgattttcagacaatcctgttttttataactctatttcttgggctttcttggctcattggtaaacgaatcttaaagaaagactcagagttttatgaggtttgcggagctatgtttccgattttactccttatatttttattcagatcattcgcttacgaaccatttaggattccttcagcttccatgatgcctacactcgagagaggcgattttatattggtcaa

SEQ ID NO: 263609 - DNA, 632 bp, Unknown
  Bacterial polypeptide expressing nucleotide sequence isolated from the Sargasso Sea
aattttttttcagaaaatataaaaaccttaatttatgcattaataattgcagtcataattagatcgcttctagtacaaccattttatattccatcatcatccatggaacctactctattagtcggtgataggttgtttgtaacaaaatatacctatggatatagcaaacactcatttccttttagtcctccaatattaaataaaagaattatgtttagtagcccagaaagaggtgatgtaattgtatttaaaacgccagcagataatcgaacagattatattaaaagattaattggtttacctggtgataaaattcagtttatagactctaatttgtatttgaataattctgaaattcttaaatctaaaattaacaataaaactacaattttctgtggtaataaaagtattgatgtttatagatttgaagaaaaactttcaaacggtaaaaaatttcatactgtttatctaaaaaactatacctatcaaaattctgatgtgtttactgtaccaaaagatcattatttctttttaggtgacaacagagattgttctaaagatagcaggtatttaacaagtgttggctatgtacatcaagataatttagtaggaaaagctcaatttatattttt

SEQ ID NO: 263610 - DNA, 652 bp, Unknown
  Bacterial polypeptide expressing nucleotide sequence isolated from the Sargasso Sea
ttggtaggtatatttagtaaaaatgttttattaaaaaaaacgggaagaggctggtttgttccagtttttctcatttttgttcttcgcacctttatttacgaaccctatcagataccttctggatccatgattccagggctcaaggttggagattttattctggtcaataaacatagttatggcttaaaggtgaatagaattggaagtacttttgccttatcggcagatcctgagtacggagatgttgttgtttttatcccaccacatgtcaatgtgccgtatataaaacgtttaattggcaaacctggagataccattggatatcttaataaaaagatatatgtaaatgggaaagccattcagcaagaacttatttcgactagcgaggaagagacttttttaaaagaaactttagctaattcagatcgaataataaggattgtaggaggaagctcctcttatcctgaagagttcactgtgcctgcgaatcattatttcgttatgggagataatagagataattcgagcgactcaagattctggggatttgttccaagagagaattttatgggtactggagaactaatctggatgtcatgggagtgttggacatgcttaccgtcatttgaaagagcaggttttattcaataga

SEQ ID NO: 263611 - DNA, 384 bp, Unknown
  Bacterial polypeptide expressing nucleotide sequence isolated from the Sargasso Sea
tatgtcgatcaatttcccgctcctgttggttatcgcggtcgccgtttgcggctttctggccctggtcgatctgatcctgctggctccgcgccgccgtgcggcaattgcggcgtaccaggggcgggtcgacgatcccgacgacagggtgctggagcgcctgagcaaggagcccttgctggtcgagtacggcaaatccttctttccggtgctggctatcgtgctggtactgcgctcgtttctggtcgagccgttccagattccatccgggtcgatgaagccgaccctggaagtgggcgatttcatcctggtcaacaaattcgcttacggcattcgcctgccggtgatcgacgagaaatcatcgaggtggacaacccgcaacgcggc

SEQ ID NO: 263612 - DNA, 701 bp, Unknown
  Bacterial polypeptide expressing nucleotide sequence isolated from the Sargasso Sea
catgaaagaaaaaaaatttataaaaataattattgaaaatgttaaaacaatttttggcgcattattgattgctctatttattagatcatttttttttcaaccattttatattccctcatcatctatggagcctacattgcttattggggatagaatatttgtatctaaatatacctatggttttagcaaacattcatttccatttagtcctagtttttttaatgggagaatattatataaatcacctcagagaggtgatgcagttgtgtttaaaacaccagaagacaatagaacagattttataaaaagattgattggactaccaggcgataagatacaattttatcaaggaaacatcatcctaaatgataaaataattgatcgaaaaaaaacacaaatttacaataaaataagttgtggaaaatattcttttgagactaacgcgtttattgaaaatttgcctaatggaaaaaaatacacagctgtttacaataaagttggcactttacaaaatacaagcaaatttaaaataccgaaggatcattttttttttctaggtgataatagggattgttctagagatagtagatttgatactattggatttgttcacaaagataatttagtgggaaaagctcagttgatttttttttctaatgatacaataaaaagtcgtgtgttaaaattttggaatttaaatg

SEQ ID NO: 263613 - DNA, 451 bp, Unknown
  Bacterial polypeptide expressing nucleotide sequence isolated from the Sargasso Sea
agattatataaaacgtttaattgggctgcctggagataaaattcagtttattgatgccaacctatacttaaatagtagtgaaatacttaaatctaaaatcccacttaaaacaaaaatttattgtggtgacagaacaatagatgtcttaaagtttgaagaaaaattacctaatggtaaaaaatttcatacagtttatttaaaaaattatacctatcaaaactcagatgttttcacagttccagatgatcattatttttttttaggtgataatagagattgttctaaagatagtagatttctttcaagtgttggttatgttcacaaagataacttagttggtaaggctcaatttatttttttttcatcagataaaaaaattggaagttttattgaattttggaaatggcataaatctataagatttaaaagaacctttaatgttattaattaa

SEQ ID NO: 263614 - DNA, 595 bp, Unknown
  Bacterial polypeptide expressing nucleotide sequence isolated from the Sargasso Sea
ttgtttgagatttcgcgagtaaataagaagaaggataagattgtggttaaaaaaagagtttcatctgggagtagtggaattatagattttgtcaaaacaattatctatgctttggtattagctggcctaataagaactttacttttccaaccgttttggatcccgtctggttcaatgaagccaaatttgctagttggtgatttcatttttgttaataaatttgcctatggttactctagacattcgtgtcctttctctctttgtcccataaaaaatagggttttcggttccgaaccgactcgaggggatattgtggtttttagacatccgacgaacggaaaagattttgtaaaaaggttaattggacttcctggtgataaggtaaggttgaagcagggcagagtctatttaaatgggaacttaatcccaatacaaaaaatagatgactttcaagaagaaaaacaaaaacagggacccttagggagcgtccctcgctgtagtaacgaacctgtgccctttgggcttgactgcttaaaaaatcagtttagtgaaagcttgcctaataaaatatcatattcaattttggatattggag

SEQ ID NO: 263615 - DNA, 369 bp, Unknown
  Bacterial polypeptide expressing nucleotide sequence isolated from the Sargasso Sea
aatgaaaaaaataattttagagaatttaaaaacaatattatatgctttatttattgctattttgattagatctttattattacaaccattttatattccttcctcctccatggagccgtctttattagtaggtgataggttgtttgttacaaaattatcctatggatatagcaaacattcatttccttttagcctaggaccaataaaaaatagaatttttttttctgaacctgagcgtggtgatataatagtatttaagactcctgctgataatagaacagattatattaaaagactgatcggcttacctggggataaaattcaatttatagatggaaatttatatttaaataatgttgaaatcttaag

SEQ ID NO: 263616 - DNA, 473 bp, Unknown
  Bacterial polypeptide expressing nucleotide sequence isolated from the Sargasso Sea
tgaaaataatattcctagtaggggagacgttgttgttttccgttatcctgaaaacccaaaaattccatatattaaaagaattattgggttgcctggtgataaaattgcttattacaataaaacattatatatcaatgacgtattagctgaacaaataacaaatggcgcttattatgcatttggctcaggtacaccaatgaaaggttctttattaatatcagaggatcttggtaatattgagcatgaaattttgattgatccagaaaggaattctcttgagtttgtaactcaagttcctgattctcattattttgttttaggagataatcgagataatagtaaagatagtcgttattggggctttgttccagaagaaaatttggttggtcgtgcatttcttgtgtggatgaattgggatgggaagaacaaacctgttgtaaatttcaatcgaattggtaaatttataaaataaa

SEQ ID NO: 263617 - DNA, 321 bp, Unknown
  Bacterial polypeptide expressing nucleotide sequence isolated from the Sargasso Sea
aatgatatttgattttcagacaatcctgttttttataactctatttcttgggctttcttggctcattggtaaacgaatcttaaagaaagactcagagttttatgaggtttgcggagccatgtttccgattttactccttatatttttattcagatcattcgcttatgaaccatttaggattccttcagcttccatgatgcctacactcgagagaggcgattttatattggtcaataagtttgcttttaatatcagaatgccattgacaggaaaaacaatatttaccaataaggagccaaaaagaggggatgttttagtttt

SEQ ID NO: 263618 - DNA, 533 bp, Unknown
  Bacterial polypeptide expressing nucleotide sequence isolated from the Sargasso Sea
cggctcaatgttacccggacttaaagtaggagatttcatacttgtaaagaaatttacttatggcatcaaggttaatagaacaggtccaccaatagcttttggaaaagatcctcagcttggtgatgtagttgtttttattccccctcatgaccataggccattcgtaaaaagattgattggcaaacctggagacagaattacctatataaacaagaaaatatatgtaaacggcaaacctattaatcaaaagcttttaagtgaaaaagataatctaaggatttatgaagaattgctgaacgatagaactattcagattcaacaaatcacttcccgcattaattatccggatgaatgggaagttccaaaagatatgtattttgttgttggcgataatagagataattcaaatgacagtagatattggggctttgtgccaagagaaaattttatgggaacagcagattatatttggatgtcttgggagtgttggacatgtgcaccatcatttaagcgagcaggtaaaattaattaat

SEQ ID NO: 263619 - DNA, 616 bp, Unknown
  Bacterial polypeptide expressing nucleotide sequence isolated from the Sargasso Sea
tatgaaattagataaaaatttcttttcagaaaatataaaaactttattttatgcattaataattgctgtaattattagatcgcttttaatacaaccattttatattccatcttcatctatggagcctactttattagtaggtgataggttatttgtaacaaaatatacctatggatatagtaaacattcatttccgtttagccctccaatattaaataagagaattatgtttagcagtcctgaaagaggtgatgtaatagtatttaaaacaccagcagataatcggactgattatattaaaagattaattggtttgcctggtgataaaattcagtttatagactctaatttatatttaaataattctgaaattcttaaatctaaaattaataataaaactactatattttgtggagataaaagtattgatgtttatagatttgaagaaaagctttcaaatggtaaaaaatatcatactgtttatttaaaaaattatacataccaaaattcagatgtgtttactgtaccaaaagatcattatttctttttaggtgataatagagattgctccaaagatagcaggtatttaacaagcgttggatatgttcataaagat

SEQ ID NO: 263620 - DNA, 719 bp, Unknown
  Bacterial polypeptide expressing nucleotide sequence isolated from the Sargasso Sea
aaatagtttttttggtaatttgaagtcaatacttatagcaatctttatagctttactaattagatcatttatatttgagccattcaatataccttcaggatcaatgaagccaaatcttcttgtaggagactttatttttgtttcaaaatattcatacggtttttcaaaacattctcttccattttcaatacctttgataccagagaaaatattatctaatattcctgaaagaggtgatgtagtagtttttaaaactcctgaaaataacagaactgattatattaaaagagtaattggcttgcctggtgataaaatagaaattaaaaatggtattatttttattaatggatcagaaattttaagaaagaaattaaatgattttatagatacagataatgaaacgaataataaaagagtcagaatgtataatgaatatttttttaacaaagagatcaatgtacttgatatcgcagataatggtatagccgataatactcagttatttaatgtcccagaaaatcatttctttgtaatgggtgataatagagataattcacaagatagtaggtttataagtacagttggtttcattccttatgaaaatctagttggtaaagcgcagtttattttcttttctttagaaaatgcaaggtttctacagatatggaaatggccaaactcaattagatatgaaagaatttttcaaaaaattcaatgat

SEQ ID NO: 263621 - DNA, 430 bp, Unknown
  Bacterial polypeptide expressing nucleotide sequence isolated from the Sargasso Sea
atgaaattagataaaaattttttttcagaaaatataaaaaccttaatttatgcattaataattgcagttataattagatcgcttttagtacaaccattttatattccatcatcatccatggagcctactttattagtaggtgataggttgtttgtaacaaaatatacctatggatatagtaaacattcatttccttttagccctccaatattaaacaaaagaattatgtttagcagtccagaaagaggcgatgtaattgtatttaaaacaccagcagataatcgaacagattacattaaaagattaatcggactacctggtgataaaattcaatttatagactctaatttatatttaaataattctgaaattcttaaatctaaaattaataacaaaactactattttttgtggagacaaaaagtattgat

SEQ ID NO: 263622 - DNA, 496 bp, Unknown
  Bacterial polypeptide expressing nucleotide sequence isolated from the Sargasso Sea
agaggtgatgtaattgtatttaaaacaccagcagataatcgaacagattacatcaaaagattaattggtttacctggtgataaaattcaatttgtagactctaatttatatttaaataattctgaaattcttaaatctagaattaataacaaaactacaattttctgtggtgataaaagtattgatgtttatagatttgaagaaaaactttcaaatggtaaaaaatttcatactgtttatctaaaagattatacctatcaaaattctgatgtgtttactgtacctaaagatcattatttctttttaggagacaacagggattgttctaaagatagcaggtacttaacaagtgtagggtatgtacataaagataatttagtaggaaaagctcaatttatatttttttcttctgataaaaaaattggaagttttatagaattttggaaatggcataagtcaataagatttaatagaacctttaataaaattaattaat

SEQ ID NO: 263623 - DNA, 622 bp, Unknown
  Bacterial polypeptide expressing nucleotide sequence isolated from the Sargasso Sea
tttgaaatcgatatttatagcaatctttatagctttattaattaggtcatttatatttgagccattcaatataccatcaggatcaatgaaaccaaatcttcttgtgggagattttatttttgtttcaaaatattcttatggtttttcaaaacattctcttccattttcaattcctttgatatctcggaaaatattttcaaatatacctgaaagaggggacgtagtagtttttaaaactcctgaaaataatagaactgattatattaaaagagtaattggtttaccgggtgataaaatagaaattaaaaatggtattatttttattaatggatctgaaatcctcagaaaaaaattaaatgattttattgatacagataataaggcgagtaataaaagagtcaggatgtataatgaatacttttttaataaagaaatcaatatactcgatattactgacaacggtatagttgataatactcagttatttaatgttccagaaaatcatttttttgtaatgggtgataatagagataactcacaagatagtagatttataagtacagttggatacattccttacgaaaatttagttggtaaagctcagtttattttcttttcttta

SEQ ID NO: 263624 - DNA, 664 bp, Unknown
  Bacterial polypeptide expressing nucleotide sequence isolated from the Sargasso Sea
catgaaattagataaaaattttttttcagaaaatataaaaactttaatttatgcattaataattgcaataataattaggtcgcttttagtacaaccattttatattccatcctcatccatggaacctactttattagtaggtgataggttgtttgtaacaaaatatacctatggatatagcaaacactcatttccttttagtcctccaatattaaacaaaagaattatgtttagcagtcctgaaagaggtgatgtaattgtatttaaaacaccagcagataatcggacagattacattaaaagattaattggtttacctggcgataaaattcaatttatagattctaatttatatttaaataattctgaaattcttaaatctaaaattaataacaaaactacaattttctgtggcgacaaaaatattgatgtttatagatttgaagaaaaactttcaaatggtaaaaaatttcatactgtttatttaaaagattatacctatcaaaattctgatgtgtttactgtaccaaaagatcattatttctttttaggggataacagagactgttctaaagatagcaggtacttaacaagtgttggatatgtacataaagataatttagtaggaaaagctcaatttatatttttctcttcagataaaaga

SEQ ID NO: 263625 - DNA, 646 bp, Unknown
  Bacterial polypeptide expressing nucleotide sequence isolated from the Sargasso Sea
aatgattaagaaaaaaaataaaaaaaaagaaagtagtttttttgaatttttaaaaacaattttttacgctgtaataatagcagttatttttagatctctattttttgaaccatataatattccttcaggatcaatgttgccaaacttgttgataggggattatttatttgtttcaaaatatagctatgggtattcaagatattctttcccctttggtattgttccattaccagaaaatagagtttttgcttcagagcccaaaagaggtgatgtagcagtttttaaattaccatcgaatacaaatataaattatataaagcgagttataggtttaccaggagataaaatacaaatgaaatctggaaaactttttataaatggtagtttagttattcaggaggaagatggtttttatagacatattattaagaataagtttgaacaaattcttgagcaaaaaaaagaaagattaaataaagataaatcatacgcaatattaaatttgaatgattatcaagtgatggacaacacaaaagagtttgtggtaccaaatgataaatactttgttatgggtgataacagagacaactccttagatagtagagcaaatggtggttggtttgtgcctttagaaaattttgttggc

SEQ ID NO: 263626 - DNA, 709 bp, Unknown
  Bacterial polypeptide expressing nucleotide sequence isolated from the Sargasso Sea
aatataaaaactttaatttatgcattaataattgcagttataattagatcgcttttagtacaaccattttatattccgtcatcatccatggaacctactttattagtaggtgataggttgtttgtaacaaaatatacttatggatatagcaaacactcatttccttttagtcctccaatattaagcaaaagaattatgtttagtagtccagaaagaggtgatgtaattgtatttaaaacaccagcagataatcgaacagattacattaaaagattaattggtttacctggtgataaaattcaatttatagactctaatttatatttaaataattctgaaattcttaaatctaaaattaataacaaaactacaattttctgtggagacaaaagtattgatgtttatagatttgaagaaaaactttcaaatggtaaaaaatttcatactgtttatttaaaaaattttacctatcaaaattctgatgtttttactgtaccaaaagatcattatttctttttaggggataacagagactgttctaaagatagcaggtacttaacaagtgttggatatgtacataaagataacttagtaggaaaagctcaatttatatttttttcttcagataaaagaagaggaagttttattgaattttggaaatggcataagtcaataagatttaatagaacctttaataaaattaattaat

SEQ ID NO: 263627 - DNA, 514 bp, Unknown
  Bacterial polypeptide expressing nucleotide sequence isolated from the Sargasso Sea
tatgaaattagataaaaattttttttcagaaaatataaaaactttaatttatgcactaataattgcagtaattattagatcgcttttagtacaaccattttacattccgtcttcatccatggaacctactttattagtaggtgatagattgtttgtaacaaaatatacttatggatacagtaaacattcatttccttttagccctccaatattaaacaaaagaatcatgtttaatagtcctgaaagaggagacgtgattgtatttaaaacaccagctgataatcgaacagattacattaaaagattaattggtttacctggtgataaaattcagtttatagaatctaatttatatttaaataattctgaaattctgaaatctaaaattaataataaaactactattttctgtggagataaaagcattgatgtttataggtttgaagaaaaaatttcaaatgataaaaaatttcatactgtttatttgaaagaattatacttatcaaaattcaga

SEQ ID NO: 263628 - DNA, 716 bp, Unknown
  Bacterial polypeptide expressing nucleotide sequence isolated from the Sargasso Sea
tatgactaaaacaaaaaaaaatagtttttttagtaattttaaatcaatatccattgcaatatttatagctttattaattagatcatttgtatttgagccatttaatataccttcaggatcaatgaagcctaacctccttgtgggagattttatttttgtttcaaaatattcatatggttattcaaaacattctcttcccttttcaattcctttgatacctagaaaaatattttcaaatattccggaaagaggtgacgttgtagtttttaaaactcctcaagataatagaactgattatattaaaagagtaattggtttaccaggggataaaattgaaataaaaaatgggattatatttataaatggatcggaaattttgagaaaaaaattagataaatttatcgatacagataaaaatataactagaaatgaaaaaagagtagataagtataaagaatatttttttaataaagaaatcgatgttcttaatttatacgataatttcatgtatgataatacacagttatttgttgttcctgaaaatcatttttttgttatgggcgataatagggataattcaatagatagcagatcaaacgatgttgggtttattccatttgaaaatctaattggtaaagcaaggtttattttcttctctttagaaaattcaagattttttcaaatatggaaatggccaaattcaatcagatatgaaa

SEQ ID NO: 263629 - DNA, 598 bp, Unknown
  Bacterial polypeptide expressing nucleotide sequence isolated from the Sargasso Sea
ttgttaataggaactattgttagtttactaatatggttaattggtaaatttattaaaaataatttcttaaaaacttcaggtagaagttggtttatacctattttcttaatttttattttaagaacatttgcatatgagccatatcagattccatcaggctctatgattcctggactaaaagttggagattttattttagtcaataaacattcttatggtttaaagcttgaaagaacaggcaaggcctttgcttttgataaaaatccagaatacggcgatgttgtggtatttattcctccacataaacctgtaccttttgttaaaagattaattggtaaaccgggagataagataagttatattaataaaaagttatatatcaatagtaagccaattcctcaaactttttataaatctgaatcagatttagttttctatattgaaaacataaacaataaagacatccaagttcagcatatgaaatcaagaccttccagcgcaccatctgaatggattgttcctaaggatatgtattttgcagttggtgataatagagataattcaaatgacagtagatattggggctatattccctaaa

SEQ ID NO: 263630 - DNA, 740 bp, Unknown
  Bacterial polypeptide expressing nucleotide sequence isolated from the Sargasso Sea
cttggcgtttctaattctcttgatgatttttgttaccgcaggtgaccttggtatcttattactggttggatcaatagtaagttttttattaatgatggtaggcttaattgcaaaaaataccgaaatcgcaaaaactggaagaggttggtttttgccattcttcttaatatttattttgagaacttttctttttgagccttatcaaatcccatccggctcaatgttacctggacttaaagtaggagatttcatacttgtaaagaaatttacttatggcatcaaggttaatagaacaggtccaccaatagcttttggaaaagatccagagcttggtgatgtagttgtttttattcctcctcatgaccataggccattcgtaaaaagattgattggcaaacctggagacagaattacctatataaacaagaaattatatgtaaacggcaaacctattaatcaaaagcttttaagtgaaaaagataatctaaggatttatgaagaattgctaaaagatagaactattcagattcaacaaatcacttcccgtattaattatccagaggaatgggaagttccaaagggaatgtattttgttgttggcgacaatagagataattcaaatgacagtagatattggggctttgtgccaagagaaaactttatgggaacagcagattatatttggatgtcttgggagtgttggacatgtgcaccatcatttaagcgagtaggtaaaatta

SEQ ID NO: 263631 - DNA, 514 bp, Unknown
  Bacterial polypeptide expressing nucleotide sequence isolated from the Sargasso Sea
atgtatagtagtcctgaaagaggtgatgtggtagtatttaaaacaccagtggataacagaaccgattatattaaaagattaataggtttaccaggagataaaattcagtttatagactctaatttgtatttaaataatagtgagatattaaaatctaaaattttaaataaaagcaaaatatattgtggcaatagaactattgatgtctataaatttgaagaaaaactacctaacggaaaaaaatttcatacggtatatttaaaagattatacttttcaaaattcagatattttcattgttcctgaagatcactttttttttcttggggataatagagattgttcaaaagatagtagattcttaacaagtgttggatatgtccataaggacaatttagttggaaaagcccaatttatttttttttcatcagataaaaaaataggaagtgtttttgctttttggaaatggcataaatcaataagatttagcagaacgtttgataaaattaattaat

SEQ ID NO: 263632 - DNA, 607 bp, Unknown
  Bacterial polypeptide expressing nucleotide sequence isolated from the Sargasso Sea
cggccatccgaaacgcggcgatatcgtggtgtttaaatacccggaagatccgcgtctggattacattaagcgggctgttggcttaccgggcgataagatcacctacgatccggtagcaaaacaggtcactatccagccgggctgcagttccggtcaggcatgcggcaacgcactgccggtaacttactccaacgttgagcccagcgatttcgtccagaccttctctcgtcagaacggcggggaagcgaccagcggcttctggcagttgccgaaaggcgaaagcaaggctgacggtattcgtctgaccgagcgcaaagagacgctgggtgaggtaactcaccgcattctgaccgtgccgattgctcaggatcaggttggcatgtattaccgccagtccggcctgccgctggccacctggatcgtgccgccgggtcattacttcatgatgggcgacaaccgcgataacagcgccgacagccgttactggggctttgtgccagaggccaacctggtgggtaaagccacggccatctggatgagcttcgaaaaacaggaaggtgaatggccgaccggcgtgcgtttatcgcgtattggtagcattcagtaa

SEQ ID NO: 263633 - DNA, 551 bp, Unknown
  Bacterial polypeptide expressing nucleotide sequence isolated from the Sargasso Sea
ttttccttttagtctaggaccaataaaaaatagaatttttttttctgaacctcaacgtggtgatgtaatagtatttaaaactccagcagataacagaacggattatattaaaagattaattggcttacctggagataaaattcaatttatcgatggaaatctatatttaaataatattgaaatcttaaaatcaaaaattaacaagaatttacagatctattgtggaaaaacagttgtagatactaatgtttttaaggaaactttattaaataaaaaagaatatttaactacttattataaaaatggaagttatcaaaattcagatgaatatttagttccaaaagatcattatttttttttaggtgataatagagattgttcaaaagatagtagatttttaaccagcgttggttatgttcataaagataatttagtaggaaaagcacaatttatttttttttcaacaaatattagagagggtagtatatttaatttttggaactggaaaaatattttaagaactgaaagattttttaaaaaaataatttaat

SEQ ID NO: 263634 - DNA, 480 bp, Unknown
  Bacterial polypeptide expressing nucleotide sequence isolated from the Sargasso Sea
tttttaaaacacctgcagacaatagaactgactatattaaaagattgattggtttacctggtgataaaattcaatttataaatggagatttatatttaaatgataatcaagttcttaaaactataaaatcaaaaaatgaaatattatattgtggtaattcaaagttttcagcaagaacttttgaagagaagttgcctaacggaaaaacttatattgcttcttacagaattgattatagttttatgaattcagatgaatatcttgttcctgaaaatcattatttttttttaggtgataatagggattgctctaaagatagtcgttttttatcagaagttggatatgttcataaaaataacttagtaggcaaagcacaattattatttttttcgtcagacccaagaatcggaagtattgttaaattttggaagtggaataaaatattaagaataaatagattctttaaaaaaatattatagt

SEQ ID NO: 263635 - DNA, 502 bp, Unknown
  Bacterial polypeptide expressing nucleotide sequence isolated from the Sargasso Sea
atgaaattagataaaaattttttttcagaaaatataaaaactttaatttatgcattaataattgcagttataattagatcgcttttagtacaaccattttatattccatcctcatccatggaacctactttgttagtaggtgatagattgtttgtaacaaaatatacctatggttatagtaagcattcatttccttttagccctccaatattaaacaaaagaattatgtttagcgctccagaaaggggtgatgtgattgtgtttaaaactcccgcagataatagaacagactacattaaaagattaattggtttacctggtgataaaattcagttcatagactctaatttatatttaaataattctgagattcttaaatctaaaattaataacaaaactactattttctgtggagacaaaatcattgatgtctataggtttgaggaaaagctttctaatggaaaaaagtttcatactgtttatctaaaagattataccctat

SEQ ID NO: 263636 - DNA, 634 bp, Unknown
  Bacterial polypeptide expressing nucleotide sequence isolated from the Sargasso Sea
atgaaattagataaaaattttttttcagaaaatataaaaactttaatttatgcattaataattgcagttataattagatcgcttttagtacaaccattttatattccatcctcatccatggagcctactttattagtaggcgataggttgtttgtaacaaaatatacctatggatatagcaaacattcatttccttttagcccaccaatattaaacaaaagaattatttttagcagcccagaaagaggtgatgtaatagtatttaaaacaccagcagataatcgaacagattatattaaaagactaattggtttacctggtgataaaattcaatttatagactctaatttatatttaaataattctgaaattcttaaatctaaagttaataacaaaacaactattttttgtggagataaaagtattgatgtttatagatttgaagaaaaactttcaaatggtaaaaaatttcatactgtatatttaaaagattatacctaccaaaattcagatgtatttactgtaccaaaagatcattatttctttttaggggataacagggattgttctaaagatagcaggtacttaacaagtgtagggtatgtccataaagataatttggtaggaaaagctc

SEQ ID NO: 263637 - DNA, 745 bp, Unknown
  Bacterial polypeptide expressing nucleotide sequence isolated from the Sargasso Sea
tttggcgtttttaattcttctgatgatttttgtgacggcaggagatcttggcatcctactgctggtaggttcaatagtaagttttttactaatgatagttggattaattacaaaaaatacggaaatcataaaaacgggaagaggttggtttttaccattctttttaatatttattttaagaacttttctttttgagccatatcaaataccgtctggttcaatgatgcctggacttaaagttggagattttatactcgttaaaaaatttacttatggtatcaaggttaatagaacaggatctcccattgcctttggaaaagatcctgagcttggcgatgtagttgtctttattccaccacatgaccatagaccttttgtaaaaagattgattggcaaacctggagacagaattacttatataaaaaagaaaatatatgtaaatggaaaacctattaatcaaaagcttttgagcgaagaggacaatgtaaggatttacgaagaaatgcttgatgataaaactatccagattcaacaaattacttcgcgcattaattatcctgaggagtgggttgttccgaaagacatgtacttcgtcgttggagacaacagagataattcaaacgacagcagatattggggcttcgtgccaagagaaaattttatgggcaccgcagattatatttggatgtcttgggagtgttggacatgtgcaccatcatttaagcgagcaggtaaaattaattaa

SEQ ID NO: 263638 - DNA, 739 bp, Unknown
  Bacterial polypeptide expressing nucleotide sequence isolated from the Sargasso Sea
atgaagatagataaaagttttttttcagaaaatataaaaaccttattttatgctttagtaattgccatagtaataagatctcttttaattcaaccattttatatcccttcatcatcgatggaaccaacattgctagtaggcgataggttgtttgttacaaaatattcttacggctatagtaagcattcttttccttttagtcctccgatactcagcaaaagagtaatgttcaatagtccagaacgtggagatgtagttgtgttcaaaacaccagcagacaatagaacagactatataaaaagacttattggtctaccaggtgataagattcaatttatagactctaacgtatatttaaatagcagtgaaatattaaagtcaaaaacacctagtaaaagtaatatttattgtggaagtgaaattatcgatgtttataaatttgaagaaaaattaccaaatggaaaaaaatttcacacagtctacttaaaagaatacaccttccagaattcagacgtctttactgtccctgataaccattatttttttttaggtgataatagagattgctctaaagacagtagatatttaacaagtgttggttatgttcataaagacaatctagtgggtaaagcccagtttatttttttttcatctgatagacaggttggtagtatctttgaaatttggaaatggcataagtcaattagatttaatagaacatttgataaaattaattgat

SEQ ID NO: 263639 - DNA, 895 bp, Unknown
  Bacterial polypeptide expressing nucleotide sequence isolated from the Sargasso Sea
tatgaattttgcgctgattctttttgtgctcgtcattttgacgggcgtcgcatgggtcgcagacaaactggttttcatgccgcaacggcgtcgcgcggcggacgccgtggtcgctgagttcgaccgccagcaggcacgcgtcggcgagcgcttcgccgacgaaaacgcggcgcaaacgcgtgctcgtctgcgtgacgacaagctgcgtcagccgtggtggctcgagtattcggcgagcttcttcccggtgattctggtggtgttcgtggtgcgctcgttcgtggtggaacccttcaagattccgtcgggctcgatggtgccgacgctgctggtgggcgacttcatcctcgtcaataaattcgactacggtctgcgtctgccgatcaccaacacaaaggtcactgaaggccgcccgctcgagcgtggcgacgtggtggtgttccgctacccgaaagacgagtccgtcgattacatcaagcgcgtgatcggcctgccgggcgacacggtcgcttatcaggacaagcaactgacgatcaacggcaagcccgtaccggaaacgccgctgcctgactatctcgacgaagaacgcctcggctacgccaagcaattcgaagaagatatcgacggccgcaagaacgcgattctgaacaacccggctgtgccgccgttcatcgtcggcgcagaagattatccgtatcgcgataactgcacgtacaacgcccgcggcgtgatctgcaaagtgccgcctggcaattacttcatgatgggcgacaaccgcgataacagcgcggatagccgctactggggtttcgcgccggacaagaatattgtgggtcgcgcgttttttatctggatgaacttcagcgatctgaaacgcatcggcccattccactga

SEQ ID NO: 263640 - DNA, 745 bp, Unknown
  Bacterial polypeptide expressing nucleotide sequence isolated from the Sargasso Sea
ttggcatttttgattctcttgatgatttttgtgaccgcaggtgatcttggtatcttattactggtcggatcaatagtaagttttttattaatgatggtaggcttaattgcaaaaaatactgaaatcgcaaaaaccggaagaggttggtttttgccattcttcttaatatttattttgagaacttttctttttgagccttatcaaattccatccggctcaatgttgcccggacttaaagtaggagatttcatacttgtaaagaaatttacttatggcatcaaggttaatagaacaggtccaccaatagcttttggaaaagatcctgagttaggtgatgtagttgtttttattccccctcatgaccataggccattcgtaaaaagattgattggcaaacctggagacagaattacctacataaacaaaaaaatatatgtaaacggcaaaccaattaatcaaaagcttttaagtgaaaaagataatctaaggatttatgaagaattgctgaacgatagaactattcagattcaacaaatcacttctcgcattaactacccggaggaatgggaagttccaaaggatatgtattttgttgttggcgataatagagataactcaaatgacagtagatattggggctttgtgccaagagaaaattttatgggaacagcagattatatttggatgtcttgggaatgttggacatgtgcaccatcatttaagcgagctggtaaaattaattaat

SEQ ID NO: 263641 - DNA, 748 bp, Unknown
  Bacterial polypeptide expressing nucleotide sequence isolated from the Sargasso Sea
gatgaatctagcattaatacttgtttctcttacagccatcagtggagctgtaatactaactgatatcttattttggaaaaataaactaaaagaaaaatcaccaactaaagtaatcttagaatactcttatgcatttttccccgttcttttattggttgttgtaatgcgttcgtttgtctttgaaccattcagaataccatcaggttcaatgaagccaactctccttgtgggagactttatttttgttaaaaaatattcatatggattgagattacctgttcttgaaaaaaaaatactagatatcgaaaaacctcggcgtggtgatgttgcggtttttcggctcccttcagatccaagtatcaattatattaaaagagtgattggattacctggcgacaaaatcatttatcaggatcataagcttactattaatggtgatgaggttgccatgaatagagattcgtctaaccccttacatgaaatgaaaccacaatttattgaagtgatagatgacaatcgccatacgattatcacttcaaatgctaattttagtattggtgagggttattatgaagtgcctaaaaatagttactttatgatgggtgataatagggacaacagcagggacagtcgatttatagggtcaattccagaggaatacctagtaggaaaggcagctaggatatggatgcatatggatggatttgagtggccagatataaaaagaattggccgcaaaatagaataa

SEQ ID NO: 263642 - DNA, 720 bp, Unknown
  Bacterial polypeptide expressing nucleotide sequence isolated from the Sargasso Sea
aatggcaaaaactaagaaaagtttgggcggttcagtaattgaaacaataaaaacgatagtctacgcactaatcttggctggaatatttaggtcgttattttttcaaccgttttggattccctctggttcaatgaaggatacgcttcttataggggattttctttttgtgaataaaatggcgtatggatattcgtatgcatcttgtcccagtataataattcctcggtttggtattaatgttgacgcagaagatttttgtggtttcgtaaaaagaaacaatgagcgcttatttggaggacagccacaaagaggtgatgtggttgtatttaggcacccagtaactggaagagattatatcaagcgccttattggcttgcccggagacaaggttcaaataaaagatggtaaaataagcatcaatgaccaaaaagttgagacagatgatgcgggaatttttgttgagacttatgcgcctcaagggcctttccgaaaccaaccgaggtgttctaataatccgaaaaaatttggcgaggattgtgaaaagttccgaataaagtctaccctaccagacggtagatctttttttaatttggatacatttaagggtgaaaatataggaaacagcatttataatgttccttctggccattatttctttatgggtgataaccgagataactctctcgatagtaggataggtcaagtccaaggtggagttgg

SEQ ID NO: 263643 - DNA, 677 bp, Unknown
  Bacterial polypeptide expressing nucleotide sequence isolated from the Sargasso Sea
tgcagttataattagatcgcttttagtacaacctttttatattccatcatcatctatggaaccaactttattagtaggcgatagattgtttgtaacaaaatatacctatggatacagcaagcattcatttccttttagccccccaatattaaataaaagaattatgtttagtagcccagaaagaggtgatgtaatagtatttaaaacaccagcagataatcgaacagattatattaaaagactaatcggtttacctggtgataaaattcaatttatcgactctaatttatatttaaacaattctgaaattcttaagtctaaaattaataacaaaaccactattttctgtggaaataaaagtattgatgtttatagatttgaggaaaagctttcaaatggaaaaaagtttcatacagtttatttaaaagattacacctatcaaaattctgacgtgtttattgtaccaaaagatcattatttttttttaggagataacagggattgttctaaagatagcaggtacttaacaagcgtagggtatgtgcataaagacaacttagtaggaaaggctcaatttatatttttttcttctgataaaaaaataggaagttttatagaattttggaaatggcataagtcaataagatttaatagaacatttaataaaattaattaat

SEQ ID NO: 263644 - DNA, 646 bp, Unknown
  Bacterial polypeptide expressing nucleotide sequence isolated from the Sargasso Sea
cttggcgtttctaattctcttgatgatctttgtgactgcaggtgaccttggtatcttattactggtaggatcgatagtaagttttttattaatggtggtaggcttaattgcaaaaaatattgaaatcacaaaaactggaagagggtggttcttgcccttcttcttaatatttgttttaagaacttttatttttgagccttatcaaatcccgtccggctcaatgttacccggacttaaagtaggagatttcatacttgtaaagaaatttacttatggcatcaaggttaatagaacaggtccaccaatagcttttggaaaagatcctgagcttggtgatgtagttgtttttattcccccacatgaccataggccattcgtaaaaagattgattggcaaacctggagacagaattacctatataaacaagaaaatatatgtaaacggcaaacctattaatcaaaagcttttaagtgaaaaagataatctaaggatttatgaagaattgctgaacgatagaactattcagatacaacaaatcacttcccgcattaattatccagaggaatgggaagttccaaaggatatgtattttgttgttggcgataatagagataattcaaatgacagtagatattggggctttgta

SEQ ID NO: 263645 - DNA, 574 bp, Unknown
  Bacterial polypeptide expressing nucleotide sequence isolated from the Sargasso Sea
ttcctacggttatagtaagcattcttttccttttagtcctcctatactcagcaaaagagtaatgttcaatagtccagaacgtggagatgtagttgttttcaaaacaccagcagataatagaacagattatataaaaagacttattggtctcccaggtgataagattcaatttatagaatctaaactctatttaaataacagtgaattgttaaagtccaaaactcttagtaaaagtaatatttattgtggaagtgaaattattgatgtgtttaaatttgaggaaaaattaccaaacggaaaaaaatttcacactgtctacttaaaagaatacacgtaccagaattcagatatctttactgttcctgataaccattatttttttttaggtgacaatagagattgctctaaagacagtagatatttaacaagcgttggttatgttcataaagacaatcttgtgggcaaagctcaatttatttttttttcatctgatagaaagatgggtagtatttttgaattttggaaatggcataaatcaattagatttaatagaacatttgataaaattaattga

SEQ ID NO: 263646 - DNA, 739 bp, Unknown
  Bacterial polypeptide expressing nucleotide sequence isolated from the Sargasso Sea
tatggatttcacagtcttactagttttgattacatttataagtggtatttgtctcttattgtctcaatcaaataattctgcgaattctctctatagcattttacaattcatgggatcgctgtttcctatattgtttattgttctattcataagatcttttatagtcgaaccatacaaaatcccatctggatctatgatacccactttactgataggcgatttcattctggtaaaaaaatatcagtatggagtaagagctcctataattaataaggtaatttttgaaaatgaaaaaccaagctatggtgatataattgttttccaatatcctcaaaataaaaaaattaattatattaaaagagttgtggctttgcccggagatagtgttagatatattgaaaaagagttatttgtaaatggaaaaaaatatactcaaaagcaagaaatattatatccctctagctcacaatatagtagcgaagaggtctataaagaaactaacatatataattcctacaatattttgaagagcaccaacccctctcaggactttgaatatagagttcccgagggaacttattttgttttaggtgataaccgagacaatagtaatgatagtagatattggggcccagtcccgtatgagaatcttatcggcgaggctttttatatatggatgttttggaatccttctggttctgacaccataatagatagaattgggacttctttagattag

SEQ ID NO: 263647 - DNA, 739 bp, Unknown
  Bacterial polypeptide expressing nucleotide sequence isolated from the Sargasso Sea
atgaaattagataaaaacttttttagtgaaaatattaagacccttttttatgcgctgataattgctattgtaattagatcattatttattcaacctttttatataccatcatcttcaatggaacctacattgttagttggtgatagattgtttgttacaaaatattcttacggttatagcaagcattcgtttccatttagtccaccaattttgagtaaaagaattatgtttaaagaaccaaaaagaggggatgttgtggtattcaaaacacccgctgataatagaactgattatattaagagattaattggattaccaggtgataaaattcaatttattgatgcaaatttgtacttaaataacaatgaaattttaaaatcaaaagtaaaaataaaaactaaaatattttgtggaaataattcaatcgatgtttttaagtttgaggagaaattacctaatggcaaaaaatttcattcagtatacttaaaagaatttacctatcaaaattcagatgtttttactgttccaaaaaaccattatttttttttaggtgataacagagattgttctaaggatagcagatatttaactagtgttgggtatgtccataaagataatttagttggtaaagctcgttttatttttttttcatcagatagaaaaataggaagtttttttgaattttggaaatggcataaatcagtgagatttaaaagaactcttaataaaattaattaat

SEQ ID NO: 263648 - DNA, 787 bp, Unknown
  Bacterial polypeptide expressing nucleotide sequence isolated from the Sargasso Sea
atgaaactagataaaaaatttttttcagaaaatataaaaactttattttatgcattgataattgcaataataattagatcacttttagtacaacctttttacataccttcttcttcgatggaacccacattacttgtaggtgacagactgtttgttacaaaatattcatatggatatagtaaacactctttcccttttagcccaccaatacttggtaaaagaataatgtttaaaagtcctaaaagaggggatgtaattgtttttaaaacaccagctgacaatagaacggattatataaaacgtttaattggactgccaggagataaaattcaatttattgatgccaacctatatttaaatagtagtgaaatacttaaatctaaaataccacttaaaacaaaaatttattgtggtaacaaaaaaatagatgtcttaaagtttgaggaaaaattacctaatggtaaaaagtttcatacagtttatttaaaaaattatacctatcaaaactcagatgttttcatagttccagatgatcattatttctttttaggtgataacagagattgttctaaagatagcagatttctctctagtgttggttatgttcataaagataacttggttggtaaggctcaatttatttttttttcatctgataaaaaaattggaagttttattgaattttggaaatggcataaatctataagattaaaagaacctttaatgttattaattaatgaaaataaagtatcaagaattagaaaaaaaaataaatattgtttttaaa

SEQ ID NO: 263649 - DNA, 895 bp, Unknown
  Bacterial polypeptide expressing nucleotide sequence isolated from the Sargasso Sea
atgaattttgcgctgattctttttgtgctcgtcatcttgacgggcgtagcgtgggtgctggacaaactggtgttcctgccgcggcgtcgcaaggcggccgactcggcgatcgaggagttcgatcgtcagcagtcgcgcatcgacaagcgcttcgcggatgaaaacgcggcgcagacgcgttcgaagctgcgcgacgagaagctgcgccagccgtggtggctcgagtacacggcgagcttcttcccggtgatcctggcggtgttcgtcgtgcgttcgttcgtcgtcgagccgttcaagattccgtcgggctcgatggtgccgacgctgctcgtcggcgatttcatcctcgtcaacaagttcgagtacggtctgcgcctgccggtcacgaacacgaagattacgcagggcagcccgctgtcgcgcggcgacgtcgtcgtgttccgctatccgaaggacgagtcggtcgactacatcaagcgcgtgatcggcctgccgggcgataccgtcgcgtaccaggacaagcagctcacgatcaacggccagccggtgcccgaaacgccgctgcccgatttcttcgacgacgagcgccagaattacgcgaagcagttcgaggaaacgatcggcaacaagaagaacgcgatcctcaacaacccggccgtgccgccgttcgtgatgggcgcatacgactacccgtatcgcgacaactgcacgtacaacagccgcggcgtgatctgcaaggtgccgcccggtcactacttcatgatgggcgacaaccgcgacaacagcgcggacagccgctactggggtttcgtgccggaccagaacatcgtcggccgcgcgttcttcatctggatgaacttcagcgacctgaagcgcatcggttccttcaactgat

SEQ ID NO: 263650 - DNA, 682 bp, Unknown
  Bacterial polypeptide expressing nucleotide sequence isolated from the Sargasso Sea
attaaaagtaaaataattagtttaataatagagcagtcaaaatcactttttccaattttttttattgttctcattttacgttcttttatttttgagccatttagaattccatctgcatcaatgatgccaacactactaattggcgatttcatactagtgaacaaatacgactatggattacgattgcctgttactcatgagaaatttttcaaaaataatatacctgaaagaggagatgtagttgtatttaggtaccctgaaaatccaaaaattccctatataaagaggattataggattgccaggtgataaaattgcttattataataaaaccatatatataaacgatgaagtggttgagcaagtaacaattggctcatatccagcctatggcgcaggattgccaatgaggggctctatattggttttagagaaattaggagaagtagagaataatattttaattgatccagaacgtgattcacttgaatttgtaacaaaaattcctgattcacattattttgtactcggagataatagagataacagcaaggatagtcgttattggggctttgtcccagaagaaaatttggttggaaaagcttttataatttggatgaattgggacggggaaagtaaaaatattattaattacaaaagaattggaaaatctataaagtgag

SEQ ID NO: 263651 - DNA, 655 bp, Unknown
  Bacterial polypeptide expressing nucleotide sequence isolated from the Sargasso Sea
gactcagagttttatgaggtttgtggagccatgtttccgattttactccttatattttatttcagatcattcgcttacgaaccatttaggattccttcagcttccatgatgcctacactcgagagaggcgattttatattggtcaataagtttgcttttaatatcaggatgccattgacaggaaaaacaatatttaccaataaagagccaaaaagaggggatgtcttagtttttgactttccttgtgatcgagacatcaaatacatcaaaagattgattgggttacctggagatgaaatcgcatacaggaacaagcaactgaccatcaatggcgaatccattatttcgagttatgattctgtttttaaggatcctaaacaatatggctcacatgtatacaatgaggcgattaatggcattgatcatcagttacttctcactccatctcggaggggaagggaaggcgtatacactgttccagaaggctcatatttcgtgatgggcgataatagagataacagcacggacagtcgttttgattgcccgggttttgttccaaccgatcacattgttggttcagcaacaagaatttggtttaattgggacttttcaacgatgccaaagtggcgcaggattggcgataaaatcaaataaa

SEQ ID NO: 263652 - DNA, 342 bp, Unknown
  Bacterial polypeptide expressing nucleotide sequence isolated from the Sargasso Sea
aatggcgaattacttctccttgattttggtggcactcaccttaataacaggattaatctggctagtggatagcctagtgtttgcaccaaagcgaaaagcacgtttacaggctgcggcaaccgaagaaggagcgggctatggagaagatcctcaactgccgtaccttgttgatacttcgcaacagatttttcctgttattgctttcgtattggtattgcgctcttttttatatgagccttttcagattccatcaggttctatgatgcctaccttactggttggtgacttcatcttggttgaaaagtttgcctatggcgtgaaagacccggttttcagaagtaa

SEQ ID NO: 263653 - DNA, 709 bp, Unknown
  Bacterial polypeptide expressing nucleotide sequence isolated from the Sargasso Sea
tatgagcgataaagaatctacatcttcatggattaaatctaatttattaactattttctacgcaataataatagcattagtaattagaacatttctttttcaacccttctttattccatcctcctctatggagccaggcttgctagttggtgatagaatttttgcttcgaaatatgattttggttacagtcaacattcatttccatttagtttacccattgttaaaggaagaatatttgaaagttcaccgaaaagaggagatgttgttatctttaaacctcctcatacaagaaatgattatattaaaaggttaattggactacctggagataagataaaaatagttaatggtattgttcatataaattcaaatcctattgaaatagaatttattagaaaagacgataaaggtatttctatatataaagaaaccttgcctagtggaaaaagttatgaagtaaaagatttgggagataaacctcaagacaatattaacgaatttttagtacctgaaaatcactattattttatgggagacaatagagataattcaaatgatagtagattttggggaccagttccgacagagagaattgtagctaaggctcaaataatatttttttcaacgaaagatggatcatggttcatagaattttggagatggccatttgatatccaatttgaaagactttttaaattaattaaatag

SEQ ID NO: 263654 - DNA, 919 bp, Unknown
  Bacterial polypeptide expressing nucleotide sequence isolated from the Sargasso Sea
atggcagcctatttttccattattttagtgctagtcaccctgatttcagggctgatctggttaatcgatgtgctggtatttgcgcctaaacgccgcgaaagcttagccttagccaaggcttcgcaggctaatttaaccgaggaagccgaatataacatcatccgcgaacccacagtggttgaaaccgcgcactccatcttccctgtgattgctttcgtgttgatcctgcgctcgtttatttatgaaccattccaaattccctcaggctctatgatgccaaccctgttagtgggtgactttattctggtggaaaagtttagctatggcctaaaagatcccgtatggcgcactaaactgattgaaacgggcgagccgaaacgtggcgatgtaattgtgtttaaatatcctgagaaccctcagattgactacatcaagcgcgtggtaggtttaccgggcgatcggattatctaccgcaacaagcagttgatgctccaaaaggcctgtggcgctgagcaaacccattgccctgagccagaactggtggcgcgtaccgaaatcagccgtggtgatttcagccaagatggtgtgccattaattcgttttaaagagcaactcggtgaagtggcccacgatattttaatcaatccaagccgccccgatatgctgggatacttcaagcgtgaaggaaatttaccagcgggtgagttccttgtaccagaaggccattattttgcgatgggtgacaaccgcgataacagtaccgacagccgtttctggggctttgtccctgaagagaatcttgtgggtaaagcggtcgctatctggattagttttgagtttgaccgttctaaagctgacttcctgccaacttgggtgccaagtggcgtgcgttttgaacgagtaggtggaattcactagt

SEQ ID NO: 263655 - DNA, 742 bp, Unknown
  Bacterial polypeptide expressing nucleotide sequence isolated from the Sargasso Sea
aatgatttttgattttcagacaatactatttttcataaccctttttcttgggctttcttggcttattggtaagcgtattttaaagaaagactcggagttctatgaagtttgcggggccatgtttcctattctgcttatcatatttctttttaggtcgtttgcttatgaaccatttagaattccctcagcatctatgatgccaacactcgaaaaaggtgattttattttggttaataagtttgcttacaacatcagaatgccattaacaggaaagacaatttttaccaataaagaaccaaaaagaggcgatgttctagtcttcgactttccatgtgatagagacatcaaatacatcaagaggttggttggattgccaggagatgaggttgtatatagaaataagcagttaaagatcaatggagaatcaattatttcaagctatgactcagtttttaaggatccaaagcagtatggttcacacgtatacaacgaaacgattgatggaattgatcatcgtttactccttactccttctcgcagagggagagaaggcacatatacggttccagaaggcacatatttcgtgatgggtgataatagagacaacagtacagacagccgttttgaatgcccaggatttgttcccagtgatcatgttgtcggatcagccactagaatatggttcaattgggatttctcaacttttcctaagtgggacaggattggcgataaaattaaataa

SEQ ID NO: 263656 - DNA, 867 bp, Unknown
  Bacterial polypeptide expressing nucleotide sequence isolated from the Sargasso Sea
gatggcaagcacgttttccctgatcctggtggtggtctgcgcgatcaccggtgttatctggtgtctggacaagatgatctggtccaagcagcgggccgccaagattgccgtggcccgtgcccacggcggcgcccatctggacgagaaaaccctggccaaggtggcaccggtgccggtctggatcgagcagaccgccggggtattcccggtcatcacgctggtattgatcctgcgttcgttcatctttgaaccgttccagatcccgtcgggctccatgatgcccaccctgctggtgggcgacttcatcctggtggagaagtttgcctatggcctcaaggatccggtgaccaacaccaagttcctcgagaccggtgagccaaaacgcggcgacgtggtggtgttcaagtatccgctggatacccgggtggactacatcaagcgggtggtcggcatgccgggggatcgggtcatctatcgcaacaaggagctgatgatccggcccaagtgcgatgagcaggaagggaaaacgtgcccgggcttccagaagctcgacgtcaagtttgaacaaaggggtgaatttacccagatggggatcccgcttgaccgctataccgagcagctgggcgaggtgtctcacgagaccctgcgcaacccgctgatgcccgatatggtcggccgttactaccgccagcccggtacctacccagacgaatgggtggtgccggaaggccagtacttcgtgatgggtgacaaccgtgacaacagtaccgacagtcgtttctggggcttcgtgcccgagcagaacctggtcggcaaggcggtcgctatctggataagttttgaattcgagcgcgaagaaggctccct

SEQ ID NO: 263657 - DNA, 856 bp, Unknown
  Bacterial polypeptide expressing nucleotide sequence isolated from the Sargasso Sea
tatgtcactaaatttcccgctgttgctggtcattgccgttgccgtctgtggtctcctggcgttgctcgatctggtgttcttcgccccgcgtcgtcgggcggccatcgcttcctatcagggcagcgtcagccagcccgatgcggtggtggtcgagaagctgaacaaagagcccttgctggttgagtacggcaagtcgttcttcccggtgttgttcatcgtgctggtgctgcgctcgtttctggtagagccgttccagatcccttcggggtcgatgaaacccaccctggacgtgggcgacttcatcctggtgaacaagttttcctacggcattcgcctgccggtgatcgacaagaaagtcatcccggtaggtgacccgcagcgcggcgatgtgatggtgttccgctacccaagcgacccgaacgtcaactacatcaagcgagtcgtcggcctgccgggcgacgtggtgcgctacaccagcgacaagcgcctgttcatcaacggtgagtcggtggccgagaagctgttgggcgccgagccgaataccttgggcagcgccgagctgtaccaggaaaaactcggtgcggtggagcaccaaatccgcaaggaaatgagccgctaccgtgcgatgccggatggcctgtggaaagtgcctgccgggcactacttcatgatgggcgacaaccgggacaactccaacgacagccgctactgggatgaccccaacattcccaaggatctgctgggcatggtgccggacgagaacattgtcggcaaagccttcgcggtctggatgagttggccggaacccaagctcagccacctgccgaacttctcgcgggtcgggctgatcaagtaa

SEQ ID NO: 263658 - DNA, 925 bp, Unknown
  Bacterial polypeptide expressing nucleotide sequence isolated from the Sargasso Sea
tatggcaggttattttgcaattttcctcgtagtattgaccttggccagtggtttaatctggttgatcgatgtactggtatttgcgcctaagcgtaaagttaaagttgcgaccgctcaggctgctgcagccggcggcctgccgttaaatgtggtagaagaactgggaaagccttcttatctggcagaaacagccaaagaaattttcccgctcattctggctattactattatccgttcgtttttgtacgagccattccagatcccatcaggctcgatgatgcctaccttgttggtcggtgattttattctggtggaaaagttttcgtacgatgtgaaagatccggtctggcgtaagccgctgatcacgactggccgcccagagcgcggcgacgtgatcgtatttaaatacccggagcagccaacagtcgattttattaaacgtactgtaggtttgccgggcgaccgtatcgtctacaagaacaaacagttgtttattcagcctgcttgtaccgcagcggataaaagtacctgccctggtttagaagctgtgcctttaactttgcaagccgaaggcgagtttatggatggcgaattgccaaccaagcgttattcagagcaatttggcgagcacaaacacgacatactgcagcatccgtttaagtcggaaaacctaatgcagtactacaagcaaccaggtacagctattgaagagtttattgtcccggaaggccattattttgctttaggtgacaaccgcgataatagccgcgacagccgtttctggggttttgtacctgaagaaaatctggtcggtaaagcggtctttatctggatgagttttgaatttagtgacgatccggacaactggttaccttcctgggtaccggtcggagttcgttttgaacgtttaggcaaaattaaataa

SEQ ID NO: 263659 - DNA, 736 bp, Unknown
  Bacterial polypeptide expressing nucleotide sequence isolated from the Sargasso Sea
tatgtcgctcaatttcccgctgttgctagtcatcgccgtcttcatctgcggtctgcttggcttgatcgacctgctgttcctggccccgcgccggcgtgcggcaatcgccaactatcagggcagcgtcagccagcccgagatggcggtggtcgaacggctgaacaaggagccgttgctggtcgagtatggcaagtcgttcttcccggtactgttcatcgtgctggtgctgcgttcgttcctggtcgagccgttccagatcccctcgggatcgatgaagccgaccctggaagtgggcgacttcatcctggtgaacaagttctcgtacggcattcgtctgccggtgatcgacaagaaggtcatcgcggtcggtgacccgcaacgcggggatgtgatggtgttccgctacccgagcgacccgaatgtcaactacatcaagcgtgtggttggcctgccgggcgacgtagttcgctacaccaacgacaagcggctgttcgtcaacggccagcccgttgccgaacaactggtgggcagcgagccgggtaccctgggcagcgctcagctgtacaaggaaaagctcggcgagaccgagcacctgatccgcaaggaaatgagccgttatcgcatgccgccggaccagcagtggaccgtgcctgcgggccattacttcatgatgggcgacaaccgcgacaactccaacgatagccgcttctgggatgacccgaacattcccaaggaa

SEQ ID NO: 263660 - DNA, 919 bp, Unknown
  Bacterial polypeptide expressing nucleotide sequence isolated from the Sargasso Sea
aatggcagcctatttttccattattttagtgctagtcactctgatttcagggttgatctggttagtcgatgtgctggtatttgcgcctaaacgccgtgaaagcttagccttggccaaggcttctcaggccaatttaactgaggaagccgaatacaatattatccgtgaacccactgtggttgagactgcgcactctatcttcccggtgattgcctttgtgctgatcctgcgctcgtttatttatgagccatttcaaattccatcgggttctatgatgccaacgctgttagtgggggattttattctggttgaaaagtttagttatggcctaaaagatcccgtatggcgcactaaactgattgaaacgggcgagcccaaacgtggtgatgtgattgtctttaagtacccagagaatcctcaggttgattacattaagcgtgttgtaggtttaccgggcgataggattatctaccgtaacaagcagttgatgatccaaaaggcctgtggtgcagagcaaactaattgccctgagccagaactggtggcgcgtaccgaaatcagccgtggtgattacagccaagatggtgtgcctttactgcgttataaagagcaactcggtgaagtggcacacgatattttaattaatccaagccgtcctgatatgttgggttatttcaagcgtgatggcaatttacccgcgggtgaatttcttgttcccgaaggccattactttgcgatgggtgataaccgcgataacagtaccgacagccgtttctggggctttgtccctgaagaaaatcttgtcggcaaagcggtggctatctggatcagttttgagtttgaccgttcaaaagccgatttcctgccaacctgggtaccaagcggtgtgcgctttgaacgtgtaggtggaattcactag

SEQ ID NO: 263661 - DNA, 718 bp, Unknown
  Bacterial polypeptide expressing nucleotide sequence isolated from the Sargasso Sea
cctgttttttataactctatttcttgggctttcttggctcattggtaaacgaatcttaaagaaagactcagagttttatgaggtttgcggagccatgtttccgattttactccttatatttttattcagatcattcgcttacgaaccatttaggattccttcagcttccatgatgcctacactcgagagaggcgattttatattggtcaataagtttgcttttaatatcagaatgccattgacaggaaaaacaatatttaccaataaggagccaaaaagaggggatgttttagtttttgactttccttgtgatcgagacatcaaatacatcaaaagattgattgggttacctggcgatgaaatcacatacaggaacaaacaactgaccatcaatggcgaatcaattatttcgagttatgattctgtttttaaggaccctaaacaatatggctcacatgtatacaatgagtcgattaatggcattgatcatcagttacttctcactccatctcggaggggaagggaaggcatatacactgttccagaaggctcatatttcgtcatgggcgataatagagataacagcacggacagtcgttttgattgcccgggttttgttccaaccgatcacattgttggctcagcaacaagaatttggtttaattgggacttttcaacgatgccaaagtggagcaggattggcgataaaatcaaataa

SEQ ID NO: 263662 - DNA, 187 bp, Unknown
  Bacterial polypeptide expressing nucleotide sequence isolated from the Sargasso Sea
actgatatcgagattcatgcaaatgaagttttgtcattaaaaaaaagattaaatgaaatttactcaaaacatacaggtaaaagtgttgatgaagtgaaatctgcgcttgaaagagacaatttcatgactgctgatgttgcaaagtcatttggtcttattgacgaagttgtagaaaaaagatcttaat

SEQ ID NO: 263663 - DNA, 367 bp, Unknown
  Bacterial polypeptide expressing nucleotide sequence isolated from the Sargasso Sea
atgttctctttttttaaaaaaaaaaaaattattccacacataaggctgtccggtgtcattggttcagctggaagatttaaacaaggtattgatttttcaggccagcaagagattataaaaaaagctttttcatttaaaaagtctgaaaacatagcaatatcaattaattctccaggtggctcacctgtccaatctcatttaattcatgactatataaggcagttggctaaaaaaaataaaaaaaaagttatagtttttgctgaagatgttgcagcatctggtggatacttaatagcttgtgcgggagatgaaatatatgcgaattcaagttctatagtaggttcaattggagttatctcagcctcat

SEQ ID NO: 263664 - DNA, 763 bp, Unknown
  Bacterial polypeptide expressing nucleotide sequence isolated from the Sargasso Sea
ggaattatcggctcagccggcaagttcaagcaaggaatggaattagctaatcaaagagatactttaaagaaagctttttcagtaaaaaaaatcacacatgtcgctatctcgataaattctcctggaggttcgcctgtccaatctcatttgatttacagttatataagacaactagctgaaaaaaataaagtaaaagtcattatttttgcagaagatgtagctgcttctggaggatactttattgcttgtgcaggagatgaaatttacgctaattctagctcaataattggttccataggggtaatatcagcttcgtttggttttaaagatttaattcagaaaattggcgtggaaagaagagtttatacggctgggaaaaataaaagtactttagatccttttaaagaggagaaagaagaggatattaaaagattaaaaactattcaattagaattacacgaagattttattaaaattgtcaaaaaaagcagaggatcaaaattaaaagatccagaaaaaaataatatttttacgggagagttttggacaggaaagacatcgctaaggctaggattaattgatgggatcggtaatgcagaccagattttaaaagaaaaatttggggacaaagtgattattaaatcttttgaaaaaccaaaagggtttatagcaagaaaactctcctcttcttttgtagatcctattgaaaaattagtaaatataatcgatgaaaaatcaatatggcaaagatttggtttataaa

SEQ ID NO: 263665 - DNA, 820 bp, Unknown
  Bacterial polypeptide expressing nucleotide sequence isolated from the Sargasso Sea
atgaaatttatttctaaattttttaagagtgataaaccaattataaatataattagaatgaacggggtaatagctagtggttcaaagtttccaggttcgagtaatttatctcttgaaagcttagagaaacaaattgaaagggcttttgctggaaaaaaaattgctggagtagctttaataattaattctccaggaggatctcctgttcaatctgctttaatatcagagagaatagttgagttatcaagcaaaaataatattcctgtatttgcgtttgtagaggatgttgcagcttcaggaggatattggcttgcttgttctgccgatgaaatatttgttatgcctgcatcaatagttggttccatcggagttatatcagctggattcgggttcgtagatgtaattaaaaaaataggagtagagagaagagtgttttcaaaaggagaaaacaagggtatgttagatccttttcaaccgcaaaacccagatgatgttaaagtaattacagatttgcaggaagagattcataaccagtttaaagattgggttagtaaaaggagaggaaatagacttaataaagaaacaataaagaaagaaggtatttttgaagctaagattttctcaggagttaaggcgtgtgaaattggtcttgcggattctattggagagttaaaacaggtcttaagagaacgtatcgatgaaaaagtagtttttaaggaaatttctggaagaaaaaaattagggcaaagacttggtttatcatcttcaagatattataaagtaatagattatattgaagaaaaaattgctttctctagat

SEQ ID NO: 263666 - DNA, 556 bp, Unknown
  Bacterial polypeptide expressing nucleotide sequence isolated from the Sargasso Sea
tatgttttcttttttcaaaaaaaaaaaaattataagtcatattagactttctggcgttataggaaatgttggcaaatttagacaagggatagaatatgctggacaagaagaaactataaaaaaagctttttctgtgaaaaaagcactggcagttgctataactattaattccccaggcggatctcctgttcagtcacatttaatatataaatttataagagaacaggcaaaaaaaaataaaaaaaaagtaattatttttgctgaagatgttgcagcttctggtggatatttaattgcttgtgctggagatgaaatttatgctaattcaagttcaataattggatcaataggtgtaatttctgcatcattcggatttaaaaacttgatagaaaaaataggcgtacaaagaagagtttatactgctggtaaaaataaaagcacattagatccatttttagatgaaaaagaggaagatattaaaagattaaaaagtattcaattagagcttcatcaggattttatagatgtagttgaggaaagcaggggtgaaaaacta

SEQ ID NO: 263667 - DNA, 385 bp, Unknown
  Bacterial polypeptide expressing nucleotide sequence isolated from the Sargasso Sea
catgttctctatttttaaaaaaaaaaaaatcatacctcatattaaactaagtggagtgataggtaatgttggaaaatttaaacaaggtattgattttgcgggacaagaagaaataataaaaaaagctttctcaattaaaaaagcacccgctgttgcaatttctattaattcaccaggaggatctcctgttcaatcacatttaattcatgactttataagatcgcaagcaaaaaaaaataagaaaaaagtgataatttttgctgaagatgtcgctgcatccggtggatatttaattgcttgtgcaggggatgagatttatgcaaatcaaagctctatagtaggatcaataggtgtgatttattcatcttttggttttaaagatctt

SEQ ID NO: 263668 - DNA, 571 bp, Unknown
  Bacterial polypeptide expressing nucleotide sequence isolated from the Sargasso Sea
attggtaaaactttcaggtgtaattggaagcgtagggaaatttaaacaaggaatagatttttcaggacaagaagaaattatcacaaaagctttttcactgaagaaatctccagctgttgcaatttcaattaattcgccaggaggatctccagttcaatcacacctaattcatgatcacattaggcagttagcaaagaaaaataataaaaaagttattgtttttgctgaagatgtggctgcatcaggtggctatctaatttcatgtgctggcgatgaaatatatgcaaataagagctccatcattggatctattggagttatatattcatcttttggatttaaagatttaataggtaaaataggagttgaaagaagagtttacactgcaggaaaaaataagagtacactagatcctttcttagatgagaaagaggaggatattaaaaggctaaaaaatattcaattagatttacataaggatttcattgatgttgtagaaaatagtagagcttccaaactaaataaagataaaggtattgaattattttctggcgaattttggtcaggtaga

SEQ ID NO: 263669 - DNA, 301 bp, Unknown
  Bacterial polypeptide expressing nucleotide sequence isolated from the Sargasso Sea
atgttctctttttttaaaaagaaaaaaattgttgctcacttaaaattaagtggggttattggtaatgctggaaaatttaaacaaggtattgattttgcaggtcaagaagaactaattaaaaaggctttttctctgaaaaaagcggcatgtgttgctatatcaattaattctccaggaggatcaccagttcaatctcatttaatctacagttttattagacaacaagcaaaaaaacacaaaaaaagagttattgtattcgctgaagatgtagcagcttctggaggttatttgatttcgtgtg

SEQ ID NO: 263670 - DNA, 894 bp, Unknown
  Bacterial polypeptide expressing nucleotide sequence isolated from the Sargasso Sea
tatgaattttaagaaactaggcagtacagacgtcgatgtgagtacaatttgtctcggaaccatgacttggggggagcaaaactcaaaggcagatggttttgagcaaatggattatgcaattgataatggggtaaatttttgggacacagcagaaatatatgcaataccaatgagagaagaaacttatggtgaaactgaaaacatcataggtgaatggttcaaaaaatctaaaaagagagacaaagtcattttagctacaaaggtttctggtcctaccagtaaggagtacataagaggcggtggatgcagttatgataaaaaaagtatgtcagaggcattagagaaaagtttaaaaagaatgcaaactgattatatcgatttatatcaattacattggccagaaaggaatactaatttttttggtaagcaaggatacgaacacgactcaaatgaaaaaaattggattgcttttgaagaaattttagaaaatttaaaaaaatttgtagatgcaggtaaaattcgatatgtgggtctctcaaacgaaactgcgtggggtttagcgaaatgtcttgagctttcaaagttaaaaaatttacccaagatgatggccgttcaaaatccctataacttactcaataggacctatgaggttggtcttgctgaaatctcggtaagggagcaaagtggtttgctggcttattctccattagcctttggctacctcacaggaaaatatagaaataataatataccaaaaggttcaagaatagatctttttaaagactttactcgttacaataatgaaaatagcattaaagctattgaagaatactacaaaatttctcaaaaatttaatttggattttgctcaaatgtccataaaattttgtgaaat

SEQ ID NO: 263671 - DNA, 502 bp, Unknown
  Bacterial polypeptide expressing nucleotide sequence isolated from the Sargasso Sea
atgttttcattttttaaaaaaaaaaaaattgttagtcatttaagacttaccggcgtcattggaaatgttggaaaatttaaacaaggaatagaatattcttctcaagaagaaatgataaaaaaagctttttcagtaaaaaaagcagaggctgttgcaatttcaattaattccccaggtggttcacccgttcaatcacatctaatatataaatttattagagaacaatctacgaaaaacaaaaaaaaagtaatagtttttgcagaagatgttgctgcatctggaggctatctaattgcatgcgcaggtgatgagatttatgctaatgcaagttctataatcggatcaataggagttatttattcttcttttggttttaaagatttaattcaaaaaataggtgttcaaagaagagtttatacagctggaaaaaataaaagtactctagatccttttttagatgagaaagaagaagacattcaaagattaaaaaatattcaactgg

SEQ ID NO: 263672 - DNA, 1088 bp, Unknown
  Bacterial polypeptide expressing nucleotide sequence isolated from the Sargasso Sea
gatgaatctcttgctgcagtttatgtgaatgtatctgaactaggtatgtacatctcttctgcatttgaacttgctaatgctgtaaaaaatgtcagagatagtggaaagaatgtgatagcctatgctgaaaattttgggaataacgcatacttaataagctcacaggcaaataccataatgattaatgaatatggtggtgtcaatgctgttggattttcaagaaagagagaattttataaagatttatatgaaaaaataaatcttaactacaatgtatttgttgccggtgattttaaaagtggtccagaaccttatacaagaaactcaatgtctgaggaagataaattggcttggagtgaatttgcagatcctttatggaataaaatgaaagaaatgatggaggctggaagagacttgcaacaaggcacaattcaggaatatggagatactttatgggaaagatcattaaacaatcccgagcctgcaaaaattgcattagagcttggcatggtagatatggttgttacaagagaagaactaagacattggatgtatgaaaaatttcctaacgatgagaatgataaaaatgaacttccagattcggtctcaatttatgaatatttatctatatttgaagaggacatcaatgactccgaaaataagatcgcagttgttaatgtagaaggagcaattacgactggtgaagtgcaatacggcattgctgggtctgataccattgtaaaaaacataagaaatgccatcaaagatgattcggttaaagcattagttctaagagtaaatagtcctggtggcagtgtttgggcgagcgaactaattacaaacgctttagacgaatttaaatcaacaggtagacctatcgtaacaagtatgggagatattgctgcttctggtggagtttgggtgacaacttattcagacgaaatatgggcaaaagaagaaacacttactggctctattggagtttacggaatagtgcctactcttgatggtatatatgattgggctggcatacaggttgacggtatttcatctacaaaagctggtgaatgggatgaaagactggcaat

SEQ ID NO: 263673 - DNA, 720 bp, Unknown
  Bacterial polypeptide expressing nucleotide sequence isolated from the Sargasso Sea
catgtccaaagaattagataaatattttaaggtttatgacgttctaaagaagcggaataggtggcgtctaatagcaatcttgttattacttacttccgccgtttttggttttaagacgacattttcaaatcagtttacagattatgtggctatagttgatttaacagggataattcgcgatgatcacaagctaatagcggttttaaataaaatagaacataataaaatggctagggcattgatcttacgaattaactcccctggcggtacaatggtcggcgctgaggggttatatcattccattcgagagatctcagataaaaagccggtggtcgcagtaatgggggaagtagctacctctgcaggttatatggttgcgcttgcagcagataggattgttgctagaaaaactactataaccggttcagtaggtgttttgatgcaatccgcagatattacaaacttattggagaaattgggtattaagccacaaattgttaaaagctcagagctaaaagcccagccaagcccttttgaacctttttctagcgccgcccgagaaatttctgaaatagttgtagcctacgttcacaagtactttttagacttagtttcagagcgtcgcaaactaagcataacagatgctagacggttgtctgatggcaggatttttactggtggtcaggctattgaaaaaggattagtcgatgagttgggggg

SEQ ID NO: 263674 - DNA, 751 bp, Unknown
  Bacterial polypeptide expressing nucleotide sequence isolated from the Sargasso Sea
ggtaaagcattagttctaagagtaaacagtcctggtggcagtgtttgggcgagcgaactaattacaaacgctttgaacgaatttaaatcaactggtaggcctatagtaacaagcatgggagatattgctgcttcgggtggagtgtgggtgacaacttattcagatgaaatatgggcaaaagaagaaacacttactggctctattggagtttacggaatagtgcctactcttgatggtatatatgattgggctggcatacaggttgatggcatttcatcaacaaaagctggcgaatgggatgaaagattggcaatgcctaattatgttactgaatccatccaggcaggtattgatcatacatatgataaattcgtttcaaaggtagctgaaaatagaaatatggcatacaaagaggttttatctattgctggaggaagaatctggtctggtaaaaaagcattgcagcttggattagtagataaaattggagacttagaagatgctattgattcagctgctcaatttgcagatattgatgactatgaaatagtttcatatgtaaaagagatggatccttttgaattatttttaaatgaattgttagaaaatttggattcaaaagttgaaataaatgcagaccttcaagctttgggtgagtttttagatgcacggtataaatttatagatcctaacaaaaagattaacacagcagtctattgctttgagtgtgagtatttcaactctcaataac

SEQ ID NO: 263675 - DNA, 545 bp, Unknown
  Bacterial polypeptide expressing nucleotide sequence isolated from the Sargasso Sea
tatgttttctttttttaaaaaaaaaaaaataattccacatattaaatttagcggagtgattggaaacgttggtaaatttaaacaaggtataaacttttctggacaagaagagattattaaaaaggctttttctattaaaaaatcccccgctgttgcaatatctattaattcacctggtggatcacctgtacaatcacaccttattcacgattttattaaaaaccaagcaaaaaaaaacaaaaagaaagtaattatttttatggaggatgtggctgcatctggcggatacttgatagcctgcgcaggagatgaaatatatgctaataaaagctcaatagttggatcaattggtgtaatatattcttcttttggttttaaagatttaattcaaaaaattggagtacaaagaagagtttatactgcaggaaaaaataagagtactttagatccttttttagatgaaagagaagaagatattcaaagattaaaaaaaattcaattagatttacataaagattttatagaagttgttgaaaatagccgag

SEQ ID NO: 263676 - DNA, 677 bp, Unknown
  Bacterial polypeptide expressing nucleotide sequence isolated from the Sargasso Sea
taaaaagccatctgtagtagtcattaagatcaactcaccaggcgggtcaccggttcaatccgagcttatacacaaccgtataagaaatttatcgaagaaaaataacgtgaaagtgattacaatcgcggaggatgttgctgcctcaggaggttatatgctgatgtgtgcaggagatactttaattgccaataaaagttcaatagtcggatcaataggtgtaatcagtgcctcttttggattcaaaaaattaatagataaactaggcattaaaaggagagtttttacaaaaggagatagaaaatcatttctagatccatttgaggaagtttctaaaaaagatatagataagctgatcaaagtccaggatagcatatttgaaaatttcaaagatttagtctcaaaaaatagaaaaaagagaatagacccaaaaaaagtttttaatggagaattttggacaggtgaacaggcaaaaaaacttggtttagtagattctaatgaagaactaaattcgtacattgaaaaacattatggaaaaaaattaaagattaggaacatagaagaaaaaaaatcattcattaaaaatattttaaataatcagatttcaaataacgatattattgatcgactaaaaaaagctctaagagaaaattctttctggagtcgatatggcctctaaa

SEQ ID NO: 263677 - DNA, 553 bp, Unknown
  Bacterial polypeptide expressing nucleotide sequence isolated from the Sargasso Sea
aatgatagggttgtatggtgaggtagacgaagaacgagcggctgaaacaaccttttcgttaatggcgttgagggatcttggccaaaagcaagagttgcaggacccggatgatccagaatcagaacttgaaacaacttacgatccttttgattttattgtatcaacctggggcggcagtgcagctgatatgttttcaatatacgacacaatgagaatggttagggatgattgcgagattagcactttagggttgggaaaagtaatgtccgctggagtactactcctggctgctggaacaaaggggaaaagacgaataggtaaaaattgtagggtgatgcttcacggggtcagcgccggccaacatggtaatatttcagatcttgaaaacgaaatggccgaagccaagtggactcaggaaaggctaattgcttgtttatcagaagaaacaaagatgacaaagaggcacattaagaagcttttagcgaaaagaatgaatgtgtatcttacagcggaagaggctttagaattaggaattgcagacgaaatcgtataa

SEQ ID NO: 263678 - DNA, 829 bp, Unknown
  Bacterial polypeptide expressing nucleotide sequence isolated from the Sargasso Sea
atgggcatttttgttaacacttttttaaaaacattcggaaatttgctagctttaggagctttttttataattatagccctttttatcaatttttttaaaaataatgaaaattttaatgattttaaatttactgagggtaacaaagagtcaaataacataattacaattctagaagttaatggcccaatagttaatgactcaatattgccttcaaatctgtttaattttgaaataatttcgcctgataaaataaaaaattatatcgatcaaattaatgaattagaaactaatattttaatagtatcaattaactcgccaggtggtactgtttctgcttctcatgaaatttatcagttaataaaaaaattaaaaagtgaaagaaaattaaaaatttattttcacacaactgagactttagcttcaggtgcatattggttttctttagcagcagacaaaatatttgctaattatggagcattaataggtagtataggtgttaaggggcccgattggatttattttgataatccagtttctatgtctacaggaatacttggaagcagcatagaaacaaaaaacggtattcaaattttttctaacactgcaggaaaatccaaagatattcttaatccttttagaaaacctacaaatgatgaaaaaaatcaacttaaattaacgattgatcaaatctatgaagattttgttgttagtgtatctaagcaaagaaaaatagaaataaataaaataaaaaatgatattggtgcatttatctacaatgctaatgaagcaaaagaaaattatctaatagatggtattagcaatttagaag

SEQ ID NO: 263679 - DNA, 778 bp, Unknown
  Bacterial polypeptide expressing nucleotide sequence isolated from the Sargasso Sea
tttacggggctatctggcattatatcatcacagtcaggcttgacaggctctggtttagcaataaataatttagaaaaattaattgataagttatttgctgataaaaaatctcctgttgtaactttaattattaattcacctggaggctcccctacacaatcctctttaattgcaaaaaggattattgatctggcaaaggaaaaaaataaaaaagttttagcattcgttgaagatgttgcagcttctggtggttattggttagcatgtgctgctgatgagatatatattgatcaaaactctgttattggatcaattggtgtaatttcaccaggttttggttttgttgatcttttaaaaaaagttggaattgaaagaagagtttatacatctggaaaaagtaaaagttttcttgatccttttaaagaagaaaaacaggaagacattgatagattaaaaaatattcaagaacaaattcatgataattttattaattatgtaaaagaaagaagaggttcaaagcttgatcagaataaattagataatatcttttctggtttattttgggttggtaacaaagctatcgatttaggtttagcagatggtattggtgcattaaaaccaattttagaagaaaagtttggaaaaaaaattaaaattaaaatgatcagtcaaaaaaaatcatttttacaacgtaggttttcttcttcaatatttaattctgatgaaattttaaataaaattgaagaacgaattatgttttctaggtttggattgtgat

SEQ ID NO: 263680 - DNA, 703 bp, Unknown
  Bacterial polypeptide expressing nucleotide sequence isolated from the Sargasso Sea
agatattataaaaaaagctttttcagtaaaaaaagctttagcagtagcaataacaattaattccccaggtggttctccagtacaatcacatttaatttataaatttattagagaacaagcaaaaaaaaataaaaaaaaagtaattatttttacagaggatgtggcagcctcaggtggatatttaattgcttgttcaggtgatgaaatttacgcaaacccaagttcaataataggatcaattggtgtcatatcagcatcttttggatttaaaaatttaattgaaaaaataggggtgcaaagaagagtttatactgcaggaaaaaataaaagcaccctagatccttttttagatgaaaaggaagaagatattaatagattaaaaaatattcaattagaactgcaccaagactttatagatgttgttgaagaaagcagaggttctaagttaaataaaaatagtggtattgaattattttcaggtgaattttggacaggcaaaaaagccaaggagctaggattgatagatggtttgggaaatgcagatcaaatattaagagaaaaattcggcgatgaagtagaaattaaaaaatttggaaaaccaaaaggatggttagctaaaaaactttcatcatcccaggatcatgccgataagttgataagtattctagaagaaagatcgatctggcagagatatggtctctaa

SEQ ID NO: 263681 - DNA, 413 bp, Unknown
  Bacterial polypeptide expressing nucleotide sequence isolated from the Sargasso Sea
tttgataagcattgttttattcttttttggcgaaaataaacaaaaatattttagttatttagaaggaaataaagattcttctgaaattattgcaattttaaatttgaatggacctataatttcagaacctcctaattttaataattataatatatttcaaaatttagaggtaatttatccttcactaataaaagaatacttaaaagaattagagcaaattaatgcaaaaggactaattatatctataaactctccaggaggaggtgtttctgctactcaaaaaatatataatttaataaaagattttaaagataaaaataatattccaattttttttcatactaaagatatcttaacttctggaagttattgggttgctttatctggtgataaaatttttgctgattatggaa

SEQ ID NO: 263682 - DNA, 256 bp, Unknown
  Bacterial polypeptide expressing nucleotide sequence isolated from the Sargasso Sea
atgttttctatttttaaaaaaaaaaaaattgtaccacacattaaacttagtggagtaataggaaacgtgggtaaatttaaacagggtattgattttgctggtcaagaagaaataattaaaaaagctttttcaattaaaaaagctccagctgtagctatttcaattaattcaccgggaggttcaccagttcagtcacatttaattcatgatttcattagatctcaagcaaaaaaaaataagaaaaaagtaattgttt

SEQ ID NO: 263683 - DNA, 837 bp, Unknown
  Bacterial polypeptide expressing nucleotide sequence isolated from the Sargasso Sea
aattggtattaacctttattcatatgttttcgttttttaaaaagaaagttgttgttccacatattagactagctggagttattggatcagctggacgatttagacagggcatagatttttcaggtcagcaagaaattataaaaaaagcattttcatttaaaaaagctaaaagtatagcaatttcaataaactcacctggaggatcaccggtccagtcacatttgattcatgattacattagacaacttgcaaaaaaaaataaaaaaaaagttattgtttttgcagaagatgttgcagcttcaggcggatatcttattgcttgtgcgggtgacgagatatatgcaaactcaagttcaatagttgggtcaatcggggttatatcagcttcttttggatttcaggacgctattaaaagaataggggttcaaagaagagtttatacagctggaaaaaacaaaagtactttagatccttttaaagaggaaaaaccggaagatattgaaagaattaaaaaattacaattagaattgcactcagactttataaatttagttaaaaaaagtcgtggatcaaaattaaaagatcccgataaaaataatacttttacaggtgaattttggtcaggctcaacctcattaaaattaggacttgtggatggcataggaaatgcagaacaaattttgagagaaaaatttggagaaaatattgagattaaaaagtttgaaaaacaaaaaggttttttagcaaaaagattatcttcctcattagacaatcaagttgatactatagtaagcgctatagaagaaagagcactgtggcaaaaatttggtttataga

SEQ ID NO: 263684 - DNA, 694 bp, Unknown
  Bacterial polypeptide expressing nucleotide sequence isolated from the Sargasso Sea
ttttcggtgcgctcggccaaggcagtggcgctgatcatcaattcgcccggtggctcgccggtgcagtcggcactgatcggccagcggattaaggaccttgccgggaaggctgatgtgccggttctggctttttgcgaggatgttgcggcaagcggggggtattggattgctgccagcgctgacgaaatctatgccaatggtgcttcggtcattgggtcgattggcgttgtctcagctgggtttggctttgatcgggcgatcgagaagattggcgtcgatcgccgcgttcacaccgctgggcgcaacaagatgatcctcgatccgttccagccacagcgggacgaggatgtcgagcgactgaaggagctgcaggcggatattcatcagcaattcatcaaccatgtgcttgaccggcgaggggcacgattgcagaaaccccacgatgatctgttcagcggcgctttctggactggccagcgtgcggccgatcttggccttatcgatggtcttggcgaatgccgtcaggtgctgcgcgacagatttggcgaggacatcagtttcatgctcattggaccaaagcggaaatttcttgctggtcttggtggcttgcccggatcgctggcaggtggcattgttgacgaggcggcggaaatcgcgactgagaaagccatgctgtcgcgctttggtctctagc

SEQ ID NO: 263685 - DNA, 441 bp, Unknown
  Bacterial polypeptide expressing nucleotide sequence isolated from the Sargasso Sea
tatgttttcttttttcaaaaaaaaaaaaattattagccacataagactaagcggagtaataggaaatgtcggtaaatttagacaaggcatagaatatgttggacaagaagagactataaaaaaagctttttcagtaaaaaaagctttagcagttgcaataacaattaattctcctggtggatctcctgttcagtcacacttaatttataaatttataagagaacaggcaaaaaaaaataaaaaaaaagtaattatatttactgaagacgttgcagcatcaggaggatatttaatagcctgcgctggtgatgaaatttatgctaattcaagttcaataattggatcaattggagtaatttcggcttcattcggatttaagaatctaattgaaaaaaatggagtacaaagaagagtttatactgcaggaaaaaacaaaagtac

SEQ ID NO: 263686 - DNA, 426 bp, Unknown
  Bacterial polypeptide expressing nucleotide sequence isolated from the Sargasso Sea
tatgttttcgtttttaaaaaagaaagttgttgttccgcatattaggctagctggagttattggatcagctggacgatttagacaaggtatagatttttcaggtcagcaagaaattataaaaaaagcattttcatttaaaaaagccaaaagtatagcaatctcaataaactcacccggaggatcaccagttcagtctcatttaattcatgattacattaaacaacttgcaaaaaaaaataataaaaaagttattgtttttgcagaggatgttgcagcgtcaggtgggtaccttattgcttgtgctggtgatgagatatatgcaaactcaagttcaatagttggatcaattggggttatatcagcttcttttggatttcaggatgctattaaaagaataggagttcaaagaagagtttataccgctgg

SEQ ID NO: 263687 - DNA, 892 bp, Unknown
  Bacterial polypeptide expressing nucleotide sequence isolated from the Sargasso Sea
gctttgttctcactcgaagagcagcgcaaggcgagacggtggggaatctttttcaagtcgctcacctttatttacttgttctttgtggtgatggtattcgttcctttcagatcgccgtctttgcaaagtgattccagcgagcatgtcgcgctggttgcgctcgacggtgtgatcgccgccgatgctgacgccaacgctaattcagtagtgacgggtttgcgtgctgcttttgaagcgaagaattcagtgggcgttattcttgcgatcaattctcctggcgggagccccgtacaatccggctacattaatgatgaaatattcaggcttagagagctgcaccctgaaaagaaaatctattcggtgatcgctgatgtcggtgcttcgggcggctattacatagcttcagctgctgacgagatttacgccgataaggcaagtcttgtgggatcaattggtgtggttagcggtggatttggtttcacttcagctatggaaaaaatcggcatcgatagacggatttatactgccggcgagagcaaagggtttttagaccccttttcccctgaaaaagaaggcgacaaggtcttttggcagggcgtgctcaacgtgacacaccagcaatttattgatgtggtacagaaggggcgcggctcacgattggttgatgaccccgaaattttttccggtttgatttggagcggcgagcaagcggtaaccaaaggtctgattgatgggcttggcagcgtgggctatgtcgctcgcgaggtcattggcactgaagaaattcgaagttacaccgttcagccgcatccctttgatgaatttgcgcggcgtttgggcgtggcgaccaaaaacactttgcgtgtgctgagttcaccgctgagctattaat

SEQ ID NO: 263688 - DNA, 205 bp, Unknown
  Bacterial polypeptide expressing nucleotide sequence isolated from the Sargasso Sea
tatgttaaaatcttttttttctaagagtataaatatcccaacattacgtttatccggtgttattggtcaggctggttttatgagatctggcttaaatatatctgctttagataaattaattgaaaaattatttgcggataaaaaaagcccagctgtatgtttaattattaattctccgggtggatctcctactccatcatcttta

SEQ ID NO: 263689 - DNA, 869 bp, Unknown
  Bacterial polypeptide expressing nucleotide sequence isolated from the Sargasso Sea
gatgctagccaaccttaggagaagatctcattgtgaaaatattatttatacagattggagaagagataattttttaaaagcaatagtttcaattattggaagagataatcctccaaaaaatataggaatagaaaatgatcatgtcactttagacatgaaggaaaaaattggatcaatttttacattttcagttttcaaagatgtttcgaaagaattaatgaaacttagaatgataaaatctaacgaagaaatagaagttataaaaaatggagcaagaattgctgacattggaggacaagaaatagtaaaaaatattaaagagggagcaactgaaatagaaattgctattgcagggagagacaaaatggaaagagagattgcaaaaacttatccaaatgctgaatatatggatacttgggtttggtttcaatctggaattaatacggatggcgctcataatccaaaaacaaatcgaaaattaataaatggagatattttatctttaaacactttcccaatgatatcaggatattatacggctttagaacgtactctttttttaaataaaattgatgacgcatcattaaaagcttgggaagcaaatgtaaaagttcacaaaagaggattggaactaattaaacctggagttaaatgttcagatatttgcaatgaattaaatgaacttttcgctgagcttggatatttacaatataggacttttggctatggacattcttttggcgttttatcacatttttatggcagggaagctggtttagaacttagagaagatattgatactgttttaaaagaaaatatggtcgtatcaatggaaccaatgattttaatccctgaaggaaaagctggtg

SEQ ID NO: 263690 - DNA, 553 bp, Unknown
  Bacterial polypeptide expressing nucleotide sequence isolated from the Sargasso Sea
aatgttcactccaaacaaaacaataatctcaattgatctcaaaggaatgatcgcatctggaagcagagcaccattgaatatggataatttaaatggacttttctcaaaggtaatgaaaatgaaatttgatgcactatcaattgtcattaactctcctggcggttctccagtacaatcatcattaattgcacaaaagataagagaaatttcagataagaaaaaagtgaaatgttattgttttgttgaggatgttgctgcatccggagggtattggcttgcatgtgcagcagatgagttgtatgcagatgtaaattctattgttggttcaataggtgttatatcaggtggttttggatttactgatcttataaaaaaaattggagtagagagaaggatatttacagctggagagaacaaaagctttttagatccatttttaaaaattaataaaaaagatgaagaaaaattaaaaaaacttcaaaagttaatacatcaaaattttattgattgggtgtcctcgagaagaaaaaagaaacttagcgaaaaaaataaa

SEQ ID NO: 263691 - DNA, 580 bp, Unknown
  Bacterial polypeptide expressing nucleotide sequence isolated from the Sargasso Sea
atgaacgaagaaaatgcagctaaccctagctcagcaaacaattttttggacgagaagctttttaaatctcgttcaatctcaatttttggacagataaacgaaaaggtagctagatcaacagctgagaaactattggccttgtctgccgaaagtgacgaacctataacgatctttataagctcacccggaggacacgtcgaatccggagatgtaatatacgacatcataaagtttgttaaacctgaagttaaagtcgtagggaccggatgggttgccagcgcggccacaaacattttcctcgcagcaaaaaaggaaaaccgtttctcgctcccaaatacccgctatctagttcatcaacccagcgggggctcaaggggagacgctacagatatagcgatacaggctgaagagatactaaaaactaaagcaagaattaataaaatcatatctgaggaaactggcagatcccttgaacaggtggaaaaagatactgatagagactattggatgtcggtgaaagaagccatcgaatacggaatagtaagcaaagaaattacttccataggagatataggctaac

SEQ ID NO: 263692 - DNA, 220 bp, Unknown
  Bacterial polypeptide expressing nucleotide sequence isolated from the Sargasso Sea
tatgtttaaaagatttttttctaaaaatattcaaataccaactcttagactttctggaataatatctgcacaatctggaattacaggatctggcttagctataaataaccttgataaattaattgaaaaattattttcagataaaaaagctccagcagttgcaattattataaattcacctggtggttcaccaacgcaatcctcacttatagcaaaaaaa

SEQ ID NO: 263693 - DNA, 811 bp, Unknown
  Bacterial polypeptide expressing nucleotide sequence isolated from the Sargasso Sea
atgttttcatttttaaaaaaaaaaaaagttattagccatcttaaactatctggcgttataggaaatgctggaaaatttagacaaggaatagattattcaagccaggaagaaataattaaaaaagctttctcactaaaaaaagcattagtagtagcaattacaataaactcaccaggaggatctccagttcaatcacatctgatttataaacttattaaggaacaatcaaaaaaaacaaaaaaaaaagtgattgtctttgctgaagatgtggctgcttccggcggatacctgatcgcttgtgctggtgatgagatatatgcaaactcaagttcgataataggatcaattggcgttatttctgcatcatttggatttaaaaacttaattgaaaaaattggagttcaaagaagagtatatacagcaggaaagaataaaagtactttagacccttttcttgatgaaaaagaagaggatataaatcggttaaaaaatattcaattagaaattcatcaggactttattgatgtcgttgaggagagtagaaaagaaaaactaaacaaaaactctggtattgaacttttttcaggtgagttttgggctggaaaaaaagcaaaagaattaggtttaatagatggtttgggtaatgcagaacaaatattaagagaaaaatatggagatcaaattgagattaagaaatttgaaaaaagtaaagggtggttatcaaaaaaattatcatcctcagaaaattatactgataaagtaatcagtttattagaagaaagatcaatctggcaaaggtatggtctataaa

SEQ ID NO: 263694 - DNA, 784 bp, Unknown
  Bacterial polypeptide expressing nucleotide sequence isolated from the Sargasso Sea
atgaaaaaaatttttaattttattttgaaactttttggcaaaggtaaaccaattgtgcctgttttaagattcgagggtattattggcactggtggtggtataggcaaaggtaaaattaatgctgaaaatctagaaccaaatatcaaaaaagcattctctgaaagcaatccaagtgctgtagctataataataaattccccaggtggttcgcctgttcaatcctctctaatttatcaaagagttaggtatctcgcagataaaaaagatgtaccagttatggtgtttatagaagatgttgcagcatctggaggttactggctttcatgcataggagatgaaatctttgcagacaaatcttcaattgttggttcaattggagtaatttctgcttcatttggttttacggaagcaattaataaattaggggttgaaagacgggtatatacgactggcaaatcaaaagggtcactagatccatttaaacctgaaaagaaagaagacgtgcaaatgcttaaaaatattatgaatgatactcaaaaagcatttgttgatcttgtaagtaagagaagaggaaataagttatcagatgataataccatttttacaggtgctttttggtcaggtgaagaggcaaagaaactaggtttaattgatgagattggtgagataagaacagttctaagagagagatttgggccaaaagtaaaattgaaatttattacaaagaaaaaaggctttttatctggtattttgcaaaagtgcatttcatcctctcataagcaaa

SEQ ID NO: 263695 - DNA, 808 bp, Unknown
  Bacterial polypeptide expressing nucleotide sequence isolated from the Sargasso Sea
aatgttatctttttttaaaaaaaaaaaaattatacctcacattaaattaagtggagtcatagggaatgttggaaaatttaaacaaggaatagattttgctgggcaagaagaaataataaaaaaagctttctcaattaaaaagtcacctgcagtagctatttctattaattcacctggaggatcacctgttcaatcacatctaatccatgattttattagattacaggcaaaaaaaaataagaaaaaagtaataatttttgctgaagacgtagctgcatcaggtggatatttaattgcttgtgcaggtgatgaaatttacgcaaatcaaagctctataataggttcaattggtgtgatctactcatctttcggttttaaagatcttataaataaaataggagttcaaagaagagtttatactgccggtaagaataaaagtacacttgatcctttcatggatgaaaaaaaagaagatattgaaagattaaaagctattcagctagatctacataaagattttattgaagttgtagataatagccgatcaactaaattaaaaaaagatagtggaattgaattattctcaggagaattttggtctggtagaaaagcaaaagaactaggcttaatagatggaataggaaatgcagatcaaattttaagagaaaagtttggtgataaaataatcattaaaaaatttgagaaatcaaaaggctggcttgctagaaaattatcttcagaaaatcatacagaacaattaattaatgttttagaagaaagatctatctggcaaaggtatggcttctaa

SEQ ID NO: 263696 - DNA, 467 bp, Unknown
  Bacterial polypeptide expressing nucleotide sequence isolated from the Sargasso Sea
aatgttttcaatttttaaaatttttaaaaagaaaaaaataatacctcatattaggttatcgggaatcattggctccgttggaagatttagacaaggcataaactttgcaagccaacaagaaattattgataaagctttttctgttaaaaaagctctagcgattgcaatatctataaattcgcctggaggatcaccggtgcaatcacacctattgtatagttacataaaaaaactagctaagaaaaataataaaaaagttttagtttttaccgaagatgtagctgcctctgggggatatcttatagcttgcgcgggtgatgaaatttacgcgaattcaagctctatagtaggttcaataggtgtaatttctgcttcctttggattccaggatgctattaaaaaaattggagtagaaagaagagtctataccgcgggtaaaaacaaaagcactcttgatccttttaaag

SEQ ID NO: 263697 - DNA, 601 bp, Unknown
  Bacterial polypeptide expressing nucleotide sequence isolated from the Sargasso Sea
atggccgaccaaccgaattccccggattcctcctcccgtcccgacagccgtgaaccgaactgggagcgtgcggcgctcgagcggatcgcgctcgcggccgtcaaggagcagcgcgcggcgcgacgctggaagatcttcttccgcttcgcgttcctcgccgtgttcgtgctgttcgcgttcgcgctgatcgatttttcgagcgattcgaagttttcgtcgagcgggcggcatacggcgctcgtgacgatcgacggcgagatcgcggccggcgtgaacgcaaatgccgacgacatcaacaccgcgctcgacgccgcgttcgaagacgacggcacggccggtgtcgtgctgcggatcaacagtccgggcggcagcccggtgcaggccgggatggtctacgacgagatccgccggctgcgcgcgaagcatccggacaagccgctgtatgtcgtcgtgaccgacatgtgcgcatcgggcggctattacatcgcgtctgcggccgacaagatcttcgtcgacaaggcgagcatcgtcggctcgatcggcgtgctgatggacgggctccagatcggcaagcccggcacccatgagcgcgcgctcgcgc

SEQ ID NO: 263698 - DNA, 940 bp, Unknown
  Bacterial polypeptide expressing nucleotide sequence isolated from the Sargasso Sea
agagagatatgtaaaagacttatatgaaaatattaaacttaaccaacatgtttttatagctggcgaatggaaaactgctccagagccatttactagaaatgatatgtctgaagaagataaaaatgcatggaatgattttgctgaacctctttggaataaaatgacttcttatattgaaaatgcaagagagcttccatatgggactttgcaaaattatggtgattctttttgggagttagctgcagatgaacctgaagtttctcaaattgctcttaagattggtcttgttgataaggtatttactgaagaggaatttcgtcattggttgtttgataaatttcctaatgaagataatgatataaataaactacccgattcaatatctatttatgattacttatctacaattgaatctgaagaaactaagtctaaaaataaaattgctgttatacatatcgaaggagctataactacaggtgattcaacttatgggattgctggttcagatacaattgttaagaatataagaaaagctataaaagatgatgccgtaaaagcgctcgttctgcgtattaatagtcctggcggaggagtttatcctagtgaattaatcacaaatgcattaaatgaatttaaagagactgataggcctatagtaagttcaatgggagatatagctgcatctgggggtgtctgggttacaactttatctgatgaaatatgggcaaaaaatgaaactctcaccggatccattggggtgtacgccacattacctacatttgaaaatttatacgattgggttggtgtgcaagtggatggagtaagctctactaaggctgaggaatgggatccaagattatcaatgccagataatgtcactaatggaattcaagctacagttgataatatttatgataaattttgtaataaagttttctaa

SEQ ID NO: 263699 - DNA, 724 bp, Unknown
  Bacterial polypeptide expressing nucleotide sequence isolated from the Sargasso Sea
ttgtcaggtattataggaaatgtcggtaaatttagacagggaatagaatattcaggacaagaagaaataattaagaaagcgttttctgtaaaaaaagcactagcagtggccataacaattaactcaccaggaggttcccctgttcaatctcacctaatttatagatttattagagaacaggctaaaaaaaataaaaaaaaagttattttttttgcagaagatgttgcggcttcaggtggatatttaatagcttgtgcaggagatgaaatatatgcaaattcaagttcaatcattggatcaataggagtaatttcagcatcgtttggatttaaaaatttaattgaaaagataggtgtacaaagaagaatttatacagctggtaaaaataaaagtactttagatccttttttagatgaaaatgaagaagatattaatagattaaaaaatattcagctagagcttcatcaagatttcatagacgttgtagaggaaagtagaggttctaaacttaaaaaggatagtggtattgaattattttcaggagaattttggacaggaaaaaaatctaaggatctagggttgattgatggtttaggaaatgccgaacaaatattaagagaaaaatttggagaggatatagaaattaaaaaatttggaaaatcaaaaggatggttagctaaaaaaaattcatcatcagaagatcatgctgacaaattaataagta

SEQ ID NO: 263700 - DNA, 286 bp, Unknown
  Bacterial polypeptide expressing nucleotide sequence isolated from the Sargasso Sea
tttgctattaagccttgtgtttaagagatttttttcaaaagatattaatataccaacattaagattatcgggtgttattggacaggctggtatagcaagatcaggactaacaattactggaatagaaaagttaattgataagcttttcgctgataaaaaatcacctgctgttgctttaattattaattctccaggaggttctccaacacaatcttcattaattgcaaaaaaaattattaatttagcaaaagaaaaaaacaaaaaagtatatgcatttgtggaagat

SEQ ID NO: 263701 - DNA, 289 bp, Unknown
  Bacterial polypeptide expressing nucleotide sequence isolated from the Sargasso Sea
tatgttctcctttttaaaaaagaaaaaaattgtttcacatattaaattaaatggcgtcattgggaatgctggcaaatttaagcaaggtattgattttgcaggacaggaagaaattattaaaaaagctttttctttaaaaaaagctgctgcagtagcaatatcaatcaattctccaggtggttcacctgtgcagtcacatttaatttatggttttattcgtcagcaagctaaaaaaagtaataaaaaagttatttttttgcagaagatgttgctgcatctgggggatatc

SEQ ID NO: 263702 - DNA, 184 bp, Unknown
  Bacterial polypeptide expressing nucleotide sequence isolated from the Sargasso Sea
atgcgcggtaggcaaagccccagaggttgcccagcccaacggcactacccgcagccgccaagacaaagcccagtcccgatctccactgttccttcgccatgcgctctcaacaagctgtccgccagcttgccagcgattaacagtcctggtgggagacttgtcgcaactgccggatcagcgtgaa

SEQ ID NO: 263703 - DNA, 775 bp, Unknown
  Bacterial polypeptide expressing nucleotide sequence isolated from the Sargasso Sea
aaaaaaaaaaaaattatccctcatataattcttaatggagttataggtaatgttggtaaatttagacaaggaatagatctttctagccaagaagaaattattaaaaaagctttttcaataaaaaaatccccagcagttgcaatttcaataaattctccaggaggttctcctgtccaatcccacttaatacacgattttattaaatcacaagcaagaaaaaataaaaaaaaggtaataatttttgcagaggatgttgctgcatctggaggttatttaatagcatgtgccggtgatgaaatttatgcaaatcaaagttcaataattggttcaataggagtaatttattcatcttttggttttaaagatttaattcaaaaaattggagtccagaggagagtatacactgctggcaaaaataaaagtacactagatccttttcttgaggaaaaagaggaagatataaatagattaaaaaatatccaactagatttacataaagactttattgaagtagttgaaaaaagtagatcatctaaattaaaaaaagatactggaatagaattgtttacaggagagttctggtcagggagaaaagctaaagagctaggattaatagatgatataggtaacccagaggaaattttgaaagaaaaatttggagataagatagttataaaaagatttgaaaaaactaaggggtggttagccaaaaaattatctaatgagatttatactaatcaaataattaatgctttagaagaaagatctatctgca

SEQ ID NO: 263704 - DNA, 529 bp, Unknown
  Bacterial polypeptide expressing nucleotide sequence isolated from the Sargasso Sea
atgagtgtgtattcttcggaaaaggaaaacgatagtaaaagtgatcacaggccaatggctttcatagatgagaagttattcaagtcaagatgtctaactatatttggggagattaacgacaagctcgcccgcactatcacagagagattgttggcgttggcctcggacagtgatgatccaatttccttatatattagctcacctgggggccatgtggagtctggggatgttatctatgacatcataaagtttataaagcctcctgtaagagtcatcggcactggttgggtcgcaagtgccgccacaacgatttatctcgctgctgaaaaagataaacggtttgctttaccgaatactcgttttcttatccatcaacccttgggaggatctcgaggtgatgccacagatatagcgattcaagctgagcaaatggttaggactaaagcgcgcataaaccaacttatcgcaaaagaaacaggccaacctttagacagggttgcaaaagacactgatcgagactatggatgac

SEQ ID NO: 263705 - DNA, 713 bp, Unknown
  Bacterial polypeptide expressing nucleotide sequence isolated from the Sargasso Sea
ggtattgattttgcaggtcaagaagaactaattaaaaaggctttttctctgaaaaaagcggcatgtgttgctatatcaatcaattctccaggaggatcaccagttcaatctcatctaatctacagctttattagacaacaagcaaaaaaacataaaaaaaaagttattgtattcgctgaggacgtagcagcttctggaggctatttgatttcttgtgctggggacgaaatttatgcaaattcaagttcaataattggatccattggagtgatatattcctcttttggatttacagagttgataaaaaaaattggggttgaaagaagagttcatactgctggcaaaaacaaaagcacacttgatccatttttagaagaaaaaaacgaggatattgaaagattaaaaaatattcaattggatcttcataaagactttatagatgttgttgaaaaaagtagaggatcaaaattaaacaaatctgatgtagaacttttttcaggtgagttttggtcaggcagtaaagcaaaaaatttaggattgattgatggaataggtgatgcacatgaaatattaaaagataaatttggtgaggatgtaattattaaaaaatttgaaaaatcaaaaggatggttaagtcaaaaactttcttcatctagcaatcaagtagatcaaatagcaagtattttagatgaaagatcaatttggcaaagata

SEQ ID NO: 263706 - DNA, 782 bp, Unknown
  Bacterial polypeptide expressing nucleotide sequence isolated from the Sargasso Sea
tatgttttcattttttaaaaaaaaaaaggttgtacctcacgtaagactaactgggataattggctcaagtggcagatttaaacaaggcatggagttggctaatcaaagagaaattctcaagaaggctttttcagtcaaaaaaatttcccatgttgctatatcgattaattcaccaggaggatcaccagttcaatcacacttaatttatagttatataagacaacttgctgaaaaaaataaaattaaagtaattgtttttgctgaagacgtagctgcttcgggagggtattttattgcttgtgcaggagatgaaatatatgcaaattctagctcaataattggctccataggagttatatcagcttcttttggcttcaaagaattaattcaaaaaattggagtagaaagaagagtttatactgctgggaaaaacaaaagtactctggacccttttaaagaggagaaagaggaagatataaaaagattaaagaatattcaacttgagcttcatgaagactttataaaagttgtagaaaaaagcagaggatcaaagcttaaagatcccgaaaaaaataatatatttacaggagaattttggacaggaaaagcttcacttaaacttggattaattgatggcctaggcaatgcagatcaaattttaaaagaaaaatttggagataaggtaataataaaaacttttgaaaaaccaaaaggtttccttgcaagaaaactttcttcatcaactcaagatcctattgaaaaattagcaaatatttttgagg

SEQ ID NO: 263707 - DNA, 808 bp, Unknown
  Bacterial polypeptide expressing nucleotide sequence isolated from the Sargasso Sea
tatgatttcatttttcaaaaaaaaaaaaattattccactaattagattaagtggagtaataggcagtgttggcaagtttaagcaaggaattgattttacaggacaagaagaaattataaaaaaggcttttgctcaaaaaaaatcacctgcagttgctatttcaattaattcaccaggaggatcaccagttcaatcacacttaattcacgattttattagatatcaagcaaaaaaaacaaaaaaaaaagttattgtttttgctgaggatgttgctgcatctggagggtatttaattgcatgtgcaggtgatgaaatttatgcaaatcaaagctctatagtaggatcaattggagttatctattcatcatttggatttaaggaattaataaataaaatcggtgttcagagaagagtttatactgcaggaaaaaataaaagtaccttagatccttttttagatgagaaaaaagaggatattgaaagattaaaaaatattcaattggatttacataaagattttatagatgtagttgaaaaaagcagatcttcaaagcttaaaaagaatagtgatatagaattatttacaggagaattttggtcaggaagaaaatctttagagcttggattaattgatgggattggaagtgcaaatgaaatattaagggaacaatatggtgaagatgtagttatcaaaaaatttgaaaagtctaaaagttggctagctagaaaattatcttctgagacacaactagaaaaaatagtaaatttggttgaggaaaaaaatatctggcaaaaatatggtttctaa

SEQ ID NO: 263708 - DNA, 658 bp, Unknown
  Bacterial polypeptide expressing nucleotide sequence isolated from the Sargasso Sea
gttgctatatcaataaattctccaggaggatcacctgttcaatctcatcttatttatgattttataagatcgcaggcaaaaaaaaccaaaaaaaaagttattatttttgctgaagatgttgctgcatcaggtggttatttaatagcatgtgcgggtgatgaaatctatgcaaacaaaagctctatagtaggatcaattggtgttatttattcatcatttggttttaaagatctgattcaaaaaattggagtccagagaagagtttatactgcaggaaaaaataaaagtactttagatccattcatggaagaaaagcaagatgatatcgaaagattaaaaagtattcaattagatcttcataaagattttattgatgtcgtagaagaaagtagatcaacaaaacttaaaaaaaatattggtattgaattattctcaggagaattttggtcaggaagaaaagctaaggatcttggtttaattgatggaataggaaatgcagatcaaatacttaaagaaaaatttggcgaagatgtaaatattaaaaaatttgaaaaagccaaaggatggttagcgaaaaaattatcttccgaaacccaaatagataaaacaattagtattttagaagaaagatccatctggcaaagatatggtttctaag

SEQ ID NO: 263709 - DNA, 820 bp, Unknown
  Bacterial polypeptide expressing nucleotide sequence isolated from the Sargasso Sea
attgttcttctggcgcaaaaagaaatctgtggtcccggtggtgcgcctgtccggggtgatctcgtcggccccgtctctgcgccgggggttgtcgctggagtcaatcgaaccacagttgaagaaggctttttcagtaagctcggccaaggctgtggcgttgatcatcaactcgcctggcggctcgccggtgcaatcggcattgatcggtcagcggatacttgatcttgccggcaaggccgatgtgccggttctggctttttgcgaggatgttgcggcaagtggtggctattggatcgctgtcagcgccgacaagatttatgccaatggtgcgtcggtgatcgggtcgattggtgttgtctcggctggtttcggttttgaccgggcgattgaaaagatcggtgttgaccggcgcatttacacggctgggcgcaacaaaatgatcctcgacccttttcagccgcaacgggacgaggaggtggagcggttgaaggcgttgcaggtggatattcatcaacaatttatcgaccatgtgttggaccggcgcggggcgcgcctacaggaaccccatgatgatctgttcagtggtgcgttctggaccggccagcgggctgttaatctgggtctcatagatggtctcggtgagtgccgtcaggtgcttcgcgacaggtttggtgaggacatcaatttcatgtttattgaaccgaagcgcaaattccttgctggccttggcgggttgcccggatcgctggcaggtggcattgttgatgaggcggctgaaattgccactgagaaagccatgctgtcgcgctttggcctctag

SEQ ID NO: 263710 - DNA, 574 bp, Unknown
  Bacterial polypeptide expressing nucleotide sequence isolated from the Sargasso Sea
atgttttcatttttcaaaaaaaaaaagataattccacatgttaagttaagtggtgttattggtaatgttggaaaatttaaacaaggtatagattttgctggacaggaagaaatattaaaaaaagctttttcaataaaaaaagctttagctgtagctatttcaattaattcgccaggaggttctccagtacaatcacacctaattcatgattttattagataccaagccaaaaaaaataagaaaaaggttattatttttgctgaagatgttgctgcttccggaggttatttaattgcctgtgccggagatgaaatatatgccaaccaaagttcgattgtaggttctatcggagtaatttattcatcttttggttttaaaaatctgatagaaaaaattggagttcaaagaagagtttacactgctggaaaaaacaaaagtacactggatccatttatggatgaaaaacaagaggatattgaaaggttaaaaaatattcaattagatctacataaagattttattgatgttgttgaaaagagcagaggcagtaaattaaataaaaattctggaattg

SEQ ID NO: 263711 - DNA, 556 bp, Unknown
  Bacterial polypeptide expressing nucleotide sequence isolated from the Sargasso Sea
atgacaattagacaacttccggttgctccggcgggacgcccgtgcgcgggtgtgaccagtgaaccccaaccctcagcgcttgagcgctggaatggtgggatcagggctgcatccgataatgacaactccatttctatttttgatgttgttggccgtgattactgggatgagggtgtcacagcaaaacgcatctccggcgctctacgttcgatgaacggtgctgatgtgacggtaaatatcaactcgcccggcggcgatatgtttgaaggcctggcaatttacaacctgcttcgcgagtaccacgggaaagtcactgtaaaagtgctgggcatcgctgccagcgccgcttcgattattgctatggccggggatgatattcaaatcgggcgcggtgcttttctgatgatccacaactgctgggtagcagcgatgggcaaccgccatgattttgctgagttatcgacttatcttgagccatttgataccgcgatggctgatatctatgcggcacgctccggccttgatatggacaccgtgcagaagctgatggatgcag

SEQ ID NO: 263712 - DNA, 118 bp, Unknown
  Bacterial polypeptide expressing nucleotide sequence isolated from the Sargasso Sea
catactggaaaatctgttgatgaaattaaatcagcattagagagagataattttatgactcctgataatgcaaaaagttttggcctgatagataaagtggtagaaaagagagaataaa

SEQ ID NO: 263713 - DNA, 250 bp, Unknown
  Bacterial polypeptide expressing nucleotide sequence isolated from the Sargasso Sea
tatgaaattgaaaattccatttttaccctctaagccaagtgttgctgttgttaagatgtctggcgtaatttctgctggcgctcgtgccggcttgtgcgaccagactttaaatccaattttggaaaaggctttcaagaaaggacagcatcaagcagtggcactattaattaattcgccaggcggatccccagttcaatcctctttaataagttctcgaataaaacgcttagcggaagaaaacgagatgcca

SEQ ID NO: 263714 - DNA, 544 bp, Unknown
  Bacterial polypeptide expressing nucleotide sequence isolated from the Sargasso Sea
tatgttttcgtttttcaaaaaaaaaaaaatcattccacatattaaacttagtggagtaataggaaatgttggtaaatttaagcaaggtatagattttgcggggcaagaagaaataataaaaaaagcattttcaataaaaaaagcaccagtaattgcaataactataaattctccaggcggatcgccagttcaatcacatcttattcacgatttgattagatcacaggcaaaaaggaataaaaaaaaagtaattgtttttgcagaagatgtggcagcttctggtggatatttaatagcatgtgccggtgacgaaatttatgcaaatcaaagctctataataggttcaataggagttatatattcttcttttggttttaaagatttaatccaaaaaattggagttcaaagaagagtatatactgcaggaaaaaacaaaagtaccttagatccttttttggaagaaaaacaagaagatattgaaagattaaaaaatattcaactagatttacataaggattttatagaagttgtgaaaaaagtagat

SEQ ID NO: 263715 - DNA, 391 bp, Unknown
  Bacterial polypeptide expressing nucleotide sequence isolated from the Sargasso Sea
atgttttcattttttaaaaaaaaaattataattccacacgttagattatcaggtgttataggatctgcgggaagatttaggcagggtatagatttttcaggacaacaagaaatcataaaaaaagcattttcatttaaaaagtccaagcacattgccatatcaattaattctccaggtggctctccagttcagtcacatttgatacatgattatattaggcaattagccgtgaaaaataagaaaaaagtaatagtttttgcagaagatgttgctgcatcaggtggatatttaatagcgtgtgccggcgatgagatttatgcaaattctagttctatagttggttcaataggagtaatatcagcttcttttggttttcaaggaggcaattaaa

SEQ ID NO: 263716 - DNA, 424 bp, Unknown
  Bacterial polypeptide expressing nucleotide sequence isolated from the Sargasso Sea
tatgttttcattttttaaaaaaaaaaaaattgttagtcatttaagacttaccggcgtcataggaaatgttggaaagtttaaacaaggaatagaatattcctctcaagaagaaatgataaaaaaagctttttcagtaaaaaaagcagaggctgttgcaatttcaattaattcaccaggtggttcacccgttcaatcacatctaatatataaacttattagagaacagtctaagaaaaacaaaaaaaaagtaatagtttttgctgaagatgttgctgcgtctggaggctatctaattgcatgcgcaggtgatgagatttatgctaatgcaagttctataatcggatcaataggagtaatttattcttcttttggttttaaagatttaattcaaaaaataggtgttcaaagaagggtttatacagct

SEQ ID NO: 263717 - DNA, 594 bp, Unknown
  Bacterial polypeptide expressing nucleotide sequence isolated from the Sargasso Sea
aatgagcttaatatcctctaaaacaagaataaatatagttggcttgcgaggtgttattggagatctcggtagatttcaaaagggccttacacttgagaattgtgctgctattcttgagaaagcttttagctttaaaaggccatctgtagtagtcattaagatcaactcaccaggtgggtcaccggtacaatctgagcttatacacaaccgcataagaaatttatcaaagaaaaacaatgtaaaagtgattacgatcgcggaggatgttgctgcctcaggaggttatatgctgatgtgcgcaggagataccttaatcgccaataaaagttctatagtcggatcaataggtgtgatcagtgcctcttttggattcaaaaaattaatagataaactaggcattaaaaggagagtttttacaaaaggagatagaaaatcgtttctcgatccatttgaagaagtttctaaaaatgacatagataagctgatcaaggttcaggatagtatatttgaaaatttcaaagatttagtattaaaaaatagaaaaaagaaaatagaccaaaaaaaagtttttaaatggggagttttggacaggcg

SEQ ID NO: 263718 - DNA, 196 bp, Unknown
  Bacterial polypeptide expressing nucleotide sequence isolated from the Sargasso Sea
tatgtttaaaaagatattttccagaaatgttcaaattccaacactgcgattatcaggtgttattgcatcacaatctggaattatgagttctagtttatcaattaataatcttgataaattaattgaaaaacttttttcagacaaaaaatctccagctgtagctttaataattaattctccaggaggttcaccaact

SEQ ID NO: 263719 - DNA, 344 bp, Unknown
  Bacterial polypeptide expressing nucleotide sequence isolated from the Sargasso Sea
ttcatgtccaataacaactattgttactggatttgcagccagcatgggttcaattttgagtttggccgcagaaaaggggcgtagatatgcaatgcctcaggcaaaaatcatgattcaccagcctcttttaatgggttatcagggacgtgcaactgaatgtgaaattcaggcacgtgaaatacttaaaacaagagatcacctggttaagctttattctgagcaaacaggaaaaagccacgaggaaataaaaaaagctcttgacagagataactggtttactgctgaagaagcacttgaatatggtttaattgacaaggttgtacacaccaggtcagaattataaa

SEQ ID NO: 263720 - DNA, 441 bp, Unknown
  Bacterial polypeptide expressing nucleotide sequence isolated from the Sargasso Sea
tatgttttcattttttaaaaaaaaaacaacaattccccacgtaagactatcaggtgttataggatctgttggtaggtttagacagggtatagacttttcaggacaacaagagattataaaaaaagcattttcttttaaaaaggcaaaatgtatagctatatcaattaattctccaggagggtccccagttcagtcacatttaattcacgattacataaaacaattggccaagaaaaataagaaaaaagttattgtttttgcagaagatgttgcggcatcaggcggttatctaattgcttgtgcaggagatgaaatctatgcaaactcaagctcaatagttggttcaatcggagtaatctcagcatcttttggttttcaagatgcaattaaaaaaattggtattcaaaggagagtttatactgccggaaaaaacaagagcac

SEQ ID NO: 263721 - DNA, 709 bp, Unknown
  Bacterial polypeptide expressing nucleotide sequence isolated from the Sargasso Sea
ggcctgggcggcagctcgctgaactacggcttcccggcacacagtgacgagcagtatttcgacgcggtgattcccaagctcaggcaagccagggtttcggcgctgttgctgccgggtatcggcaccgtcgaccacctgaagatggcgcacggctgtggcgtttccaccatccgcgtcgccacccactgtaccgaggctgatgtgtccgagcagcatattggcatggccgccagcatgggcctggataccgtcggtttcctgatgatggcgcacatgctcagcgcggaaaaactgctcgagcaggccaggctgatgcagggttacggtgccaactgcatctactgcaccgactcggccggctacatgctgccggatgaagtgacggagaagatctcggtgctgcgtgcgggcctggatgccgacgtggagatcggttttcacggccaccacaacatgggcatggccattgccaactcactggccgccatcgaagccggggcagggcgcatcgatgggtcggtggccgggctcggtgctggcgccggcaacacaccgctggaagttttcgttgcggtactcgagcgcatgggcgtcaacagcggcatcgacctgtaccggatcatggacgtggccgaggacctggtggtgccgatgatggaccagccgatccgtgtcgaccgcgatgcgctgacactgggttatgcgggtg

SEQ ID NO: 263722 - DNA, 757 bp, Unknown
  Bacterial polypeptide expressing nucleotide sequence isolated from the Sargasso Sea
atgttttctatttttaaaaaaaaaacagtaataccacacgttcgattgactggcgtcatcggatcagcaggtaggtttagacagggtatagatttttcaggacaacaagaaattataaaaaaagcattttcatttaaaaagtcaaaaagtgttgctatttctattaattccccaggtggttcaccggtccaatctcatttaatccacgattatataaggcagttggcgaagaaaaataaaaaacaggtaatagtctttgcagaagacgtagctgcatccggaggttatttaattgcatgtgcaggcgatgaaatatatgcaaattccagctcaatagttggttcaataggtgtaatttctgcatcattcggttttcaagatgccatcaaaaaaattggtattcaaagaagagtttatacggcaggaaaaaataaaagtactcttgatcctttcaaggaagaaaaagaagaggatattgaaagaataaaaaaacttcaattagagctacatgcagattttataaatttagtaaaaagaagcagaggttccaaattaaaagatcccgaaaaaaacaatacctttaccggtgaattttggtctggttcaacatctctaaaattaggtttaattgacggaataggaaatgccgaacaggttttaagagaaaaatttggagaaaatgcaattataaaaaaattagaaaaaccgaaaggttttatcgcaagaaaattatcttcatctattgataatcagatga

SEQ ID NO: 263723 - DNA, 798 bp, Unknown
  Bacterial polypeptide expressing nucleotide sequence isolated from the Sargasso Sea
tatgaataatcagccatcttctcagccccctcagaatgagcgggaatggaagctgatagagaaattactgggccaggcccaagatgagcagcgtaaatcccgtcgttggggtattttcttcaaggtcctgacctttgtgtatctgtttaccttgttggtgatagtgattccgggcaaaaccggttctgctgtgaccatggcggaagcccatgtggggatcgtagatgtgaacggcgtgattgcgccggatcaggaggcgagtgcggacttgatcgtcaccggcttaacgagagcctttgaagcggaaaacaccaccgccgttctattgaaaatcaacagcccaggtggctcaccagtacaatctaatcaggtgtacaacgccatcaagcggctgcgggctgaatacccggaaaagaaactgtatgcggcgattaccgatgtgggtgcctctggggcgtactttattgcctccgctgcagatgaaatctatgcggacccggccagcattgtaggctccattggcgtgatcatggctggctttgggctggagcaggcggccgacaaactgggcgtggagcgccgtgtgtttaccgctggcgaaaacaaggatttgatggatccgttttcaccggtgaagccagcccatcgcaaacacgtacaaaccatgctggatgatattcatcagcagtttattgcggcggtgaagaaggggcgcggcaataggttgaaagttgatgggcatccaaaattgttttccggcttgttctggactggcgagcgggctatggatttgggtct

SEQ ID NO: 263724 - DNA, 367 bp, Unknown
  Bacterial polypeptide expressing nucleotide sequence isolated from the Sargasso Sea
tatgttttcattttttaaaaaaaaaatcattgttccacatatcaggctagctggagtaattggatcagctggacgatttaggcaaggtatagatttttctggccaacaagagattattaaaaaagcattttcatttaaaaaagctaagagtatagcaatatcaattaactcacccggagggtcaccggttcaatcacatttaattcatgattacataagacaacttgcaaaaaaaaataataaaaaagtaattgtttttgcagaagatgttgcagcctcaggcggttatttaatcgcttgtgcaggtgatgagatttatgcaaactctagttcaatagttggatcaatcggagttatttctgcatct

SEQ ID NO: 263725 - DNA, 769 bp, Unknown
  Bacterial polypeptide expressing nucleotide sequence isolated from the Sargasso Sea
tatgccaactaatgtctattttgacacaggcacgaccaacgagcaaagactatatgaagatttaatagtagaacagctcaaaatctacggccaagatgtctattacttaccaagaaagatagcgaacaaagatacaatctttggcgaagatcctgcaagctcatttgatgattcctacatcatagaaatgtatgtagataataccgatggatatatgggcgaacaagaaataattaaaaagtttggtttagaattaagagatgatattgtattcacagtttcaaaagcaagatgggaaactttagtaggtaacaattcagatttaacaactgatagaccacaagaaggtgacctagtttacttccctactacaaacgcattttttgaaatacagtttgttgaacatgaacaaccgttctatcaacaaagtgctttacctgtttataaattatcatgtactaaatttgaatatagttcagaaagacttgatactggtatctcaacgattgatagtgttgaagatagtttatcaactgatacaatgaattttcaatttactttagaaaatgaagtaggttctttcttattagaaagtgatacaggtgaaataagttatcttatcaatgaggactttacaatggcaacacaacaacctactgaccaaggggcagcttttgaaacagaagcaggtacaacaacatcatctactggtgatgatatactagactttagcgaaagaaatccatttggggaggtcgatgaatactaa

SEQ ID NO: 263726 - DNA, 698 bp, Unknown
  Bacterial polypeptide expressing nucleotide sequence isolated from the Sargasso Sea
aatgaaaaaaatttttaattttattttgaaactttttggcaaaggtaaaccaattgtgcctgttttaagattcgagggtattattggcactggtagtggtataggcaagggtaaaattaatgctgaaaatctagaaccaaatatcaaaaaagcattctctgagagcaatccaagtgctgtagctataataataaattccccgggtggttcgcctgttcagtcctctctaatttatcaaagagtaaggtatctcgctgataaaaaagatgtaccagttatggtgtttattgaagatgttgcagcatctggaggttactggctttcatgcataggagatgaaatctttgcagacaaatcttcaattgttggttcaattggagtaatttctgcttcatttggttttacggaagcaattaataaattaggggttgaaagacgggtatatacgactggcaaatcaaaagggtcactagatccatttaaaccagaaaagaaagaagacgtgcaaatgcttaaaaatattatgaatgatactcaaaaagcatttgttgatcttgtaagtaagagaagaggaaataagttatcagatgataacaccatttttacaggtgctttttggtcaggtgaagaggcaaaaaaactaggtttaattgatgaaattggtgagataagatcagttctgagagagagattggggc

SEQ ID NO: 263727 - DNA, 406 bp, Unknown
  Bacterial polypeptide expressing nucleotide sequence isolated from the Sargasso Sea
tatgttttcattttttaaaaaaaaaataataattcctcacgtgagactttctggcgttataggatctgttggcagatttagacaaggaatagatttttcaggacaacaggagattataaaaaaagcattttcttttaagaaagcaaagagcgtggcaatatcaattaattctccggggggctccccagttcagtcgcatttgatccatgactatataaggcaactggctaaaaaaaataagaaaaaagttataatttttgctgaggatgttgcagcatcaggtggttatctgatcgcttgtgctggagatgaaatttacgcaaactccagttcaatagttggctcaataggtgtaatttctgcatcctttggttttcaagatgcaattaaaaaaattggaattgaa

SEQ ID NO: 263728 - DNA, 754 bp, Unknown
  Bacterial polypeptide expressing nucleotide sequence isolated from the Sargasso Sea
atgaaaaatttaaaatctaaagagccattactgtctgtgaagggaatagaaaaatcatatgggcatgtgcgagctcttcaaaatgttgatattgatattcatgcgggggaagtgctaggacttttaggagacaatggtgctggaaaatctactttaattaaaattctttcaggcattgttcggccagataaaggtaaaattttacgtgatggaaaagaaattaatattaattcaagaaaagatagtgaagagaaagctggtgtgcaaacgatttatcaagacattgctctagttaaatcaatgtcgattttacgtaatatttttgctggccaagaaagaaaaactaaatttggttttttaaaattaaaagaaatgagagatacaacaatgcaaatattaaatgagcatgttaaaatcgcgggtattacttctcctgatttattaattgaagaattatcaggagggcaggcccaagcagttgcgattgcaagagctgttcattttcaaagagatattctcctattagatgaaccaacttctgcattgtctgttcgtgagactaataaagtgcattctataatgagagaaattgctgatgctggtaatagctgtgtttttgtgactcataatttatatcatgcttatcaagtctgtgatcgttttgttgttttttctcatggagcggtagtaaaatccgcaattaaagagaatacttcattaaatgaattaacagaattaatattagctaattaat

SEQ ID NO: 263729 - DNA, 926 bp, Unknown
  Bacterial polypeptide expressing nucleotide sequence isolated from the Sargasso Sea
agtgcagcagtgcggcgtcgcaccgaccgacgatggctttacggtcatagccccgggagaggaagacgcggatcaagacggtcccgcgttagcctctgaccccgatctaggcttcgaagggttgcagcagttcgggccgggcctggtccagcacgccaagctcaaactaagaaccggtctgaaggccaccaatttttgtttgatcgacagcccgggcatgatcgacgcgccgggcggctcgacgctcgacgaagggcatgaacgaggctacaacttcgaggcgtcggtgcgctggttcgccgatagagccgacgttattttattattttttgacccggacaagcccggtacgacgggcgaaactttatcagtcttgaccaatgcgttatcaggatgcgaccacaagctgcacatcatcctcaacaaagcggataggttcgagaagatccacgacttcgcgcgggcctacggggcgttgtgctggaatttatccaaagttatcccgaggaaggacttacctcagatttatacgacgtgtattcctcccgccgaaggtgaagtaagggagggccacggggatttagcaaacggtttggaggatctgagacggacgagagatgatgtgatggcggaagtgttccgcgcgccgacgcgacgcgtggacaacgccgttactagactacgagatgccgcttccgtgctcttgatgcatttagatgtgtgttcggccgctcgttcggcaagacggaaggagttatttgcgttgtatgccccttcagtactcgcggcggccgcatgtataagtggtgcaggcgggttgtttgttgccggtgctgtcagtccggcggtggcgtgtggggctggtggtttggcggctactgcgggattccactacgtgaacgcgaagaactgccggcggaacttgg

SEQ ID NO: 263730 - DNA, 292 bp, Unknown
  Bacterial polypeptide expressing nucleotide sequence isolated from the Sargasso Sea
atgtttaaaaagatattcactaaaaatatccagattccaacacttagattatcaggtataatagcttcgcaagcaggaattgctagttctagcttatcaataaataatttagaaaaactaattgaaaaactattttcagataagaaatctccggcagttgtaataataattaattcacccggaggttctccaactcaatcatcacttatagcaaagaaaattattgatttagcaaaagaaaaaaagaagcaagttattgcgtttgtcgaggatgttgcagcctccggaggtt

SEQ ID NO: 263731 - DNA, 396 bp, Unknown
  Bacterial polypeptide expressing nucleotide sequence isolated from the Sargasso Sea
cagaggccttcgccatctgcgacacgctccgctacgtgaaaccgccggtccacaccatctgtatcggccaggcgatgggaaccgcagccgtaatcctttcagctggcaccaaaggccagcgggctgctctgcctcactcatccatcgtgttgcatcaaccccgcagcggtgcccagggccaggccaccgacattcagatccgggccaaggaagtgctgcacaacaaggcggccatgcttgagatcctttccaacaacacgggtcgcactgtggacgagctcagcaaggattccgaccggatgagctacctcaccccccaggaggccgtcgagtatggcctgatcgaccgcgtcctcagcagccggaaggagcttcctggcagcaacagcaactgac

SEQ ID NO: 263732 - DNA, 628 bp, Unknown
  Bacterial polypeptide expressing nucleotide sequence isolated from the Sargasso Sea
atggggattttatttaatgtttttttgagaactgtagggttttttcttgctattttattgtgtgttttaataattatagggatttcagcgtatgcaaattaccaagaagacatcgagtttgacttagtcagaggcaatatagagagtggcaatacaatcttcattttagagataaatggaccaataattcaaagtgaaagttcgataaatgatttggttggaatgaatatcatttcaccgaaagcagtgaaaaacaatcttgataaaattataaaactcaatccaaatatattaatagtttcaataaattcacctggtggcacagtgagcgcatccaatgaattatacaatcactttaaagaatttaagaaaaagtcaaactcaaaaatatattttcactcatctgaaatgttggcctcaggaggatattggtcatctcttgcaggagaaaaaatttatgcaaactacggtgcaattataggcagtattggagtaaaaggaccggattggtttttttttaataagccaaaattaatttcatctggcattttaggtcatacaatcgaagtaaaagatgaaattaaggtttattcaacaaatgctggtaaatcaaaagaatttatttaat

SEQ ID NO: 263733 - DNA, 669 bp, Unknown
  Bacterial polypeptide expressing nucleotide sequence isolated from the Sargasso Sea
tatgttttcaatttttaaaaagaaaaaaatagtaccgcacgtaagattgacaggagtgattggttctgcaggccgatttaataaaggtattgatcttgctggtcaaagagaaattctaaaaaaagcattttctttaaaaaaaataacccatgttgcagtctcaattaattctccaggtggatctccagttcaatctcatttaatttatagttacatcaggcaattagccgaaaaaagtaaggtaaaagtaataatatttgccgaagacgtagctgcatctggtggttatttaatttcgtgtgccggagatgaaatttacgctaactcaagttctattattggatcaataggtgttatctctgcctcattcggatttaaagatttgataaaaaaaattggaatagaacgaagggtttatacagctggaaaaaacaaaagtactttagatccatttgtagatgaaaaagaagaagatgttaaaaggttaaaaagtattcaattagaattacatgctgacttcattaaagtagttgaaacaagcaggggatctaagcttaaagatccggaaaaaaataatatttttactggagaattttggactggaaaaactgcattgaaaattggattaattgatggaattggaaatgctgatcaaattttaaaagagaa

SEQ ID NO: 263734 - DNA, 651 bp, Unknown
  Bacterial polypeptide expressing nucleotide sequence isolated from the Sargasso Sea
tgattattaattctccaggcgggtcgcctacacaatcttcattaattgctgaaaaaataattaatttagctaaagaaaaaaataaaaaagtatatgcttttgttgaggatgttgccgcttccggtggttactggttagcatgtgctgcggatgagatttatttagatttaaattcaattgtcggatcaattggagtaatttctccaggatttggatttgtagatctaataaaaaaaattggtgtagaaagaagagtatatacatcaggcaaaagcaaaagttttcttgacccttttaaagaagaaaaaaaagaagatattgatagacttaaatctattcaagaacaaatacacgaaaattttattgaatatgtaaaatcaagaagaggttcaaaattattgagtttcgcagaagatgaaatattttcaggattattttgggttggcaaaaaaggagtagatttaggattagctgatggaattggctctattaatcaaataattagagagaagtatggcaataaagcgaaaataaaacttattgatcaaaaaaaatcttttttacaaaaacgactttcttcttctataaataataatgatatttttaataggctagaggaaatgataatgtggtctagatatggtttataat

SEQ ID NO: 263735 - DNA, 325 bp, Unknown
  Bacterial polypeptide expressing nucleotide sequence isolated from the Sargasso Sea
catgtattcaatatttaaaatttttaaaaagaaaaggatagtacctcatattagattatcagggattatcggttctgttggaagatttaagcagggcataaattttgctggtcaacaagaaataattgataaagctttttctattaaaaaagctttggcaattgcaatatctataaattctccaggaggatcaccagttcaatcacacttaatatatagctacataagaaaattagctcaaaaaaataataaaaaagttttagtttttgctgaagatgtggctgcatcaggaggatatcttatagcttgtgcaggagatgagatt

SEQ ID NO: 263736 - DNA, 403 bp, Unknown
  Bacterial polypeptide expressing nucleotide sequence isolated from the Sargasso Sea
aattctccaggaggagaaatcttttccgggtttgcaatttttgacatgttgaaattcattgaatgtccgatcacaacggtggtgacaggattcgcggcaagcatgggttcggtattaagccttgctgcagatgaggaccgcaggtttgccatgccccaagcgaagatcatgatccatcagccgatgctgatgggatatcagggacgggcagcagattgtgaaatccaggccaaggaaattctcaaaacacgcgatcacctgatcaacctctattccgaacagactgggaaggattatgaagaaatcaagcaggcgattgatcgtgacaactggttcacttctgaggaagccatggaatttggactgctcgaccgaattgtgaaaaaccgctcagaactataaa

SEQ ID NO: 263737 - DNA, 559 bp, Unknown
  Bacterial polypeptide expressing nucleotide sequence isolated from the Sargasso Sea
tttgggtggtgcggctggagcaccagcagaaacagagacatccaactcagtgatactctacggggatatcgacgaggaaaacgccgcagatttagtgacatcactattaagaaaaagattacatagcaaaccagaagagccggctatggatatgcatttttatctatcaagctggggtggctctgccgcagatatgttttctatttatgatacaatgaatttactcaaacaaaatcgcgatatttatacttacggtttgggtaagatcatgtccgcagcggtaccgattctcgcagcaggtaccaagggcaagaggatgattggaaagaattgtagagttatgattcacggcgtcatcgccggccatcacggtcctttattcaacttgcagaacgaaatggaagaagttaagtggacacaagaaaaatatattgatgtgcttgtcagagataccgatatgacaaggcgatatattaaaaaattaattgataggaaagtaaatgtatatctcgatgctaaagaagctatcgaactgggtatcgcagatgagattatctaa

SEQ ID NO: 263738 - DNA, 584 bp, Unknown
  Bacterial polypeptide expressing nucleotide sequence isolated from the Sargasso Sea
aatgttatctttttttaaaaaaaaaaaaattatacctcatattaaactaagtggcgtgataggtaatgttggaaagtttaaacaaggcattgattttgcgggacaagaagaaataattaaaaaagctttctcaattaaaaaagcacctgcagtagccatttctattaattcaccaggaggatctcctgttcaatcacatctaatccatgattttattagatcacaagcaaaaaaaaataagaaaaaagtaataatttttgctgaagatgtagctgcatctggtggatatttaattgcttgtgctggggatgaaatttatgcaaatcaaagctctatagtaggatcaataggtgtaatttattcatcttttggttttaaagatcttataaataaaataggagttcaaaggagagtttatactgctggtaagaataaaagtacacttgatcctttcatggatgaaaaaaaagaagatattgaaagattaaaaactattcaactagatcttcacaaagattttattgaagttgtagagaatagcagatcaacaaaattaaaaaaagatattggaatagaattattct

SEQ ID NO: 263739 - DNA, 271 bp, Unknown
  Bacterial polypeptide expressing nucleotide sequence isolated from the Sargasso Sea
atgttaccttttttcaaaaaaaaaaaaatcgttccccacttaagattaactggtgttataggaaacgctggaagatttaagcaaggaattgattttgctggccaagaggaattaataaaaaaagcattttctataaaaaaatctctagctgttgctatatcgattaattctccaggtggttcaccggtccaatctcacttaatatacgacttcattagagctcaggcaaaaaaaaataaaaaaaaaggtaattgttttcgcagaagatgtg

SEQ ID NO: 263740 - DNA, 687 bp, Unknown
  Bacterial polypeptide expressing nucleotide sequence isolated from the Sargasso Sea
aatgctctctttttttaaaaaaaaaaaaattattccgcatataaagctaagtggtgtaatcggaaatgttggtaaatttaaacaaggtatagatttttctggtcaagaagagattatttcaaaagctttttcagttaaaaaagcaccatgtgttgctattacaataaactctcctggaggttctcctgtccaatcacatttaatttacagtttaattaaagaacaggcaaaaaaaaataaaaaaagggtaatagtttttgccgaagatgtagctgcttcaggtggatatctaatagcatgtgctggtgatgaaatttatgcaaactcaagttcaataataggctcgataggagtaatttactcttcttttggttttactgagttgattaaaaagattggtgttgagagaagagtgcatacggctggaaaaaataagagcacattagacccatttctagacgaaaaaaaggaagacatcgaaagattaaaaaatattcaattagatttacataaagatttcatagaggttgtcgaaaaaagcaggttatcaaaacttaaaaaaactgaggtagaattattttcaggtgaattttggtcaggtagaaaagccaaagaccttggtttggtagatgatataggaaatgcaaatcagatattaagagaaaaatttggagaggatattgttat

SEQ ID NO: 263741 - DNA, 178 bp, Unknown
  Bacterial polypeptide expressing nucleotide sequence isolated from the Sargasso Sea
tgaaattcacgctaatgaagttttatctctaaagaaaagattaaatgaaatttactcaaaacataccggaaaatcagttgatgaaattaaatcagcattagagagagataactttatgactcctgataatgcaaaaagttttggtcttatagataaagtggtaggaaaaagagaatag

SEQ ID NO: 263742 - DNA, 685 bp, Unknown
  Bacterial polypeptide expressing nucleotide sequence isolated from the Sargasso Sea
atgttttcgttttttaaaaagaaaattattgttccgcatatcaggctaactggagttattggatcagctggacggtttagacaaggtatagatttttcgggtcagcaagacattataaaaaaagcattttcgttgaaaaaagctaaaagtatagcaatttcaataaactctcctgggggatcaccggttcaatcacatttaattcatgattacattagacaacttgcaaaaaaaaataataagaaagttattgtttttgcagaggatgttgcagcttcaggcgggtatcttattgcttgtgccggtgatgagatatatgcaaactcaagttcaatagttggatcaatcggggttatatcagcttcatttggatttcaggatgctattaaaagaataggggttcaaagaagagtttatactgctggaaaaaacaaaagtactttagatccttttaaagaggaaaaacccgaagacattgaaagaattaaaaaattacaattagaattgcactcagactttataaatttagttaaaaaaagtcgtggatcaaaattaaaagatcccgataaaaataatacttttacaggtgaattttggtcaggctcaacctcattaaaattaggacttgtggatggtataggaaatgcagagcaaattttgagagaaaaattggagaaaatatgag

SEQ ID NO: 263743 - DNA, 664 bp, Unknown
  Bacterial polypeptide expressing nucleotide sequence isolated from the Sargasso Sea
tgtagtagtcattaagattaactcgccaggtgggtcaccggttcaatctgaattgatacataatcgtatcagaaatttagcaaaaaaaaacaatgtgaaagtgattacaatcgcagaggatgttgctgcctcaggaggctatatgttgatgtgtgcaggagatacattaatcgctaataaaagttctatagtcggatcaataggggtgatcagtgcctcttttggtttcaaaaaattaatagataaattaggcattaaaagaagagtttttacaaaaggggatagaaaatcttttcttgatccatttgaagaagtttctaaaaaagatatagataagctcattaaagttcaggatagcatatttgaaaactttaaagatctggtatcaaaaaatagaaaaaagagaatagacccaaaaaaagtttttaatggagaattttggacgggtgaacaggccaaaaaacttggcttggtagactctaatgaagagctcaattcatatattgaaaaacattatggaaaaaaattaaagattagaaatatagaagaaaaaaaatcatttattaaaaatattttaaataaccagctttcaaataatgatgtcattgatcaattaatagaagccttaagagaaaattctttttggagtcgatatggcctctaa

SEQ ID NO: 263744 - DNA, 692 bp, Unknown
  Bacterial polypeptide expressing nucleotide sequence isolated from the Sargasso Sea
catgttacgtatacctttcctcaacaaattgaacaggcgaaagacggtttcagtagttcggctcaacggtctaatttcgtcaggagcgcgtgggggtatttctgatagtgtgcttgcacccacacttgagaaggcattccgaaaaggaaatcccagtgccgttgctttcattattaattcacccggtggatcgccagtccagtcttctcttgtcggagacaggattaaaagactatcggaagaaacagaggtgcctactattgcatttgtggaggatgttgccgcatctggtgggtattggatagcatcagccgctgatgaaatttatgcggaccatgcctctattattggttctattggtgtaatttcctcaggatttggtttgcaagagttgctttcaagatatggaatcgagaggagagtgtataccgcaggtaaatctaagtcgatgcttgatccctttaagaaagaaaaagctgaagatgtcaaaagattaaaggatattctttcgcagttacatgaagtttttatatcttacgtgaagggtgctagagatggaaaattatcgaccgatcatgatctgtttacaggagaaatttggttggccgctcgagcaaaagaacttggtttaatagatggtatagggcacgttgttccggttttgaaagagagatttggcgaaaaaactcgtt

SEQ ID NO: 263745 - DNA, 778 bp, Unknown
  Bacterial polypeptide expressing nucleotide sequence isolated from the Sargasso Sea
gttgtcaggcttagtggggttattacccagtctactcgccttgggcaacgtggtttgtctcttgaggccgtggaaccgcagttaaaaaaagcattttctgtaaaacgggccaaggcggtggcgttgatcattaattcaccaggtggatcaccggtgcaatcttcgttgattggtcagcgaattcgtgatcttgctagtcgtgctgatttaccagttttggctttctgtgaggatgttgctgccagcggtggttactggttggcagtgagtgcggatgaaatcattgccaatcccgcttctgtcattggttcaattggagttgtatcagctggctttgggtttgataaagcaatcgccaagctcggagttgagcggcgagtctatactgctggcgcggcaaaaatgatgcttgacccgtttcaaccggtacgggatgaggaagttgcgcggctgaaggcgttgcaggctgatattcacaagcaattcattaaccacatcgaagcaaggcgcggttctcggctaaacggtgcacacgaagatttatttagcggggcattttggactggtcagcgtgcggtggaacttggacttgttgatagtcttggtgaatgccggcaaacgattttaaagaggtttggtgatgataccgaggtgatgttcattgaaccgaaacgtaattttttggcctttggcttgcccggtatgcggggccagctggtgcaagaaaccgctgatcttgcaattgaacgggcgtatttttcacgtttcgggctgtaaa

SEQ ID NO: 263746 - DNA, 675 bp, Unknown
  Bacterial polypeptide expressing nucleotide sequence isolated from the Sargasso Sea
aatcaaaaaacatagcaatatcaattaactccccgggaggttcgcctgtccaatcccatttaattcatgattacataagacagttagcaaaaaaaaatgaaaaaaaagttatagtttttgcagaagatgttgcggcatctggtggatacttaatagcttgtgcaggagacgaaatatatgccaattcaagctctatagttggttcaattggcgttatctctgcttcatttggttttcaagatgctatcaaaaaaattggtgttcaaagaagagtttatactgctggaaaaaacaaaagcaccttagatccttttaaagaagaaaaagaagaagatattgaaagaataaaaaaattacaactagagcttcattcagattttattgaggttgtaaaaaaaagcagagggtcaaaacttaaagatccagaaaaaaacaatacttttacaggggaattttggtcaggtactgcatcaatgaaattaggtttaatagatggcataggtaatgcagaacaaattttaagagaaaaattcggagaagacatagatataaaaaaactggagaagccaaaaagttttatagcaaaaaaactgtcatcttctatagataatcaaattgataatatagctagcgtgttagaggaaagagccttgtggcaaaaatttggtttataaa

SEQ ID NO: 263747 - DNA, 713 bp, Unknown
  Bacterial polypeptide expressing nucleotide sequence isolated from the Sargasso Sea
ttctggacaagaagaaatcattaaaaaagctttttcagtaaaaaaagcactagctgtagctataacaatcaattctcccggaggatcacctgttcaatcccatttaatttataaatttattagagagcaggcaaaaaaaaataaaaaaaaagtaataatttttactgaagatgttgcagcttcaggcgggtatttaattgcttgcgcaggtgatgaaatttatgcaaactcaagttcaataattggatcaattggcgttatttcagcatcctttggatttaaaaatttaattgaaaaaataggggtgcagagaagagtttatactgcaggaaaaaacaaaagcactttagatccttttttagacgaaaaagaagaagacattaatagattaaaaaatattcaattagaacttcatcaagactttattgatgtggttgaagaaagtagaggtcccaagttaaataaaagtggtattgaattattctcaggagaattttggacaggcagaaaagcaaaggaattaggattaattgatggactaggaaacgcagatcaaattttaagaaaaaaatttggtgatgaaattgaaattaaaaaatttggaaaacctaaaggttggttagctaaaaaactttcatcatcacaagatcacaccgataagttaataagtattttagaagaaagatcgatctggcagagatatggtctctaaa

SEQ ID NO: 263748 - DNA, 313 bp, Unknown
  Bacterial polypeptide expressing nucleotide sequence isolated from the Sargasso Sea
atgttttcaatatttaaaaaaaagactgtagtaccacatgttagattaacagggataataggttcagccggaagattcaaacaaggaatggaattagccaatcaaaggaatatattaaagaaggctttttcggtaaaaaaaatttctcacgtggcaatttcaattaattcacctggtggttcaccagtccaatctcatttgatttatagttatattagagaacttgcaaaaattaaaaaagtaagagttataatttttgccgaggatgttgcagcttcaggaggatattttattgcttgtgcgggagatgaaa

SEQ ID NO: 263749 - DNA, 448 bp, Unknown
  Bacterial polypeptide expressing nucleotide sequence isolated from the Sargasso Sea
aatgttttcaatatttaaaatttttaaaaagaaaaaggttataccccatattagattgtcggggattattggatcagttggaaggtttagacaaggcataaactttgccggtcaacaagaaataattgataaagctttttctataaagaaagcttcagccattgcaatttctataaattcaccaggagggtcaccagttcaatcacacttaatatatagttacataaaaaaactagcgaaaaaaaataataaaaaagttttagtttttgctgaagatgtagcagcttcaggaggttatcttatagcttgcgcaggagatgaaatttacgcaaattcaagctcaattgtaggttcaataggtgtaatttctgcatcttttggatttcaagatgccattaaaaaaattggggtagaaagaagagtttatactgctgaaaaaataagagca

SEQ ID NO: 263750 - DNA, 710 bp, Unknown
  Bacterial polypeptide expressing nucleotide sequence isolated from the Sargasso Sea
aacagagacagaagcaaatgcagattttattatatctagtttaaaaaatgcttttgaaaataataatacgagtggaattattcttagaattaatagcccaggcggaagtccagtgcaggctggatatataaacgatgaaattaatcgcttaaagaaacttaatccggacattcccgtgtatgccgttattactgatttatgtgcatccggcggttattacattgctgtagccgcagataaaatttttgccaataaagcaagtataattggatcgattggtgtaatcatatctggctttggttttgtcgatgcaattgaaaaattaggaatagaaagacgcatattacatagcggagatcataaagctttaatggatccatttagcccacttgatttttatgaagagacacatatgcaagaattacttgatgaaatacatcaacaattcatttctattgttaagagtggaagaggggatgtgctcgaagataatgaagaaattttttctgggcttgtgtggtcaggtcagcggtcattagaattaggattaattgatgaccttgcgagtgtcaatgaaattgctcgagatattattggtacggaatatattattaattttaccactcgtgaaaactactttgatagatttgcgaaacaggttggaacttcaatttttcagtacattaatcagccagttattggtgaataga

SEQ ID NO: 263751 - DNA, 241 bp, Unknown
  Bacterial polypeptide expressing nucleotide sequence isolated from the Sargasso Sea
atgtcttttctatcaaaactaatgttttggaaagcgggtcacccaaaggttagcatattaagactttcaggcgttatcgcatcgggaggaggtgccctgcgtaaaaacctaaattatgagacgttggagccagttataaaaaaagcgttcgctgacgaaaagcagaatgctgtgattttatgcataaactctccaggtggctctcctgtgcaatcagctcttatcggaaagcgcattcgtc

SEQ ID NO: 263752 - DNA, 725 bp, Unknown
  Bacterial polypeptide expressing nucleotide sequence isolated from the Sargasso Sea
aaggcttacagggataattggatcagctggaaagtttaaacaaggtttagagttagctaatcagagggatatattaaaaaaagctttttctgtaaaaaaaatttcccacgttgctatttctataaattctccaggggggtcaccagtacagtcacatttaatttatagttatataagacagttagctgataaaaataaagtaaaagtaatcgtgtttgctgaggatgtagcggcatcaggcggatattttatagcttgtgcaggagacgaaatatacgctaactctagctcaattataggttcaataggcgtaatctcagcatcatttggttttaaggacttgattcaaaaaattggagtagaaagaagagtttacactgcaggaaaaaataaaagcactttggatccgtttaaagaagagaaagaagaggatatcaaaagattaaaaaatattcaattagaacttcacgaggattttattaatgttgtaaaaaaaagcagagcgacaaaaataaaagatcctgaaaaaaataatatttttactggagaattttggacaggtaaaacttcacttacacttggattaattgacggcttaggaaatgctgaccaagttcttaaagaaaaatttggggataaagtaattataaaaacatttgagaaacctaaaggatttatagctagaaaattgtcgtcatctatacaagatccagttgaaaaacttg

SEQ ID NO: 263753 - DNA, 487 bp, Unknown
  Bacterial polypeptide expressing nucleotide sequence isolated from the Sargasso Sea
atgttttcaatttttaaaatttttaaaaagaaaaaaatagttcctcatataagattatctggaattattggttctgtaggaagatttaggcagggtataaattttgctggccaacaagaaattattgataaagctttttctgttaaaaaagccttagcaatcgcaatatctataaattcaccaggagggtcaccagttcaatcacacttaatatatagttatataaagaaactggcaaaaaagaataataaaaaagttttaatttttgctgaagatgtagcagcttctggagggtatcttatagcttgcgcaggtgatgaaatttatgccaattcaagttcgattgtaggttctataggtgtgatttcagcatcttttggatttcaagatgccattaaaaaaattggtgtagagcgaagagtttatacagctggaaaaaacaagagcactcttgacccttttaaagaagaaaaagaagacgatattc

SEQ ID NO: 263754 - DNA, 758 bp, Unknown
  Bacterial polypeptide expressing nucleotide sequence isolated from the Sargasso Sea
aaaattattaaaagtttaaataacaaaaatgttaaagctttaataattaaaataaattcacctggtggtacagtaagtgcaacagtcgaattagctaacataataaaagatttcaaaaataataaaaaagtaaaaatatatttttttactgaggaaatattagcttctggtggatactgggtagccactcaaggtaataaaatatttgcaaaatatggatctgttataggcagtattggagtgagtggcccaaattggtatttttataacaaacctaaatcaatatcttatgggctaattggtcaatctatagaaactgaggatggtgtagaagtttatagtcaaaatgcaggagactctaaagatctttttaatccttttagaaaaccaaaaattcaggaacttaatcatttacaaaaaatggttgaggaaatttataatgattttgcaattgaagtttctaaaactagaaaaatagaattagatagagtgaaaaaaaacataggagctttaatctacacaagcaatcaagctaaagaaaattttttaatagatgatgttttagattttaatcaattattaaacaaaatttcgaaagaacaaaatatgctagattataaaataatagaaaataaattagattataatatgttcgaaaaattttttctaagcaaaaaatctataaatatatgtgataaaatgaataatgttttattatctgtttcgccaacttacttaagaaattgttttattaatta

SEQ ID NO: 263755 - DNA, 211 bp, Unknown
  Bacterial polypeptide expressing nucleotide sequence isolated from the Sargasso Sea
ctcggctggttttcaaggacaagcaaccgacattcagattcatgctaaagatattctctcactcaaagaaagattaaacaaaatatattcaaaacatactggtaaatctatcaacgaaatctcagaggctcttgagagagataattttatgacggctgacgaagcaaaaaaatttggattaattgactctgttgtggaaaagagaaaataa

SEQ ID NO: 263756 - DNA, 202 bp, Unknown
  Bacterial polypeptide expressing nucleotide sequence isolated from the Sargasso Sea
atgaatttaccttcaaatataataccaactgtttttgaatcaggcgcaagaggtgagagggctctagatatatactctcttcttttaaaagaaagaataatttttcttggaacaccaattaacgaccaaattgcaaatttagttgttgcccaactgctgtatttagccagagaagatgctgacaaggatataagtctataca

SEQ ID NO: 263757 - DNA, 375 bp, Unknown
  Bacterial polypeptide expressing nucleotide sequence isolated from the Sargasso Sea
tatgttttcaatttttaagaaaaaaaaaatagttccgcatgtaagacttacaggtattataggttcagctggtaaatttaaacaaggcatggaactagcaaatcaaagagatattttgaaaaaagctttttcagtaaaaaaaatttctcacgttgcaatatcaatcaattctcctggcggatcaccggttcagtcacatttaatatatagttatataaggcagctagctgaaaaacataaagtaaaagtaattatatttgccgaagacgttgcagcatcaggtggatattttattgcatgcgcgggagacgaaatatatgcaaattcaagctcaataattggttcaataggagtaatttctgcatcctttggttt

SEQ ID NO: 263758 - DNA, 165 bp, Unknown
  Bacterial polypeptide expressing nucleotide sequence isolated from the Sargasso Sea
gtcgcgtgtgcccgatcgaaacgccggaaggtccgaacatcggtctgatcaactcccctggcggcctatgcccgcaccaaccagtacggcttcctggaaagcccgtaccgcgtggtcaaggaaggcaaggtcaccgacgagatcgtgttcctgtccgccattgaa

SEQ ID NO: 263759 - DNA, 616 bp, Unknown
  Bacterial polypeptide expressing nucleotide sequence isolated from the Sargasso Sea
tatgttctctttttttaaaaaaaaaaaaattattccacatattaaattaagtggagttattggaaatgtgggaaagttcaagcaaggtattgattttgctggtcaggaagaaattattaaaaaagctttttcaataaaaaaatcacccgctgttgccatatctattaattcacctggtggatcccctgtacaatcacaccttattcatgattttataagaagccaagctaagaagaacaaaaagaaagtaattatctttatggaagacgtagctgcttctggaggttatttaattgcgtgcgctggtgatgaaatttatgcaaatcaaagttcaatagtaggttctattggagttatttattcttcatttggttttaaagagttaattcaaaaaattggagttcaaagaagggtatacactgcaggaaaaaataaaagtactttagatccatttatggatgaaaaacaagaggatattgagagacttaaaaatattcaattagaattacataaagactttatagatgttgtagaaaaaagcagatcaaagaaattaaaaaaagacaaaggtatagaattgttttctggtgagttttggtcaggtagaaaatcatta

SEQ ID NO: 263760 - DNA, 238 bp, Unknown
  Bacterial polypeptide expressing nucleotide sequence isolated from the Sargasso Sea
catgttttcaatttttaaaattttcaaaaagaaaaaaatagtccctcacattagattgtctggaatcataggatccgttgggcgatttaaacaaggtataaattttgccggtcaacaagaaattattgataaagctttttctattaagaaagctttagcaatcgcgatctccataaactcaccagggggttcaccggttcaatcacacttaatatatagttacataaaaaaactggca

SEQ ID NO: 263761 - DNA, 313 bp, Unknown
  Bacterial polypeptide expressing nucleotide sequence isolated from the Sargasso Sea
atgctctctttttttaaaaagaaaaaaattattccacatattaagctaagtggagttattgggaatgtagggaaatttaaacaaggtatagatttttctggtcaagaagacattattactaaagcattttctctcaaaaaagcaccatgtgtcgctataacaataaactcccctggaggttctcctgttcaatcacatttaatttacagcctaattagacaacaggcaaaaaaaaataaaaaaaaagtaatagtttttgcagaagaatgtagcagcctcaggtggatatctaattgcttgtgctggagatgaa

SEQ ID NO: 263762 - DNA, 817 bp, Unknown
  Bacterial polypeptide expressing nucleotide sequence isolated from the Sargasso Sea
atatttatgtttccttttttcaaaaaaaaaaaaattgtaagccatatcaggctatccggtgttattggaaatgttggaaaatttaaacaggggattgattattctagccaagaggaaattataaaaaaagctttttcattgaaaaaagccaaagcagtagcaataacaattaattctccaggcgggtcaccagtacagtcacacttaatttataaactaattagaaatcaggcagacaaatataaaaaaaaagtgattgtatttgcagaggatgttgcggcttctggcggctacttaattgcttgttctggagatgaaatatatgctaatcctagttcaataattggttctattggagttatttattcttcattcggatttaaagatcttattcaaaaaattggcgttcaaagaagggtttatacagctggaaaaaataaaagtacactcgatccattccttgatgaaaaagaagaagatataaaaaggttaaagaatatacaattagaacttcatcaagaatttattgatgtagttgaggaaagtagaaagacaaagttgaaaaaagatattggggttgaattattttcaggagaattttggtcaggaaaaaaatctaaggatcttggtttaattgatggtttaggtaattccgaacaaattctaagagaaaaatttggtgaagacgttgaagtgaaaatttttgagaaaagtaaaggatggcttgcaaaaaaattatcttcttcagaaaatcaagcagataaaattttgaacttgatcgaagaaagatctatttggcaaaaatatggtttctaaa

SEQ ID NO: 263763 - DNA, 802 bp, Unknown
  Bacterial polypeptide expressing nucleotide sequence isolated from the Sargasso Sea
tatgttctctttttttaaaaaaaaaaaaattattccacatataaaactaagtggagttattggaaatgtgggcaagtttagacaaggtattgattttgctgggcaacaagaaattattaaaaaagctttttcaatcaaaaaaacacttgctgttgcaatatcaatcaactcccctggcgggtctccagtacaatctcatttgattcacgactacataagatctcaagctaagaagaaaaaaaagaaagtgattgtttttatggaagatgtggccgcatcaggaggatatctaattgcttgtgcgggtgatgaaatttatgcaaaccaaagttcaatagtaggttcaatcggagttatatactcatcatttggttttaaaaatttaattgaaaaaataggagttcaaagaagagtttatacagcaggaaaaaataaaagtactttagacccttttatggatgaaaaacaagaagatattgaaagactaaaaaatattcaattagacttacataaagatttcattgatgttgttgagaacagtagatctacgaaacttaaaaaaaacaaaggtatagaattattttcaggcgaattttggtctgggagaaaatctttggagttaggattaattgatggcattggaactgttgatcaaattttgagagaaaaatttggagaagatgtagtaattaaaaaatttgaaaaaacaaaaggttggttagcaaaaaaactttcatcagaaaataatgtagaccaactaataagcattgttgaaagaaagatctatctggcaacgatatgg

SEQ ID NO: 263764 - DNA, 712 bp, Unknown
  Bacterial polypeptide expressing nucleotide sequence isolated from the Sargasso Sea
tatgttctcttttttcaaaaaaaaaaaaattgtaagtcatctacgattaacaggagttataggaaatgttggtaaattcagacagggaatagaatattctggccaggaagagattataaaaaaagctttttcaataaaaaaagccttagcagtagcaataacaattaattctccaggaggatctccagtacaatcgcatttaatttataaattaattcgagaacaggcaaaaaaaaataaaaaaaaagtaattatttttactgaggatgtggcggcatcaggtggatatttaattgcttgttctggtgatgaaatttatgcaaactcaagttcaataataggatcaataggcgttatatcagcatcttttggatttaaaaatttaattgaaaaaataggggtacaaagaagagtttatacagcaggaaaaaataaaagtactttagatccttttttagacgaaaaggaagaagacattaatagattaaaaaatattcaattagaactccaccaagactttatagatgtagtagaggaaagtagaggtcctaaattaattaaaaataatggtgttgaattattttcaggtgaattttggacaggaaaaaaagcaaaggaactaggattgattgatggattgggaaatgcagatcaaatcttaagagaaaaatttggtgatgacattgaaattaaaaaattggaaaacccaaag

SEQ ID NO: 263765 - DNA, 394 bp, Unknown
  Bacterial polypeptide expressing nucleotide sequence isolated from the Sargasso Sea
aatgttctctttttttaaaaagaaaaagattgtggcccatttaaaattaaatggagttattggaaatgccggtaagtttaaacaaggtatcgattttgctggtcaagaagaacttataaaaaaggctttttcattaaaaaaagctatttgtgttgcaattactataaattcaccaggaggatcaccggtacaatcacacctgatttatagttttattagacaagaagcaaaaaaaaataaaaaaaaagtaattgtatttgctgaagacgtagcagcatctggcggttatcttatttcatgtgctggtgatgaaatttatgcaaattcaagttcaataataggttctattggagtaatttattcttcatttgggtttacagaaattaataaaaaa

SEQ ID NO: 263766 - DNA, 845 bp, Unknown
  Bacterial polypeptide expressing nucleotide sequence isolated from the Sargasso Sea
aattttaaattataataatagtgctgtaggaggtaacttctataatcatataaatccaaaacaagtaaaatcttatttagaaaatttaaagaagttaaaaataaaaattttaataattaaaattaactcacctggcggtaccgtgagtgcaacagctgaattaacaaatatattaagtaattttaaagaagagacaggtgttgaaatatttttttttactaatgaaattctggcatctggtgcatattggattgctacatcagcaaataaaatatttgcttcttatggctcaattataggtagtattggggtaagtggacccagttggttttattataacaccccagtaagtctttcttccggaatatttggtcaatctatagaaacaaaagggggaatagaagtttacaaccagaatgcaggtcaaggaaaggatttatttaatccttatagaaaaccagaaaatgaagaaattatacaccttcaaaggatagttgatgaagtatacgatgattttgtatctaaagtatctaatagtagaaaaattgatttatcagttgttaaaaatcaaattggtgcttttatctatagctctaatcaagctaaacagaattttttaattgatgatgttatagattacaaaacacttatagaatatattattgatgaaaataattttgaaaattataaaatttttgaaaataatactaaatctaatttaattggaaattttctttcaatttataaagttaataatgaaaatataaatataaatattaatatttgtaataagttatatggaactattaatgttattattcctttgtacttgaaagaatgttaac

SEQ ID NO: 263767 - DNA, 561 bp, Unknown
  Bacterial polypeptide expressing nucleotide sequence isolated from the Sargasso Sea
aatgttctctttttttaaaaaaaaaaaaatcatacctcacattaaactaagtggtgtaataggaaatgttggaaaatttaaacaaggcattgatttcgcagggcaagaagaaatcattaaaaaagctttctcaattaaaaaagcacctgcagttgccatttctattaattcacccggaggatctcctgtccaatcacatctaatacatgactttattaggttacaagcaaaaaaaaataataaaaaagtaataatttttgccgaagatgtagctgcatcgggcggatatttaattgcctgtgctggagatgaaatttatgcaaataaaagttctatagtaggatcaataggtgtgatttactcatcatttggttttaaagatcttataaataaaataggagttcaaagaagagtttatactgctggtaaaaataaaagtacacttgatccttttatggatgaaaaggaagaagatattgaaagattaaaatctattcaactagacctccataaagattttattgaagtagtagagaacagtagatcaacaaaattaaaaaa

SEQ ID NO: 263768 - DNA, 666 bp, Unknown
  Bacterial polypeptide expressing nucleotide sequence isolated from the Sargasso Sea
tagtaattattaatagtcctggaggtacttttgttagtagtaaagagattcatgatagtttagaaaaaataagcatgaaaattccaacttcagcttacatgaaagaaatggcaacttctggagcttatttagcatctatgggtttacaaaaaatttttgctaatcagggaactataacaggttcaattggtgtgattcttcaaactgctcaattaacctccttgatggaaaaaattggagttaaaccaatagtaattaaaagtggtgaacttaaagccacacctaatccacttgaaaaattagatgaagaaaagataaattatttaaaaaaaatcattctccaactacaaaaagaatttattggtatagtaaaagaaaaaagaaatttaaatcaaaccactattaaagagatttcaactggaagaatttttaccagtaaacaggcactgaaactaaatttaattgattttattggaaatgaaacagatgcattagattggataaaaaaagaaggggggctcgaccaaaaaatagatgtaattgaattagataagaaaaactctctatatgatatattcaataccacctttttgaaaaattctcttaaaccttttaatttaaatctaaataatggtatactagcaatttggacacctggattatgaa

SEQ ID NO: 263769 - DNA, 676 bp, Unknown
  Bacterial polypeptide expressing nucleotide sequence isolated from the Sargasso Sea
tatgacagcatcttccccgtattatggcgactctgccgtaatgagaactccaccccctgatttaccctcacttcttttgaaagagaggatagtttatttaggcttgccactattttccgatgatgacgctaaaaggcaactcggaatggatgtaactgaactaattattgcccaacttctttttctagaatttgataattctgagaaacctatttatttttacattaactcaactggaacgagttggtacaccggggatgcaatcggatttgaaacggaagcctttgcaatctgcgacactctcagatacgtgaagcctcctgtgcatactatttgcataggtcaagcgatgggaacggcagcagtaatactttcagccgggaccaaagggcagcgtgcagcattacctcatgcatcaattgtccttcatcaacctagaagtggagctcaaggccaagcaactgatattcaaatcagagcgaatgaggttattcacaacaaaaaagcaatgctagaaatccttagtcataacactgggaaatcagtagaacaattatccaaagactcagatcgaatgagttatttgaacccacatgaagcagtagattatgggattatagatcgtgttcttactagtagaaaagacttgccaagcgagaaagtcttgcctacatag

SEQ ID NO: 263770 - DNA, 277 bp, Unknown
  Bacterial polypeptide expressing nucleotide sequence isolated from the Sargasso Sea
aatgatctctttttttagaaagaaaaaaattattccacatattaaattaagtggagttattggaaatgtaggaaagttcaagcagggaatagatttttcaggtcaagaagagatcatccttaaagcttttgcgttaaaaaaagcgccatgtgttgcaattacaattaattcacctgggggttctccagtccagtctcatttgatttataattttataaggcaacaagctaaaaaaaataagaaaaaagtaatagttttcgccgaggatgtggcagct

SEQ ID NO: 263771 - DNA, 441 bp, Unknown
  Bacterial polypeptide expressing nucleotide sequence isolated from the Sargasso Sea
tatgttctcattttttaaaaagaaaaaaattgtttcacacttaaaattaagtggagtcattggtaatgctggaaaatttaaacaaggtatcgattttgcaggtcaagaagaactaattaaaaaggctttttctctaaaaaaagcgtcatgtgttgctatatcaataaattctccaggaggatcaccagttcaatctcatttaatctatagctttattagacaacaagcaaaaaaatacaaaaaaaaagttattgtattcgctgaggatgtggcagcctctggagggtatttgatttcttgtgctggagacgaaatttatgcaaattcaagttcaataatcgggtctataggagttatttattcttcctttggatttacagagttgataaaaaaaattggagttgaaagaagagtccatactgctggtaaaaacaaaagtac

SEQ ID NO: 263772 - DNA, 370 bp, Unknown
  Bacterial polypeptide expressing nucleotide sequence isolated from the Sargasso Sea
aatgttttctttttttaaaaaaaaaaaaatcgtttcccatataaggctcagtggagttattggaaatgtaggtaaatttaaacaaggaattgattttgccggacaagaagaaattataaaaaaagctttttcattaaaaaaaatcaaagcagtcgctatatctattaattcaccaggtggatcgcctgtacaatctcatttaatatacaaatttattcgtcaacaagcaaaaaaacataaagtaaaagttattgtttttgctgaagatgtggcagcttcaggtggctatttaatagcatgcgcgggagatgaaatttatgccaactcaagttcaatagttggttctatagggggttatttattcttcttt

SEQ ID NO: 263773 - DNA, 473 bp, Unknown
  Bacterial polypeptide expressing nucleotide sequence isolated from the Sargasso Sea
aatgttatttttcaatgttttttttagaactcttggtttcttgagcgcattattaatttttttaataattattaattttgtacttcatttttccaatgaacagagaaagaaacagttcgtaatgactgacggtttacctaactctaataatattatagctaagattaatttagatgggccaatatttaataataacagtaatatattgggaaataatctttacgattacatcaacccttctcagataaaatcatatttggaggaattaaaagaactacaaatcaaagctctaattataaatattaattctccaggtggcacagtaagtgctactgctgagttggaacaaattatttatgaatttaaaaaaaacacaaacactaaagtatatttttatacaaaggaaattttagcatctggaggatattgggttgcaaccacagctgataagatattcgcgtcatatggatcta

SEQ ID NO: 263774 - DNA, 767 bp, Unknown
  Bacterial polypeptide expressing nucleotide sequence isolated from the Sargasso Sea
gtttaagagatttttttctaaagatattactataccaactttacgattatcaggtgttattggacaggctggtataactaggtcaggattaacaattactgggatagataaattaattaacaagctttttgcagataaaaaagcacctgcagttgctttgataattaattctccaggaggctctccaacgcagtcttctttaattgcagaaaaaattatagctttgtctaatgaaaaaaataaaaaggtatatgcctttgttgaagacgtggcagcctctggtggatactggctagcttgttcagcggatgaaatatatttagatttaaattcaatagtaggatcaataggtgttatttcacctggttttggttttgtggatttaattaagaaaatcggagttgaaagaagagtttatacatctggtaaaagtaaaagttttttagatccatttaaggaagaaaaaaaagaagatattgatagattaaaggatattcaaggacaaattcatgaaaattttattgattatgttaaaaagagaaggggctctagacttttaagtgctaatgaagaagaaattttttctggactattttgggtaggaaaaaaaggtgttgagctaggcttagctgatggtattggatcaattaatcaagttattaaagaaaaatttggaaaaaaagctaaaattaaaattattgatcaaaaaaaatcttttttacaaaaacgactttcttcttctataaatagtaatgatatatttaata

SEQ ID NO: 263775 - DNA, 659 bp, Unknown
  Bacterial polypeptide expressing nucleotide sequence isolated from the Sargasso Sea
catgtttaagaaaaagcctctgatagtagtagtgagattagatggcgtaattggtgctgtaagtaggtttggatcagctggtattgatgacgccaatactcaaaaactaatggagaaagcttttgaatatgaaaaagccaaggccattgttataaagataaactctcccgggggttccccgactcaatcatcattaattgcttcacgtattatcaaattgtcgaaggataaaaaaatacctgttatagcattttgtgaagatgtagcggcatcgggaggttattggttagcttgtgcatctgaagaaatctatgctgatgtgaattcaattataggatctattggagttatttccgcgagctttggtttttctgaattaataagtcgttacggtattgagcgcagagtatatacggcaggagaagagaagagcatgctcgacccttttcaaccggaaaaggcgagtgatattaaaagattgaaagtgattcaaaaagctatttttgaaaattttaaaaattttgtcagtgaaagaagaggcaaaagagtagaggggaagaaaatctttaacggagaagtttgggaggctgaaagagctaaaaatctcggactaattgacgatattggaactatggaagatattttggaaagaaaatatg

SEQ ID NO: 263776 - DNA, 790 bp, Unknown
  Bacterial polypeptide expressing nucleotide sequence isolated from the Sargasso Sea
ccccacatttgtttacagagtggatagtgaagtaaaacaaacgattatatcagggcaaggagaattacatttgacagtaacttcagagcgtttgaaaagaagatttggcattaatattcaattagaggagccaaaagtaccatacagagaaacaattttagggaaaagtgaatcaaaatataggcataaaaaacaatctggaggagcaggtcagtttgctgaagtttggatgaggattgaatcgaggccaagaggagaaggtgttgaatttactcaatcattagtaggacaaaatgtagatcgtgtttttgttccatcagttgaaaagggagtaaacactgcctgttcagatggtattcttgctggttgtaaggttgtagatgtaaaagtagatttttatgatggaaaaatgcatccagttgattctaaagatattgcttttcaaacagcaggaaaacatgcattccgcgatgcttttttaaaagctcagccttgtttattagaaccgattatggatattgaagtaaaagttcctgaagaatttatgggcgatataatgggagatatttcgggtaagcgtgggaaaattatgggtatggatgctgagggaagctttcaattaatcaaagcacaggttccacaagcagagttgtatcattatgcaacaacagtacgctctttgactggtggaagaggaatacattcagaatcttttagccattatgagaaaatgccaaaggaattcgagaaaaaagttattgaatctaggcaatcaaaagatgatgaataa

SEQ ID NO: 263777 - DNA, 235 bp, Unknown
  Bacterial polypeptide expressing nucleotide sequence isolated from the Sargasso Sea
tatgttttcatttttcaaaaaaaaaaaaatcattccacatattaagcttagcggcgtaattggcaatgtaggaaagtttaaacaaggaatggatttttcaagtcaagaagagataattaaaaaagctttttctttaaagaaagctcctgcagtcgctatatcaataaattcaccgggtggttccccagttcaatcacatttaatacatgattacattagacatttagcaaaaaaa

SEQ ID NO: 263778 - DNA, 175 bp, Unknown
  Bacterial polypeptide expressing nucleotide sequence isolated from the Sargasso Sea
catggctaatggaggttatgggtctttgaaaaaaaggttaaacgaaatttattctaaacacacaggtaagtcagttgatcaaatcaaagaagctttggagagagacaattttatgactccagaaaacgctaaagattttggtttgatcgataaagtagtagaaaaaagagactaa

SEQ ID NO: 263779 - DNA, 802 bp, Unknown
  Bacterial polypeptide expressing nucleotide sequence isolated from the Sargasso Sea
tatgtttaaaagattgttttctaaaagtattcaaattccagtgctcaggctatctggaattatctcagcacaatcaggcataacttcatcagggttagctataaataatttagaaaagttaattgaaaaattattttctgataaaaaatctccggctgtagctctattaattaattctcccggaggatctccaactcaatcgtccttaatagcaaaaaaaataatagatctttcaaaagataaaaataaaaaagtaattgcatttgttgaagatgttgcagcttctggtggttattggctagcttgtgcagcagaagaaatatatatagatcaaaattctgtaataggttcaataggagttatctcaccaggctttggttttgtcgatttaataaagaaagttggaatagaaagaagagtatatacatcaggaaaaagtaaaagttttttagatccttttaaagaagaaaagaaagaagatattaatagattaaaagatatccaagaacaaattcatgataattttattgattatgttaaggatagaagaggctcaaaacttgatcaaaataaattagatgatatattttctggattattttgggttggaaaaaaagcaattgatttaggtttggctgatggaattggatctttaaatcaagtcttagaaaaaaaatttggaaaaaaagttaaaattaaaatgataagtcaaaaaaaatcattccttcaacgtagattatcttcctcaatattaaattcagaggaagttttaaataaaattgaagaaaaaataatgctatct

SEQ ID NO: 263780 - DNA, 781 bp, Unknown
  Bacterial polypeptide expressing nucleotide sequence isolated from the Sargasso Sea
atgggtttcctttctatttttagaaagtctcaaaatgtttcagtaattccactaaatggaattattgcgcctaatatgggtagaagaaaaggtttgaacttaaatgaaattgacaaaaatattgaagatgcatttttagttaaaaatttaaaagctgttgcactgcgtataaattctcctggtggatcacctgtccaatctgaaatgatatctaagcgcattagaagcttatcagagaaaaacaatattccagttatagccttcgttgaagatgttgcagcatctggtggttattggttagcatgttcagcagacgaaatttttgcaagcaaagcttcaataattggttcaataggtgttgtgtcctctggatttggttttgacaaagcaattcaaaaacttggggtagaacgtcgtctttacacttctggcgataataaagctattttagatccatttttacctgaaaataaagatgatgttaatagattaaaagggatacaaaaagaattgcataatcagtttatttcatttgttaagtcaagacgaggtagtaaaatttcaaatgaaaataaagaaatttttactggagctttttggtcaggcgaaaaaagtttagaacttgggttaatagattcttttggtgaaatgaaagcagttttaaaagaaaggttcggagaaaatgtaaaaataaaagagtttgcaccaaagaaaaagctttttggttttggaagtttattatctggagctttagatatgttgattaacaaagttgaagaaa

SEQ ID NO: 263781 - DNA, 673 bp, Unknown
  Bacterial polypeptide expressing nucleotide sequence isolated from the Sargasso Sea
gatgaaaccaaatgactttttagaacaattttatacaagaagacaatcaataataaatcgtttattaatcatagtagttgtgattttgttgatgttcaccgcttcacttcaattccaacaaaatgaaaattttattgcaaaaataactgttgaaggaatcataaaagatagaaatgatatacttgaacaattgagaaacttagacaaagatcaaaatgtgaaaggacttataaccgtcatcaacagtcctggaggtacatatgtgggaagtaaagaaattcacgaatcaattgaaaaattaggtaaaaaaataccaacagttgcttatatgagagaaatggctacgtcaggcggctatcttgtgtctttaagttctgacagaatttttggcaatgagggaaccattacagggtcaataggtgtaatacttcaaacagcagatataagccaacttcttagtaaattgggtattaatccagttataattaaaagtggtgatttgaaagcagtaccaaatcctgctgaagaaatcgatgaaaaaaaattaaattacttaaaagatgttataaaaaaaatgcaaacagaatttttgaatttggttaaaaacagtagagatatatcaagttctacactagatttggtttcagatgggagaattgtaacaggaaaacaa

SEQ ID NO: 263782 - DNA, 580 bp, Unknown
  Bacterial polypeptide expressing nucleotide sequence isolated from the Sargasso Sea
tatgtttaaaaggttattttcaaagagtactacaatacctgttttacgtttatctggcattatatcatcacagtcaggcttaacaggctctggtttagcaataaataatctagaaaaattaattgataaattatttgctgataaaaaatctcctgttgtagttttgataattaattcacctggaggttctcccacacaatcctctttaatagcaaaaaggatcattgatctagctaaagaaaaaaataaaaaagttttagcattcgttgaagatgttgcagcttctggaggttattggttagcatgtgctgctgatgagatatatattgatcaaaactctgttattggatcaatcggtgttatttcaccaggttttggttttgttgatcttttaaaaaaagttggaattgaaagaagagtttatacatctggaaaaagtaaaagttttctagatccttttaaagaagaaaaacaggaagacattgatagattaaaaaatattcaagaacaaattcatgataattttattaattatgtgaaagagagaagaggttcaaaacttgatcagaataaattagat

SEQ ID NO: 263783 - DNA, 661 bp, Unknown
  Bacterial polypeptide expressing nucleotide sequence isolated from the Sargasso Sea
tatgattagcagtgtaaggaaattttttcgaagaaaacctttagttgttgttatacggctagatggggtcataggtgcagtgagtagatttgggtcaggaggtctagacgattccaacactaaacaattattagaaaaagcctttgagttcgaaaaagccaaagcgattgcaataaaaattaactctcctggtggttcccctacacaatcatctcttatagcatcgagaattttaaaattatctaaagaaaaaaaaatacccgttttatgcttctgtgaagatgttgcagcatctggaggctattggttagcttgtgctggtgaagaaatttactcggatataaattcgattataggttccataggtgtaatctctgcaagcttcggtttttcagagcttatatccaggtatggtatagaaagaagagtatacacggctggagaagaaaagagtatgctggatcctttccagccagaaaaagctagtgacgtaaaacgactaaaatctattcaaaaggccatttttgaaaactttaaattttttgtgactgagcgcagaggtgaaaagataaaaggaaagaaaatatttaacggtgaagtatgggatgcaccaagagcaaaagatcttggtctcatcgatggcataggaatgatggaagat

SEQ ID NO: 263784 - DNA, 760 bp, Unknown
  Bacterial polypeptide expressing nucleotide sequence isolated from the Sargasso Sea
atgggctagagaaaaaaaatctattaaaacaattgtatttagaatcaatagcccaggtggaagtgcattggcaagcgacgaaatatggagagaagttaaattaacaaataaaacaaaaaaagtgatcgtatctatgggtgatgttgcagcctcaggaggatattatatcgctgcacccgctgaatgtattttttctgaaccaacaactataacaggctctattggtgtgtttggaatgatcccctacactggtaaaatgttagaaaactatttagggatttcatttgacagggtgcaaaccaatcaacattcagtaatgagtacaaataaaaaattaagtccaaaagaacttgaaattattcaaaatgaagttgacctaacctacaatcaattccttgaaagagttgcaaaaggtaggaaaatgaataagaaacaagttgatgttattgcaagaggaagagtttggactggaagagatgcattaaaaattggattggtagataaaattggtggtttaaacgatgccataaaatatgctacaaaaaaatcaaaaattgatgaagcaaaaatagtttactatcccgaggttaaggaaaacaaacttcaaaatttaattgaatcatttaatgactttgaggaaatcaaacatgaaaatcatgatatttcaaaagaacttttaaaatattacaatcaacttaaggaaattgaaaaaagaaaaggaattcaaatgagacttccatatgacattattatcaattaa

SEQ ID NO: 263785 - DNA, 345 bp, Unknown
  Bacterial polypeptide expressing nucleotide sequence isolated from the Sargasso Sea
tatgttttcattttttaagaaaaaaaaagttgtaccgcatgttagactaactgggataattggctcaggcggcagatttaaacaaggcatggagttagctaatcaaagagatattttaaagaaagcgttttcagtaaaaaaaatatctcatgtggctatttccattaattcaccaggaggatcgccagttcaatcacacttaatttatagttatataagacaacttgcagaaaaaaataagattaaagtaattgtttttgcagaagatgtcgctgcttcgggagggtattttattgcttgtgctggcgatgaaatttatgcaaactctagctcaataataggatc

SEQ ID NO: 263786 - DNA, 545 bp, Unknown
  Bacterial polypeptide expressing nucleotide sequence isolated from the Sargasso Sea
tatgttttcaattttcaaaaaaaaaaaaattattccacatataaaattaagtggtgtaattggaaatgtcggaaaatttagacaaggtatagattttgctagccaagaagaattaattaaaaaagcattttccataaagaaatctccagcagttgcaatttcaattaattctcctggtggctcacctgttcaatctcatttaattcatgatttaataaaagatgaatcaaaaaaaaataataaaaaagttataatttttgcagaagatgtagcagcttcaggaggttatcttatagcatgcgctggcgatgaaatttatgcaaatcaaagttcaattgttggatcaataggagtaatttattcttcttttggttttaaagatttaattcaaaaaattggagttcaaagaagagtttacacagctggaaagaacaaaagtacactagatccatttttagatgaaaaaaaagaggatattgagagattaaaaaatattcaactagatttacataaagactttattgatgttgtagaaaaaagtagat

SEQ ID NO: 263787 - DNA, 991 bp, Unknown
  Bacterial polypeptide expressing nucleotide sequence isolated from the Sargasso Sea
agctcgcaggctgatgaaattattttaaataaatatggtcaaatttcatcttttggattctctagaaagagagaatatgttaaagacttatatgaaaatattaaacttaaccaacatgtttttatagctggcgaatggaaaactgctccagagccatttactagaaatgatatgtctgaagaggataaaaatgcatggaatgattttgctgaacctctttggaataaaatgacttcatatattgaagatgcaagagagcttccatatgggactttgcaaaattatggtgattctttttgggagttagctgcagatgaacctgaactttctcaaattgctcttaagattggtcttgttgataaggtatttactgaagaggaatttcgtcattggttgtttgataaatttccaaatgaagataatgatataaataaactacccgattcaatatctatttatgattacttatctacaattgattctgaggaaactaagtctaaaaataaaattgctgttattcatatcgaaggagctataactacaggtgattcaacttatgggattgctggttcagatacaattgttaaaaatataagaaaggctataaaagatgatgccgtaaaagcgctcgttctgcgtattaatagtcctggcggtggagtttatcctagtgagttaatcacaaatgcattaaatgaatttaaagagactgataggcctatagtaagttctatgggagatatagctgcatctgggggtgtctgggttacaactttatctgatgaaatatgggcaaaaaatgaaactctcactggatccattggggtgtatgccacattacctacatttgaaaatttatatgattgggttggggtacaagtggatggagtaagctctactaaggctgaggaatgggatccaagattatcaatgccagataatgtcactaatggaattcaagctacagttgataatatttatgatagattgt

SEQ ID NO: 263788 - DNA, 502 bp, Unknown
  Bacterial polypeptide expressing nucleotide sequence isolated from the Sargasso Sea
aatgttttcattttttaaaaagaaaaaaattatctctcatttgaggcttagtggggtaattggaaatgttggtaaatttaaacaaggtattgatttttctggccaagaggaaattataaaaaaggcattttctttaaaaaaagcaagtgcaatagctgtaacaattaattctcctggcggttcaccagtgcaatcacatttaatatacaaatttattagacaattagcgaaaaaaaataaaaaaaaagtattagtatttgccgaagatgtagcggcatcaggaggttatttgatcgcttgtgcaggagatgaaatatatgcaaattctagttcaatcattggatcaataggagtaatttattcttcatttggctttaaagaattaattaaaaagtttggcatagaaagaagagtacacacggcaggaaaaaacaagagtactttagatccattccttgaagaaaaagtgaagatattgaaagacttaaaaatattcaattag

SEQ ID NO: 263789 - DNA, 532 bp, Unknown
  Bacterial polypeptide expressing nucleotide sequence isolated from the Sargasso Sea
atgaaacattactttggtaaattacggtcgttacgtcttctcggcttccgaaatcccaaaccagtagttgcagttttgagactttctggtgtaattggacaaacgggcaatcctcttcgccaagggttgacctcggcagctctggtacggtcgatagaacgtgccttcgcgctaccgaaacttaaagcagttgctttgcaaattaactctccaggtggtagtccagttcaatcgtcgcttatatttaaaagaattcgttctatggcggaggagaaaggcatccccgttgtggcttttgctgaagatgttgcagcatctggtgggtatatgctcgcttgtgcggccgatgaaatatttgcagacgaatcttcagtactggggtcaataggagttatctcagctggctttgggtttgttgagttacttgaaaaggtcggtatagaacgacgtgttcataccgagggcaaaaacaaaagtatgcttgacccattcctgaatgagaggcctcaggacgtaagacgtcttaaggagc

SEQ ID NO: 263790 - DNA, 308 bp, Unknown
  Bacterial polypeptide expressing nucleotide sequence isolated from the Sargasso Sea
tatgtttaaaagacttttttcaagaaatgtgcaaatacccacacttagactttcgggaattatttcatcacaatcaagcattactagttctgctttagcaataaataatttagaaaaattaatagaaaaattatttgctgataaaaaagctccagctgtagctttaatcattaattctcctggcggttctcccacacaatcttcattaattgcaaaaaaaataattaatctagctaaagaaaaaaataaaaaagttttagcatttgttgaggatgtagctgcttctggtggatattggttagcatgtg

SEQ ID NO: 263791 - DNA, 732 bp, Unknown
  Bacterial polypeptide expressing nucleotide sequence isolated from the Sargasso Sea
ttaagcaagggatagatttttctggacaagaagatatcattttaaaggctttttctgttaaaaaagcaccttgtgttgcaattacaataaattctcctggtggttctcctgttcaatctcatctaatttataattttattagacaacaggcaaaaaaaaataaaaaaaaagtaataatttttgccgaagatgttgcggcttctggtggctatttaattgcatgtgctggtgatgagatatatgcaaactcaagttccataataggttcaatcggtgtcatatattcttcttttggtttcacagaattaataaaaaaaattggagtagaaagaagggttcacacagctggaaaaaacaaaagtaccttagatccttttcttgaagaaaaaaaagaagatatagaaagacttaaaagcattcaattagatctccataaagatttcataaatgtagttgaaaagagtcgtggaataaaattgaataaaactgaagtagaattattttctggtgaattttggtctggaagtaaagctaaagatttaggtcttatagatgagattggggatgctaatcaagtattaaaagaaaagtttggtgatgacgttgtaattaaaaaatttgagaaatctaaagggtggttaaccaaaaaattatcatcttctaacgatcatctagaccgatttacaaatatattggatgaaaaatctgtttggcagagatatggcctctaaa

SEQ ID NO: 263792 - DNA, 790 bp, Unknown
  Bacterial polypeptide expressing nucleotide sequence isolated from the Sargasso Sea
atgctctcttttttaaaaaagaaaaaaattattccacatataaagctaagtggtgtaattggaaatgttggtaaatttaaacaaggtatagatttttctggtcaagaagaaattatttcaaaagctttttcggttaaaaaagcaccatgtgtcgctatcacaataaattcccccggaggttctccagtccaatcacatttaatttatagtctaataaaacaacaggcaaaaaaaaacaaaaagaaagtaatagtttttgctgaagatgtagcagcctctggtggatatcttatagcatgtgctggggatgaaatttacgcaaactcgagctcaataattggctcgattggagttatttactcttcttttggatttacagaattgataaaaaagataggtgttgagagaagagtgcatactgcagggaaaaataaaagtacattagacccatttctagatgaaaaaaaagaagacattgaaagattaaaaaatattcaattagatttacataaagatttcatagaagtggtcgaaaaaagcagatcatcaaaacttaaaaaatctgaggtagaattattttcaggtgaattttggtcaggtagaaaagctaaagacctcggtttgattgatgagataggaaatgcaaatcaggtattaagagaaaaatttggagaggacgttgtaattaaaaaatttgaaaaatcaaaaagttggcttagtaaaaaattatcgtcttcaaatgaacatgtcgatcaattagcaaatatattagaggaaaaatcagttggca

SEQ ID NO: 263793 - DNA, 137 bp, Unknown
  Bacterial polypeptide expressing nucleotide sequence isolated from the Sargasso Sea
gaataacatgaaaaaagagccttcaaattatgttgtacctacagttattgagaatacaaatagaggcgagagagctttcgatatttattcaaggcttttaaaagataggaattatatttcttggcactcctattgat

SEQ ID NO: 263794 - DNA, 494 bp, Unknown
  Bacterial polypeptide expressing nucleotide sequence isolated from the Sargasso Sea
aatgctctctttttttaaaaacaaaaaaattattccacatataaagctaagtggtgtaattggaaatgttggtaaatttaaacaaggtatagatttttctggccaagaagacattattacaaaagcattttctctaaaaaaagcaccatgtgttgctataacaataaattctcctggaggttctcctgttcaatcacatttaatttacagcttaattagacaacaggcaaaaaaaaataaaaaaaaagtaatagtttttgccgaagatgtagcagcttcaggcggatatctaatagcttgtgctggagatgaaatttatgcaaactcaagttcaataataggctcaataggagtaatctactcttcttttggttttacagaattgataaaaaagataggtgttgagagaagagtgcatactgctgggaaaaataaaagtacattagacccatttctagatgaaaaaaaggaagacatcgaaagattaaaaatat

SEQ ID NO: 263795 - DNA, 532 bp, Unknown
  Bacterial polypeptide expressing nucleotide sequence isolated from the Sargasso Sea
atggccgaccaaccgaattccccggattcctcctcccgtcccgacagccgtgaaccgaactgggagcgtgcggcgctcgagcggatcgcgctcgcggccgtcaaggagcagcgcgcggcgcgacgctggaagatcttcttccgcttcgcgttcctcgccgtgttcgtgctgttcgcgttcgcgctgatcgatttttcgagcgattcgaagttttcgtcgagcgggcggcatacggcgctcgtgacgatcgacggcgagatcgcggccggcgtgaacgcaaatgccgacgacatcaacaccgcgctcgacgccgcgttcgaagacgacggcacggccggtgtcgtgctgcggatcaacagtccgggcggcagcccggtgcaggccgggatggtctacgacgagatccgccggctgcgcgcgaagcatccggacaagccgctgtatgtcgtcgtgaccgacatgtgcgcatcgggcggctattacatcgcgtctgcggccgacaagatcttcgtcgacaaggcgagcatcgtcg

SEQ ID NO: 263796 - DNA, 611 bp, Unknown
  Bacterial polypeptide expressing nucleotide sequence isolated from the Sargasso Sea
gatgttaagtcacgccgtaaagcggaggttgacgagaaccgtgaacagggcctggtgtttgacaccgaccccgccaatgataaaggaggcaccagtgccgaagccaaagaaccgggcgcgccaccgtccgaaagccagcgcaaaaagtaattcgtggttccgcatgcaggccagcaataacagcgaggccgacatttttatttatgacgaaatcgggtactggggcgtaacggcgaaacagttcgtcaatgatctccgggcacttggggacgtcacccacatcaacctttatatcaactcgcccggtggtgatgtcttcgacggtattgctatttataacgcgctgaagcatcacggcgcggcgattaccgtgcatatcgacggtctggcggcctccatggcctcggtgattgcgatggtaggcaatccggtcatcatgcctgaaaacacgatgatgatgatccataagccctgggggtttgctggtggtgacgcgagcgatatgcgcgactatgcggatcttctcgacaaggttgaatccgttcttatcccggcttatgcgcagaaaaccggaaaatccaccgaagaaattgcggcaatgctggaggacg

SEQ ID NO: 263797 - DNA, 118 bp, Unknown
  Bacterial polypeptide expressing nucleotide sequence isolated from the Sargasso Sea
atgccaataggaactccaagcgtgccttacagacttccaggaagtcaatacgaaagatgggtcgacatatatacaagactaggtgttgaaagaattctttttcttggacaagaagtga

SEQ ID NO: 263798 - DNA, 673 bp, Unknown
  Bacterial polypeptide expressing nucleotide sequence isolated from the Sargasso Sea
ggccatcgtacttcggattaatagtccaggtggaacggttggagcttctcaagaaatctctcaagcgatcaaacagattaaaaagcagacaaaactccctatcgtggcatcgtttggagatgttggtgcatctggtgcatattgggtagcgctggctagtgatcatatggtggctaaccctgggagtttaattggaagtataggagttatcatgagtagttttgaccttacaggcttcagcgagaagtcagggataagccaaaatacagtcaagagtggtaaatttaaagatcttttatctagttggcgtgatatgggccccgaagaacgaaagttgctccaaaatttagttgatgacgttcatgatcaatttattacggagtttatgacagcacgtaaactcagcaaaaaacaagcacaaaccttagcggatggccgtatatttacgggtaggcaagctgtaaaattaggtgtgattgatggcgtggggtcttttcaagacgcattaaatattgcccaaaagatggctaaattatctggagagcccaatattattaacaaagcaaaaccgtcattacaagatatgttcgagatgttccaactcaatgcgatgtctgatatcccgcaaaccttacttaacaaggcacgctttggggatgtgaaggtgcattaa

SEQ ID NO: 263799 - DNA, 198 bp, Unknown
  Bacterial polypeptide expressing nucleotide sequence isolated from the Sargasso Sea
tatgttttcaatttttaagaaaaaaaaaatagttccgcatgtcagacttacaggcatcataggatcagcgggtaaatttaaacaaggcatggaattagctaatcaaagggacattttgaaaaaagctttttcagtaaaaaaaatttctcacgttgcaatatcaatcaattctcctggtggatcaccagttcagtcaca

SEQ ID NO: 263800 - DNA, 346 bp, Unknown
  Bacterial polypeptide expressing nucleotide sequence isolated from the Sargasso Sea
atgttttctattttcaaaaaaaaaaaaattattccacatataaaacttaatggtgttattggtaatgttggaaagtttaaacaaggaatagattttgctggtcaagaggaaattataaaaaaagctttctctttaaagaaatcaccagccgtagcaatatcaattaattctccaggaggttcgccagtacaatcgcatcttattcacgattacgtaaaacaattggcaaagaaaaataaaaaaaaagtaattatatttgcagaggatgttgccgcatctgttggatatttaattgcatgttgtggagatgaaatttacgcaaatcaaagttctataataggttcta

SEQ ID NO: 263801 - DNA, 571 bp, Unknown
  Bacterial polypeptide expressing nucleotide sequence isolated from the Sargasso Sea
atgaaactaaaaattccctttttgccgtctaagccaagtgttgcggtcgttaagatgtctggcgttatttccgctggtactcgctctggcctgtgcgaccagactttaagtccaattttggaaaaagcgttcaagaaagggcaacatcaagcggtcgctttattaattaattcgcccggtggatccccagtccaatcctctctgataagttctcgaataaagcgcttagcagaagaaaacgagatgccagtattcgcattcattgaggatgtggctgcttcgggaggctattggctcgcttgcgctgcggatgaaatttatgcagatactgggtcaataataggctctattggagtcatttctgcaggatttggtttccaagaattaatcgataaatatggcgtagaacggagagtacacacagcaggtaagtccaaatcgatgctagatcctttcaaaaaagaaaagcccgaagatataaaacggctgaaaagaatacttagtgaaatgcacgaactctttatcacgcacgtggaagaaacacgcagtggtaaactaactcaagaagata

SEQ ID NO: 263802 - DNA, 695 bp, Unknown
  Bacterial polypeptide expressing nucleotide sequence isolated from the Sargasso Sea
aaaagctttttcagtaaaaagattttctcacgtagctattccaataaattctccaggaggatctcctgtgcaatcacatttaatttatagctatataagggaacttgccgataaaaaaaaagtaaaagttttaatttttgctgaagatgttgctgcttctggaggatatttcattgcatgtgcaggagacgaaatatttgctaactcaagttcaataattggttccattggcgttatatctgcttcatttggttttaaagatttaatcaagaagattggagtacagagaagagtgtatactgcaggaaaaaataaaagcactttagatccttttgtagatgaaaaggaagaggatgtaaaaagattgaaaaatatccaattagagttacatgctgattttatcaaagttgttgagaccagtcgaggatcaaaattgaaagatccagaaaaaaataatatttttacaggagaattttggacaggtaaatcggccttaggactgggcttaattgacggtattggaaatgcagatcaagttcttaaagaaaaatttggagataaagttataattaaaaattttgaaaaacggaaaggttttttagcaaaaagactttcttcatcaatctctgatcctttcgataaaataataaataatttagaagaaaaatcgatgtggcaaagatttggtttataga

SEQ ID NO: 263803 - DNA, 699 bp, Unknown
  Bacterial polypeptide expressing nucleotide sequence isolated from the Sargasso Sea
tatgttttggagaactgatgctcctagggtgagtgttttacggctatctggagtaattgcctctggcggaagtccgctgcggaaaaatttaaattatgtttccttggagccagttatcaaaaaagcctttttagataaaaaacaaagcgcagttatcttatgtataaattctcctggtggctcacctgtgcaatcagcactgattggaaaacgtatacgccagttggcagataaaaataagatgcccataattgctttttgtgaggatgttgctgcctctggtgggtattggcttgcttcttgtgcagatgaaatttatgcagatgagtcctcaattattggttctattggtgttatatcagctggttttggttttactgaagcaatttcaaagcttggaattgaaagacgcgtttatacaagcggtgaatctaaaagcgtattagacccgtttaagaaggaaagtccaacagatgtggcgcgattaagaggcttacagaacgatattcacgaacattttatcgcacatgtgaaatcaagaagaggcaagaaattgaacgaagaggaaccattattcacagggttattttggactggtaaaaaagctaagaaattaggcttgatagatggaatcggtgccatgcaagatatattaatggagaagttcggtgataatgtaaagataaaacaaataactca

SEQ ID NO: 263804 - DNA, 103 bp, Unknown
  Bacterial polypeptide expressing nucleotide sequence isolated from the Sargasso Sea
atgaaagataaaatagaagaacacatgaataatcttattcctatggttgttgagcaatcaaaccgcggagaacgagcttatgatatttatccaagattataaa

SEQ ID NO: 263805 - DNA, 530 bp, Unknown
  Bacterial polypeptide expressing nucleotide sequence isolated from the Sargasso Sea
aatgttctcattttttaaaaaaaaaaagattgtaagtcatctcaaattatcgggagttataggaaatgttggaaggtttagacaaggaatagaatattcaagtgaggaagaaataataaaaaaagccttctcagttaagaaagcattagccgttgcgataacaattaattcaccaggtggatctccagtacagtcacatttgatatacaaactaataaaagagcaatctaagaaaacaaaaaaaaaagtaattatttttgctgaggatgtggcagcatctgggggatatcttatttcatgtgctggtgatgaaatttatgctaactcaagctcaatcataggatctattggagttatttctgcatcatttggttttaaaaatttaattgaaaaaattgggatagaaagaagagtttacaccgctggaaaaaacaaaagtactttagatccttttttggatgaaaaagaagaagatataaatcgtttaaaaaatatccaattagaaatacatcaagattttatagacgttg

SEQ ID NO: 263806 - DNA, 512 bp, Unknown
  Bacterial polypeptide expressing nucleotide sequence isolated from the Sargasso Sea
aatgagctttatatcctctaaaacaagaataaatatagttggcttgcgaggtgttattggagatctcggtagatttcaaaagggactgacacttgagaattgtgcctctattcttgataaagcttttagctttaaaaagccagctgtagtagtcattaagatcaactctcctggtggttcaccggttcaatccgagcttatacacaaccgtataagaaatttatcgaagaaaaacaatgtgaaggtgattacaatcgcagaggatgttgctgcctcaggaggttatatgctgatgtgtgcaggagatactttaatcgccaataaaagttcaatagtcggatcaataggagtaatcagtgcctcttttggattcaaaaaattaatagataaactaggcattaaaaggagagtttttacaaaaggagatagaaaatcgtttctagatccatttgaagaagtttctaaaaaagacatagataagctgatcaaagttcaggatagcatatttgaaa

SEQ ID NO: 263807 - DNA, 430 bp, Unknown
  Bacterial polypeptide expressing nucleotide sequence isolated from the Sargasso Sea
tttgagtgctttattaatttttttaataattattagttttatacttcatttttccaatgaacaggaaaaaaaacagttcgtaatgacagacggtttacctaactcagataatattatagctaagattaatttaaatggaccaatattcaacaataacagtaatgttttaggaaataatctttacgattacatcaatccttcgcaggtaaaatcttatttagaagaattgaaagaactacaaatcaaggctctaattataaacattaattctccaggtggaacagtaagtgctactgctgagttagaacaaattatttatgaatttaaaaaaaacacaaacactaaaatatatttttatacaaaggaaattttagcatctgggggatattgggttgcaaccacagccgacaaaatatttgcgtcgatatgg

SEQ ID NO: 263808 - DNA, 405 bp, Unknown
  Bacterial polypeptide expressing nucleotide sequence isolated from the Sargasso Sea
ttaacgccctgttcgctatctacgacaccagccaatacattcgcaatgacataacgaccatctgcctcggccaagcggcttccgctgcggcggttctactcgccgcaggcactccagggaaacggatggcgttaccccacgcacgagtactactccatcagccgtacggccaagcaatgggtcaggccaccgacattgaattggccgctcgagaaatcgacaggatgagagacctgctggaaggcatcctcgcacgtcacaccggacaagaccttgaacgaattcacacagacaccgaccgtgacttcattatggatgccgaggccgccaaagaatacggaattatcgacgaagtcatcgacagtagagaggtcgccgaagacggcccgatccgcgccgcttaac

SEQ ID NO: 263809 - DNA, 205 bp, Unknown
  Bacterial polypeptide expressing nucleotide sequence isolated from the Sargasso Sea
gatgccgggtttttggagtaggctgaagcagcggctaaacgaaatctacgtcgaacacacgggaaaagcgctcaaagatatcgaggaaaaccttgagcgagacaggttcatggacgttcacgaggcaaaggagtacggcctgatcgatgctgtgattacgaagcgcgcgcagaaagaggatacgaacgagtcttccgacaactag

SEQ ID NO: 263810 - DNA, 622 bp, Unknown
  Bacterial polypeptide expressing nucleotide sequence isolated from the Sargasso Sea
gatgctctctttttttaaaaagaaaaaaatagtcccacatattaaattgaatggcgttattggtaatgttggaaaatttaaacaaggcatagatttttctgctcaagaagaaattatatctaaggctttttcattaaaaaaagcgccgtgcgtagcaataacaataaattcacctggaggatctcctgttcaatcacatttaatttacaacttcataagacagaaagctaaaaaaaacaaaaaaaaagttatagttttcgccgaagatgtagcggcatctggaggttatttaattgcatgcgctggagatgaaatatatgcaaattctagttcaatcataggatcaataggagtcatttattcatcttttggttttaccgaattgattaaaaaaataggagttgaaagaagagttcacactgctggaaaaaataaaagtacactagatccttttctcgaagaaaaaaaagaggatattgaaagattaaaaaatattcaattagatttacacaaagaatttataaatgtggttgaaaaaagcagaggttctaaattaaaaaaatctgatgtggagttattttctggtgagttttggtctggtaaaaaagctagagaccttggt

SEQ ID NO: 263811 - DNA, 734 bp, Unknown
  Bacterial polypeptide expressing nucleotide sequence isolated from the Sargasso Sea
aaaatttaaacagggtatagacttttctggccaggaggagataattaaaaaagctttttcattaaaaaaagccaaatgtgttgcaattaccataaattcaccagggggatcacctgttcaatctcacctaatttatagttttattagacagcaagccaaaaaaaataataagcaagtaatagtatttgcagaggacgttgctgcatctggaggttatcttatagcatgtgctggggacgaaatttatgcaaattcaagttctattattggatccattggagttatttattcatcatttggttttacagaattaataaaaaaaattggtgttgagagaagagttcatacagctggtaaaaacaaaagtactctcgatccctttctcgaagaaaagaatgaagataaagagagacttaaaaatattcaattagacttacataaagattttattgatgttgtagaaaaaagtagaggtagtaaattaaaaaaatctgatatcgaacttttttctggtgaattttggtcaggaagtaaatcaaaaaccttaggattaatagatggaataggaaacgcacacgaaatattgaaagaaaaatatggagatgatgtaataattaaaaaatttgaaaagactaaaggatggttaagtcaaaagctttcttcctctaatcaagtagatcagtttgcaaatattttagaggagaggtcaatctggcaaagatatggtttctaaa

SEQ ID NO: 263812 - DNA, 298 bp, Unknown
  Bacterial polypeptide expressing nucleotide sequence isolated from the Sargasso Sea
ttgagaagaatattcgataaatttggtataccaatatttaggaagcctaaaccagtagttgcggttttgaggttttctggagttatagggcaggtaggtaatcccattagacaggggatatatgctgatggattcataaagcccatcgaacaggcttttaatctgaaaaaccttgtttgcgtagccgtacagataaactcaccaggaggtagtcctgtacaatcatctttaatattcaaacgtattcgaagtttagcagaagaaaaagatgtgcccgtgatagcattgcagaggatgc

SEQ ID NO: 263813 - DNA, 811 bp, Unknown
  Bacterial polypeptide expressing nucleotide sequence isolated from the Sargasso Sea
atgttctcattttttaaaaaaaaaaagattataagtcacctcaaattatccggagttattggaaatgttggaaggtttagacaaggaatagaatattcaagtgaggaagaaataataaaaaaggctttctcagttaagaaagcattagcagttgcgattacaattaattcaccaggtggatctccagtacagtcacatttgatatacaaactaataaaagagcaatctaaaaaaacaaaaaaaaaagtaattgtttttgctgaagatgtagcggcctctggcggttatcttatttcatgtgctggtgatgaaatttatgctaactcaagctcaatcataggatctatcggagttatttctgcatcatttggttttaaaaatttaattgaaaaaattggtattgaaagaagagtttacaccgctggaaaaaataaaagtactttagacccttttttggatgaaaaggacgaggatataaatcgtttaaaaaatatccaattagaaatacatcaagattttattgacgttgttgaggagagtagaaaagagaaactcaacaaaaactctggtattgaacttttctctggagaattttgggcaggaaaaaaagcaaaagaattaggactaatcgatggattgggaaatgcagagcaaatattaagagaaaaatatggagatgacttagaaattaagaaatttggaaaaagcaaaggatggctatcgaaaaagctatcatcttctgaaaattttactgataaagtaattagtttattagaagaaagatcaatctggcaaaggtatggtctctaaa

SEQ ID NO: 263814 - DNA, 631 bp, Unknown
  Bacterial polypeptide expressing nucleotide sequence isolated from the Sargasso Sea
atgttctctttttttaaaaagaaaaaaattgttgctcacttaaaattaagtggggttattggtaatgctggaaaatttaaacaaggtattgattttgcaggtcaagaagaactaattaaaaaggctttttcactgaaaaaagcggcatgtgttgctatatcaatcaattctccaggaggatcaccagttcaatctcatttaatctacagttttattagacaacaagcaaaaaaacacaaaaaaaaagttattgtattcgctgaagacgtagcagcttctggaggttatttgatttcttgtgctggggacgaaatttatgcaaattctagttcaataattggatctataggagtgatatattcttcttttggatttactgagttgataaaaaaaattggggttgaaagaagagttcatactgctggcaaaaacaaaagtacacttgatccatttttagaggaaaaaaacgaagatattgaaagattaaagaatattcaattggatcttcataaagactttatagatgttgttgaaaaaagtagagggtcaaaactaaacaaatctgatgtagaacatttttcaggtgagttttggtcaggtagtaaagcaaaaaatttaggattgatgacgg

SEQ ID NO: 263815 - DNA, 610 bp, Unknown
  Bacterial polypeptide expressing nucleotide sequence isolated from the Sargasso Sea
tatgttttcattttttaaaaaaaaaatcattgttccacatatcaggctagctggagtcattggatcagctggacgatttaggcaaggtatagatttttctggccaacaagagattattaaaaaagcattttcatttaaaaaagctaaaagtatagcaatatcaataaactcaccaggaggttcaccagttcaatcgcatttaattcatgattacatcagacaacttgcaaaaaaaaataataaaaaagtaattgtttttgcagaagatgttgcagcttcaggcggttatctaatcgcttgtgcaggtgatgaaatctatgcaaactctagttcaatagttggatcaatcggagttatatcagcatcttttgggttccaggatgctatcaaaagaataggagttcaaagaagagtatatactgctggaaaaaataaaagcactttggatcccttcaaagaggagaaacccgaagatattgagagaattaaaaaattacagttagaactacactcagacttcataaacttagtaaaaaaaagtcgtggatctaaacttaaagatccagataaaaataatacttttacaggagaattttggtcaggctcaact

SEQ ID NO: 263816 - DNA, 262 bp, Unknown
  Bacterial polypeptide expressing nucleotide sequence isolated from the Sargasso Sea
catgggtttcctttctatttttagaaagtctcaaaatgtttcggtaatcccacttaatggaattattgcacctaatatgggtagaagaaaaggattgaatttaaatgaaatcgacaaaaatattgaagatgccttttcagcaaataatttaaaagcagttgcattgcagataaattctcctggtggatccccagtccaatccgaaatgatatctaaacgcattagaagtttatcagagaaaaaaagtattccagttatagcc

SEQ ID NO: 263817 - DNA, 845 bp, Unknown
  Bacterial polypeptide expressing nucleotide sequence isolated from the Sargasso Sea
tttaagtagagattacattttgctattaaagcctgtgtttaagagatttttttcaaaagatatcaatatcccacttttaagattatcaggagtaattggtcaatctggtataactagatctggattaacaattactggaatagaaaaattaattgataaattattttcatataaaaaatctccagcagttgctttaattattaattctccgggaggatctccaactcaatcttctttaattgctgaaaaaataattaatttatccaaagaaaaaaataaaaaagtttatgcatttgttgaagatgtagcagcatctggtggttattggttagcttgtgctgcagatgaaatttatttagatttaaactcaatagttggatcaataggagttatttcgccaggatttggatttgttgatttaattaaaaaaattggcattgaaagaagagtttatacttcaggaaaaagcaagagctttcttgatccttttaaagaagaaaaaaaagaagatattgataggttaaaaaatattcaggagcaaattcatgaaaattttattgagtatgtaaaaaatagaagaggctcaaaactattaagttcttcagaagatgaaatattttcaggattattttgggtaggaaaaaaaggtgttgagttagggttagctgatggaattggctcaattaatgaaattattaaagaaaaatttggaaaaaaagctaaaattaaaattattgatcaaaaaaaatcttttttacaaaaacgactttcatcttctataaataacaatgatatttttaatagactggaagaaatgataatgtggtctagatatggtttataat

SEQ ID NO: 263818 - DNA, 396 bp, Unknown
  Bacterial polypeptide expressing nucleotide sequence isolated from the Sargasso Sea
gatgcaccctttacgaaaaagttatcagtctattgtaacgcggacgacgacccattctgtaaaagggccatatccagtctttgataatttaccggcattatttagtgccaacccagttattaccagaacagctacatatatttatgcgtgtgcagaatggatagatgatgcctttcaaggaaaggaattaatgttagatatctattcgagactactaaacccaacatccgtatcactagccaatcatatagtcgatatttcaacaggcccagatgcaggcagttatctggcttggaattttaattctgggatggcagcgatagatgcgattttgagtcatttggtgggctatcaagatattgtattatgtagccgaaatgtatacggcggaacgta

SEQ ID NO: 263819 - DNA, 900 bp, Unknown
  Bacterial polypeptide expressing nucleotide sequence isolated from the Sargasso Sea
cattgtttactctaatggtttgtctcagattggatactatttagcttcttctgcggattccatttttataaatggtttatcaaatattgaatggaaaggtcttggtgcgcagttaatgtattttaaatcaatgcttgagaagataggtgttagggctgaaccaatcagggttggtaagtttaaaagtgctatagaaccatttatcatggattcaatgagctttgaaaatcaatatcaattaactcaaatgcttaaagatctttggagtaatattctaactgaggtaagtattgaaagaaatgtttcttctgaaaaattagataaaattgcagatgaattaggttatttacttcctaatgaggcgcttaaacacggattaattgatgggattaaatatgaagatgaaatcacctcttatttaaatcaaatggttggagggagctgtaatcttatctcaactcaaaagtataataaatcatataaaaactacactagcggtacatctaaaatagtagtagtaaatgctgaaggagcaatagtcgatgctaatactgaatcagacatttcaagtgtcaagtattgtaagttatttgatgacatcttaaaagataataacatcaaagctgttgtattaagaataaattctccaggaggaagtgcattagcctccgaaaaattatggaggaaactaaaattaatcagcgctaaactacctctcatcgtgagtatgggtaattatgcggcttctggaggttattatatggcatgtgctggcgatactattcttgccgagaaaaatacaataaccggatctataggtgtatttggtcttatgtttaatgtttcaaagctgaataataagataggagtcagagtcgaaaaagtaaaaaccaatcaaat

SEQ ID NO: 263820 - DNA, 502 bp, Unknown
  Bacterial polypeptide expressing nucleotide sequence isolated from the Sargasso Sea
gatggaagcggattatcttattgaccgccgtcggttaaaaaggcggatcaccttctggcgaacagctgccattattttaattattgcagctgttgcggttggggcccaaaaatacgcagaccccaaagctggtaactatatagcccgattaaagatcacaaattttattcataacgatattgaacgcctagccgcaatcgaaaaagttcgttcggacgagaatgtgaaagcattaattgttcgaataaattccccagggggcactgtcgtcgggggggaggctctgtatgaggcgctaaatcgggtgcgaaaacaaaaacctgttattgccattatggatgaattggcaacctcagcgggctatatggtagcgattgcatctgatcgcgtaattgctcatgctgggactattactggttctattggtgtactcatgcagaccgcggaagtaacggatttgctttacaagcttggaattaaggttgaggcaataaaaagtagc

SEQ ID NO: 263821 - DNA, 529 bp, Unknown
  Bacterial polypeptide expressing nucleotide sequence isolated from the Sargasso Sea
aatgagtttcctttcttttattagaaagtcacaaattgtttcaaccatagccttaagtggcataattgctccaaatatgggcagaagaaaaggcttaaatttatatgaacttgataaagttattgagcaagctttttcagttaaaaatttgaaagctgtagctttacagataaactctccaggtggatcgcctgtccaatctgagatgatatccaagcgtataagagatttatctgaaaacaaaaatatacctgtattagcatttgttgaggatgtggctgcttctggtggttattggcttgcatgcgcggctgatgagatttttgcaagtaaggcatcaataattggatctattggtgttgtatcatctggctttgggtttgataaagctatcaaaaaaattggtgtagatcgtcgtctgtacacatctggagaaaataaagcaattttagacccatttttacctgaaaacaaagatgacattaaaaggttaaaagatatacaaaaagaattgcataatcagtttata

SEQ ID NO: 263822 - DNA, 754 bp, Unknown
  Bacterial polypeptide expressing nucleotide sequence isolated from the Sargasso Sea
cttaaaggaatgattgcatctggaagtagagcaccattgaatatggataatttaaatggacttttctcaaagataatgaaaatgaaatttgatgcactatcaattgtcattaactctcctggtggttctccagtgcaatcgtctttaattgcacaaaaaataagagaaatttcagataagaaaaaagtgaaatgttattgttttgttgaggatgttgctgcatctggtggttattggcttgcatgtgcagcagatgagttatatgcagatgtaaattcaattgttggttcaataggtgtcatatcaggtggttttggatttactgatttaattaaaaaaattggagtagagagaaggatatttacagctggagagaacaaaagctttttagatccatttttaaaagttaataaaaaagatgaagaaaaattgaaaaaacttcaaaagttaatacatcaaaattttattgaatgggtttccttgagaagaaaaaagaaacttagcgaaaaaaataaaaaaattatattctctggctccttttggttagctaatgaggcaaaagacttaggtttaatagatggtattgcatctgagtcatctttttttaaaagtaaatttggtgaaaagacaaaaattaaaaaaataaaacaaccaaagtctttaaaacaaaagctaggtctaggtattaactctttaaatagtgaagattttattactaaattaaaagaggagcttctttttaacaaatttggta

SEQ ID NO: 263823 - DNA, 538 bp, Unknown
  Bacterial polypeptide expressing nucleotide sequence isolated from the Sargasso Sea
atgaaaaaaatttttaattttattttgaaactttttggtaaaggtaaacctattgtacctgttttaagatttgaaggtattattggcactggtggtggtattggtaagggtaaaattaatgctgaaaatctagaaacaaatatcaaaaaagctttctctgagagcaatccaagtgctgtagctataataataaattcaccgggtggttcgccagttcagtcctctctaatttatcaaagagtgaggtatctagctgataaaaaagatgtaccagttttagtttttatagaagatgtggcagcatctggaggttattggctttcatgtataggtgatgaaatctttgcagacaaatcttcaattgtaggttcaattggcgtaatttctgcttcatttggttttacggaagcaattaataaattaggggttgaaaggagagtatatactactggcaaatcaaaagggtcattagatccatttaaacctgaaaagaaagaagacgtacaaatgcttaaaaatattatgaatgatacccaga

SEQ ID NO: 263824 - DNA, 259 bp, Unknown
  Bacterial polypeptide expressing nucleotide sequence isolated from the Sargasso Sea
atgtttaaaaggtttttttcaaagagtactacaatacctgttctacgtttatctggcattatatcatcacagtcaggcttaacaggctctggcttagctatcaacaatttagaaaagttaattgataagttatttgctgataaaaaatctcctgttgtaggtttggtcattaattcacctggaggttctccaacacaatcctctttaatagcaaaaaggatcattgatctagcaaaggaaaaaaacaaaaaagtctagc

SEQ ID NO: 263825 - DNA, 694 bp, Unknown
  Bacterial polypeptide expressing nucleotide sequence isolated from the Sargasso Sea
atgattgtcaactatccgccgcgcgtcatggtcgtgacgatgtcgggcatcatcgcgcacgagagcgagctcagcgccggtatgagcctccaggcgctggaccactcactgctgagcggcgacggggcgatcgaagcggcgcggcgcaacggcgagctgatcaacctcgatcggttcgaggaggtgctgtcgcgggccttccgcgcgacccgctgccgggcggtcgcgctggtgatcaactcgcccgggggcagcccggcgcagtcgtcgctcctgtacaaccggctgcgcgagctgcggcagcgccacaagaagaccaagctgatcacgtacgtgcaggcgagcgggctctcgccgctcccaaaattggcactgcgtcccggcctcccgcgccaccacctccaccacctccaccacctgctccgcccccacctcccatcacaagtcacgcccaccgcctccgccacctcctcggagcaggacagcgccgcgtcgggcggctactacattgcgtgcgcggccgacgagatcgtgtgcgacaccaactcgctcgtcggctccatcggcgtcgtctcgcgcggcttcggatacgtgcgcgccctcaagaagcaggcgcgagctcccccgacctccaccaatctcaccccgatctccgcccgatctccgcccgatcttgctccgatctccgcccgat

SEQ ID NO: 263826 - DNA, 788 bp, Unknown
  Bacterial polypeptide expressing nucleotide sequence isolated from the Sargasso Sea
tgcggtgctgcagctttctggcgtcatcggcgaagcgggaatgatgcggcgtggtggattaaacctcgctgatcttgaggataacattgagcaggcttttgacattccgaggcttaaagccgtagctatttgtattaattcgcccggcgggtcacccgtgcaatctgcactgattgccggacgtatacgtgaattggccaaagaaaagaaagtacgcgtttacgcattttgtgacgatgtggcggcttccggtggttattggctcgcatgcgcggcagatgaaatttatgcaaatggagcttccatagttggctcaatcggtgttatttcggctagtttcggatttcctgagttgatgaaacgattgggggtggagcggcgcgtttatacggcaggggagaataagcgtcgacttgacccttttttgcctgaaaataggaaggacgtgacccatctgaaatcgttgcaaaaggatttgcacgcacagtttaaatcctatgtacaggagcggcgagggaaacgcctgaaagggccagataaggttctatttagtggtgatttttggagcggcacaaagggtttagagcttggtttggtggatggtcttggcgattttcgttccgttatgcgcaagaagtttggcaatgatgtccgattttatccaattgaagaaaaaaagggattcctggccaagcgtctgggtatgtcggtcaagtcagagcattgggctgatgatttggtaggtgctatcgaagaacgtgctttttggaatcgttacggactttaga

SEQ ID NO: 263827 - DNA, 808 bp, Unknown
  Bacterial polypeptide expressing nucleotide sequence isolated from the Sargasso Sea
tatgttctctttttttaaaaagaaaaaaattgtttcccatttaaagttaagtggagtgattggtaatgctggaaaatttaaacagggtattgacttcgcaggtcaagaagaagtaataaaaaaggccttttctttgaaaaaagctgtatgtgtagcaatatcaattaattcaccgggaggatcgccggttcaatctcatttgatttatagttttattaggcagcaggcaaaaaaaacaaaaaaaaaagtgattgtatttgcagaagatgttgccgcctcagggggttatctgatttcttgtgctggagacgaaatttatgcaaattcaagctcaataattggatctataggagtaatatattcttctttcggtttcacagatttgataaaaaaaattggagttgaaagaagagtgcataccgcgggtaaaaataaaagtacgcttgatccatttttagaggaaaagaatgaggatatagaaagattaaaaaatattcaattggatttacataaagactttattgatgttgttgaagaaagcagaggatcaaaattaaataaatctgaagtagaacttttttcaggtgagttttggtcaggaagtaaagcaaaaaacttaggactgattgatggattaggtaatgcacatgaaatattaaaagagaaatttggggaggacgttacaattaaaaaatttgaaaaatcaaaaggatggttaagtcaaaaactatcttcatctaacaatcaagtagatcaaatagcaaatattttagatgaaagatcaatttggcagagatatggtttctaa

SEQ ID NO: 263828 - DNA, 382 bp, Unknown
  Bacterial polypeptide expressing nucleotide sequence isolated from the Sargasso Sea
atgttctcattttttaaaaagaaaaaaattgttgctcacctaaaattaagtggagttattggtaacgttggaaaatttaaacaaggtatcgattttgcaggtcaagaagaactaattaaaaaggctttttctctgaaaaaagcgacatgtgttgctatatcaattaattccccaggagggtcaccagttcaatctcatttaatatacagttttattagacaacaagcaaaaaaaaataaaaaaaaagttattgtatttgctgaggatgttgcagcttcaggaggatatttgatttcttgttctggtgacgaaatttatgcaaattcaagttcaataatatggatctataggggtcatatactcttcttttggatttactgag

SEQ ID NO: 263829 - DNA, 721 bp, Unknown
  Bacterial polypeptide expressing nucleotide sequence isolated from the Sargasso Sea
tttggtagttaaaataaattctcctgggggaactgttacagcaacctcagaattagaaacattaattaccaacttcaaaaaaaagacaaatactgaagtttacttttatacaaatgaaattttaacctcaggtggatattggatagctactacagcagataagatttttgctaattatggttcaattattggtagcattggtgttagtgggccgagttggtattattatgataaaccaatttcaatttcttcaggaatacttggtcaaagtatagaaacagaaaatggaatacaaatctttgatcaaatttctggtagctctaaagatttatataatccatttagaaaaccaactgcaaaagaacttgatcatcttaagactttaattaatgaaatttatgatgattttttatttaaagtatcaaatagcagaaaaatagaattggttactcttaaaaaagaaattggtgcattaatatttactagtaaacaagcaaaagataattatttaatagatgatattatgagttttgaaaaattaaaaaagaaaattataattgataacaattataaaaattacaaaattatacatagtaaatctccaaataatttattaggtaattatttggattcatattttaatagaagtcatttaaaaatttgtaataagttaaattctaactttgtatcaatttttccaatttttttaaaaaattgctaa

SEQ ID NO: 263830 - DNA, 262 bp, Unknown
  Bacterial polypeptide expressing nucleotide sequence isolated from the Sargasso Sea
atgttttcaatttttaaaaaaaaaatcattattcctcatgtcagactagctggagtcattggatcagctggacgatttaggcaaggcatagatttttctggtcaacaagatattattaaaaaagcattttcatttaaaaaggctaaaagtatagcaatatcaataaattcaccaggaggttctccagttcaatcgcatttaattcacgattacataagacaacttgcaaaaaaaaataacaaaaaagtaattgttttgcaga

SEQ ID NO: 263831 - DNA, 487 bp, Unknown
  Bacterial polypeptide expressing nucleotide sequence isolated from the Sargasso Sea
atggccgaccaaccgaattccccggattcctcctcccgtcccgacagccgtgaaccgaactgggagcgtgcggcgctcgagcggatcgcgctcgcggccgtcaaggagcagcgcgcggcgcgacgctggaagatcttcttccgcttcgcgttcctcgccgtgttcgtgctgttcgcgttcgcgctgatcgatttttcgagcgattcgaagttttcgtcgagcgggcggcatacggcgctcgtgacgatcgacggcgagatcgcggccggcgtgaacgcaaatgccgacgacatcaacaccgcgctcgacgccgcgttcgaagacgacggcacggccggtgtcgtgctgcggatcaacagtccgggcggcagcccggtgcaggccgggatggtctacgacgagatccgccggctgcgcgcgaagcatccggacaagccgctgtatgtcgtcgtgaccgacatgtgcgcatcgggcggctattacatcg

SEQ ID NO: 263832 - DNA, 739 bp, Unknown
  Bacterial polypeptide expressing nucleotide sequence isolated from the Sargasso Sea
gatgttcagtccaaacaaaacaataatctcaatcgatctcaaaggaatgattgcatctggaagtagagcgccattgaatatggataatttaaatggacttttctcaaaagtaatgaaaatgaaatttgatgcactatcaattatcattaactctcctggtggttccccagtgcaatcatctttaattgcacaaaaaataagagaaatttcagataagaaaaaagtgaaatgttattgttttgttgaagatgttgctgcatcaggaggttattggcttgcatgtgcagcagatgaattatatgcagatgtaaattctattgttggttcaataggtgttatatcaggtggttttggatttactgatcttattaaaaaaattggagtagagagaaggatatttactgctggagagaacaaaagctttttagatccatttttaaaaattaataaaaaagatgaagaaaaattgaaaaaacttcaaaagttaatacatcaaaattttattgattgggtgtcctcgagaagaaaaaagaaaattagcgaaaaaaataaaaaattcatattctctggttccttttggttagctaatgaggcaaaagacttaggtttaattgatggtattacatctgagtcatctttttttaaaagtaaatttggtgaaaagaccaaaattaaaaaaataaaacaaccaaagtctctaaaacaaaagctaggtctaggcattaactctctaaatagt

SEQ ID NO: 263833 - DNA, 454 bp, Unknown
  Bacterial polypeptide expressing nucleotide sequence isolated from the Sargasso Sea
tatgttctctttttttaaaaagaaaaaaatagtagctcatctaaaactgagtggtgtgattggaaatgcaggaaaatttaaacagggtatagacttttctggccaggaggagataattaaaaaagctttttcattaaaaaaagccaaatgtgttgcaattaccataaattctccagggggatcacctgttcaatctcacctaatttatagttttattagacagcaagccaaaaaaaataataagcaagtaatagtatttgcagaggatgttgctgcatctggaggttatcttatagcatgtgctggggacgaaatttatgcaaattcaagttctattatcggatccatcggagttatttattcatcatttggttttacagaattaataaaaaaaattggtgttgagagaagagttaatacagctggtaaaaataaaagtactctcgatcccttt

SEQ ID NO: 263834 - DNA, 298 bp, Unknown
  Bacterial polypeptide expressing nucleotide sequence isolated from the Sargasso Sea
tatgttctctttttttaaaaagaaaaaaatagtagctcacctaaagcttagtggcgtgataggaaatgcaggaaaatttaaacaagggatagattttgctggtcaggaggagataattaaaaaagctttttcgttaaaaaaagccaaatgtgttgcaattacaatcaattcaccaggtggatcacctgttcaatctcatctaatttatagttttattcgagaacaagcaaaaaaaaataacaaaaaagtaatagtttttgctgaggatgttgcagcgtctggaggctatcttatagca

SEQ ID NO: 263835 - DNA, 385 bp, Unknown
  Bacterial polypeptide expressing nucleotide sequence isolated from the Sargasso Sea
aatgatatttttcagtgttttttttagaactcttggttttttgagtgcattattaatttttataataattattaatttattacttcatttttctaatgaactagaaaaaaaacaatttgtaatgactgaaggtatacctagttcaaataatattatagctaatattaatttaaatgggccaatattcaataataacaacaatgttttaggaaataatctttacgattacatcaatcccttgcaagtaaaatcttatttagaagagttaaaagaactagaaatcgaggctctaattataaacattaattctccaggtggaacagtaagtgctactgctgagttagaacaaattatttatgaatttaaagaacaaacaaatactaaa

SEQ ID NO: 263836 - DNA, 808 bp, Unknown
  Bacterial polypeptide expressing nucleotide sequence isolated from the Sargasso Sea
atgttctcttttttcaaaaaaaaaaaaattattcctcatataagattaactggtgtcataggaagcgtaggaaaatttaaacaaggaattgattttaatggtcaagaggaaattattaaaaaagcctttgcaataaaaaagtcacctgcagttgctatatcaattaattcccctgggggatcaccagtacaatcccatttaatttatagtttcattagaagacttgctaaaaaagaaaaaaagaaagttattgtttttgctgaggatgttgctgcatcaggcggctatcttatagcctgtgctggtgatgaaatttatgccaattcaagttctataattggatctataggagttatttattcatcattcggatttaaagatttaattcaaaaaattggagtacaaagaagagtttatacagctggaaagaataaaagcactttagatccatttatggatgaaaaaaaagaggatattgatagacttaaaaatattcagttggatcttcataaagattttataaatgttgttgaagctagcagaggatcaaaactaaaaaaggatttaggaatagaattattttctggggagttttggtctggtagcagatcaaaagaattaggattaattgacggaataggtgacgcaaaccacattctaaaagaaatttatggtgaagatattgtaattaaaaaatttgagaagagcaaaggatggcttgctaaaagattatcatcagaaaattatattgatagtttgtcaaatgtaatcgaagaaaaatctatttggcaaaggtatggcttctaaa

SEQ ID NO: 263837 - DNA, 808 bp, Unknown
  Bacterial polypeptide expressing nucleotide sequence isolated from the Sargasso Sea
aatgatctcatttttcaaaaaaaaaaaaattgtacctttaataagacttagcggagtaataggaaacgtcggaaaatttaaacaaggtattgacttaactggacaagaagaattaattaaaaaagcttttgctgttaaaaaatctccagctgttgccatctcaattaattctccaggtggatctccagtgcaatcacatcttgttcatgattttataagacaacaagcaaaaaaaaataaaaagaaagttattatttttgctgaggatgttgcagcttcaggaggttacttgatttcttgtgcaggtgatgagatttatgcaaatcaaagttcaataattggatccatcggtgtaatttattcatcatttggttttaaagaattgatagaaaaaattggtattcaaagaagagtctatactgctggaaaaaataagagcactttagacccttttttagaagagaagaaagaggatatagagcgacttaaaaatattcaacttgatttacataagaattttataaaagtagtagaaaacagcaggtctacaaagctaaaaaaagacaatggaatagaattatttagcggggaattttggtctggaaaaaaagctttagaattaggtttaattgacggtattgggaattcaaatgaagttttgagagaaaaatatggtgatgatattattattaaaaactttgaaaaaagcaaaggttggttagccagaaaactatcttcagagtctcaagtagaaatgttaattaattctatagaagaaaagtctatctggcaaaaatatggtttctaa

SEQ ID NO: 263838 - DNA, 782 bp, Unknown
  Bacterial polypeptide expressing nucleotide sequence isolated from the Sargasso Sea
aatgttatctttttttaaaaaaaaaaaaatcatacctcacatcagattaagtggtgtaataggaaatgttggaaaatttaaacaaggtattgattttgcagggcaagaagaaataattaaaaaagctttctcaattaaaaaagcacctgtagtagctatttctattaattcaccaggaggctctcctgttcaatcgcatctaatacatgattttattagatctcaagcgaaaaaaaataaaaaaaaagtaataatttttgcagaagatgttgcagcatctggaggatatttaattgcatgtgccggagatgaaatttatgcaaatcaaagttctatagtaggatcaataggtgtgatttattcatcttttggttttaaagatttaataaataaaataggtgttcaaagaagagtttatactgcaggtaagaataaaagcactctcgatccttttatggatgaaaaaaaagaagatattgaaagattaaaaactattcagctagatcttcataaagattttattgatgttgtagaaaaaagcagatcttcaaagttaaaaaaagatagtggaatagaattattctcaggagaattttggtcaggtagaaaagctaaagaattaggattagtagacggtataggaaatgtagatcaaattttgagagaaaagtatggagaaaaaataattattaaaaaatttgagaaagcaaaaggctggctagctagaaaattatcttcagaaaatcacgcagatcaagtaattagtattttagaagaaagat

SEQ ID NO: 263839 - DNA, 796 bp, Unknown
  Bacterial polypeptide expressing nucleotide sequence isolated from the Sargasso Sea
aatgtttagtccacaaaaaacaatagtttcaattgacctaaagggaatgattgcatctggaagtagagccccactgaatatggataatttaaacggtcttttttcaaaattaatgaaaatgaaatttaatgcactttcgattgttattaactcacctggaggttcgcctgtacaatcatcattgatagctcaaaaaataagagaaatttcagctaagaaaaaagttaaatgctactgttttgttgaagatgttgccgcttctggagggtattggcttgcatgtgccgccgatgaaatttatgcagatattaattcaattgttggttcaataggggttatttctggtgggtttggatttactgatttaataaaaaaaattggagtagagagaagaatatttactgcaggggagaataaaagttttttagatccatttcaaaaagttaataaaaaagatgaagataaattaattaaacttcaaaaattaatacatcaaaattttattgattgggtttcttcaagaagaaagaagaaacttaacgataaaaataaaaaaataatattttcaggatctttttggttagcaaatgaagcaaaagatttgggtttaattgatggaattacttcagagtcggctttttttaaaagtaaatttggtgaaaagacaaaaataaagaaaatcaaacaaccaaagtccttaaaacaaaagttaggacttggtattaattcttttaatagtgaagatttaattactaaagcaaaagaagagcttctttttaataaatttggtatctga

SEQ ID NO: 263840 - DNA, 745 bp, Unknown
  Bacterial polypeptide expressing nucleotide sequence isolated from the Sargasso Sea
gtaggaaagtttaaacaaggaatagatttttcaagccaagaagaaattttgaaaaaagcttttgaaataaaaaaagcaccagctgtggctatttcaataaattcccctggaggatctccagtacaatctcatctaattcatgacttcattagatatttggcaaaaaaaaataagaaaaaagttattatatttgctgaagatgtagctgcctcaggtggttatttaattgcttgttcgggtgatgagatttatgcaaatcaaagctcaatagttggatcaattggtgtaatttattcttcttttggatttaaagatttaattcaaaaaattggagttcaaagaagagtttatactgctggaaaaaataaaagtaccctagatccttttttggatgaaaaagcagaagacattgagagattaaaaaatattcagcttgaacttcataaagacttcatacaagttgtagagaaaagcaggtcttctaaattaaaaaaagagactggtatagaattattttcaggagaattttggtcaggtcgaaaagcaaaagaactaggattagtagatggaataggaaatgcaaatcaaatattaagacaaaaatttggagatgaagtaattattaaaaaatttgaaaaaccaaaagggtggctagccaggaagttatcagcatcagaaaatcatgcagacaaggtaataagtattttagaagaaagatctatctggcaaagatatggtttctaaa

SEQ ID NO: 263841 - DNA, 583 bp, Unknown
  Bacterial polypeptide expressing nucleotide sequence isolated from the Sargasso Sea
tatgttttggattttcaaaaaaaagaaagtagtaccccatgtgaggttaacaggtattattggatctgctggtagatttaaacaaggaatggatctctctagtcagcaagaaattttaaaaaaagctttttcttttaaaaaacccaaacatgttgctatttctataaattctccaggagggtctccagtgcagtctcatttaatttatagttatataagacaattagctgatgaaaataaaactaaagttataatttttgcggaggatgtggcagcttccggcggttattttattgcatgcgcaggagatgaaatttacgcaaactcaagttcaattattggttcaataggagtaattactgcttcttttggatttaaagagatgataaaaaaaattggtgttgaaagaagaatttatactgctggaaaaaataaaagcacattagatccatttgttgatgaaaaagaagaagatgttcaaagattaaaaaaacttcaattagaattacatggagattttataaaaattgttgaaaaaagcagaggaaaaaaattaaaagatcctgaaataaataatatattt

SEQ ID NO: 263842 - DNA, 808 bp, Unknown
  Bacterial polypeptide expressing nucleotide sequence isolated from the Sargasso Sea
aatgctctctttttttaaaaagaaaaaaattattccacatattaagctagttggagttattgggaatgttgggaaatttaaacaaggtatagatttttctggtcaagaagacattattacaaaagcattttctcttaaaaaagcaccatgtgtcgctataacaataaactctcccggaggttctcctgttcaatcacatttaatttacagcttaattagacaacaggcaaaaaaaaataaaaaaaaagtaatagtttttgccgaagatgtagcagcatcaggtggatatctaatagcttgtgctggagatgaaatttatgcgaactcaagttcaataataggctcaataggagttatctactcttcttttggttttacagaattgataaaaaagataggtgttgagagaagagtgcatactgctgggaaaaataaaagtacattagacccatttctagatgaaaaaaaggaagacatcgaaagattaaaaaatatacaattagatctacataaagatttcatagaggtggtcgaaaaaagcaggtcatcaaaacttaaaaaatctgaagtagaattattttcaggtgaattttggtcaggtagaaaagcaaaagatcttggtttgatagatgatataggaaatgcaaatcagatattaagagaaaaatttggagaagatgttgttattaaaaaatttgaaaaatcaaaaagctggcttagtaaaaaattgtcgtcttcaaatgatcatgtcgatcaattagcaaatatattagaggaaaaatcagtttggcaaaaatatggcctctaa

SEQ ID NO: 263843 - DNA, 836 bp, Unknown
  Bacterial polypeptide expressing nucleotide sequence isolated from the Sargasso Sea
tatgagtgatgattctttagctaaaattgtagattcgcttgttgaggagcggacatctgagagaaaattcaaacttttgagccgagtattttttgtaatacttctattaataatattctatctatctttttccaacccaatggatgataatatttatcaaagtgaacacacggctgtaattaaattggatggggttatagcaaacaacggtaccattaataccgaaacaacccttgaactaataaggaaggcatttaataacgatttatgtaaaaatatcatattaaaaataaatagtcctggaggtagtgctacccaatcaaagattatttatgacgaaattttaaagctgaaaaaaaatgctaacaaacagattttctctgtgattgaggatgttggtgcatcaggaggctactacatagcggcaagtgcagataaaatatttgctagtaattcaagtatcgttggatctataggtgtccgaatagatagcttaaattttaaatcacttttcaataaacttggaataaaatcccagactatctcatccggaaaggataagttaatcttagatccttttcaagacatgacagaggagcataaaacccaccttaccaaactcgcaaatagtatacacaacgaatttatatctgacattaagatttcaagagataatttaatcaaggatgatattgcattctctggtctattttggacaggcaatgaggctctgggtattggtttaattgatcagatatcctctctttatgatgttaatagagattattttaataattcaaagcttataacttacaataagaaaccatcaatatttg

SEQ ID NO: 263844 - DNA, 1852 bp, Unknown
  Bacterial polypeptide expressing nucleotide sequence isolated from the Sargasso Sea
tatggcaaaaactaagaaaaaaaatgatatcggagcgttttctaggctaggaaatttcctaggtaatatttggtattttataagagttggaagagatttcttttggaaagcaatacgctttaccttagcaacttcaatctttttatttgtcgttgctgcgattcttataagtattttagatccactttttgataatgagactaagccaaaagcagatggaaaggttgtagtttttagtccagacggaatagttgttgatcaacaaattcccaaatcacaagatcaattcacttcattcttgggcgatgaagaagtcattacatatgaatttaaacatctagtagatttttttgagaagtttaaagaagacgaaaaggtttcgggtatgatttttgatccatctggactacaaattagctctgcttatgcaatacctttggctaaaaagataaaagaagctgctcaggcaggcaaagaaataataattagagctgagtcactatcaatttatggagatacggcttatttgctttcatccggtgcaactgaaataagcgctagcaaatactctgcatttgcactcgatggctttacgtctacaagattgtatcaaaaggattttttcgaaaaatttcttttaactccgagagtttttacagcaggagattggaagacagggcctgaagactggacaagatcaaatatgagccaggagcaaaaggataattcatactacatagacagattttggaatgcgtataaaaattttgttaaagaaacaagagatgtagatctccaatggtatgcagatgagtcatataaagatttaatagcgggaaatgtttcttttgaaaatgcaaatcttgagtggaatatcattgattatcaagaggaagaggatgattttaatgatagaatgctggaaaagtttggggctgcagaagatgacgaagacgagctaaatgcaatttactatagggattatttgaagacatttgaaaaggcaaaaaaatctaaatcaaaaaatgtaatcaaggtaattactgtagaaggtgctattactacaggaccggtacagctaggtattgctggctctgatgggctagtaaaaatgttaaaagctgctcatgaaaatgaaaatacaaaagcaattgtgttaagagtaaattcacccggtggctcagttgttgcatctgaatatataaggtgggaaattgaaaaagcacagaataaggggattccaattgtagtttcaatgggaagtttggctgcttctggtggctactgggtttcatcgatggcagataaaatctacgcagaagaaaatactattacaggatctataggtgtttatggacgtcttttatccttggaaaagattcttgagtgggcaggattaaattatgattcaaataaaactactgaatttggagacttcaatcctgtggcagaagactggcctgaagaaataatagaaacttttcaagcaaatattgatgaaacatatatgaacttcacaacacaaacttcaaaagatagagatataccactagaaaaagttttagagattgctagaggaagagtgtggtatggagaagatgcagttgaaataggtctcgtagatgaaataggcacccttgaagaagctattaattttacagcagagtctatattagaggttgatgactttaaagtggactatgtaaagcctgcaaaaaatagcaacagcttaaattttgcaatctcactaactgaggctatatctgaattcgtgaatggaaaagagttaagtaaaggtaaaatgagaaaagaaattaatgtcctttgcagagaatgttctcttattgattaa

SEQ ID NO: 263845 - DNA, 1855 bp, Unknown
  Bacterial polypeptide expressing nucleotide sequence isolated from the Sargasso Sea
atggtaaagaaaaagaaagaaacaaatgaaggttttcttcataaagtcggcaaatttttagttgctgcatggggttatatagtcgtaggaagagactacttctggaaagcggtcagatttactttagctacaggtatatttttatatatagcaataagtattgttataagtttgatcagccctttatggcaggaatcaaatgaaattgatcctacaggaaaagtagtggtatttagccctcaaggggttgttgttgatcaaccgcctactcctcctccagcgcaatggtgggaagatatagatggtgtaataccttcacagaacggaacaatctactacccatatcaagatatgcttgaatactttgaagatttcaagaacgatgaaagagtcgatgctatgatttttgacccatcaggtctaggcgtaagtattgtttatgcactaccaattgctaagaaaatgaaggaagcagttgatgcaggaaaagagatagttgtcagaagtgatttcttaactgatgggacttatcttttagcttcgacagctactgaaattagtattcctacatatgctggaatatcgattaatggttttggtggagctaggcaatatctaaaaaacttctttgaaaagtttctaataactccaagaatatttgccgctggtgactttaaaactgggcccgagccttataccagtgacagaatgagtgatgaagctaaagcaaatttagccttctatgaccctctttggaaaaaatggaaagattttgtttatgaaaatagagaaatagatttgcaatggcttgctgatgaatcttacaaacagatcattgatggttcagttgatccgcttgaatctcctttagtttggggcgctgttgatgtaatcgaagaatccgatgcttttgatgatcgaatgaaagaaaaatttggtactgctgaagacgatgatgaagcattaaatgcagtttattaccgtagctatttagcaagttttgaagaagatatgccatcaaaaagcaaaaatgagattaaagttgtgactgttgaaggcacaattatgggtggtccagtagtttatggtcaagctgggtcagatggcatagttgagatgcttaaagaagctcacgaagacgaaaatacaaaagcaattgttttgagagttaattctccaggtggttcagttgttgattctgattacatgagatgggaaattgaaaaagctcaagaaaaagggatacctgttgttgtttcaatgggaactttagctgcatctggtgggtattggatttcttctctggctgacaagatttatgctgaaccagataccattacaggatctattggtgtctatggaactttattcagttttgaaaaaatatttgattggatgggcataaattatgatggttattccacaactaagtggggtgcttttgatcttactgccatggactggccagaagaatttgaaaatttagtaagggctggaatttattcaacctacgacaaatttacttctcaagtttctaatgacagaggcataccaattgagagagtaagggaaatagccaaaggtagagtctattcaggagaaatggcacttgaaatagatcttgtagacgaactaggaacacttgatgatgctattaaatatgtggctgaaagtgcagaacttgaagactacaaggttgaacatgtaattcctccagcgccagctgcaaattatatgtttcaatttgattttattaagaacttatttgatacaaaacaaaataatcacttcactgcaaaagatgtatataaaaatatcagaatttactgctttgaatgtgaagtagtcgactaag

SEQ ID NO: 263846 - DNA, 769 bp, Unknown
  Bacterial polypeptide expressing nucleotide sequence isolated from the Sargasso Sea
ttgtccggtgttataggatctgcaggtagatttaaacaaggaattgacttttcaggtcagcaagaaattataaaaaaagccttttcatttaaaaaatcaaaaaacatagcaatatcaattaactccccaggaggctcgcctgtccaatcccatttaattcatgattacataagacagttggcaaaaaaaaatgaaaaaaaagttatagtttttgctgaagatgttgcggcatccggtggatacttaatagcttgtgcaggagacgaaatatatgcaaattcaagctctatagttggttcaattggcgttatctctgcttcatttggttttcaagatgctatcaaaaaaattggcgttcaaagaagagtttatactgctggaaaaaacaaaagcaccttagatccttttaaagaagaaaaagaagaagatattgaaagaataaaaaaattacaactagaacttcattcagattttattgaggttgtaaaaaaaagcagagggttaaaacttaaagatccagaaaaaaacaatacttttacaggggaattttggtcaggcactgcatcaatgaagttaggtttaatagatggcataggtaatgcagaacaaattttaagagaaaaatttggagaagacatagatataaaaaaactggagaagccaaaaagttttatagcaaaaaaactgtcatcttctatagataatcaaattgacaatatagctagcgtgctagaggaaagagccttgtggcaaaaatttggtttataaa

SEQ ID NO: 263847 - DNA, 769 bp, Unknown
  Bacterial polypeptide expressing nucleotide sequence isolated from the Sargasso Sea
ctgacaggtgtaattggatctgctggtagatttagacaaggtattgatttttcaggacaacaggaaattattaaaaaagctttctcatttaaaaaggcaaaaaatattgcaatttccataaattcgcccggaggttcaccagttcaatctcatttaatacacgattacattagacagttagccgttaaaaataaaaaaaaagttattgtttttgctgaagatgtagctgcctctggaggttatttaattgcatgtgcaggtgatgaaatttatgcaaactctagttctatagtaggctctatcggagtaatttcagcctcattcggctttcaagatgcaataaaaaaaattggaattcaaagaagagtatatacagccggaaaaaacaaaagcactcttgatccttttaaggaagaaaaggaagatgatattcagagaattaaaaaattacaactggaattacattcagactttataaacttagtcaaaaaaagtagaggctcaaaattaaaagacgcagaaaaaaataatatttttactggtgagttttggtcaggttctgcctctctaaagctaggtctcattgatggaattggtaacgcggaacaaatattaagagagaaatttggagaaaatattgaaattaaaaaacttgaaaaacccaaaggttttattgcaagaaaattatcttcatcattagataatcaaattgatagtattgcaaatgctatagaagaaagagcgatgtggcagaaatacggtttataaa

SEQ ID NO: 263848 - DNA, 889 bp, Unknown
  Bacterial polypeptide expressing nucleotide sequence isolated from the Sargasso Sea
attgtacttatcaattgacgcacctcaatcttcaactataaggagatattatattaaacaaaaaaatcttataaacatcattatgctttctttttttaaaaaaaaaaaaattattccacatataattcttaatggagttataggaaacgttggtaaatttagacaaggaatagatttttcaaatcaggaagaaataattaaaaaagcattttctataaaaaaatcacctgcagtagcaatttcaatcaattctccaggaggatcccctgttcagtcacatttaattcatgaccttataagatctcaagcaattaaaaataaaaaaaaagtaataatttttgctgaggatgttgctgcctcaggtgggtatttaatagcatgcgcgggagatgaaatttatgcaaatcaaagttcaattgttggttccataggggtgatttattcatcctttggattcaaagatttaattcaaaaaattggggttcaaaggagagtatatacggcaggaaaaaataaaagtacccttgatccttttctagaagagaaaaatgaagatattgaacgattaaaaaatattcaacttgatttacacaaagattttattgatgtagtagaaaaaagtaggtcatcaaaattaaaaaaagatagtggcattgaattattttctggagaattttggtcaggaaggaaagcaaaagaacttggattaatagatgatattggcaatccagaaaaagttttaaaagaaaaatttggagaaaaaataattattaagaaatttgaaaaaactaaaggatggttagctaaaaaattatctaatgaaattaatactaaccaaataattaatgctttagaagaaagatctatctggcaaagatatggtttctaa

SEQ ID NO: 263849 - DNA, 316 bp, Unknown
  Bacterial polypeptide expressing nucleotide sequence isolated from the Sargasso Sea
aatgagcttaatatcctctaaaacaagaataaatatagttggcttacgaggtgttattggagatctcggtagatttcaaaagggtcttacacttgagaattgtgcctctattctagataaagcatttagttttaaaaagccatctgtagtagtaattaagatcaactcaccgggcgggtcaccggttcaatccgagcttatacacaaccgtataagaaatttatcgaagaaaaacaatgtgaaagtgattacaatcgcggaggatgttgctgcctcaggaggttatatgctgatgtgtgcaggagataccttaatc

SEQ ID NO: 263850 - DNA, 805 bp, Unknown
  Bacterial polypeptide expressing nucleotide sequence isolated from the Sargasso Sea
tatgttctctttttttaaaaagaaaaaaatagtagctcatttaaagcttagtggtgtgataggaaatgcaggaaaatttaaacaagggatagattttgctggccaagaagagataattaaaaaagctttttcattgaaaaaagccaaatgtgttgcaattactataaattcaccaggtggatctcctgttcaatcccatctaatttatagctttataagacagcaagcaaaaaaaaataacaaacaagtaatagtatttgcagaggatgtagctgcgtctggaggctatcttattgcatgtgctggggatgaaatttatgcaaactcaagttctattataggatcaattggagttatttattcttcatttggttttacagaattaataaaaaaaattggtgttgagagaagagttcatacagctggtaaaaataaaagtactcttgatccttttcttgaagaaaaaaatgaagatatagagagacttaaaaacattcagttagacttacataaagattttattgatgttgttgaaaaaagtagaggtactaaattaaaaaaatctgaagttgaacttttttcaggtgaattttggtcaggtagtaaatcaaaaacattaggattagtagatggaataggaaatgctcatgaaattttgaaagaaaaatttggagatgatgtaattattaaaaaatttgaaaaaactaaaggatggttaagtcaaaaactttcttcctctaatcaaatagatcaatttgcaaatattttagatgagaggtcaatttggcaaagatatggtttctaa

SEQ ID NO: 263851 - DNA, 1007 bp, Unknown
  Bacterial polypeptide expressing nucleotide sequence isolated from the Sargasso Sea
ggataaaattttatggtttaagccaattggtgttgttgtagataaagcaataagtccttcatcttctatagactctcttattctaggatcaacaaatactcaacaacatgaacttaatgaccttctggatgttttaaatagtgcagctgaagatgaaaatttagatgctatatacattaatgtttcagaacttggtatgtattatgcatcagcttttgaaatagcaaatgctgtgaaaaatattaaagataatggaaaaagaataatagcctatggtgaaaatattggtaacaatgcctatttaataagctcgcaggctgatgaaattattttaaataaatatggtcaaatttcatcttttggattctctagaaagagagaatatgttaaagacttatatgaaaatattaaacttaaccaacatgtttttatagctggcgaatggaaaactgctccagagccatttactagaaatgatatgtctgaagaggataaaaatgcatggaatgattttgctgaacctctttggaataaaatgacttcatatattgaagatgcaagagagcttccatatgggactttgcaaaattatggtgattctttttgggagttagctgcagatgaacctgaactttctcaaattgctcttaagattggtcttgttgataaggtatttactgaagaggaatttcgtcattggttgtttgataaatttccaaatgaagataatgatataaataaactacccgattcaatatctatttatgattacttatctacaattgattctgaggaaactaagtctaaaaataaaattgctgttattcatatcgaaggagctataactacaggtgattcaacttatgggattgctggttcagatacaattgttaaaaatataagaaaggctataaaagatgatgccgtaaaagcgctcgttctgcgtattaatagtcctggcggtggagtttatcctagtgagttaatcacaaatgccattaaatgaa

SEQ ID NO: 263852 - DNA, 360 bp, Unknown
  Bacterial polypeptide expressing nucleotide sequence isolated from the Sargasso Sea
aatgttttcattttttaaaaagaaaaaaattgtctcccatttgaagcttagtggaataattgggaatgttggcaaatttaaacaaggcattgatttttccggacaagaggaaatcataaaaaaggcattttctttaaaaaaagcaagcgcaatagctgtaacaattaattctcctggcggctcaccagtgcaatcacatttaatttacaaatttattagacaattggcaaaaaaaaataaaaaaaaggtattagtatttgcagaagatgtagcagcatcaggaggatatttaattgcctgttctggtgatgaaatatatgcaaattccagctcaatcattggatcaataggagtaattta

SEQ ID NO: 263853 - DNA, 808 bp, Unknown
  Bacterial polypeptide expressing nucleotide sequence isolated from the Sargasso Sea
atgttttcattttttaaaaaaaaaaaaattgttagtcatttaagacttaccggcgtcataggaaatgttggaaagtttaaacaaggaatagaatattcctctcaagaagaaatgataaaaaaagctttttcagtaaaaaaagcagaggctgttgcaatttcaattaattcaccaggtggttcacccgttcaatcacatctaatatataaatttattagagaacagtctaagaaaaacaaaaaaaaagtaatagtttttgctgaagatgttgctgcatctggaggctatctaattgcatgcgcaggtgatgagatttatgctaatgcaagttctataatcggatcaataggagtaatttattcttcttttggttttaaagatttaattcaaaaaataggtgttcaaagaagggtttatacagctggaaaaaataaaagtactctagacccttttttagacgagaaagaagaggacattcaaagattaaaaaatattcaactggaacttcaccaagaatttattaatgttgtagaggaaagtagatcaacaaaattaaacaaaactgatgttgaacttttttctggagaattttggtctggcaaaacatctttaaaacttggtttgatagatggaatagggaatgcagaacagatattgagagaaaaatttggtgaagatgttgaaattaaaaaatttgaaaagtctaaaggatggcttgccaaaaaactttcgtcttcagaagaccatgcggataaattgataagtgttttagaagaaagatctatttggcaaaaatatggtttctaaa

SEQ ID NO: 263854 - DNA, 429 bp, Unknown
  Bacterial polypeptide expressing nucleotide sequence isolated from the Sargasso Sea
tatgttttcattttttaaaaagaaaaaaattgtgccttatattaggttaagaggagttattggtaatgtaggtaaatttaaacaaggcatagattttaacggacaagaagaaataataaaaaaagcattttctataaaaaaaacagaggttgtggcaatctcaattaattctcctggagggtctccagtgcagtcacacctaatttataaatatataagagagttagcaaaaaaaaataaaaaaaaagtaattgtttttgctgaagacgtagctgcatcagggggatatcttattgcatgtgctggagatgaaatttatgcaaattctagctctataattggttcaataggtgtaatatattcctcatttggttttaaagaattaattaaaaaaataggagtacaaagaagaatttataccgctggtaa

SEQ ID NO: 263855 - DNA, 546 bp, Unknown
  Bacterial polypeptide expressing nucleotide sequence isolated from the Sargasso Sea
tatgaaaaattattttgaatttatatttaggctctttatcaaaaaaaaaccaattgtacctgtattaagatttgatggtgtaattggaactggaggtggatttggaaagggtaggataaatgcagaaaacctcgaaactaatattaaaaaagcattttctgaaaataaaccaagtgctgttgctattataataaattctcctggggggtcacctgtacaatcatctttaatctatcaacgggtaaggtatttagctgataaaaaagacgtgccaattttagtattcatagaagatgttgctgcttcgggtggatattggctttcttgcataggtgacgaaatttttgcagataaagcatcaattgttggttcaataggtgtgatttcagcttcatttggttttacggaggctattgagaagttaggagtagaaagacgtgtttatacaactggtaagtcaaaaggctccttggacccttttaagcctgaaaagtcagaggatgttaagatgttaaaaaatattatgaatgatacacaaaaagcttt

SEQ ID NO: 263856 - DNA, 808 bp, Unknown
  Bacterial polypeptide expressing nucleotide sequence isolated from the Sargasso Sea
tatgttttctttttttaaaaaaaaaaaaattattccacatattaaactaagtggagttattggaaatgtgggcaagttcaaacaaggtattgattttgctggtcaggaagaaattattaaaaaagctttttcaataaaaaagtcaccggctgttgccatatctatcaattcacccggaggatctcctgtacaatcgcaccttattcatgattttataaggagccaagctaaaaagaacaaaaagaaagtaattatttttatggaagatgtagctgcttctggaggatatttaattgcatgcgctggtgatgaaatttatgcaaatcaaagttcaatagtaggttctattggagttatttattcttcatttggttttaaagaattaattcaaaaaattggagttcaaagaagggtatacactgcaggaaaaaataaaagtactttagatccatttatggatgaaaaacaagaggatattgagagacttaaaaatattcaattagaattacataaagactttatagatgttgtagaaaaaagcagatcaaaaaaattaaaaaaagacaaaggtatagaattgttttctggtgagttttggtcaggtagaaaatctttagaattaggtttgatagatggaattggaacagctgatcaaattttgagagaaaaatttggtgatgatgtaaacattaaaaaatttgaaaaatcgaaaggttggttagcaaaaaaactttcatcagaaagccacacagatcaagtaattagtattttagaggaaagatctatctggcaaagatatggcttctaa

SEQ ID NO: 263857 - DNA, 808 bp, Unknown
  Bacterial polypeptide expressing nucleotide sequence isolated from the Sargasso Sea
aatgttatcttttttaaaaaaaaaaaaaatcatacctcatattaaacttagtggagttataggtaatgttggaaaatttaaacaaggtattgattttgcaggacaagaagaaataattaaaaaagctttttcaattaaaaaagcacctgctgtcgcaatttctattaattcaccaggaggatctcctgttcaatctcatttaatccatgatttcatcagatcacaagcaaaaaaaaataggaaaaaagtaataatttttgcagaagatgtagctgcatctggcggatatttaattgcttgtgcaggagatgaaatttatgcaaatcaaagctctatagtaggatcaataggagtgatttattcatcttttggttttaaagatcttataaataaaataggagttcaaagaagagtttataccgctggcaagaataaaagtacacttgatccttttatggatgaaaaaaaagaagatattgaaagattaaaaactatccagcttgatcttcataaagattttatcgaagttgtagagaacagcaggtcaacaaaattaaaaaaagatgctggaatagaattattctcaggagagttttggtcgggtagaaaagcaaaagaattaggattaatagatggaatagggaatgctgatcaagttttgagagaaaaatttggtgaaaaaataatcattaaaaaatttgagaaagcaaaaggctggcttgctagaaaattatcttcagaaaatcatacagaacaagcaattagtattttagaagaaagatctatctggcaaaggtatggtttctaa

SEQ ID NO: 263858 - DNA, 796 bp, Unknown
  Bacterial polypeptide expressing nucleotide sequence isolated from the Sargasso Sea
atgtttagttcacaaacaacaatagtttcaattgaccttaagggaatgattgcatctggaagtagagccccactaaatatggacaatttgaatggtctattttcaaaattaatgaaaatgaaatttcatgcactttcgattgttattaactcacccggaggttcgcctgtacaatcatcattgatagctcaaaaaataagagaaatttcagctaagaaaaaagttaaatgctactgttttgttgaagatgttgctgcttctggaggatattggctcgcatgcgccgctgatgaaatttatgcagatgttaattcaatagttggttcaataggggttatttctggtgggtttggatttactgatttaataaaaaaaattggagtagagagaagaatatttaccgcaggggagcataaaagttttttagatccatttcaaaaagttaataaaaaagacgaagctaaattaattaaacttcaaaaattaatacaccaaaactttattgattgggtttcttctagaagaaagaagaaacttattgataaaaataaaaaaataatattttcaggttctttttggttagccaatgaagcaaaagatttaggtttaattgatggaattacatctgagtcagctttttttaaaagtaaatttggcgaaaagacaaaaataaagaaaatcaaacaaccaaagtccttaaaacaaaagctaggactaggtattaattcttttaacagtgaagatttaattactaaagcaaaagaagaacttctttttaataaatttggtatctgat

SEQ ID NO: 263859 - DNA, 808 bp, Unknown
  Bacterial polypeptide expressing nucleotide sequence isolated from the Sargasso Sea
atgttatcttttttcaaaaaaaaaaaaatcgtcccccacataagattgactggtgttattggaaacgctggaagatttaagcaaggaattgattttgctggtcaagaggaattaataaaaaaagcattttctataaaaaaatctctagctgttgctatatcgattaattctccaggtggttcaccagtccaatctcacttaatatacgacttcattagagctcaggccaaaaaaaataaaaaaaaggtaattgttttcgcagaagatgttgctgcttcaggaggttacttgattgcatgtgctggagatgagatttatgctaattcaagttcaattgttggttcaattggtgttatttatgcttcttttggtttcaaggatcttattcaaaaggtaggtgtagaaagaagagtttatactgcaggaaaaaacaaaagtactttggatccttttgtagatgcgaaagaagaagatattaacagattaaaaaatattcaacttgatttgcacaaagattttataaacgtagtggagacaagtaggggtgcaaaacttaaaaaagataaaggaatagaattattttctggagagttttggtccgggtctaaatcaaaagaacttggcttaattgatggtataggaaatgcaaatcaaattttaaaagataagtttggtgacgatgtcataattaaaaagtttgaaaaaagcaaaggatggttggcaaaaagaatttcatcagagaatcaaatcgataagatagcaaatgtaattgaagaaagatctatctggcaaagatatggcctctaaa

SEQ ID NO: 263860 - DNA, 1381 bp, Unknown
  Bacterial polypeptide expressing nucleotide sequence isolated from the Sargasso Sea
gttggcctcccaggcagatcagatcttgctgcatcccgagggcggcatgttcctggaggggttctcagtgtaccgctcctatctgcgggcattccttgagaaaatccgggtcaccatgcacgtctttcgcgccggcgagaacaagtcggcggtcgagccctacctgcgtgatgacatgtctgaggaggagcggcgggtggtttcacgctggctcgacgggctctggaccacctacaccgagctcgccgagtctggcagggaattacccgcgggaacaatggatcagttcatcgcatcctttgcgactcagctcggcgcatccgacaatgatctcgccgaaaccatgctggctgcgggctgggtcgatatgctcgccgaccatggccagatggaagacgcattggccgaatgggttggggcgaccgatgcggacggttacgccgaggtcatcccacttgatcgctatgtcgaggacgtcaagataaggcgctcactgcgtgaggagaaccttccgctaattgccatcatccccgttgagggtaccttgatgcccggggacagtgaggagggcatggcgggcagcgatactatcaacggctatatcgacaccgttttagaggccgaagatctggcggcgatcgtgctgcgcgtgaactcccctggcggtagcgtgttcgcctcggacttgattcgtagaaagctttcagaggtggcggacgccggcattcccatcgtggtgtccatgggcaccgtcgccgcctctggcggctactggattgcagcagaagcagacgagatctgggcgctgcccacgacgctgaccggcagtattggtgccttcaccgctttccccacaattgagggcatcgtggattacatcggcgtcactgttgatggcgtggggaccaccccgttggcgggcgcggccagctttaaccgcgggttgagcacggagatggcgagcattgtgcaggcgctggcttatggcgcctatgacgacttcattgaattggtcgcgagtggtcgcgacatgagtgagcaagcggtgagagacgtcgccgatgggctggtctggaccggcgccgaggcggtggatcgtggtcttgttgacgagttgggtggattgaacgaggcggtggcggccgcggcgcgcctagccgacttggaacagtggcgaaccgcccgcacccgggtaccgccttcttttgagagcctgttgctacaggaactgagcggctcctttggcatagtcgcgacgccgctgggcggctggttcgagtcgctggtcagcgcctttaaacccacgatcaagagcctctccagtatgcgcgatccgatgcatgtttatgcccagtgccttgcctgtgcgccgctgctttag

SEQ ID NO: 263861 - DNA, 799 bp, Unknown
  Bacterial polypeptide expressing nucleotide sequence isolated from the Sargasso Sea
tatgaaactaaaaattccctttttgccgtctaagccaagtgttgcggtcgttaagatgtctggcgttatttccgctggtgctcgctctggcctgtgcgaccagactttaagtccaattttggaaaaagccttcaaaaaaggacaacaccaagcagtggcattattaattaactcgccaggtggatccccagttcaatcctcattaataagttctcgaataaagcgcttagcagaaaaaaatgagatgccagtgtttgcattcgttgaggatgtggctgcttcgggtggctattggcttgcttgcgctgcagatgaaatttatgcagatactgggtcaattataggctcgattggagttatttctgctggatttggtttccaagaattgatcgataaatatggtgtggaacggagagtgcatacagcaggtaagtccaaatcaatgttggatccatttaaaaaagaaaagcctgaagatataaaacggctaaaaagaatactgagtgaaatgcacgaactctttatcaagcacgttgaagaaacacgcggtggtaaactcacccaggaagataatatttttacaggcgaaatttggttgggtgaaaaggccgaacaattgggattaattgatggcataggacatctcgacactgtaataaaagaaaaatttggtaagaaaacccgaattaaaatttatggtcaaaaaaagaattttttgcagcgctttggtgtaaatttaataaatgaggctggcgtttatttggaagagcgcgcagcatttgcccggtttggtctctaa

SEQ ID NO: 263862 - DNA, 703 bp, Unknown
  Bacterial polypeptide expressing nucleotide sequence isolated from the Sargasso Sea
gaaattattaaaaaagcattttcaattaaaaaatctctagtagttgcaatatctattaattctccaggaggttctccggttcaatctcatttactatataaatttattagagagcaggccaaaaaacataaaaaaaaagtaatagtatttactgaagatgtggctgcatcaggtggatatcttatagcttgcgcaggagatgaaatttacgctaatcctagctctatagtaggttcaataggagtaatttattcatcatttggatttaaagatttaataaaaaaaataggcatacaaagaagagtttacacagcaggaaaaaacaaaagtaccttagatccatttcttgaagaaaaagaagaagatatcaatagattaaaaagtatccaattagagctgcatgaagaatttattaatgtcgttgaagaaagtagagcagcaaagttaaaaaaagatagtggagttgagttgttttcaggagaattttggtctggaaaaaaagcaaaagaattaggactgatagatggcttggggaatgctgatcaaatattaaaagagaaatttggagaggatgtagaaattaaaaaatttgaaaaatctaaaggttggttggctaaaaagctttcttcatcagaataccagactgaaaaattaattaatattttagaagaaagatcaatctggcaaagatatggtttctaaa

SEQ ID NO: 263863 - DNA, 637 bp, Unknown
  Bacterial polypeptide expressing nucleotide sequence isolated from the Sargasso Sea
tatgttagaacaactcgccaatcagtttttggctatgaatgctaagtcagctagaaaccttgttggctctctgtctcgccttcagaaaggtggtttttcaatcactgatgatcaaggtgctgttgatgctaccgaaaagccgcgcataagcaccgcgtctttggggtatggtatgagcggccgaaactacgactcaaagcctttccactttattgatggcatagccattatccccgtgatgggaacactagttcataagcttagctattcaagttcatgggctaccggctacaacgttattgttggcatgtttgatgccgcaaacgccgaccctgatgtagagggcatattgcttgccattaattcgccgggcggaacagttgcaggttgctttgacgctactgaccacattgcacaaaacaaaggtgataaacctgtttgggcaatttatgacgatatggcttgtagtggcgctatgtgtattgccagcgttgcagacaaacgtttaacaacacaaacagccattagtggttcggttggtgttgttcagatacatgccagctatgaagaaatgcttgctgaatcaggcttagcggtcacgctaatctattccggttctcacaaggttgatggcaat

SEQ ID NO: 263864 - DNA, 369 bp, Unknown
  Bacterial polypeptide expressing nucleotide sequence isolated from the Sargasso Sea
tatgttttcaattttcaaaaaaaaaaaaattataccccatataaaactaaatggtgtgataggtaatgttggaaagtttaaacaaggaatagatttcgcaggtcaggaagaaatcataaaaaaagcattctctttaaaaaagtcaccagctgttgcaatatcaataaattctccaggaggttcgccggttcagtctcatctcattcacgattacgtaaaacaacaagcaaagaagcacaaaaaaaaggtaataatatttgctgaggacgttgctgcatctggaggatatttaattgcttgttgtggagatgaaatttatgcaaatcaaagctctataataggctccattggagtcatatactcatcttt

SEQ ID NO: 263865 - DNA, 817 bp, Unknown
  Bacterial polypeptide expressing nucleotide sequence isolated from the Sargasso Sea
tatgtttaaaaggatattttcgaagaatacttctatacctgttttacgtttatctggcattatatcatcacagtcaggcttaacaggctctggtttagcaataaataatttagaaaaattaattgataagttatttgctgataaaaaatctcccgttgtatgtttgatcattaattcacctggaggctctcctacacagtcctctttaattgcaaaaaggatcattgatttagcaaaggaaaaaaataaaaaagttttagcatttgttgaagatgttgcagcttctggtgggtattggttagcatgtgctgctgatgagatatatattgatcaaaactctgttattggatcaattggtgttatttcaccaggttttggttttgttgatcttttaaaaaaagttggaattgaaagaagagtatatacatctggaaaaagtaaaagttttctagatcctttcaaggaagaaaaaaaggaagacattgatagattaaaaaatattcaagaacaaattcatgataattttattaattatgtaaaaaatagaagagcttcaaagcttgatcaaaataaattagacgatatcttttctggtttattttgggttggtaataaagctatcgatttaggtttagcagatggtattggtgcaataaaaccaattttagaagagaagtttggaaaaaaaattaaaattaaaataatcagtcaaaaaaaatcatttttacaacgtaggttttcttcttcaatatttaattctgatgaaattttaattaaaattgaagaaagaattatgttttcaaggtttggtttataa

SEQ ID NO: 263866 - DNA, 811 bp, Unknown
  Bacterial polypeptide expressing nucleotide sequence isolated from the Sargasso Sea
tatgttctcattttttaaaaaaaaaaagattataagtcatatcaaattatccggaattataggaaatgttggaaagtttagacaaggaatagaatattcaagtgaggaagaaataataaaaaaagctttctcagttaagaaagcattagctgttgcgattataattaattcaccaggtggatctccagtacagtcacatttgatatacaaactaataaaagagcaatctaaaaaaacaaaaaaaaaagtaattgtttttgctgaagatgtagcggcctctggcggttatctaatttcatgtgctggtgatgaaatttatgctaactcaagttcaatcataggatctatcggagttatttctgcatcatttggttttaaaaatttaattgaaaaaattggtattgaaagaagagtttacaccgctggaaaaaataaaagtactttagacccttttttggatgaaaaggacgaggatataaatcgtttaaaaaatatccaattagaaatacatcaagattttattgacgttgttgaggagagcagaaaagagaaactcaacaaaaactctggtattgaacttttctctggggaattttgggcaggaaaaaaagcaaaagaattaggactaatcgatggattgggaaatgcagagcaaatattaagagaaaaatatggagatgacttagaaattaagaaatttggaaaaagcaaagggtggctatcgaaaaagctatcatcttctgaaaattttactgataaagtaattagtttattagaagaaagatcaatctggcaaaggtatggtctctaa

SEQ ID NO: 263867 - DNA, 863 bp, Unknown
  Bacterial polypeptide expressing nucleotide sequence isolated from the Sargasso Sea
catgaaatttcttaaaagattaattccattccgaaagcgcgatcctcaagtctcagtcattcggttatcaggcattattggcagtgcgggcaattttaatcggggtcttaatttaaaaagtgttgaatcgaacatagaagcggctttcgatcagaaaaacgcatctgctgttgcactaatcattaactcgcctggggggtctccggttcaagcggaccttatccaaaaacggatacgcgatctcgctgatgaaaaagataaaccagttttcgtattttgcgaggatgtagctgcttcggggggatactggatagcacttgcagcaaatgagatatatgccaacgccagctcaatcataggttctataggtgttgtttctgcggggtttgggtttaccgaagccattagtaaaatcggtgtagagagaagaatatactcaacgggtgacaaaaagggaatgttggatccttttcagccagaaaattctgatcacgtagctcacctaaaatccctgcaaggtgaaatctttcatttatttcaggactgggtaaaatcaagaagaggtgcaaaattaaaaggctcttcagaggaactattcagtggagctttctggaccggcataaaagcaaaagagctaggtttaatagatggattgggagatatgagaacgataatgcgagagcgtttcggagagaatgttaaattcaaaatttttgaaaaaaaggccggcttcttatcccgttttggattatcgggtaaaatggagagtggctcagcaagcgcactcatagatgattttttagacggtatcgaagctcgcgcacttggaacagatttgggctatgaaattagcccaaccagaa

SEQ ID NO: 263868 - DNA, 1837 bp, Unknown
  Bacterial polypeptide expressing nucleotide sequence isolated from the Sargasso Sea
tatgagtaaagttaagtcaatttggtctaaagccgatgcatttttatcaacaacgagaaaactaattcttaacacatttacagttttagttttgatctttgtaacagtagcaatttttggagctttcggtgcaatgtttactggagatgaagaaattgatactgaaaataaagtcctttggtttaaaccaataggagttgttgtagataacgcaacaagttctgcgccatcatttgacgacatatttgcaagcaactctgtaaagcaacatgaattagatgatttacttaaagttcttgataatgctgcaactgatgaatcattagctgctgtctatattaatgtttctgaacttggtatgtattatgcttctgcatttgagatagcaaacgcagtaaaaaatataaaagataatggaaaaagagtaatcgcatatgctgaagattatggcaacgcagcatatttgataagttctcaagctactgatgtaatgataaataactacggtcaagtctctgcatttgggttcgcaagaaaaagagaatattacaaagatttatataaaaatataaaacttaattatcacgtatttgttgctggtgactataaaagcggtcccgaaccatatacaagaacatcaatgtctgaggaagataagcttgcttggaatgaatatgctaatccactttgggagaagatgactaatatgattgaaacaagtagaaatcttccaaaaggtacgatgcaacaatatggagactcaatctgggatttatctatagaaaatccagaaactgctgaaattgcactaaatgttggtttagttgatcaaattgttacacgagaggaattaaggcattggatgtttgaagaatttcctaacgaagaaaatgataaaaacgaatatcctgatgcagtttatatctatgaatatctctcaacaattgaagaagaagaaaaagtttcaaaaaataaaattgctgttatcaatgttgagggtgcaataacaactggcgaagcaacatataatattgctggatcagacaccatagttagcaatattcgtaaagcaataaaagatgagaatgttaaagctcttgttctgagagttaatagtcctggtggaagtgttttggcaagcgaacttattattaactcactcaatgaattcaaagaaaccggaagaccaatagtttcttcaatgggagatattgcagcatcaggcggtgtttgggtcacaaccttgtctgatgaaatttgggcaaagccagaaacactcacagggtcaataggtgtttatgggttaattcccacattagatggcatatatgaatgggctggaattcaggtcgatggggttagcactacaaaagctggtgagtgggattctaggctggcaatgccagattacgtaaataaagcaatccaagcaagcattgataattcctatgacaagtttgtttcaaaagtagctgaaaatagaatgatgccatacaaagaaatactagcagttgcaggtgggagaatttggtcaggtcaaaaagctcttgaattaggacttgttgacagaattggaaatattaaagatgccatagaatcctctgcagaacttgctgacattgatgactacgaagttgtttcatatgagaagccaatggatccatttgaaataattctttctgaacttttagataacctagatgttagagtgaatgttgacaaaaatattgcatctttgttgaaaatcattaattctgattacaaatttattgataaagaaaaagacataaatatcgcatcatattgttttcaatgcgaatttttagaagctaaataa

SEQ ID NO: 263869 - DNA, 409 bp, Unknown
  Bacterial polypeptide expressing nucleotide sequence isolated from the Sargasso Sea
aatgagctttatatcctctaaaacaagaataaatatagttggcttgcgaggtgttattggagatctcggtagatttcaaaagggactgacacttgagaattgtgcctctattctagataaagcttttagctttaaaaagccatctgtagtagtcattaagatcaactctccaggcggttcaccggttcaatccgagcttatacacaaccgtataagaaatttatcgaagaaaaataatgtgaaagtgattacaattgcggaggatgttgctgcctcaggaggttatatgctgatgtgtgcaggagatattttaatcgccaataaaagttcaatagtcggatcaataggagtaatcagtgcttcttttggattcaaaaaattaatagataaactaggcattaaaaggcga

SEQ ID NO: 263870 - DNA, 463 bp, Unknown
  Bacterial polypeptide expressing nucleotide sequence isolated from the Sargasso Sea
tatgtttaaaaaaatattttctagtactgtagatataccgacgttaagactatcgggagtcattggtcaagctggatttatgcgttcagggctttcttcgtctaatttagataaattaattactaaacttttttcagataaaaaagcacctgctgtagcattaattattaactctccaggaggatcgccaacacaatcatccttaattgcaaaaaaaattttagaattggcaaataggaaaaaaaagaaaatatatgcgtttgttgaagatgttgcggcatctggcggatattggttagcatgtatagctgatgaaatttatatagatgagaattcaatagttggctcaattggagttatatctccgggttttggttttgttaatttaataaagaaagctggtattgaaagaagaatgtatacatctggaaaaagtaaaagttttttagacccttttcaaaaa

SEQ ID NO: 263871 - DNA, 808 bp, Unknown
  Bacterial polypeptide expressing nucleotide sequence isolated from the Sargasso Sea
atgttttcaattttcaaaaaaaaaaaaattatacctcacataaaattaaatggtgtaataggcaatgttggaaaatttaagcaaggaatagattttgcaggtcaagaggaaattattaaaaaagcattctctttaaaaaaatctccagctgttgcaatatcaattaattctccgggaggttcgccagttcagtctcatctcattcatgattatgtgaaacaacaagcaaagaagcataataaaaaggttataatatttgctgaggatgttgctgcatctgggggatatttaattgcttgttgtggggatgaaatttacgcaaaccaaagctctattataggctccattggagtaatatactcatcttttgggtttactgagttaataagtaaaataggtgttcaaagacgagtttataccgctggtaaaaataaaagcacacttgatcctttcatgaaagagaaagatgaggatatcgaaaggcttaaaaatatacaattagatcttcataaagattttattgaagttgttgaaaaaagtagaggaacaaaactaaaaaaagatatgggtatagaactcttttctggtgagttttggtcaggaagaaaagccaaagagttaggacttatagatggaattggaaatgcagatcagattttaaaagaaaaatttggtgatgatgtcataataaagaaattcgagaaagcaaaaggttggttagctagaaaactatcttcagaaagcagtacagaacaagtgataaatattttagaagaaagatctatctggcaaagatatggtttctaaa

SEQ ID NO: 263872 - DNA, 262 bp, Unknown
  Bacterial polypeptide expressing nucleotide sequence isolated from the Sargasso Sea
atgaattattctgaagaatttaaaaaatatgctacaaaacatcatggtgttaattctatgtattatgacaagatacttagtagtatgacaccttacatcattgaagaaagacagctgaacgtagcccaaatggatgttttttctagattaatgatggatagaattatttttttaggaaccgctattaacgattctgttgctaatattattcaagcacaactactatttcttgagagcacagacaaggaaaaagatattcaaa

SEQ ID NO: 263873 - DNA, 808 bp, Unknown
  Bacterial polypeptide expressing nucleotide sequence isolated from the Sargasso Sea
atgaatatttttagctcaaaaatcagcataaatgttgttagcttaaggggggtcattggagatcttggtagattccaaaaaggcttaacaatagataattgttcaagcttacttgaaagggcttttactttcaaaaagccgaaaattgtaataatcaatattaattcacctggaggctctccagtacaatctgaattaatttataataaaattagagagttggcagaaaagaataaaacaaaagtaattacagttgcagaagatgttgctgcgtctggtggttatatgttgatgtgctctggtgattatttgatagcaaataaaagttcaattgttggttctataggagttataagtgcttcatttgggtttaaaaaacttatagacaagcttggcattaagaggagagtattcacaaaaggtgatagaaaatcattcttagatccatttgaagaagtttctaaaaaggatattaataaattaattaaagttcaagatagcatatttgaaaattttaagaatttagtttctaaaaatcgtaaaaagaaaataaaaccttctcaggtatttaatggagaattttggactggcgaacaggcaaagtcacttggattggtagattctaacgaagaactaaatgtatatttatcgaaaacttatggtaagaacttaaaaattaaaaagattgaaggaaaaaagtcctttgttaaaaatttattaggttccagttctccttctaatgatttagttgatcatctgtttgagagattaaatgaaagttcatattggagcaaatatggtctctaag

SEQ ID NO: 263874 - DNA, 898 bp, Unknown
  Bacterial polypeptide expressing nucleotide sequence isolated from the Sargasso Sea
gaattaaacctcgtatattatcgtccttaccttgcaagttttgatgatgaactaccatctaaaagcaaaaatgaaattaaagtagttacagttgaaggcacaattatgggtggggatgtcctctttggtcaagcaggttcaaaaggagttgttgcaatgcttaaagaagctcacgaagatgaagaaacaaaagcaattgtattaagagttaattccccaggtggaagtgtcgtagattcagactatatgcgatgggaaattaagaaagctcaagataaaggaattccagtaattgtttccatgggatctttagcagcatcaggtggttattggatatcttcactggcggacaaaatctacgctgaggctgatactattaccggttcaattggtgtttatggaacattatttagttttgaaaaaatttatgactggatgggcataaattatgatggatattctacaactaagtatggtgcattcgatttcacagcaatggattggcctgaagaattttctgctgcttttaaggctggaatagatcaaatttatgtagacttcacaacacaaacatcaatagatagagatatacccattgagaaagtgagggaaatagctaggggaaaggtttactctggtgaaatggcacttgaaattggtttagtagatgaaataggaacactgcacgacgctgttgaatttgctgcttcacaggcggagcttgaggattataagcttgactatgtgaagccaccagcggcagcaccagtcaatccatttgaagtaccaagtctcattaaatcatactttgaaggtcaaacaggttttaatcttgagaatagaaatatgtataacaacataaaaatctattgtcttgaatgtgaagctgtaaattaag

SEQ ID NO: 263875 - DNA, 632 bp, Unknown
  Bacterial polypeptide expressing nucleotide sequence isolated from the Sargasso Sea
tatgctaaaatccctattttcaaaaagtataaatattcctaccctaagattatcaggggttataggtcagtcaggtttaacgaaaagtggcttaaatataaattccttagacaagttgattgataaactttttatggataaaaaatgcaaagccgttgcattgataataaattctccaggaggatctcctacgcaatcatcattaattgcagaaaaaattataaaaaaatcaaaagaaaaaaataaaaaaattataacttttgttgaggatgttgctgcttctggaggttattggcttgcttgtgctggagatgaaatttatattaatattaattctatagttggatctataggagttatttctcccggatttggctttgtagatttattaaaaaaaattggtgttgaaagaagagtttatacttctggtaaaagtaagagcttccttgatccttttaaggatgcaaaaaaagaagacattgatcgtctaaaaaatattcaagagcagattcatgacaactttatcaattatgttaaaagtagaagaggttcaaaaattaaagaaaaagactttgatgaaatttttagtggcttattttgggttggacaaaaagcaattgatttaggattag

SEQ ID NO: 263876 - DNA, 808 bp, Unknown
  Bacterial polypeptide expressing nucleotide sequence isolated from the Sargasso Sea
atgttctctttttttaaaaagaaaaaaattgttgctcacttaaaattaagtggggttattggtaatgcaggaaaatttaaacaaggtattgattttgcaggtcaagaagaactaattaaaaaggctttttctctgaaaaaagctgcatgtgttgctatatcaatcaattctccaggaggatcaccagttcaatctcatttaatctacagctttattagacaacaagcaaaaaaacataaaaaaaaagttattgtattcgctgaagacgtagcagcttctggaggctatttgatttcttgtgctggggacgaaatttatgcaaattcaagttcaataattggatccataggagtgatatattcttcttttggatttacagagttgataaaaaaaattggggttgaaagaagagttcatactgctggcaaaaacaaaagcacacttgatccatttttagaagaaaaaaatgaggatattgaaagattaaaaaatattcaattggatcttcataaagactttatagatgttgttgaaaaaagtagaggatcaaaattaaacaaatctgatgtagaacttttttcaggtgagttttggtcaggcagtaaagcaaaaaatttaggattgattgatggaataggtgacgcacatgaaatattaaaagataaatttggtgaggatgtaattattaaaaaatttgaaaaatcaaaaggatggttaagtcaaaaactttcttcatctagcaatcaagtagatcaaatagcaagtattttagatgaaagatcaatttggcaaagatatggtttctaaa

SEQ ID NO: 263877 - DNA, 348 bp, Unknown
  Bacterial polypeptide expressing nucleotide sequence isolated from the Sargasso Sea
aatgatctctttttttagaaagaaaaaaattgttccacatattaaattaagtggagttattggaaatgtaggaaagtttaagcagggaatagatttttcaggtcaagaagagatcatctctaaagcttttactttaaaaaaagcaccatgtgttgcaattacaattaattctcctggagggtctccggttcagtctcatttgatttataattttataaggcaacaagctaaaaaaaataagaaaaaagtaatagttttcgccgaggatgtggcagcatcagggggctatttaattgcatgcgctggagataagatatatgcaaattcaagttctattattggttctat

SEQ ID NO: 263878 - DNA, 1846 bp, Unknown
  Bacterial polypeptide expressing nucleotide sequence isolated from the Sargasso Sea
aatgagtaaaataaaatcaatttggtcacaagcagataaatttctgacattagccagaaaaattttagttaatacagtaactgcaattgttttaattgtgattacattttcgatcttgggtggtgttggatcaatgttctctcctgaagaagaaattgatacggaaaacaaagttttatggtttaaaccaattggtgtggttgttgactctagtgttaattcatcgccttcattttcatttgactcgcttgctttaggtggtgggactgttcaacaacacgaacttgaagacttgttaaaggtgctcgacatggcagctgaagatgaatctcttgctgcagtttatgtcaatgtatctgaactgggcatgtacatctcttctgcctttgagcttgccaatgctgtaaaaaatgttagagatagtggaaagaatgtgattgcttatgctgaaaattttggaaataacgcttatctaataagctcgcaagctaatactgtaatgattaatgaatatggtggtgttaatgctgtaggattttcaagaaagagagagttttataaagatttatatgaaaaaataaatcttaactacaatgtatttgttgcaggtgattttaaaagtggcccagaaccttatacaagaaactcaatgtctgaagaggataaattagcttggagtgagtttgcagatcccttatggaataagatgaaagatatgatggaggctggtagagatttgcaagaaggtacaattcaggaatatggagatactttatgggaaagatcattagacaatcctgagcctgcacaaattgctctagagcttggcatggtagatatggttgttaccagagaagatcttaggcattggatgtatgacaaatttcccaatgacgaaaatgataaaaatgaacttcctgattcaatatcaatttatgaatatttatctatatttgaggaagataccattgactcagataataagattgcagttgttaatgtagaaggagcaattacaactggcgaagtgcaatatggtattgctgggtcagataccattgtaacaaatataaggaatgctattagggatgattcggtaaaagcgttagttttaagagtaaacagtcctggtggcagcgtttgggcgagcgaactaatcacaaacgctttgaacgagtttaaatcaactggtaggcctatagtaacaagcatgggagatattgctgcttcaggtggagtgtgggtaacaacttattcagatgaaatatgggcaaaagaagaaacacttactggctctattggagtttacggaatagtgccaactctcgatggtatatataattgggctggcatacaggttgatggcatttcatcaacaaaagctggcgaatgggatgaaagattggcaatgcctagctatgtaaccaaatccatccaggcaggtattgatcatacatatgataaatttgtctcaaaggtagctgaaaatagaaatatggcatacaaagaggttttatctattgctggaggtagaatctggtctggtaaaaaagcattgcagcttgggttagtggataaaattggagacttagaagatgctgttgattcggctgctcaatttgcgggtattgatgactatgaaatagtttcatatgcaaaagagatggatccttttgaattatttttaaatgaattattagacaatttggattcaaaagttgaaataaatgaagaccttcaggctttgggtaagtttttagatgcacggtataaatttatagatcctaataaaaagattaacacggcagtctattgctttgagtgtgagtatttcaactctcaataa

SEQ ID NO: 263879 - DNA, 826 bp, Unknown
  Bacterial polypeptide expressing nucleotide sequence isolated from the Sargasso Sea
ttgttattaagccctgtgtttaagaagtttttttcaaaaaatattaatataccaacattaaggttaacaggtgtcattgggcagggtggcatagcaaagtctggactaacaattactggaattgaaaaattaattgaaaagttgtttgctgataaaaaagcacctgcagttgctttaataattaattctccaggaggttctcctacacaatcttctcttatagcagagagaattattaacttatcaaaagaaaaaaacaaaaaagtatttgcgtttgttgaggatgtagcagcatctggaggttattggttggcctgtgcagcagatgaaatttatttagatataaattcaattgtcggatcaattggagttatttctcctggttttggctttgtcgaccttatcaaaaaaattggaatagagagaagggtttatacttctggaaaaagtaagagttttttagatccatttaaagaagaaaaaaaagaagatattgatcgcttaaaaaatatccaagaacaaattcatgaaaattttatagattacgttaaaagaagacgaggtgcaaaactctccagttctaatgaagatgaagtattctctgggttattttgggtagggaaaaaaggtgttgagctaggtttagctgatggtttaggttcaattaatgaggtgattaaggaaaaatttggaaaaaaagctaaaattaaaattattgatcaaaaaaaatcttttttacaaaaacgtctctcatcttctataaatagtaatgatatatttaatagactggaagagatgattatgtggtctagatatggcttataat

SEQ ID NO: 263880 - DNA, 814 bp, Unknown
  Bacterial polypeptide expressing nucleotide sequence isolated from the Sargasso Sea
aatgttttcatttttaaaaaaaaaaattattattccgcacattcggcttgccggtgttattggatctgcaggcagatttaaacaaggcattgatttctcaggtcaacaagaaattataaaaaaagctttttcatttaaaaaagccaaaagtgtagcgatatcaattaattctccaggaggttctcctgtccaatcccatttaattcatgattacataaaacaattagctaaaaaaaataaaaaaaaagttatagtctttgccgaagacgttgcggcatctggtggatacctgatagcttgcgctggagatgaaatttacgcaaattcaagttctatagtagggtcaattggagttatttcggcttcatttggttttcaagatgctatcaaaaaaattggtgttcaaagaagagtttatactgctggaaaaaataaaagcactttagatcctttcagagaagaaaaagaagaagacattgaaagaataaaaaaattacagctagaactacattcagattttattgatgttgttaaaaaaagcagaggtccaaaacttaaagatcctgaaaaaaataatacgtttactggagagttttggtctggatctgcctcaatgaaattaggattaatagatggcataggtaacgctgaacaaattttaagagaaaaattcggagaagatatagttattaaaaaacttgaaaagcaaaaaggttttattgcaaaaaaactatcattttccatagataatcaaattgataatattgccagtgtcatagaagaaagagccctatggcaaaaatttggtttataa

SEQ ID NO: 263881 - DNA, 436 bp, Unknown
  Bacterial polypeptide expressing nucleotide sequence isolated from the Sargasso Sea
tatgttttcgattttcaaaaaaaaaacagtagtgcctcatgtgaggctaacaggaattattggctctgcaggtcgatttaaacaaggcatggaactagctaatcaaagggatatattaaaaaaagctttttcagttaaaaaaatttcacatgtagctatttctataaattcaccaggaggttcacctgttcaatcgcatttaatttacagctatataagggagcttgctgataaaaaaaaagtaaaagtcttaatttttgcagaagatgttgctgcttcagggggttactttattgcgtgcgcaggagatgaaatatttgcaaactcaagttcaataattggttccattggagttatatcagcttcatttggttttaaagatttaatccaaaagatcggagttgagagaagagtttacacagcaggaaaaaataaa

SEQ ID NO: 263882 - DNA, 460 bp, Unknown
  Bacterial polypeptide expressing nucleotide sequence isolated from the Sargasso Sea
agctgaaaaattactggcactttcctttgaatcagatgagccaattactatgtatataggatctccaggagggcatgtcgaatctggtgatacgatcttcgatatgattcgatatattaaacctcgggtccgcacagtgggtactggctgggtaggaagtatagcgacacatatttatttagcgcccgataaagagaatcgatttgctttgccgaatacacgttttctgattcatcaacctcatgggggctttggcggagatgcttccgatatagaaattcatgccagagagattgttaaaacgagagaacgaatcaatggggtgattgcggcacagactggacagtcattagacaaagtggccgaagatacacaacgtgactattggatgagtgctgaggagtcagttgattacggcctcgtgggaaagataatcagcaatattgatgatttgagttag

SEQ ID NO: 263883 - DNA, 703 bp, Unknown
  Bacterial polypeptide expressing nucleotide sequence isolated from the Sargasso Sea
cttttacggaaagctttttcattcaaaaagccaaatcacgtagctatttcaattaattctcctggaggatcgccagttcagtctcacttgatatatagctatataagacaacttgcagaggagaacaaaactaaagttatcatttttgccgaagatgttgcagcatcaggaggttatttcattgcatgtgctggtgatgaaatttatgcaaattcaagctctattataggttcaatcggagtaataacagcctcttttggttttaaagagatgataaaaaaaattggggtagaaagaagaatatatactgcaggaaaaaacaaaagtacgttagacccctttgttgaagaaaaggaagaagatgttcaaagattgaaaaaacttcaattagaattacatggccactttataaaagttgttgaaaaaagcaggggaaaaaaattaaaagatccagaaaaaaataatatatttaccggtgaattttggtcaggtgaaacggctctaaagttaggattaattgatggaataggtaacgcagatcaaactcttagagaaaaatttggtaaagatgttataattaaaaaatttgaaaaacctaaaggttttattgctaaaaaactctcatcctctattgaaaaccaaattgataatttagcaaacgttttagaggaaagatctatgtggcagaaatttggtttgtaaa

SEQ ID NO: 263884 - DNA, 708 bp, Unknown
  Bacterial polypeptide expressing nucleotide sequence isolated from the Sargasso Sea
tatgttttctttttttaaaaaaaaaataatagttccacatattagactatccggggttattggttccgcaggtagatttagacaagggatagatttttcaggacaacaagaaataataaaaaaagcattttcttttaaaaaagctaaaaatattgctatatcaattaattcaccagggggctctccggtacagtcacatttaatacatgattacataaagcagttagcaaaaaaaaataataaaaaagttattgtttttgctgaagatgtagctgcatcaggcggatatctaatcgcgtgtgcaggagatgaaatctatgcaaattcaagttcgatcgtaggttcaataggagtaatctctgcatcttttggatttcaagatgcaataaagaaaattggaattcaaaggagagtatacactgctggaaaaaacaaaagcactttagacccttttaaagaggaaaaagaggatgatattcagagaattaaaaaattgcaattagagttgcattcagatttcattaatcttgttaaaaaaagtcgtggcgcaaaattaaaagaaccggaaaaaaacaatattttcaccggcgagttttggtcaggatcagcgtctttaaaactaggactgatagatggacttggaaatgcagaacaaatcttaagagaaaaatttggagaaaatatttttattaaaaaattagaaaagcc

SEQ ID NO: 263885 - DNA, 814 bp, Unknown
  Bacterial polypeptide expressing nucleotide sequence isolated from the Sargasso Sea
tatgttttcaatttttaagaaaaaaaaagtagttccgcatgtaagactaacaggcgttataggttcagcgggaaaatttaagcaaggcatggaattggccaatcagcgggatattttaaagaaagctttcgcagtaaaaaaaatcactcacgttgcaatatcaatcaactctcctggaggatcaccagttcagtcacatttaatttatagttatataagacagcttgctgaaaaaaataaagtaaaagttattatatttgccgaagacgttgcagcatccggaggatattttattgcgtgcgcaggagatgaaatttatgcaaactcaagttctataattggttcaataggtgtaatttctgcatcctttggatttaaagacttgattcaaaaaataggagttgaaagaagagtttatacagctggaaaaaataaaagtactttagatccatttaaagaggaaaaagaagaagacattaaaagattaaaaactatacaacttgaattacatgaagactttataaaagttgtccaaaatagtagagggtcaaaacttaaggatcccgaaaaaaataatatttttactggagaattttggactggaaaaacatcattaaagcttgggttgattgacggtattggaaacgctgatcaagttttaaaagaaaaatttggagaaaaagtaattattaaaacatttgaaaaacccaaaggttttattgcaagaaaactttcttcatccgttaaagacccagttgaaaaacttgttaatttaattgaagaaaaatcgatgtggcaaaaatttggtttatag

SEQ ID NO: 263886 - DNA, 1024 bp, Unknown
  Bacterial polypeptide expressing nucleotide sequence isolated from the Sargasso Sea
aatgatatttttcagtgttttttttagaactcttggttttttgagtgcattactaatttttataataattattaatttggtacttaatttttctaatgaactggaaaaaaaacagtttgtaatgactgaaggtatacctagttcaaataatattatagctaatattaatttaaatgggccaatatttaataataacagcaatgttttaggaaataatttttatgattacatcaatccctcgcaggtaaaatcttatttagaagagttaaaagaactagaaatcaaggttctaattataaacattaattctccaggtggaacagtaagtgctactgctgagttagaacaaattatttatgaatttaaagaacacacaaatactaaagtatatttttttacaaaagagattttagcatctggaggatactgggttgcaaccactgctgataaaatatttgcttcatatggatcaattataggtagtataggagtaagtggaccaagttggttctactataatacaccgacaagtctatcttcaggaatctttggccagacaattgagactaaagaaggaatagaagtttttaaccagaatgctggagaaggaaaagatttgtttaatccgtttagacgacctagcagtgatgaaatcaaacacttacaaaatatcgttgatgatgtttataatgattttataacaaaagtttcaaaaagtcgtaaaattgaaatttcaaatttaaaaaatgatattggagctttaatctatagtagtaatcaggcaaaaaataattttttgattgacgatattttgaattacgaaacacttatcaagttaattgcaaaggaaaataaatttgacgattacaaaatttatgaaaataaagttagcaattcaatattaacaaacctattagttaagtatgaaaatcaaactgattataaatattctcttgaaaacatttgcagaaatctagaaactaatattaatgttgtaattccagtttatttaaaagaatgttaa

SEQ ID NO: 263887 - DNA, 727 bp, Unknown
  Bacterial polypeptide expressing nucleotide sequence isolated from the Sargasso Sea
tggtttagcaatcaataatttagaaaagttaattgataagttatttgctgataaaaaatctcctgttgtaggtttggtcattaattcacctggaggttctcccacacaatcctctttaatagcaaaaaagatcattgatctggcaaaggaaaaaaacaaaaaagtattagcattcgttgaagatgttgcagcttctggtggttattggttagcatgtgctgctgatgaaatatatattgatcaaaactctgttattggatcaataggtgttatttcaccaggttttggttttgttgatcttttaaaaaaagttggaattgaaagaagagtgtatacatctggaaaaagtaaaagttttcttgaccctttcaaagaagaaaaacaggaagacattgatagattaaaaaatattcaagaacaaattcatgataattttattaattatgtaaaagatagaagaggttcaaaacttgatcagaataaattagatgacatcttttctggtttattttgggttggtaataaagctatcgatttaggtttagcagatggtattggtgcaataaaaccaattttagaagagaagtttggaaaaaaaattaaaattaaaataatcagtcaaaaaaaatcatttttacaacgtagattttcttcttcaatatttaattctgatgaaattttaaataaaattgaagaacgaattatgttttctaggtttggtttgtaa

SEQ ID NO: 263888 - DNA, 796 bp, Unknown
  Bacterial polypeptide expressing nucleotide sequence isolated from the Sargasso Sea
atgactaatttaaatattctcatagtagaaggaaacgatccaaagaataacgaattctttgtaaaagccgcgaaggcatcttgttcagaaaactttaaaaatttagttttaaaattagaaccaagttcaaaagttaaaatcattaatcccgcaaaagacaatgatacaaaaactgctttagaaaacattaaaaattacgatggattaatttttacaggtggagccatgagattaaacgatatgtcagatgaaattaagaaacatttaaattttgcgtctaattgttttaaatatgaatgtaaaattttagctatttgttggggtttacaagtttgttgtgcagctgcaggaggaaaggtagctccaggaaaaaatggagcacatataggtatagctacagatatagaaattaatgatgaaggaaaaaaaaaccctatatataaagataagaaatcaaaatttacttcaccagcatttaattatgatgaagtgtgtgaaatacctgatggtgctactttattatctagcgacaaagttaataaagtaatgggattacattttaaacaagaaaaatctgaaatatggggattacaataccacccagattatgagtattggcaaatgataaatttatctattggaagaaaagatcgtatattacaaaacaatcattttgataatgaaaatgattttcaaaatcacttaaattatatcaaagaagaggaaaagaaattagattttgagaatagaacatttgaaataagaaattggcttaattatttaaaagtgtcttaat

SEQ ID NO: 263889 - DNA, 1249 bp, Unknown
  Bacterial polypeptide expressing nucleotide sequence isolated from the Sargasso Sea
atgaaatatttaaaaattatcgcctttacattaacaagtttatttttttcaaaattagttgttgctgaaacagctccaggttatggttcttgggatgatgttttaaaagcggctgatggtggtcaagtaaacgtctatatgtggggtggatctgatgctatcaatggttttgttgatgatttttatggtgttccattaaaggaaaaatataatatcaccttgaatagagttcctttagctggaactgttgacgccgttaaccaagtactaagtgaaaaagaagctggtgtaactggtgatggtggaagtattgatctaatttggatcaatggtgaaaatttctggacacttaagcaagctaaattattgtatggtccttttgctgctgctcttccaaatagtgaatttgttgcttgggataacccagctgtaaatcttgactttggtagaccagtagatggaatggagagcccttggtcaagtgctcaattccacttcatgtatgactcggctagaaataattatgatgatatgccaagaagttatgctgaattaagtgactggattgcaagcaaccctggaagatttacttatattagacctggtaaaggtggatttgttggtacaagatttgtaaaacaaattttctttgaattaagtggaggtcaggaacaatgggtaggtccatttaatcaagcattatatgataaatgggcaccaaaagtttgggaactcttaaattcttgggagaaggatttatggagaaatggtgaaacatatccaaaagacaatgcggaaatgcatagtttatttgcaaatggtgaagttgatctagatttcacacaatcaccaagaggtgctggaccaacaaatactgcgggaactacacctcctacttctagagcttttgcgttctatgaaaatatgatcggtgacttcaattactgggcaattccatataacgcacctaataaggctgctgctttagtctatgctaatttagtattagaacctgaacttcaagctgcacaagttcaacctgcaaatggtttttgttgtggatggggtatcagcactgctaaagtaactgatgctgctggaaaagctgctattgaagaagcacaaaacaatcttggagatgctgctgaagatcaaaacattttagcgaaagctttggtttcagatatcgctgctgagtaccaagatttgatagaagctgattgggaagcaaacgtacttcttaaataac

SEQ ID NO: 263890 - DNA, 358 bp, Unknown
  Bacterial polypeptide expressing nucleotide sequence isolated from the Sargasso Sea
aatgctctctttttttaaaaagaaaaaaattattccacatattaagctaactggagttattggaaatgtagggaaatttaaacaaggtatagatttttctggccaagaagacattatcagaaaagcattttctctaaaaaaagcaccatgtgttgctataacaataaactctcctggaggttctcctgttcaatcacatttaatttacagcttaattagacaacaggcaaaaaaaaataaaaaaaaagtaatagtttttgccgaagatgtagcagcttcaggcggatatctaatagcttgtgctggagatgaaatttatgcgaactcaagttcaataataggctcaataggagtaatc

SEQ ID NO: 263891 - DNA, 194 bp, Unknown
  Bacterial polypeptide expressing nucleotide sequence isolated from the Sargasso Sea
tatgtttaaaaagatattctcaaaaaatgtccaaattccaactttaagactatctggtgtaatttcagctcaatctggtattacaagttctagcttatctattaatactcttgaaaagctaatagaaaaacttttttctgataaaaaatctccagcagttgcaataataattaattcacctggagggtctccaa

SEQ ID NO: 263892 - DNA, 1393 bp, Unknown
  Bacterial polypeptide expressing nucleotide sequence isolated from the Sargasso Sea
taaatttatcgatgaaacatataaagtttcatttaaatttaacagaaaaacttactatggtttcaaaggagatactttagcctcggcacttttagcaaatgatatccacttagttggaagaagttttaaatatcatagaccacgtggaataatgactgctggttcggaagaacccaatgcaatagttcaattacatagcaatacatcaagaacggaacctaatgtaagagctacagaaatagagatttatgagggactagaagcttcaagtcaaaattgttggccaactgtaaattttgatataggtggaataaataattttttaagcccagtattacctgcgggtttttattataaaacttttatgtggccagcaagtttttgggaaaaatatgaatactttattagaaaatctgctggattaggaaaatcacccaaagagtcagatcctgatatttatgaacataaatatattcattgcgatgttttaattattggtgctggtatttcaggcataatggcagctaaaattgctgctaaaaatggttttaaaacacttttagttgatgaaaaaccatatttaggtggatctacaatttatcaaaattctgaacatttcaaaattaataatcaattatcaagttcttggttagaaaaggagattaacgaaatcaaaaaaattaaaaatttggaaattaaaactagaacaagtgttgctgcttttcatggatataattttttattagccagagaaaatttaactgatcacctgcctctagaacaaagaaataacaaaactcgacacagattacttaaaataagagcaaaaaaagttataacagcaaccggatctctagaaagaccattaatttttaataataatgatcgacctggtattttactatcctcagcaattgataaatatgcaaatttatttggtgtagtatgtggagaaaaaaatgttttattcacaaataatgatagcgcctatgaaacagcgattagtctatatcaaaaaggaattaatattgaagctattattgataatagagaagaaattgattcaaaattaattaaggaaattgaaaaaaataatattaaaattcataagggatatacaatagtaaatacctttggatacaaaagaattaaaaaagtttcaataatgaaactatcgaaagatggtcaaaaagtaattggctctaaagaatatattaattgtgattgtcttggaattacaggtggatggacaccagctgtacatctttttacacaatctgggggtaaattaaaatttagagatgaagatcaagtttttataccgaatatatatccatcagatcaagttagtattgggtcatgtaatggggattttactttagatgaaatataa

SEQ ID NO: 263893 - DNA, 436 bp, Unknown
  Bacterial polypeptide expressing nucleotide sequence isolated from the Sargasso Sea
atgttctctttttttaaaaaaaaaaaaatcatacctcacattaaactaagtggcgtgataggaaatgttggaaaatttaaacaaggcattgattttgcagggcaagaagaaatcattaaaaaagctttctcaattaaaaaagcacctgcagttgccatttctattaattcacccggaggatctcctgttcaatcacatctaatacatgactttattaggttacaagcaaaaaaaaataataaaaaagtaataatttttgccgaagatgtagctgcatcgggcggatatttaattgcctgtgctggagatgaaatttatgcaaataaaagttctatagtaggatcaataggtgtgatttactcatcatttggttttaaagatcttataaataaaataggagttcaaagaagagtttatactgctggtaaaaataaaa

SEQ ID NO: 263894 - DNA, 577 bp, Unknown
  Bacterial polypeptide expressing nucleotide sequence isolated from the Sargasso Sea
atgttttcaatttttaagaaaaaaaaaatagttccgcatgtcagacttacaggcatcataggttcagccggtaaatttaaacaaggcatggaattagccaatcaaagagatattttgaaaaaagctttttcagtaaaaaaaatttctcacgttgcaatatcaatcaattcccctggtggatcgccagttcagtcacatttaatatatagttatataaggcagttggctgaaaaacataaagtaaaagttattatatttgccgaagacgttgcagcatcaggtggatattttattgcatgcgcgggagatgaaatttatgcaaattcaagttcaataattggttcaataggagtaatttctgcatcctttggttttaaagacctaattcaaaagattggagttgaaagaagagtttatacagctggaaaaaataaaagcactttagatccatttaaagaagaaaaagaggaggacattaaaagattaaaaactatacaacttgaattacatgaagactttataaaagttgtccaaaaaagcagagggtcaaaacttaaaggatcccgaaaaaaataat

SEQ ID NO: 263895 - DNA, 747 bp, Unknown
  Bacterial polypeptide expressing nucleotide sequence isolated from the Sargasso Sea
cgcaccaaatattgggtagaaaaaaaggattgaatattcaagattataataaattaattgaacaagcatttcaaaataaacggaataaggctgtagttttagttataaattcacctggtggttcgcccgtgcaatcggagtttttagcagataagataattaatttatcaaaggaaaaaaatattcccgttatcacctttgtagaagatgttgcggcgtctggaggttattggttggcttgtgcagcagatgaaatttttgcaagtaaagcatcaataataggttcaataggtgttatatctgcaggttttggatttgataaagcattaaataagattggggtagacagaagaatttatactgctggaaaaaataaatctttattagatccattttcgcctgaaaacaaggatgatgtaaaaaggttaaaaagcttacaaacgaaattacatgatcattttatttcatttattaaattaagaagaggaaaaaaaattgatttaaagaataaagatttattttctggaatgttttggtcagggcaagaggcattagaacttggtctaatagatgggataggacaggttaattctattcttaaagatagatttggaaataatataaaaattaaagagtttcaaaataagaaaagattttttgatctaggaaacttaattagtgttacatttgaggttatttcaaataaaattgaagaaaaactgatatttaaaaagtttggactataat

SEQ ID NO: 263896 - DNA, 397 bp, Unknown
  Bacterial polypeptide expressing nucleotide sequence isolated from the Sargasso Sea
tatgtttaaaaaattcttttctagaagtactcaaattccaacattacgtctttctggtattatagcagcacaatctggaataactggttctggtctagcaattaataatattgaaaaactaattgataagctgttttctgataaaaaatctcctgctgtagctctaatcataaattctccaggcgggtctccaacacaatcatcacttattgcaaaaaaaataattaatttaagcaaagaaaaaaataaaaaagtcattgcttttgttgaagatgttgctgcttcgggaggatactggttagcatgtgcagctgatgaaatttatatagatcaaaattcagttataggttctattggagttatatcacccaggctttggatttgtagatctataaaa

SEQ ID NO: 263897 - DNA, 802 bp, Unknown
  Bacterial polypeptide expressing nucleotide sequence isolated from the Sargasso Sea
ttttaaaaaaaaaaccattattcctcacataagattgtctggtgttattggttctgcgggaagatttcgacaaggaatagatttttccggacaacaagaaattataaaaaaagcattctctttcaagaaagcaaagaacatagcaatttcgataaattcaccaggaggttcgccggttcaatcacatcttatacatgattatattaggcagttagcgagtaaaaataaaaaaaaagtaatagtttttgccgaggatgtcgctgcatctggcggttatttaattgcttgtgcaggagatgaaatttatgcaaattcaagttcaatagttggttcgatcggtgttatatcggcatcttttggctttcaagatgcaattaaaaaaattggaattcaaagaagagtttatactgcaggcaagaacaaaagtacactagatccttttaaagaagaaaaagatgaagatatccaaagaataaaaaaattacaattagagttacattcagattttatcaatcttgtaaaaaagagcagaggttcaaaattaaaagaacctgaaaaaaataatatttttacaggggagttttggtctggatcagcttctttaaaacttggattaatagatggtattggaaatgctgaacaaattttaagagaaaaatttggagaaaatatcgagattaaaaaactagaaaaaccaaaaggatttatagcaagaaaattatctgcatcattagatggtcagattgatagtattatcgaagctgttgaagaaagagcactgtggcaaaaatttggtttataa

SEQ ID NO: 263898 - DNA, 1501 bp, Unknown
  Bacterial polypeptide expressing nucleotide sequence isolated from the Sargasso Sea
aatgaatcaaattaaatctattttctcttggcttaatagttttctggaaaaagccagaatcataatgcttaatatagctacagccatcgttttgattttttttataatattaatttttgggccaataacatctatagaatcagaagttaaagatccaagtggcagagtactattcattgatcctgtgggaactgtagttgaccaagaagtgtttagttcagattttctgcttgaaattgctacaggatcctcaactgaacaaattcaaacaagagatcttattcaattaataagagctgcaggccaagatgaagatgttcctgctgtgcttgttgatttctcatccacaagctttgctggaccaactacagcaataaatattgcaaaagagttgaagtcacttcgtgattcaggtaaaagggtaattgctttcaatgatcgtttgtctactacttcttatctcatggcttctcaagcatctgagatctggctacatcctgttgggagtataagcattagaggcataggaggagttcgtgcctaccaaaaagagctttatgaaaatttaaaaatcaattttcacaattattcccaaggtgatttcaaatctgcagttgagtcaaatacaagaactaacatgtcagaaaatgacaagatgcaaagagaagatctgctcaatccaatttgggatgaaatgaaattccttatggcgcaggggcgtggtattgaaataaatgatttgcaatcttttgcagatgaatacatcggattttttggagaggctgaaattggaaatattgcctatgctttagaaaaaaatattattgatggtacaaaatcatttcctgaatttcgtcagtatatgattgaagaatttggtttagatgaagaagctgaaacggaaacttataaaactatttcttataatgactataagaagcaaataaataaagattattctaatagtgataatcaaatagctgtaataactgttgaaggagtaatcatggaaggagaaatcatgcaaggagttgctggagctaatgggatagtaaatcaaattagaacagctcatgaagatgaaaatacaaaagctattgtcttcagggtaaatagtcctggtggatctgtaattgccagtgaaatgatgagagatgagttaatcgctgctaaaagaaaaggaattaacgtgattatatctatgggggactatgcagcatctggaggagtgtacatatcaactccagctgattatatttttgctgaacccacaacaattactggctccattggagttgcaatcgccattccaacatttgaaaatgctatggattacattggagtaaattttgacggagtgtttacctcaaagtacgcaggctgggatcctactcaagccattgatgataatttagataaaatttttgaaagctggggtgccgatgtatacgatcgatttgtcaactttgtggctgagtcaagatctaaatcatatgaggac

SEQ ID NO: 263899 - DNA, 808 bp, Unknown
  Bacterial polypeptide expressing nucleotide sequence isolated from the Sargasso Sea
tatgttctctttttttaaaaaaaaaaaagttattccccacattaaattaagtggagttattggaaatgtaggcaagttcaagcaaggtattgattttgccggccaggaagaaattattaaaaaagcattttcaataaaaaaatctccagctgtagctatatcaattaattcacctggtggatctcctgtgcaatcacaccttattcatgattttataaggagccaggcaaataagaacaaaaagaaagtaattatttttatggaagacgtagccgcttccgggggatatttaatcgcttgtgctggagatgaaatttatgcaaatcaaagttcaatagtaggttctattggagttatttactcttcatttggttttaaagatttaattcaaaaaattggagttcaaagaagggtatacactgccggaaaaaataaaagtactttagatccatttatggatgaaaagcaagaggatattgagagacttaaaaatattcaactagaattacataaagactttattgatgtagtagaaaaaagtagatcaaagaaattaaaaaaagacaaaggtatagaattattttctggtgaattttggtctggtaggaaatctttagaattaggtttagtggatggcattggatcagcagatcaaattttgaaagaaaaatttggagaaaatgtaataattaaaaaatttgaaaagtcaaaaggctggctagcaaaaagacttgcttcagaaaaaaatgttgatcaattaatgactattttagaggaaagatctatctggcaaagatatggtttctaa

SEQ ID NO: 263900 - DNA, 258 bp, Unknown
  Bacterial polypeptide expressing nucleotide sequence isolated from the Sargasso Sea
aaatgagattttcattacctaatgcaagaataatggttcatcagccaagcggtggttaccaaggacaggttacagatattgaaatacaaacaaatgaaattaaaaaaactaaaaataggttaaacgaaatatattctaaacatacaggaaaaaagatttcagaaatatcgaaaattatggaaagagataaatatttttctccagaagaagcaatacaatttggtctaatagataagataattgagagtaggaaataat

SEQ ID NO: 263901 - DNA, 697 bp, Unknown
  Bacterial polypeptide expressing nucleotide sequence isolated from the Sargasso Sea
actgataaaaaaggctttttctctaaaaaaagcagtatctgttgctatatcaatcaattctcctggaggatcaccagttcaatctcatttaatttacagttttattagacaacaagcaaaaaaacaaaaaaaaaaagttattgtattcgctgaagatgttgcagcctctggaggttatttgatttcttgtgctggggatgaaatttatgcaaattcaagttcaataattggatctataggggtgatatattcttcttttggatttactgagttgataaaaaaaattggggttgaaagaagagttcatactgcaggtaaaaacaaaagcacacttgatccatttttagaggaaaaaaacgaggatattgaaagattaaaaaatattcaattagatcttcataaagactttatagatgttgttgaaaaaagcagaggatcaaaattaaataaatctgatgtagaacttttttcaggtgagttttggtcaggaagtaaagcaaaaaatttaggattgattgatggaataggtaatgcacatgaaatattaaaagagaaatttggtgaggacgtaattattaaaaaatttgaaaaatcaaaaggatggttaagtcaaaaactttcttcatctagcaatcaagtagatcaaatagcaagtattttagatgaaagatcaatttggcaaagatatggtttctaa

SEQ ID NO: 263902 - DNA, 814 bp, Unknown
  Bacterial polypeptide expressing nucleotide sequence isolated from the Sargasso Sea
tatgttttctattttcaaaaaaaagaaagttgtacctcatgtgagattaaccggcattattggctctgctggtcgttttaaacaaggtatggaattagccaatcaaagggatatcctaaaaaaagctttttcagtaaaaaagatttctcacgtggctatatcaataaattctcctgggggatcgcctgtacaatcccatttaatttatagttatataagagaacttgctgataaaaaaaaagtaaaagttttaatttttgctgaagatgttgctgcttccggaggatatttcattgcatgcgcaggagacgaaatatttgctaattcaagttcaataattggttctattggcgttatatcggcttcatttggttttaaagatttaattcagaagattggagttcagagaagagtgtatactgcaggaaaaaataaaagtactttagatccttttgtagatgaaaaagaagaagatgttaaaagattgaaaaatatccaattagagttacatgctgattttattaaagttgttgagaccagtcgaggatcaaaattaaaagatccagaaaaaaataatatttttacaggagaattttggacaggtaaatcggctttaagactgggcttaatcgacggtattggaaatgcagatcaaattcttaaagaaaaatttggagataaagttattataaaaaactttgaaaaacggaaaggttttttagcaaaaaaactttcttcatcaatctctgatccttttgataaaataataaataatttagaagaaaaatcgatgtggcaaagatttggtttatag

SEQ ID NO: 263903 - DNA, 994 bp, Unknown
  Bacterial polypeptide expressing nucleotide sequence isolated from the Sargasso Sea
atggccgaccaaccgaattccccggattcctcctcccgtcccgacagccgtgaaccgaactgggagcgtgcggcgctcgagcggatcgcgctcgcggccgtcaaggagcagcgcgcggcgcgacgctggaagatcttcttccgcttcgcgttcctcgccgtgttcgtgctgttcgcgttcgcgctgatcgatttttcgagcgattcgaagttttcgtcgagcgggcggcatacggcgctcgtgacgatcgacggcgagatcgcggccggcgtgaacgcaaatgccgacgacatcaacaccgcgctcgacgccgcgttcgaagacgacggcacggccggtgtcgtgctgcggatcaacagtccgggcggcagcccggtgcaggccgggatggtctacgacgagatccgccggctgcgcgcgaagcatccggacaagccgctgtatgtcgtcgtgaccgacatgtgcgcatcgggcggctattacatcgcgtctgcggccgacaagatcttcgtcgacaaggcgagcatcgtcggctcgatcggcgtgctgatggacgggttcggctttaccgggctgatgggcaagctcggtgtcgatcggcgcctgcatacgtcgggcgaaaacaagggcttctacgacccgttctcgccggaaacgccgaagatggacgcgcacgcgcaggcattgctcgaccaggtgcacgcgcagttcatcaaggctgtgaaggatggccgcggcaagcggctgcacgagacgcccgacatgttctcgggcctgttctggaccggcgagaagagcgtcgagctcgggcttgcggacggttacggtacgaccgacacggtcgcgcgcgacgtgctgaaggcgccggatctcgtcgactacacggtgaaggaaagcctgacgaaccgcgttgcgcgcaagttcggcgcggccgtcggcggcgccgcgatgaaggcgctgacgaccggcggcgcgtcggtcagcctgcgctgac

SEQ ID NO: 263904 - DNA, 157 bp, Unknown
  Bacterial polypeptide expressing nucleotide sequence isolated from the Sargasso Sea
ataaaagcaaagctgaatgaaatcttagcaaagcattccggtcagaaagttgataaagtggctaaagatagcgatagagataattttatgtcgcctgatgaagctgttaaatatggattaatagataacgtagttgacagtagattaaaggaataat

SEQ ID NO: 263905 - DNA, 112 bp, Unknown
  Bacterial polypeptide expressing nucleotide sequence isolated from the Sargasso Sea
atggatagtaataaaatattcagtcagctagtgcctatggtggtagagcaaactggtagaggcgaaagggcttttgatatttactctaggcttctgaaagaaagaatcattt

SEQ ID NO: 263906 - DNA, 122 bp, Unknown
  Bacterial polypeptide expressing nucleotide sequence isolated from the Sargasso Sea
catgaaaaaagagccttcaaattatgttgtacctacagttattgagaatacaaacagaggcgagagagctttcgatatttattcaaggcttttaaaagatagaattatatttcttggcactc

SEQ ID NO: 263907 - DNA, 241 bp, Unknown
  Bacterial polypeptide expressing nucleotide sequence isolated from the Sargasso Sea
atgaatgaagaaataaacagtctaatacctatggtggttgagcaaactccaagaggggagagggcgtttgatatcttttcaagactgctcaaagacaatgtcatatttgctgttggaccgattgaagaccacatggcaaatctgatcaatgcacaaatgttatttcttgaaagtgagaatcccaataaagacatctacttgtatataaattctctctgggggatcaattacatccaggatt

SEQ ID NO: 263908 - DNA, 238 bp, Unknown
  Bacterial polypeptide expressing nucleotide sequence isolated from the Sargasso Sea
ataatgattcatcaaccacttggaggtgctagagggcaagccagtgatataagaattcaggcagatgaaattttgtttttaaaagaacgattaaatactgaactatcagaaaggactggaaaggattatgagactatcaaagaagatactgatagagatttttatatgtccccaaacgaagctgttgagtacggtttaattgatctagtgttagataagaaaccaataaaagtttagc

SEQ ID NO: 263909 - DNA, 816 bp, Unknown
  Bacterial polypeptide expressing nucleotide sequence isolated from the Sargasso Sea
tatgtctctagagctcgaattatttgaggaaaggcggcgtagaacacgtcggaaatcttttttttggggagctcttctgagcggtggcctagtattgactgctgttctaatccttaatattgattcggtgtcctatcctcatatcgctgttttccaagtgaacggagaaattcaggatgatcctgatagggataatttgctcaatgagattgccgaagacgtcaacgtccgtgccgtccttttgagaattaatagtcctggcggtagtgtggtaggttcagaggcactctatgaaagtatcagagatatttcgaaaaaaaaacccgtcatagccttaattggaggtattggtgcatctggggcctatattgcagctcttggaagcgattatatatttgctaggggcaattctttagttgggtcaatcggcgtaatggtgcagtatccggatgtgtcggagcttgctaaccgattgggaattaccgttgatgtcattagttcgagtgatgtaaaacgatccccccaccccctatttcctatggatcaagtctcaagaggctttcaagaagctttaattaaggacagtttctcttggtttaaagaattaatagctgacagacgtggtgtgtctagtgaggtgctttctgaagtaagccaaggacagctgtttacggggagaatggccgttgaccttgatctcgtagatggaatcggcggtcaatctgacgctttacggaagcttagttcggagaatgaagcattttccaatttgctggtcagagagtgggttgctgagggtagctcgggtttcccatg

SEQ ID NO: 263910 - DNA, 637 bp, Unknown
  Bacterial polypeptide expressing nucleotide sequence isolated from the Sargasso Sea
atgttttcatggtttaaaaacaaatctaaaaaactaaagagttcttatgattctttagttaattttcagacccctaatcttttaacaagagtgattcatctagggggcgaaattaatgatgagttatgtaataaagttgtttctcaaatgctttatcttgatgctgaagataactcgaagccaatatatttgaagattaatagtccaggaggttcagtgacgaatgccctagcaataattgacaccataaaatatgtaaagagtgatgtagttactatttgtcaaagcgtttccggtggcatagcaacattacttttggctggagggaaaaaagggtctagattttccacgatacctgcaacaattcaagtaggcgaaataagcaatgagagggatgaaagtggaacagcaactgatgcagaaaaaagagagatagtaaaaatatgttatttaattgacaaaacactttgtgaatacacaggtcaaccaatccaaatgattaaaaaaataaaaaaaataagtcgaatttctccatgggaggctattgaatatggtttaattgatcaaatccttaaaagtaacacagaattatatcaatatatttctcataagaaggattttaagtacgggaaataag

SEQ ID NO: 263911 - DNA, 271 bp, Unknown
  Bacterial polypeptide expressing nucleotide sequence isolated from the Sargasso Sea
atgactcgtgagtcttttgttcctcagtcagctagtgcatacggcgattatcaacgtcagaggacgatgacgcttggcgatcttcttttggagaatcgcatcattcttcttcaaggtgaaatttatgatggaaatgccaatgaattggtaatgaagctactgtatctccagagtgagaacaggagaaaagatatcaacttctacatcaattctcctggtggtagtgtgacagcgacgatggcaatttatgacaccatgcagattctctcct

SEQ ID NO: 263912 - DNA, 236 bp, Unknown
  Bacterial polypeptide expressing nucleotide sequence isolated from the Sargasso Sea
ttcaagaatcatggttcatcaaccctcatcaggatcccaaggtcaggcaacagatatacaaatacatgcaaaagaaattcttgatttgaagaatagactaaataagatttattcaaaacacacaggtaagtcagtcgatgaaatctcaaccgctttggagagagataattttatgacagcagaagaagcaaaaaaatttggcttgatagactctgtggtagaaaaaagaaaatagt

SEQ ID NO: 263913 - DNA, 337 bp, Unknown
  Bacterial polypeptide expressing nucleotide sequence isolated from the Sargasso Sea
tcatctgaaatcatgacaatatgtgtaggacaggctgcatctgcaggatctttattgcttactgcaggttcaaaagatatgagattctcattaccaaattcaagaattatggttcatcaaccaagtggagggtatcaaggtcaagttactgatattgagattcaaactaatgaaataaaaaaaacgaaagaaaaattgaatcaaatatatgctaaacatactggaaataaaattgaagatgtagaaaaaattatggagagagataaatatttttcaccagaagaagcagtaaaatttggtttgattgacaagattgtggagaatagaaaaaaataat

SEQ ID NO: 263914 - DNA, 355 bp, Unknown
  Bacterial polypeptide expressing nucleotide sequence isolated from the Sargasso Sea
atgacactatgcaatatagtttcatcaaaaataatgacaatttgtgttggtcaagctgcatctgctggttcacttttacttactgcaggtgaaaaaaatatgcgcttttcactccccaactctcgaataatggttcaccagccaagtggtggttatcaaggtcaagtaacagatatcgaaatacaaactaatgaaatcaaaaaaacaaaacatagattaaatgagatttattcaaaacatactggaaaaaaactagatgaaatttctgtaattatggaaagagataaatatttctcacccgaagaagcgattaaatttggtttaattgataaaattgttgaaaatagaaaataat

SEQ ID NO: 263915 - DNA, 237 bp, Unknown
  Bacterial polypeptide expressing nucleotide sequence isolated from the Sargasso Sea
gagttatgatccatcaacccctgggtagtttccaagggcaagcaacagactttgatatacaagcaaaggaaattctttctattagagctaggctaaatcaaattttagctaagaacacaggtcagactattaaaaaaatagaatctgatacagagagagataattttatgacttctgatgaagccctaaaatatggcataattgataaaatattagatgctcgtcctgaggattaac

SEQ ID NO: 263916 - DNA, 864 bp, Unknown
  Bacterial polypeptide expressing nucleotide sequence isolated from the Sargasso Sea
tatgccatttttcaatgtatttttaagaacattaggatttttgattggcattacagttttcataatacttctaaatttattattttatatatttcccgaagaaaaagaaaattttgattttgtagagggaaataaagagtctaataatattatagcaattttagatctaaatggaccaattataaataattttaaccaatctttagtaggggatttatttgaatatatcactcccaatcgagttaaaaattatttatctaacttaaaaaaaattaaaccaaatattttgataattaaaataaattcccctggaggaactgtaaccgcaactgcatctttagaaaaaattattaatgattttaaaaaagaaaataaaattgaaatttatttttatagtaatgaaattttggcctcaggaggttattgggttgctactagtggtgacaaaatatatgcaaattatggatcaataattggcagtataggagtaagcggcccaagttggtattattttgataaaccaatatcagtatctagaggcataattggtcaaaaaattgagactaaaaatggaataaaagtttatgatcagaatgctggtaattcaaaagatctatacaatccgtttagaaaacctaaagatgaagaattaaatcacttaaatgaaatagttatggaaatttatgatgattttttgattaaagtttcaaatgctagaaaaattgaaattaatattttaaaaaatgaaattggagctttaatatattctgcaactcaagctaaaaaaaaatttttgattgatgatattttagatatagatcttttaattgataggattataaaagataaaaaatttattgatta

SEQ ID NO: 263917 - DNA, 274 bp, Unknown
  Bacterial polypeptide expressing nucleotide sequence isolated from the Sargasso Sea
gcagcaggagagaaaggcaaaagatattcattaccaaattcaagaattatggtgcatcaaccatctgcaggatttcaaggtcaggcgacagatatacaaattcatgctaaagagattctttctttaaaagaaagactgaacacaatatattctaaacatacaggtaaatcagtcgaagaaattgctaaagctttagaacgagataattttatgacagcagatgatgctaagaaatttggtttaattgactctgttgtggaaaaaagaaaataaa

SEQ ID NO: 263918 - DNA, 253 bp, Unknown
  Bacterial polypeptide expressing nucleotide sequence isolated from the Sargasso Sea
taactcacgaattatgattcatcagcctttaggaggatttcaaggacaagcatctgatttcgaaattcatgcaaaagagatgcttttagttaaaaagagggtaaatgaaatactctctaagcacacaggcaaaactttaaaaaaagtcgagcaagatacagacagagataatttcttaaatgctaaggaagctaaaagctatggcataattgatgaaatactagacaccagaccaaaaacaaatggaaaataa

SEQ ID NO: 263919 - DNA, 293 bp, Unknown
  Bacterial polypeptide expressing nucleotide sequence isolated from the Sargasso Sea
tgtgcgggtgccgcagggaagcgtttttacgcttcccaattccacaatccacatgcatcaggcactcggaggtgctcaagggcaagcgagtgatatagagattgcagcaaaagaaatactcaggatgcaagataaaattcggactatcctttccacgcatactggccagtcctatgagaaaatagcacgggatagtgacagagatttttaccttcctgcggaagaggccaaggaatacggattagttgacgaagtacttggcgcgaccgcaggagcagaaaaggcgaagtgat

SEQ ID NO: 263920 - DNA, 310 bp, Unknown
  Bacterial polypeptide expressing nucleotide sequence isolated from the Sargasso Sea
ttgtacaggcatagctgcatcaatggcagctgtattattatgtgctggtgaaaagggaaaaagatcaggtcttactcattcaagagtaatgattcatcaaccattgggtggggcacaaggtcaagcatctgatattgaaattacagctagagagattgggaagttaaaaaaagaattatacgaaataatcgctagtcatactggtcagaaatacgataaagtttatgaggactcagatagagattattggatgaaagctccagaagccaaaaaatatggtatgatagatgaagttctttctaaaaaataa

SEQ ID NO: 263921 - DNA, 394 bp, Unknown
  Bacterial polypeptide expressing nucleotide sequence isolated from the Sargasso Sea
ttacgcaggacttggaatttacgatattatgcaacatatttcttgtccggtgcatacatactgtgttggtttagccgcttccatgggctcgctccttctttccgctggtgctcctggatgtaggcactcacttccccacagtagaattatgatccaccagccacttggtggtgctcaaggacaatgttctgatatccaaattcaagctaacgaaattcaggatctaaaaaatcagctgaatggaatttatatcaagcattcatccaaaaaagagatgactatagaaaaaatagagctagaaacagacagggataattatttatctcctcagcaagctattgacatgggattaatcgataacattattgataaatcaagtccttctaaaggctag

SEQ ID NO: 263922 - DNA, 178 bp, Unknown
  Bacterial polypeptide expressing nucleotide sequence isolated from the Sargasso Sea
tatgagtcgggatttcgaagaaaaaatgaatagcttaatacctatggtagttgaacaaactagtaaaggcgaaagagcatatgatatttattcaagattactcaaagaaagaatagtttttctagttggaccagtaaatgatgctgtagcttcacttgtaacagcacaattattattt

SEQ ID NO: 263923 - DNA, 191 bp, Unknown
  Bacterial polypeptide expressing nucleotide sequence isolated from the Sargasso Sea
tatgagtcgtgatcttgaagagaaaatgaacagtcttattcccatggttgttgaacaaacaagcaaaggagaaagagcttatgatatttattctaggcttttaaaagagagaatagtatttttagttggaccagttaatgatgctgttgcatcacttgttactgcgcaattattatttttagaatcagaaa

SEQ ID NO: 263924 - DNA, 152 bp, Unknown
  Bacterial polypeptide expressing nucleotide sequence isolated from the Sargasso Sea
agatctaaactcaatcaaattttatcaaaaaataccggacaaactatcaaaaagatacaggctgataccgagagggataatttcatgcaggcagatgatgcaaaaaatatggttttatcgatcagatactcttatccagagagtaaaaactc

SEQ ID NO: 263925 - DNA, 289 bp, Unknown
  Bacterial polypeptide expressing nucleotide sequence isolated from the Sargasso Sea
ggttcttttttgttagcagcaggtgaaaatggaaaaagattttctttaccaaattcaagaataatggttcaccagccatcagctggatttcaaggacaagcaactgacattcaaatccacgcaaaagaaatactttcattaaaagacagattaaataagatttattcaaaacacacaggtaaatctgtaaaagaaatttctgaggctttggagagagacaagtttatgaccgccgaagaagcaaaggaatttggattaatagactctgtagttgaaaaaaggaaataat

SEQ ID NO: 263926 - DNA, 125 bp, Unknown
  Bacterial polypeptide expressing nucleotide sequence isolated from the Sargasso Sea
aatgagtcgcgaattagaggaaaaaatgaatagtttaatacccatggttgttgaacaaacaagcaaaggtgaaagagcttatgatatttattctaggcttttaaaagaaagaattgtttttttta

SEQ ID NO: 263927 - DNA, 241 bp, Unknown
  Bacterial polypeptide expressing nucleotide sequence isolated from the Sargasso Sea
ttgccaaattcaagagtgatgatccatcagccattgggtagttttcaaggtcaagctacagattttgatattcaagccaaagagatattaaatatacgctcgcgattaaatgagatactctctaagcataccggccaaactcttaaaaaaatccagaatgataccgaaagggacaattttatgacatcttctgatgctttaaagtatggaataattgatgaaatactagaatctcgttaat

SEQ ID NO: 263928 - DNA, 142 bp, Unknown
  Bacterial polypeptide expressing nucleotide sequence isolated from the Sargasso Sea
catgatcaatccccacgatcttcagatgaacacgttagtccctatggtcgtagagacgacaaaccgcggtgagcgctcatatgacatctactcaaggctactgaaggaacgcataatttttctcacgggtgggggtagatga

SEQ ID NO: 263929 - DNA, 193 bp, Unknown
  Bacterial polypeptide expressing nucleotide sequence isolated from the Sargasso Sea
gtcagctactgatattgaaattcatgctaatgaagttttgtctttaaagaaaaggttaaatgaaatttactcatctcatactggaaaaagtgtagatgaaattaaatctgctctagaaagagataactttatgacagcagatgtcgcacaatcatttggtcttattgacgaagtggtagaaaaaagatcttaa

SEQ ID NO: 263930 - DNA, 598 bp, Unknown
  Bacterial polypeptide expressing nucleotide sequence isolated from the Sargasso Sea
gatgtccatcgaagcagaggttttcgagcaagcaaaaaaaagggcaagaagaaaaggttttttatttgcgcttcttttggtctttttaatcttggttacggttataattcttaatagttttttagactttgaaagaaaaggcccacatatagcaaggataaaaatagacggcccgattttcgatgatataaatcttaatagactaatttacgagctggggctgaactcaaatgtaaaggcattgattgttcatataaatagcccaggtggttcagttgttggagcagagtcaatattcatagctttgtcggagttgagtagagaaaaaccatctgtgtctgtactgggtgaaactgccacttcgggcggatatttaatagcggcagcgacggacaaaataatctcacggtcaaataccctaacagggtctataggagtaatacttcaatatccaaatttttcgaaacttttgaaaaatattggaattgatgtaaatatgattagatcgtcggatctaaaggcatctatcaatttatttgagcaaccaactgctaaagccattgagaaacatcaacaagtcatagatgagaccttttta

SEQ ID NO: 263931 - DNA, 126 bp, Unknown
  Bacterial polypeptide expressing nucleotide sequence isolated from the Sargasso Sea
tatgaaagatattcaatcagctcttataccaatggtaatcgaacagactcctcgaggtgagaggtcgtttgatatttattcacgtcttttaaaagagagagttatatttctatctgggcctattga

SEQ ID NO: 263932 - DNA, 86 bp, Unknown
  Bacterial polypeptide expressing nucleotide sequence isolated from the Sargasso Sea
aatgagtaatcttgtaccaatggttgttgaacaatcaagtaaaggtgaaagagcttatgatatttattcaagactattaaaagaaa

SEQ ID NO: 263933 - DNA, 574 bp, Unknown
  Bacterial polypeptide expressing nucleotide sequence isolated from the Sargasso Sea
atggaaaaagacgaagaaagtcaagagacggacaatcttgccagcaagctgctgaagtctcgtacagttgtcatttcgcagcaggttgatgcaaaattaacttcaaaagtcttaagtcaattggttctgcttgagcaagaaggggatgaccagccggtaactgtattcatcaattcaccaggtggtgaaatattttcaggatttgcgatttttgatatgttgaatttcatttcttgccctgtaacaacaattgtgaccggatttgccgccagcatgggctcaattttaagtctggctgcggaccggggtcgcagatatgcaatgcctcaggcaaagatcatgattcatcagcctctgttaatgggttatcagggacgcgcaaccgaatgtgaaattcaggcaagagaaatacttaagacacgagatcatctcgttaagctgtattctgaacaaacgggaaaaagcaatgaggaaataaaaaaagctcttgacagagataactggtttactgctgaagaagcactcgaaaatggattaattgacaaggtggtgcacactaggtcagaaatataaa

SEQ ID NO: 263934 - DNA, 130 bp, Unknown
  Bacterial polypeptide expressing nucleotide sequence isolated from the Sargasso Sea
aatgacaaaaattgatgaacatatgaatgctttgataccaatggtggtagaacaaactaccagaggtgaaagagcttttgatatttattcaagacttttaaaagaaaggattgtatttgttgttggtcct

SEQ ID NO: 263935 - DNA, 190 bp, Unknown
  Bacterial polypeptide expressing nucleotide sequence isolated from the Sargasso Sea
taaagaagttttgtctttgaaaaaacgccttaatgaactttattctaaacatactggtcaagaggtggcagcaattgaggctgcactagaaagagataactttatgtcagctgaggatgcgaaaaagtttggaataattgactctattcaaacaaaaagatcacctcaaactgatactaaatctgaataa

SEQ ID NO: 263936 - DNA, 414 bp, Unknown
  Bacterial polypeptide expressing nucleotide sequence isolated from the Sargasso Sea
gtggcgatatcaatgctttgttcgccatatacgacacgagccaatacatccgaaacgacatcacaaccatctgcctcggccaagcagcctccgctgcagcggttctgctagcagcgggtactccaggaaaacgaatggctcttccacacgcaagagttcttcttcaccagccgtacggtcaggccatgggacaagccacagacatcgaactcgccgcccgagaaattgacaggatgagagacctcctcgaaggaatcttggctcaccacaccggtcaagacctcgaacgtatccataccgacaccgacagagacttcatcatggatgcagaagcagccaaagagtatggaattattgacgacgtgattgatagccgcgaagtcgcagaagatgggccaatacgagctgcctgat

SEQ ID NO: 263937 - DNA, 301 bp, Unknown
  Bacterial polypeptide expressing nucleotide sequence isolated from the Sargasso Sea
gcttcatcaatgggatcttttcttttagcggcaggtgagaaaggcaaaagattttcacttcctcattctaggattatggttcaccaaccttctgctggttttcaaggacaagcgaccgacattcaaattcatgctaaagaaatattatctttaaaagaaagattaaaccaaatctattcaaagcatacagggaaatcactaaaagagatttcccaagctcttgaaagggataaatttatgacagctgaggaggctaaaaattttggacttatagactcggttgttgaaaaaagaaaataat

SEQ ID NO: 263938 - DNA, 96 bp, Unknown
  Bacterial polypeptide expressing nucleotide sequence isolated from the Sargasso Sea
aatgaatgatatccagcaagctttaataccaatggtaattgagcaaacaccaagaggtgaaagatcttttgatatttattctcgtttattaaaaga

SEQ ID NO: 263939 - DNA, 185 bp, Unknown
  Bacterial polypeptide expressing nucleotide sequence isolated from the Sargasso Sea
aatgaatctagtaccaatagtaattgaacaatctggtaaaggggagaggtcatttgacattttctccagactgctcagagaaagaattatttttttgacaggcgccatcaatgatgagactgcctctttaatatgcgctcaacttttatttttggagtctgaaaatccggaagaacctattaatc

SEQ ID NO: 263940 - DNA, 220 bp, Unknown
  Bacterial polypeptide expressing nucleotide sequence isolated from the Sargasso Sea
catcaaccatctgcaggattccaagggcaagcgacagatatagaaattcatgctaatgaagtgttgtctttaaaaaaaagattaaatgaaatttattcaaagcatacaggtaaatctgtagatcagataaaagaagcattggaaagagataattttatgacacctcaaaacgccaaagaatttggattgatagatcaagtagtagaaaaaagaacataat

SEQ ID NO: 263941 - DNA, 406 bp, Unknown
  Bacterial polypeptide expressing nucleotide sequence isolated from the Sargasso Sea
ttgcgaaaagatgcgccctttcacctccgtgtgtccagaagaggccgactctcgtccaacccctcgtccgcgcccggctgtgtgcaggtggcctacaaggtcccgggcgcctactcggccgactgggtcgacctgtacaatcgcctgtaccgcgagcggatcctctttctcggccagcaggtcgccgatgacattgccaaccagatgatcggcatcatgctgtacctcgactccgaggacaacgccaagccgatcaccatgtacattaactcgccgggcggctcggtcaccgcgggcttcgccatgttcgacacgatgcgccacatcaagtccgatgtgagtgccgctcccagctttttgtgccccgcgcgcgcgtatgcgtgcgtgcgcgcgcgccgacccctct

SEQ ID NO: 263942 - DNA, 538 bp, Unknown
  Bacterial polypeptide expressing nucleotide sequence isolated from the Sargasso Sea
gatgtcagccaaactgctgaaatcccgcaccgtcatcatttcccaacaggtgaacagtgagctttccgctaaggttttgaaccagttggttttgctggaacaggaggatccaaaacagggcatcaccgttttcatcaactctccaggaggagaaatcttttccgggtttgcaatttttgacatgttgaaattcattgaatgcccaatcacgacggtggtgacgggattcgcggcaagcatgggttcggtattaagccttgccgccgatgaaggccgcaggtttgccatgccccaagcgaagatcatgatccatcagccgatgctgatgggctatcagggacgggcagcagattgtgaaatccaggccaaggaaattctcaaaacacgcgatcacctgatcaacctctattccgaacagaccggaaaggattatgaagaaatcaagcaggcgattgatcgtgacaactggttcacttctgaggaagccatggaatttggactgctcgaccgaattgtgaaaaaccgctcagaactttaa

SEQ ID NO: 263943 - DNA, 547 bp, Unknown
  Bacterial polypeptide expressing nucleotide sequence isolated from the Sargasso Sea
atggacaatcttgccagcaagctgcttaagtctcgtacagttgtaatttctcagcaggttgatgcaaaattaacttctaaagtcttgagtcaattggttctgcttgagcaggaaggcgaagatcagcctttaactgtattcatcaactcaccaggtggtgaaatattttcaggattcgcaatttttgatatgttgaatttcatttcttgtccggtaacaacaattgtaactggatttgccgccagcatgggctcaattttaagtctggccgcggacaagggtcgcagatatgcaatgcctcaggcaaaaatcatgattcaccagcctctgttaatggggtaccagggacgtgcaaccgaatgtgaaattcaggcacgtgaaatacttaagacacgagatcacctggttaagctgtattctgaacaaacaggtaaaagccatgaggaaataaaaaaagctcttgacagagataactggtttactgctgaagaagcacttgaatatggcttaattgacaaggtggtgcacaccaggtcagaaatataaa

SEQ ID NO: 263944 - DNA, 104 bp, Unknown
  Bacterial polypeptide expressing nucleotide sequence isolated from the Sargasso Sea
catgagcaatcttgtaccaatggtagtagagcaatctaataaaggtgagagagcttatgatatttattctagattattaaaagaaagaattatttttaacaggt

SEQ ID NO: 263945 - DNA, 127 bp, Unknown
  Bacterial polypeptide expressing nucleotide sequence isolated from the Sargasso Sea
atgaataataaaatttctgaatacatgaacaatctagtacctatggtagtagaacaatctaatagaggtgagagagcatatgatatttactctaggcttttaaaagataaggatagtatttgttgta

SEQ ID NO: 263946 - DNA, 196 bp, Unknown
  Bacterial polypeptide expressing nucleotide sequence isolated from the Sargasso Sea
ggacaagcaactgatatagaaattcatgctaacgaggttttatctttaaaaaaaagattaaatgaaatatattctaaacatactggtaaatcgatagatgaaatcaaatcagctttagaaagagataactttatgacaccagatgcggctaaagaatttggtttagtggataaagttgtatctaaaagagaataga

SEQ ID NO: 263947 - DNA, 538 bp, Unknown
  Bacterial polypeptide expressing nucleotide sequence isolated from the Sargasso Sea
atgtcagccaagctgctgaaatcccgcaccgtcatcatttcccaacaggtgaacagtgagctttccgccaaggttttgaaccagttggttttgctggaacaggaggatccaaaacagggcatcaccgttttcatcaattctccaggaggagaaatcttttccgggtttgcaatttttgacatgttgaaattcattgaatgcccaatcacgacggtggtgacgggtttcgcggcaagcatgggttcggtgctaagccttgcagccgatgaaggccgcaggtttgccatgccccaagcgaagatcatgatccatcagccgatgctgatgggctatcagggtcgggcggcagattgtgaaatccaggccaaggaaattctcaaaacacgcgatcacctgatcaacctctattccgaacagaccgggaaggattatgaagaaatcaagcaggcgattgatcgtgataactggttcacttctgaggaagccatggaatttggactgctcgaccgaattgtgaaaaaccgctcagaactttaaa

SEQ ID NO: 263948 - DNA, 1650 bp, Unknown
  Bacterial polypeptide expressing nucleotide sequence isolated from the Sargasso Sea
ttggattagtcgatttctagaaaaagcaagaatcatcatgctgaacgttgttacagcattcgttttgattttttttacgattgtaattattggagcgctaacctctttagagcctgaagttaaagatccaagcggcagagtgcttgtcattgatcctaaaggaactgtggttgatcaagaagcgtttaactcagattttctgtttaacattttcacagaatcttcaactgatcaaattcaaacaagagatcttatacaattaataagagcggcagctgaagatgaagatattcctgctgtgtttgttgatttttcatccacaggttttgctggaccaactacagcaatcaatattgcaaaagaattaaaagcgcttcgtgactctggtaaaagagtaattgcttttaacgatcgtctgtctacaacgtcttatctcatggcttctcaagcatctgaggtatgggttcatcctgttggaagcattagtgttcgaggtcttgggggaatgagcccttatcaaaaagagctttatgaaaatctaaaaattaattttcacaattattctcaaggggattttaaatctgccgttgagccaaacacaagaacagatatgtcagaaaatgacaggatgcaaagagaagctgtcctcaatcctatttgggataaaatgaaatctctcatggcggaaggacgtgggattgaatcagatgatattcaatcttttgcagacgactacgttgcatttattggtgaagctgcaataggaaatattgcttatgctaaagcaaataatattattgatggtacaaaatcatttccagaatttcgtcaatacatgattcaagaatttggtctagatgaggaagctgaaaccgaaactcacaaaactatttcttttatcgaatatgcaaagcaaatagatgaagacttttctgatagtgataatcaagtagctgtaattactgctgagggtgcgattatgaagggcgatatttctcaaggtgttgctggtgcaaatggtatagtaaaacaaatcagatctgcgcatgagaacaaaaatacaaaagcgattgtcttcagaattaatagcccggggggatctgtaattgccagtgaaatgatgagagatgagttatttgtagctaaaggaaaaggtatcgatgtgatcgtatctatgggtgactacgctgcatctggtggagtatatatttctacaccagctgattatatatttgctgaaccgacaacgattacaggttccataggtgtggcaattgctataccaacattggaaaatgcaatggatcacatcggagtaaattttgatggtgtggtgacttcaaagcatggtggctgggaccctaccaaagcaattgatgaagatttggataaaattttcgcaagctggggtatagatgtatacgatcgatttattaactttgtagctgagtcaagatctcaatcatataaagaaattaaagagattgcaggtggcagggtctggattgcaacaagcgccaaaaaaatagacttgatagatgagattggaggcattgataatgcaattacttacgctgctaatatggcagaattggaagactataaagtagagtattatagcgaaaaactatcttctgaggagatgatctt

SEQ ID NO: 263949 - DNA, 958 bp, Unknown
  Bacterial polypeptide expressing nucleotide sequence isolated from the Sargasso Sea
tatgaattatttttttcaagtattttcaaaaaccctaggttttttgctagctataatatttctactagttttaataagcctttttttattcatttttgagggaaataaacaaaaatattttagttatttagaaggaaataaaaattcttctgaaattattgcaattttaaatttgaatggacctataatttcggagccacctaattttaataattataatatattccaaaatttagaagtaatttatccttcacttataaaagaatatttgaatgaattagaacaaaataatacaaaaggaataataatatcaataaactctccgggtgggagtgtttctgctactcaaaaaatatataacttagttgcagagtttaaagaaaaaaataatattccaatttattttcatactaaagatattctaacctctggaagttattgggttgctttatctggtgataaaatttttgctgattatggaagtattataggaagtatcggggtaagaggtccaaattggctatattataattcaccaactatgttatctgaaggtctgtttggtagatctgtagagtcaaaaaatggactaaaattattttcaaatactgcaggtatgcacaaagatatttttaatccttttagaaagccgacacaaaaagaaatgaataaactacagatcatggttgatgatatctattctgattttgtgaatttagtttcaataaatagaaaaatagaaaaaaatattattattgatgatataggtgcaatgatatttaattcaaaaagagcaaaaattaattatttaattgatgatgaaaaaaatattgatgaaattattgaattaatttcaaaaaagttgaaacttgaaaatggaaaaattcttataaacaaatatgaagaaaagtataatttatttaatttaaattatattaatttttttaatcataaaata

SEQ ID NO: 263950 - DNA, 211 bp, Unknown
  Bacterial polypeptide expressing nucleotide sequence isolated from the Sargasso Sea
gtcagctggttatcaggggcaagcaacagatatagagattcatgcaaatgaagttttatctttgaaaaaaagattaaatgaaatttattctaaacatactggtaaatcggtagatgaaattaattcagctttggaaagagataattttatgactcccgattcagctaaagattttggtttagtagataaagtagtatcaaaaagagattag

SEQ ID NO: 263951 - DNA, 181 bp, Unknown
  Bacterial polypeptide expressing nucleotide sequence isolated from the Sargasso Sea
gcgagagaggtgctctaccagcgccaacgcctgaacgccatgatggccgagtgcaccgggcgcagcatcgaagatatcgtccgcgacaccgaccgcgacaacttcatgtccgcccacgacgccaaagcgtatggcctcgtcgacgaggtgctggaaacacgcgcgcaacacaaaagctgat

SEQ ID NO: 263952 - DNA, 142 bp, Unknown
  Bacterial polypeptide expressing nucleotide sequence isolated from the Sargasso Sea
tatgactattaaaattccagaacaattaaacaccctaatccctatggtcgtcgaacaatctagtagaggtgaaagggcatatgacatttattctagactccttaaagagaagaattgtatttgtagttgggtcaatacatga

SEQ ID NO: 263953 - DNA, 601 bp, Unknown
  Bacterial polypeptide expressing nucleotide sequence isolated from the Sargasso Sea
aatggaagaacataattcaactttaatacctatggtagttgagcaaactgccagaggtgaacgtgcttttgatatatattcaaggctattaaaagagcgagttattttcctaaccggacctataaatgatcaagtctcaaatcttgtagttgctcaattattatttctagaatcagaaaatcccaagaaagatattagcatttacattaactcaccaggcggcgtcatatcatctggtttagcaatttatgatacgatgcaatttgtatctccgtctatatctactttatgtattggtcaagctgcctcaatgggtgcattacttcttgctggtggtgaaaaggggaagcgatttgctttacctaattcaagaataatgatccatcaaccactcggaggtttccaaggtcaagcttcagatatcgagattcatgctcaagagatattgctaatgaagaaaaaagttaacgaaatattatcaaagcataccgggaagaatttaaagacagttgaaaaagatactgatagagacaacttccttaatgctgaggaagcaaaaaaatatggaatcattgacgatatattagaagaaagaagctaa

SEQ ID NO: 263954 - DNA, 613 bp, Unknown
  Bacterial polypeptide expressing nucleotide sequence isolated from the Sargasso Sea
atgacaaacaaaatatctgaatttatgagcactctagtacctatggttgttgagcaatcaagcaaaggtgaacgtgcatatgatatttattcaagactattaaaagaaagaattatttttttaactggtcagataaatgacaatgttgcttctttagtaactgcacaacttttatttttagaggcggaagatcccaaaaaagaaatttatttgtacatcaatagtccaggtggattagtaactgccggccttggaatatatgatacaatgcaatatgttaaacctgatatttctactttatgtatcggtcaagctgcatcaatgggttcatttttactttcagcaggaactaagggtaaaagattctcattaccaaattctaggataatggttcatcaaccatctgcaggttttcaaggtcaagcaacagatatagaaattcatgcgaatgaggttttatctttaaaaaaaagattaaatgaaatttattcaaaacatactggaaaaacagttgaagatattaagttagctctagagagagataatttcatgactgctgatgcagcaaaatcttttggattaatagatgaagtggtagagaaaagatcttaaa

SEQ ID NO: 263955 - DNA, 361 bp, Unknown
  Bacterial polypeptide expressing nucleotide sequence isolated from the Sargasso Sea
tggtatttatgatacaatgcaatatgttaaaccaaatatctctactctttgtattggccaagcagcttcaatgggatcttttttattagcagctggttcgaaaggtaaaagattttcacttccaaattcaagaataatggtacatcaaccttccgcgggatttcaaggccaagcaactgacatagaaattcatgctaatgaggtcttgtcgttaaaaaaacgacttaatgaaatttactcaaaacataccggcaagtcagttgatgaaatcaagttagcactggaaagagataattttatgacagctgatgcagcaaagtcatttggtttaatagacgaagtagtagaaaaaagatcataa

SEQ ID NO: 263956 - DNA, 335 bp, Unknown
  Bacterial polypeptide expressing nucleotide sequence isolated from the Sargasso Sea
accttctatctctactatgtgtattgggcaggctgcgagcatgggagctttacttcttgctggtggtgatgaaaagaaaagatttgctttacctaattctagaatcatgattcatcagcctttaggtggtttccaaggccaagcatctgattttgaaattcatgcaaaagagattttacacatgaaaaaaattgtcaatgagattttggcaaagcatactggccaaactattaagaaaatcgaaaaagatactgatagagataattttcttgatgcaaaagcggctaaaacttatggaataattgataatattctagaggtaaggaattcttaat

SEQ ID NO: 263957 - DNA, 610 bp, Unknown
  Bacterial polypeptide expressing nucleotide sequence isolated from the Sargasso Sea
tatgaaagataaaattgaagaacagatgaataatttgattcctatggttgttgaacaatcaaataggggtgaacgtgcttatgatatttattcacggttattaaaagagagaattatttttttagtaggacctgtaaatgataatgtggcaagcttggtaattgcacaactcttatttttagaatctgaaaatccaaaaaaagaaatatctttttatattaatagtccaggaggattagttacttctggtttaggagtttatgatactatgcagtatataaaggcgccagtctcaacattatgtattggacaggcttcttcaatgggatcttttttattggctgcaggagaaaaaggaaagagattttctcttccaaactcaagaattatggtacaccaaccttctgcagggtatcaaggacaagcaactgatatcgaaatacatgcaaaagaaattttgtctcttaaaaaaagattaaataaaatctattcaaaacatacaaaaaaatctgaagaggacataaaaaaagctttagagagagataattttatgacacccaatgaagccaaagattttggtttaatagatcaagttgtggaaaaaagataa

SEQ ID NO: 263958 - DNA, 615 bp, Unknown
  Bacterial polypeptide expressing nucleotide sequence isolated from the Sargasso Sea
ccgcccccgcccccttgccgaccgtggtggagcagtccggccgtggcgaccgcgccttcgacatctattcacggctgctccgggaacgcatcatctttctcggcaccggtgtggatgacgccgtggccgatgccctggtggcccagatgctgttcctcgaagctgaagacccggaaaaggacatccagatctacatcaactcaccgggaggttcggtgaccgcaggcctggccatctacgacacgatgcagcaggtggcccccgacgtggtcaccatttgctacggcctggccgccagcatgggtgccttcctgctgtccggtggctgcaaaggcaagcgactggccctgcccaatgcccggatcatgatccaccaacccctcggcggagcccagggacaggccgtggacatcgagatccaggccaaggaaattctcttcctcaaggaaacccttaacggcttgatggccgaccacaccggtcagccactcgacaagatcgctgaagacaccgaccgcgactacttcctttcccctgcagaagcggttcaatacggcctgatcgatcgggtggtggacagctccggggacaaaggaatcgttacggagggctgac

SEQ ID NO: 263959 - DNA, 271 bp, Unknown
  Bacterial polypeptide expressing nucleotide sequence isolated from the Sargasso Sea
gctgggagaaaaaggaaagagattttcactgccaaattctcggattatggttcatcagccatcagcaggctttcaaggtcaagcaacagacatacaaatacatgccaaagaaattctttcattaaaagaaaggttaaataaaatttattctaagcatactggaaaatctgttaaagaaattgcaacagcactagaaagagataaatttatgacagccgaagaagcaaagaattttggcttaatagataaagttgttgaaaaaagaaactaa

SEQ ID NO: 263960 - DNA, 422 bp, Unknown
  Bacterial polypeptide expressing nucleotide sequence isolated from the Sargasso Sea
ccagataaaggatatcttcttatatatcaactcacccggtggctcggtcactgcgggcatggcgatttacgataccatgcagtttattaagccgaatgtgagcactgtgtgtatcggtcaagcggccagcatgggcgcgtttttattagcgggcggcgaaaagggcaaacgtttctgcttacctaactctcgcgtgatgatccaccaaccactgggtggattccaaggtcaggcttctgatattgcgattcatgcccaagagatcttaggcatcaagcataaactgaacctgatgttgtcagagcacactggccagccactcgaagtgatagaacgtgataccgaccgcgacaacttcatgagtgcgactcaagcggttgaatatggtttagttgacgcagtgatgactaaacgcggctgat

SEQ ID NO: 263961 - DNA, 439 bp, Unknown
  Bacterial polypeptide expressing nucleotide sequence isolated from the Sargasso Sea
tttttagagtctgaaaatcctaaaaaagaaatttctttatacataaatagtcctggtggtttagtgacggctggtttagggatttacgataccatgcaatacattaaacctgatgtctcaacattatgtattggccaagctgcttcaatggggtcttttcttttggctgcaggggaaaaaggaaaaagattttctcttcctaattcaagaataatggtccatcaaccatctgcaggatttcaaggtcaggcaacagacatagagatacatgctaatgaagttctttctctaaaaaaaagattgaaccagatatattccaaacatactggaaagagtgaggatgaaattaagattgctcttgaaagagataattttatgacgtcggaaaacgctaaagaatttggtttgatagatcaagttgtagaaaaaagatcttagt

SEQ ID NO: 263962 - DNA, 610 bp, Unknown
  Bacterial polypeptide expressing nucleotide sequence isolated from the Sargasso Sea
atgaataaaataaatgaacacatgaacactttaatacccatggtggtcgaacaatccagccgtggtgaacgtgcttatgacatttattcaagattacttaaagaaagaattgtttttctaactggtccaataaatgatcaagttgcttcattagcaacagctcaacttttatttttagagtctgaaaatccaaaaaaagatatttttttttatatcaacagccctggtgggttagtaacagctggacttggtatttacgatacaatgcaatttattaaacctgatgtgtcaaccttatgtattggccaggctgcatcaatgggatctttcttattagcagctggcaaaaaaggaaaaagattttccttacccaatgcaagagtgatggtgcaccaaccatcagctggatttcaaggtcaggcaacggacatagaaattcatgctaatgaggttttatctttaaaaaaaagattaaatgaaatttattcaaaacacacaggtaaatctgttgaagaaattaaatctgcccttgagagagataattttatgacgccagagtctgcgaaagattttggattgatcgataaagttgtagaaaaaagggattaac

SEQ ID NO: 263963 - DNA, 332 bp, Unknown
  Bacterial polypeptide expressing nucleotide sequence isolated from the Sargasso Sea
tttggaaccacaaaactttaatcctaaatcattaatcccatcagttattgaaactacatccagaggagaaagagcttacgatatattttcattattacttaaagaaagaataatctttctaggtacgccagttgatgattttgtttctaacactattgttgctcagcttttatatttatcaagagaggatcctgaaaaggatattaacttgtatatcaactctcctggtggttctgtttatgcaggtttgtctatatacgacaccatgcaaatgatacctaatgatgtttgtacattttctgtaggattatctgctagtatgggtacaatat

SEQ ID NO: 263964 - DNA, 361 bp, Unknown
  Bacterial polypeptide expressing nucleotide sequence isolated from the Sargasso Sea
gcaatttatgacacgatgcagtttgtatctccgtctatatctactttatgtattgggcaagctgcctcaatgggagcattgcttcttgctggtggtgaaaaggggaagcgatttgctttacctaattcaagaataatgatccatcagccactcggaggtttccaaggtcaagcttcagatattgagattcatgctcaagaaatattgctaatgaagaaaaaagttaacgaaattttatcaaagcataccggaaagaatttaaagacagttgaaaaagacactgatagagataacttccttaatgctgaggaagcaaaaaaatatggaatcattgacgatatattagaagaaagaagctaat

SEQ ID NO: 263965 - DNA, 184 bp, Unknown
  Bacterial polypeptide expressing nucleotide sequence isolated from the Sargasso Sea
atgtcagaaaaacaaaatgaacaaataacgaatcaactagttccgatggttgtagagcaaacacctagaggggagagggcttatgatatctactccagactgcttaaagaaagagtaatttttttaacaggaccaatagaagattatggcgccaatctagttgttgctcaaatgcttttctaga

SEQ ID NO: 263966 - DNA, 516 bp, Unknown
  Bacterial polypeptide expressing nucleotide sequence isolated from the Sargasso Sea
ttgctgttggcccaattgatgattacattgcaaaccttattgttgctcaaatgctttttcttgagagtgaaaatccaaaaaaagacatatacctctatatcaattcaccaggtggatcaattacatcaggattatctatatacgacaccatgcaattcattaaacctgatgtcagcacaatctgtgtcggtcaggcagcgagtatgggagccttacttcttgccgggggagctgaatcaaagcgtttttctctaccgaattcaaggatgatgattcatcaaccaatttctgggtttcaaggtcaggccagtgatattgacatccatgcaaaagaggtgcttaagatgaaatcattggtcaattcaattttatctaaacatacaggcaaaactgaaaaacaaattgcaaaagatacagacagagataattttatggatgcagaggaagcattgaaatatggattaatagatcagattcttgaagagagagttgaggctttagaaagtaatggttgat

SEQ ID NO: 263967 - DNA, 319 bp, Unknown
  Bacterial polypeptide expressing nucleotide sequence isolated from the Sargasso Sea
gtagtgacaatatgctttggagtagcggcaagtatgggggcatttctactttctggaggagcaaaggggaaaagattggctttacctaattctaggattatgattcatcaacctctgggaggtgcacaaggtcaagcagtagagattgaaatacaagctaaagaaatactttttctcaagaaaacattaaattcgcttttagcagaacatactggtcaacctttagaaaaaattaatgaagatacagaaagagattactttttatctccctcagaagcagtcgaatatggattaattgataaagttatcaaaaagtgac

SEQ ID NO: 263968 - DNA, 286 bp, Unknown
  Bacterial polypeptide expressing nucleotide sequence isolated from the Sargasso Sea
atgggggcatttctactttctggaggagcaaaggggaaaagattggctttacctaattctaggattatgattcatcaacctctgggaggtgcacaaggtcaagcagtagagattgaaatacaagctaaagaaataatttttctcaagaagacactaaattcacttttagctgaacatactggtcaacctttagaaaaaattaatgaagatacagaaagagattactttttgtccccctcagaagcagtcgaatatggattaattgataaagttatcaaaaagtgac

SEQ ID NO: 263969 - DNA, 412 bp, Unknown
  Bacterial polypeptide expressing nucleotide sequence isolated from the Sargasso Sea
tatgtacataaattctccaggcggatccgtttatgatggattgggtatttttgacacaatgcaacatgttaagcctgatatacatacagtttgtgtaggcttagcagctagtatgggtgcatttttgcttgcggcaggtactcaaggtaaaagaagtagccttagacattcaagaataatgattcatcaaccacttggaggtgctagaggacaggccagtgacataagaattcaagctgatgaaattctgtttttaaaagagcgtcttaatactgaattatcagagagaactggaaaagattatgacactatcaaagaagatactgatagagatttttatatgtccccaaacgaagctgttgagtacgggttaattgatatggtcttagataagaaacctattaaggtttag

SEQ ID NO: 263970 - DNA, 208 bp, Unknown
  Bacterial polypeptide expressing nucleotide sequence isolated from the Sargasso Sea
tatgacaacaaaaattccagaacatttaagtactttgatcccaatggtagttgagcaatcaagccgaggtgaaagagcttatgatatttattcaagattattaaaagagagaattgtttttgtagttggaccaattaatgatgcagttgcatctttggttactgctcaattattatttttagagtctgaagatcctaaaaaagaaatt

SEQ ID NO: 263971 - DNA, 604 bp, Unknown
  Bacterial polypeptide expressing nucleotide sequence isolated from the Sargasso Sea
catgagtagcttaataccaatggttgttgagcaatcaaacaaaggtgaaagagcttatgatatttattcgagactattaaaagaaagaattatttttttaactggtcaaataaatgacaacgttgcttcattagttacagctcaattattatttctagaagcagaagatccaaaaaaagaaatttttttatatattaatagtccaggtggacttgttaccgcaggactgggtatttacgataccatgcaatatgtaaaaccagatatttcaactttatgcattggacaagcagcctcaatgggatctttcttattatcagcaggaacaaaaggaaaaagatactcactaccaaattcaagaattatggttcaccaaccatctgctggctttcaaggacaagctaccgatattgaaattcatgctaatgaagtgctttctttaaaaaaaagattgaacgaaatttactcaaaacacactggtaaatctgtggatgaaatcaaatctgcattggaaagagataattttatgactgccgatacagccaaatctttttggcctaatagactctgtggtagaaaaaagatcttagaacaccacatatag

SEQ ID NO: 263972 - DNA, 610 bp, Unknown
  Bacterial polypeptide expressing nucleotide sequence isolated from the Sargasso Sea
catgcatattgatgaaaaaatattaaatcaacttgtcccaattgttgtagagcaaacaggccgttcggaacgtgcctttgatatatattctcgtctgctcaaagaaagaattgtttttctaggaacaccaattgaggattctatagcatcccttattatagctcagttactttttttagaagctgaagattcagaaaaggatatctatctctatattaattctcctggaggaataatcacttcaggtatgggtatatatgatacgatgaattatataaagccagatattgcaactatatgcctagggcaggcagctagtatgggcgcctttttattagcaggtggtgcaaaaggcaaacgttcagcgttaccaaattctaggatcatgattcatcaacccatgggtggcgctgaaggccaggccactgatataaagatacaggcagaagagatactgcgaatgaagaaacaattgaatacaattctagccaagaataccggacaaactctaaaaaaaatagaggcagatacagaaagggataattacctgacatctaaagaggctaagacctatggtctcattgattctattctcacaaagagaaaatga

SEQ ID NO: 263973 - DNA, 490 bp, Unknown
  Bacterial polypeptide expressing nucleotide sequence isolated from the Sargasso Sea
tttttaggtactggaattaatgatcaagtatctgactcacttgttgcacaattattatttcttgaagctgaagatccagaaaaagacatacaaatatatatcaattctcctggaggctcagtcactgcaggaatggctatttacgatactatgcaacaaatatcacctgatgtagtgacaatatgctttggagtagccgcaagtatgggggcatttctactttctggaggagcaaagggcaaaagattggctttacctaattctaggattatgattcatcaacctctgggaggtgcacaaggtcaagcagtagagattgaaatacaagctaaagaaatactttttctcaagaaaacattaaattcacttttagctgaacatactggtcaacctttagaaaaaattaatgaagatacagaaagagattactttttatccccctcagaagcagtcgaatatggattaattgataaagttatcaaaaagtgac

SEQ ID NO: 263974 - DNA, 369 bp, Unknown
  Bacterial polypeptide expressing nucleotide sequence isolated from the Sargasso Sea
gcaggtttagaatttatgacacaatgcaatatattaaacctgaagttaatactttgtgtattggacaagcagcaagcatgggttcatttttattaggagctggggctaaaggtaaaagattttctttaccaaattctagaataatggttcaccagccttcagcgggttttcaaggacaagctacagatatagagattcatgcaaacgaagttttgtcattaaaaaaaagattaaatgaaatttattcaaaacacacaggaaaatctgttgatgaaatcaaaactgctctggaaagagataattttatgactcctgaaaacgcaaaagattttggattaatagataaagtagtagaaaaaagagaataag

SEQ ID NO: 263975 - DNA, 613 bp, Unknown
  Bacterial polypeptide expressing nucleotide sequence isolated from the Sargasso Sea
tatgacaaataaaatatctgaacacatgaataatttagtgcctatggttgtagaacaatcaaacaaaggtgagcgagcatatgatatttattcaagattattaaaagaacgaattatttttttaactggtcaaatcaatgatagtgtcgcttcattggttacagcacaacttttatttttagaggcagaagatcctaaaaaagaaatttatttatacattaacagccctggaggtttagttactgctggattaggaatttatgacacaatgcaatatatcaaaccagatatatcaacactatgtattggacaagctgcatcaatgggatcttttttgttagctgccggaacgaaaggaaagagaatttcattacctaattctagaattatggttcatcaaccatctgcgggttttcaaggtcaagcaacagatattgaaattcatgctaatgaagttttgtctttaaaaaaaaggttaaatgaaatttattcaagacacacaggaaaatcagttgaagaaattaaatccgctttggaaagagataattttatgactgcagatacggcaaaatcatttggcttaatagatgaagttgtagaaaaaagaacttaa

SEQ ID NO: 263976 - DNA, 524 bp, Unknown
  Bacterial polypeptide expressing nucleotide sequence isolated from the Sargasso Sea
aatgaataattttgataaaaatgttggtaatgctttatcggctctagtacctatggttgtggagcaaactaataggggcgaaagatcttatgatatctattcaagacttcttaaagaaagaataatttttttgattggacctgttgatgacaacattgcatcattagtatgcgcacaactattatttttagaagcagaaaatccatctaaagatatctcaatgtatataaattcccccggaggagttgtaacctcagggttgtctatttatgatacaatggaatatataaaaccagatgtttgtactgtttgttttggacaagctgcaagtatgggttcattgttattaacagcaggttctaaaaacaaaagattttgtctgcctaattcaagaataatgacacatcaaccttctggaggatttcaaggtcaagcagctgatattgaaatacatgctaaagaaataatgaacttgagaagcagattaaatcaaatttatgttaaacatagtggcaagaaacttg

SEQ ID NO: 263977 - DNA, 526 bp, Unknown
  Bacterial polypeptide expressing nucleotide sequence isolated from the Sargasso Sea
tgaaagaattctttttcttggacaagaagtaaatgatggtattgctaatagccttgttgcacaaatgctttatcttgattctgatgacaattccaaacctatctatctatatataaatagtccaggagggtcagtaactgctggattggctatctacgatactatcaaatacgtaaaaagtgatgtagtcacaatatgcgtaggccttgcagcctctatgggagccttcctattagccgctggcacaaaaggtaaaagggttgctttacctcatagcagaataatgattcatcagccccttggagggacatctcaacgccaagcaagcgatattgaaatagaggctaaggaaattttaagaattaaagatatgttaaatatgtctatggcagacatgacaggccaatcatttgagaaaattgaaaaggatactgacagagattattttttaagtgcggaagaggcgaaaaactatggcttgattgatagagtgatcactcatccaagcgaagcaaatcagccttaa

SEQ ID NO: 263978 - DNA, 256 bp, Unknown
  Bacterial polypeptide expressing nucleotide sequence isolated from the Sargasso Sea
aaaaagattttcattaccaaattcaagaataatggttcatcaaccatctgcaggttttcagggtcaggcaactgatattgaaattcatgctaatgaagttttgtctttaaagaaaaggcttaatgaaatttattcaaagcacactggaaaaagtgttgaagaaataaaatctgctcttgaaagagataattttatgactgcagatgtcgcacaatcttttggtcttattgacgaagtagtagaaaaaagatcttaa

SEQ ID NO: 263979 - DNA, 463 bp, Unknown
  Bacterial polypeptide expressing nucleotide sequence isolated from the Sargasso Sea
atgccaataggaactccaagcgtgccttatagacttccaggaagtcaatatgaaagatgggtagacatttatacaaggttaggtgttgaaagaattttatttctcggacaagaagtaaatgatgggattgctaatagcctagttgcccaaatgctttaccttgattctgatgacaatacaaaacctatttatctatatattaatagtcccgggggatcagttactgctggcctagcaatatatgacactatcaaatacgttaaaagtgatgttgtcactatatgcgttggactcgcagcctcaatgggagcttttttattaggagctgggaccaaaggtaaaagagttgcgcttcctcatagtcgaatcatgattcatcaaccacttggcggaacatcgcaacgtcaggcgagtgatattgagatagaggctagagagatactaagaattaaagatatgtaaa

SEQ ID NO: 263980 - DNA, 418 bp, Unknown
  Bacterial polypeptide expressing nucleotide sequence isolated from the Sargasso Sea
aagaaagaaatttatttatatattaatagtcctggtggtctagttactgctggcttaggaatttatgacacaatgcaatatgttaaacctgatatctctactttatgtattggtcaagctgcttcaatgggttcatttttactttcagctggaactaaaggaaaaagattttcattacctaattctagaataatggttcatcaaccatcagcaggttttcaaggacaagctacagatatagaaattcatgcaaatgaagttttatcattaaaaaaaagattaaatgaaatttattctaaacatacaggtaaatcagttgatgaaataaaatctgcattggaaagagataattttatgactgcagatgctgctaaatcttttggtttagtagatgaagtagtagaaaagagatcttaaa

SEQ ID NO: 263981 - DNA, 343 bp, Unknown
  Bacterial polypeptide expressing nucleotide sequence isolated from the Sargasso Sea
atgtctattaaaattccagaacaattaaatacccttatccctatggttgtcgaacaatctagtagaggcgaaagggcatatgacatttattcaagactacttaaagagaggattgtatttgtcgttggtcccataaatgatgcagttgcatcattagtcactgctcaactattatttttagagtctgaagatcctaagaaagaaatttttttatacataaatagccctggtggacttgtgacagctggacttggtatttatgatacaatgcaatatatcaaaccagaaataagtactttgtgtataggtcaagcagcaagcatgggatcatttttacttgcag

SEQ ID NO: 263982 - DNA, 284 bp, Unknown
  Bacterial polypeptide expressing nucleotide sequence isolated from the Sargasso Sea
tatgagtcgtgattttgaagaaaaaatgaataacctaattcctatggttgttgagcaatctagtaaaggggaaagagcatatgatatatattctcgacttttaaaagaaagaatagtttttttagtagggcccgtgaatgatagtgttgcatctttagttacagctcagtttttatttttagagtcggaaaatccaaataaagaaataagtttttacattaatagtccagggggacttgttacttctggtttaggtatctacgatacaatgcaatatataaatt

SEQ ID NO: 263983 - DNA, 370 bp, Unknown
  Bacterial polypeptide expressing nucleotide sequence isolated from the Sargasso Sea
agctggattaggaatttatgatactatgcaatatgtaaaaccagatatttcaactttatgcattggtcaagcagcttcaatgggatcttttttattagctgccggaactaaaggtaaaagattttcactaccaaactcaagaataatggtgcatcaaccctctgcaggtttccaaggtcaagccacagatattgaaattcatgctaacgaagtattatctttaaaaaaaagattaaatgaaatctactctaaacatactggtaagtcagttgatgaaattaaatctgcattagaaagagataattttatgacagcagactcagctaaatcctttggattaattgatcaagtagtagaaaaaagatcttaa

SEQ ID NO: 263984 - DNA, 571 bp, Unknown
  Bacterial polypeptide expressing nucleotide sequence isolated from the Sargasso Sea
tatggttgttgaacaatctagtaaaggtgagagagcctatgatatttattcaagacttttaaaagaaagaattatttttttaactggtcagattaatgacaatgttgcatcattagttactgctcaattgttatttttagaagctgaagatccaaaaaaagaaatttatttgtatattaatagcccaggaggtttggttacagcaggacttggtatttatgatactatgaaatatgtgaagccagatatttctactttatgtatgggccaagcagcttccatgggttcttttttgcttgcagctggcacaaaaggaaaaagattttcattaccaaattcaagaattatggttcaccaaccatctgcaggttttcaaggtcaggcaactgatattgaaatccacgcaaatgaagtgttatccttaaagaaaagacttaatgaaatttattcaaagcatacaggaaaaagcgttgaagaaataaaatctgctcttgaacgagataatttcatgactgcagatgttgcacaatcttttggtcttattgacgaagtagtagaaaaaagatcttaa

SEQ ID NO: 263985 - DNA, 485 bp, Unknown
  Bacterial polypeptide expressing nucleotide sequence isolated from the Sargasso Sea
ttcggccaatcgcattgttgctcagatgctcttcttagaagcagaagaccccgagaaggatatttatctctacatcaattcacccggcggttccgtttacgacggccttggcatctttgacaccatgcagcacatcaagcctgatgtgcacactgtttgtgtcggcttggcggcgagtatgggagcgtttcttctctgtgccggaaccaaaggtaagcgcagcagccttcagcattcgcggatcatgatccaccaaccccttggtggcgcccgcggtcaggccagtgatatccggattcaggcagacgaaattctatatctcaaggaacgactgaaccaagaactctctgatcgcaccggtcagccactggaccgaattcaacaggacacggatcgcgactttttcatgtctcccggcgaggccgttgagtatggcctgattgattccgtcatcgataagcgtcccgttcaggctgtggaatgaa

SEQ ID NO: 263986 - DNA, 616 bp, Unknown
  Bacterial polypeptide expressing nucleotide sequence isolated from the Sargasso Sea
catgcctgaaatccaggccgctggcggcctgttgccgatggtcatcgagcaatccgctcgtggcgagcgtgcctatgacatctattcgcgtctgctcaaggagcgcgtgatctttctggttggcccggtcgaggactacatggccaacctgatctgcgcccagctgctgtttctggaagcagagaatccggacaaggacattcacctgtacatcaactcgccgggtggctcggtgactgccggcatggcgatctacgacaccatgcagttcatcaaggcggatgtgtccaccacctgtatcggtcaggcctgcagcatgggtgctttcttgctggccggcggcgccaagggcaagcgtttctgcctgccgaactcgcgtgtgatgattcaccagccgctgggcggcttccagggccaggcctcggatatcgagatccacgccaaggaaatcctctttatccgtgagcgcttgaacgagctgctggctcagcacaccggtcagagcctggaaaccatcgagcgtgataccaaccgcgacaacttcatgagcgcttcgcgcgccgtggaatatggtctcgtcgatgccgtccatgaaaagcgtcaaatgccggtctag

SEQ ID NO: 263987 - DNA, 425 bp, Unknown
  Bacterial polypeptide expressing nucleotide sequence isolated from the Sargasso Sea
aatgaacaccttaataccaatggttgttgagcaatcaagtagaggtgaaagagcttatgatatttactcaagattattaaaagagagaattgtttttttagttggtccaattaatgataatgttgcgtcattagtaactgcacaacttttgtttctagagtctgaaaatcctaaaaaagaaatttctttatacataaacagtcctggtggtttagtgacagcaggtttaggaatttatgataccatgcaatatattaaacctgatgtttcaacattatgtattggccaagctgcatcaatgggatcttttcttttagctgcaggagaaaaaggaaaaagattttctcttcctaattcaagaataatggtacaccaaccatctgcaggttttcaaggtcaggcaacagacattgagatacatgcga

SEQ ID NO: 263988 - DNA, 400 bp, Unknown
  Bacterial polypeptide expressing nucleotide sequence isolated from the Sargasso Sea
atgaataaaatacctgaacatctaaatactctgattccaatggttgttgaacaatctagtagaggagaaagagcttacgatatctattctagactattaaaggaaagaatagtctttgttgttggaccaattaatgacaatgttgcctcacttgttactgctcaattattattcttggaatcggaagatccaaaaaaagaaatttctctgtacattaatagccctggtggtttagtaacagcaggacttggtatatatgatacaatgcagtatataaaaccacatgtatcgactttatgtattggtcaagctgctagcatgggatcttttctattagcagcaggagctaaaggaaaaagattttctcttcctaattcaagaattatggttcatcaacctc

SEQ ID NO: 263989 - DNA, 538 bp, Unknown
  Bacterial polypeptide expressing nucleotide sequence isolated from the Sargasso Sea
atgaataaaatacctgaacatttaaatactctaataccaatggttgttgaacaatcaagcagaggtgaaagagcttacgacatctattcaagattattaaaagaaagaatagtttttgttgttggaccaataaatgacaatgtggcgtcattagttacagcacaacttttatttttagaatctgaggatcctaaaaaagaaatttcactttatattaatagccctggtggtcttgtaactgctggtttaggaatttatgatacaatgcagtatattaaacctgatgtctcaactttatgcattggacaagcagcaagcatgggttcctttttattagctgctggaacaaaaggtaaaagatattcacttcctaattcaagaattatggttcaccaaccttctgcaggttttcaaggacaggcaactgatattgaaattcatgctaacgaggtactatctttgaaaaaaagactaaatgaaatttattctaagcatacaaataaatctgttgatgaaataaagtctgcgctgaaagaga

SEQ ID NO: 263990 - DNA, 589 bp, Unknown
  Bacterial polypeptide expressing nucleotide sequence isolated from the Sargasso Sea
aatgaatacccttattcctatggttgtggaacaaaccaataaaggagaaagagcttttgatatttactcaagacttctcaaagagagaatagtttttttagttggtccagtaaatgatagtgtagcttctttggttacagctcaattattatttttagaatcagaaaatccaaaaaaagaaataaatttttatattaatagtcctggaggcttagtaacttctggcttaggaatatatgacacaatgcaatatataaaatcacctgtctcaactttatgtatcggtcaagcatcatctatgggttcatttttacttgccgctggtgaaaaaggtaaaagattttctttacctaattcaagaataatggttcaccaaccttctgcaggttttcaaggccaagcaacagatatacaaattcacgcaaaggaaatactgtctttaaaagaaagattaaacaaaatttattcgaagcatacaggaaaatcactaaaagaaatttctgaggcattagagagagataaattcatgacagccgatgaggccaaagattttggtttaattgactctgttgttgaaaaacgaaaataa

SEQ ID NO: 263991 - DNA, 595 bp, Unknown
  Bacterial polypeptide expressing nucleotide sequence isolated from the Sargasso Sea
tatgttcgaaaataacttagttccaatggtcgttgagcaaacctctaggggtgagcgtgcttttgatatcttttccagactacttaaagatagaattgtttttattgttggtggcattgatgattacgttgctaatctcgtagtcgcacaactcttatttctggagtctgaggatcctaaaaaggatatttacatgtacatcaattcacctggcggtgtaattacatctggactatcaatcttagacacaatgaattatctcaaatgcgatgtttcaacagtttgctttggtcaagctgcaagtatgggagcggttttactcgcaaacggagcagacaaaaaaagatttgcgttaccaaatagtagagtcatgattcatcaaccattaggaggggcaagaggacaagcctctgatatagaaattcaagcaaaggaaatacttacattaaaggataagctcaataaaatacttgcagaaaaaacaaaacaaagtctcaagaaaatccaaactgatacagaaagagatttcttcatgaatgcagaagaagcagtgaaatatggaattattgatgaggttctcaaagaaagaaaataa

SEQ ID NO: 263992 - DNA, 619 bp, Unknown
  Bacterial polypeptide expressing nucleotide sequence isolated from the Sargasso Sea
atgaaaaaagaaccttcaaattatgtagtgcctactgttattgaaaatactaacagaggtgaaagagcctttgatatttattcaagacttttaaaagatagaattattttcttagggacaccaatagatgatggtgttgcaaatttaattatggctcaattgttacatttggagtcagaagatcctgaaaaagatatatatgtatatattaactctccaggaggatcaataacttctctatttgctatatatgacactatgaaatacattaaaccagatgttgcaactgtatgtatgggtctagcagcttcagctggagcagtaattttggctggtggaactccgggtaaaagatactcccttccacatgcacgaataatgcttcatcaaccagcaggtggcgcagaaggaacatcaaaagatattgagattcaagcaaagcttataaccgatatgaggcaccaaattaatggattattggcagaatttacaaagaaagacatagatcagatctctgttgatacagatagggatttctggatgactgcacaagaagccttagaatacggtatagtggatgaagtactaactcaaagggagttagtagacaaaaaataac

SEQ ID NO: 263993 - DNA, 622 bp, Unknown
  Bacterial polypeptide expressing nucleotide sequence isolated from the Sargasso Sea
atgaaaaaaaatgaaatattaaataatttggtaccaatggttgttgaacaaacatcaagaggtgaaagagcttatgatatttactcacgcttgcttaaagagagaattatctttatggttgggcctgttgaagatcattctgcaaacttgattgttgctcagttactatttttagaatcagaaaatcctacaaaagacataagtctttatataaattctccaggaggctctgtaaccgctggtatgtcaatctacgatacaatgcaatttgttaagccagatatcagcacattatgcatcggacaagcgtcgagcatgggtgcaatattgttatgtggtggtgcaaagaaaaagagatatgctttgccaaattctcgagtcatgattcatcaaccattaggtagttttcaaggtcaagcaacggattttgatatccaagcgaaggagattttgggaatacgttctagattgaatgaaatattatcaaaaaatactggtcaacctataaaaaagatacaattagatactgagagggataattttatgacctctgaagaggcaaagaaatacggcttaattgacgaaatacttgattcaagaccattagatacaaaagaatagg

SEQ ID NO: 263994 - DNA, 417 bp, Unknown
  Bacterial polypeptide expressing nucleotide sequence isolated from the Sargasso Sea
aaaaagaaatatctttttatattaatagcccaggtggattagtgacttctggattaggaatttacgatactatgcaatacattaagcctcccgtttctacactatgtataggccaagcttcatcaatgggttctttcttattagctgctggagagaaaggaaaaagattttcacttccaaactcaaggattatggttcatcaaccttcagcaggatacgaaggtcaagcaactgatatagaaatacatgctaaagaaatattagcacttaaagaaagattaaacaaaatttattcaaaacacacaaaaaagagtgaatcagaaattaagaaagctttagaaagagacaactttatgactccagttgaggcaaaagattttggtttaattgatgaagttgtggaaaaaagatcttaag

SEQ ID NO: 263995 - DNA, 336 bp, Unknown
  Bacterial polypeptide expressing nucleotide sequence isolated from the Sargasso Sea
tatgagcaaaataccagagcatttaaatactttaattccaatggttgtcgaacaatctagcaggggtgaaagagcatatgatatttattcaagattattaaaagaaagaattgtttttgttgttggaccaataaatgatgcagtggcctcattggtaacagctcaattactttttttagaatctgaagatccaaaaaaagaaatttcactatatattaatagcccaggaggtttagttacggctggattaggaatttatgatacaatgcaatatgttaagccagatgtatcaactttatgtataggtcaagccgcaagtatgggatcttttttgtt

SEQ ID NO: 263996 - DNA, 559 bp, Unknown
  Bacterial polypeptide expressing nucleotide sequence isolated from the Sargasso Sea
aggggtgagagggcttatgatatttattcaagattactaaaagagagagtaatttttttaactggaccagtagaagattacggagctaatcttatagttgcccaaatgctttatttagaagcagaaaatcctgataaagatattcatttatatatcaactctccaggagggtctgtaacagcagggttatcaatctacgataccatgcagtttattaaacctgatgtttcaactctatgtattggccaggcggcaagtatgggagctgttttactatcaggaggagcaaaaggaaaacgacaagctttacctaattctagagttatgatccatcaagttctcggaggatttcaaggacaggctagtgatatagagatccatactcaagaaattttatccatcaagaagaaactaaatgaaattttggcaaatcattctggtcaaaaggttgacaagattgctaaagatagtgaccgagataattttatgtctcccgatcaggctgttaagtatggtttaattgatgcagtggtagatagtcgctcagtcaaaaagtaat

SEQ ID NO: 263997 - DNA, 601 bp, Unknown
  Bacterial polypeptide expressing nucleotide sequence isolated from the Sargasso Sea
atggaagaacataattcaactttaatacctatggtagttgagcagactgccagaggagaacgtgcttttgatatatattcaaggttgctgaaagagagagttattttccttacgggacctataaatgatcaaatctcaaatctggtagttgcgcagttattatttctagaatctgaaaatcctaagaaagacataagcatttatattaactcacctggtggcgtcatatcatctggtttagcaatttatgacacaatgcaatttgtatctccgtctatatctacattatgtataggtcaagctgcctcaatgggtgctctattgcttgctggaggtgagaaagggaaaagatttgctcttcctaattctaggattatgattcatcaaccacttggaggttttcaaggccaggcttcagatattgagattcatgctcaagaaatcctgctaatgaagaagaaggtaaacgaaatattatctaaacataccggaaaaagcctcaaaactgttgaaaaagacactgatagagataactttctcaatgcagaggaatccaaaaaatatgggataattgatgaaatacttgaagaaagaaactaat

SEQ ID NO: 263998 - DNA, 373 bp, Unknown
  Bacterial polypeptide expressing nucleotide sequence isolated from the Sargasso Sea
tatgagttcactaataccgatggttgtagagcaaactaatagaggtgaaagatcttatgatattttttcaagattgctaaaggagagaattatttttttgaccggtgaagtcaacgatgcagtctctagtgtaatctgtgctcaatttctttttttagaatctgaagatccaaaaaaagatatttttttatatgtaaattcaccaggcggagttgtttcctcaggtttagcaatctatgatacaatgcaatacataagaccagatgtttccacggtttgtattggtcaagcagcaagtatggggtctttgcttttaacagctggggaaaaaggtaaaagatattgtctgcctcattctagaatattgacacat

SEQ ID NO: 263999 - DNA, 460 bp, Unknown
  Bacterial polypeptide expressing nucleotide sequence isolated from the Sargasso Sea
catgagtagcttaataccaatggttgttgagcaatcaaacaaaggtgaaagagcttatgatatttattcaagattgttaaaagagagaattatttttttaactggtcaaataaatgataacgttgcttcattagttacagcacaattattatttttagaggcagaagatccaaaaaaagaaatttttttatatattaatagtccaggcgggcttgttacagcaggactaggtatttatgataccatgcaatatgtaaaaccagatatttcaactttatgcattggacaagcggcttcgatgggatcttttttattatctgcaggaacaaaaggaaaaagattttcacttccaaattcaagaattatggttcatcaaccatctgcaggatttcaaggacaggctactgatattgaaattcatgcgaatgaggtattgtcattaaaaaaaaagattgaatga

SEQ ID NO: 264000 - DNA, 346 bp, Unknown
  Bacterial polypeptide expressing nucleotide sequence isolated from the Sargasso Sea
atgcagtacataaaaccaccagtttcgactttatgtataggccaagcatcttctatgggttcatttcttttagctgctggcgaaaaaggaaaaagattttcacttccaaattctagaattatggttcaccagccttcagctggataccaaggtcaagcaacagatattgaaattcacgctaaagaaatactagctttaaaagaaagactaaataaaatttactcaaaacatactaacaagagcgaagatcaaataagaaaagctttagagagagataagtttatgactccagacgaagcaaaagattttggcctcatagatgaagttgtagtaaagagatcttaga

SEQ ID NO: 264001 - DNA, 589 bp, Unknown
  Bacterial polypeptide expressing nucleotide sequence isolated from the Sargasso Sea
tatgaacaatcttatacctatggttgttgaacaatcaaataaaggtgaacgtgcatatgatatttattcaagattactaaaagagagaattatttttttaactggtcaaattaatgacaatgtagcctcattaataactgcacaacttttatttttagaagctgaggattcaaaaaaggaaatatatttatatattaatagccctggaggattagttactgctggtctaggaatttatgacacaatgcaatatattaaaccagatatatctactttatgcattggtcaagcagcctcaatgggatcttttttgcttgcagcaggtacgaaaggaaaaagattttctttaccaaactcaagaataatggttcatcaaccgtcggcgggatatcaaggacaagccacggacattgaaattcatgctaatgaagttttatctttgaaaaaaagattaaatgaaatttactcaaaacacacaaacaaatctgtagaagaaatcaagagtgctcttgagagagacaattttatgacagcagatgttgctaaatcatttggtcttatagatgaagttgtagaaaaaagaatataa

SEQ ID NO: 264002 - DNA, 335 bp, Unknown
  Bacterial polypeptide expressing nucleotide sequence isolated from the Sargasso Sea
gcaggtggctcctgatgtggtcaccatctgctacggactggccgccagcatgggagccttcctgctctccggtggcaccaagggcaagcgtttggccctgccaaacgcgcggatcatgatccaccaacccctcggtggtgcccaaggccaggccgtcgatatcgaaattcaggcgaaagaaattctttacttaaaggaaaccctgaacggtttgatggcgtcgcacacgggccaagacctggccaaagtcgctgaagacactgacagggactacttcctctctccggatgaagcagtggcctacggactgatcgatcgcgtcgtacgcgactgac

SEQ ID NO: 264003 - DNA, 613 bp, Unknown
  Bacterial polypeptide expressing nucleotide sequence isolated from the Sargasso Sea
atgacaacaaaaatcccagaacatttaagcaccttgatcccaatggtagttgagcaatcaagccgtggtgaaagagcttatgatatttattcaagattactaaaagagagaattgttttcgtcgttggaccaattaatgatgcagttgcatcattggttactgctcaattattatttttagaatctgaagatcctaaaaaagaaatttctttatacataaatagtccaggtggattagtgacagctggtttaggaatttatgatacgatgcaatacatcaaacctgaagttagcacattatgtataggtcaagctgcaagcatgggatcatttttgttggccgcaggatctaaaggaaaaagattatcattaccaaattcaagaataatggttcatcaaccttccgcaggttttcaaggtcaagcaactgatatagaaattcatgcaaatgaagttatgtcattaaaaaaaagattaaatgaaatttattctaaacacacaggtaagtctgttgatcaaattaaggaagctttggagagagacaattttatgactccagataacgcgaaagattttggtttgattgataaagtagtagaaaaaagagactaaa

SEQ ID NO: 264004 - DNA, 292 bp, Unknown
  Bacterial polypeptide expressing nucleotide sequence isolated from the Sargasso Sea
cttgctgcttgctggcggtgccgagggcaagcgtttttgtctgccgcacgcacgcatgatgatccaccagccgctgggcggcttccagggtcaggcttcggatatcgagattcacgcccgtgaaatcctcttcatccgtgagcgcctgaacaaggtgctggctgatcataccgggcagccgctggacgtgattgcgcgtgatactgatcgtgatcgcttcatgagcggcaccgaagcagtggaatatggtctgatcgacaaggtgctggagtcgcgcaccagcgccgagtaa

SEQ ID NO: 264005 - DNA, 589 bp, Unknown
  Bacterial polypeptide expressing nucleotide sequence isolated from the Sargasso Sea
cctggtcccgatggtgatcgagcaatccgcacgcggtgagcgcgcctacgacatctattcacgcctcctgaaggagcgggtgattttcatggttggccaggtcgaggactacatggccaacctgatcgtggcgcagctgctgttcctcgaggcggaaaaccccgagaaagacattcacctctatatcaattccccgggtggctcggtgaccgctggcatgtcgatctacgacaccatgcagttcatcaagcctaacgtctcgaccatctgtatcggtcaggcttgctccatgggagccctgttgctggcgggcggggcggcgggcaagcgttactgcctgccgcattcgcgcatgatgattcaccagcctctgggtggcttccagggtcaggcttcggacatcgaaattcacgcccgggaaatcctgaccattcgcgagcgcttgaacaaggtgcttgcccatcacactggccagcccatggacgtcattgcccgtgataccgatcgcgacaatttcatgagcggtgaagaagccgtcaaatacggcctcatcgaccaggttctgacccagcgccaactggccgtctga

SEQ ID NO: 264006 - DNA, 457 bp, Unknown
  Bacterial polypeptide expressing nucleotide sequence isolated from the Sargasso Sea
caattattgttcctcgaggcagaagatccagataaggatatttatatgtacataaattcacccggcggatccgtatatgacggattgggtatctttgacacaatgcaacatgtaaagcctgacattcatacagtttgtgttggcttagcagctagtatgggcgcatttttgcttgcggcaggtactaaaggtaaaagaagcagccttagacattcaagaataatgattcatcaaccacttggaggtgctagagggcaagccagtgatataagaattcaagcagatgaaattttgttcttaaaagaacgactaaacactgaattatctgaaagaactggaaaggattatgacacgatcaaagaagatactgatagagatttttatatgtccccaaacgaagctgttgagtacggtttaattgatatggtgttagataagaaaccaataagagtttagc

SEQ ID NO: 264007 - DNA, 592 bp, Unknown
  Bacterial polypeptide expressing nucleotide sequence isolated from the Sargasso Sea
tatgactataaaaatatcagaacacatgaacacgcttattccgatggttgtagaacaatcctcaagaggtgaaagagcgtatgacatttattcaaggcttttaaaagaaagaattgtttttttggtaggtccaataaacgataatgtagcctcattagttacagctcaattattatttttagagtcagaaaatccgaaaaaagaagtttttttatatataaatagcccaggtggtttagtcacagcaggcttgggtatttacgatacgatgcaatatataaaaccagatgtatcaaccctttgcattggtcaggcagcatcgatgggatcttttttattagctgcgggcaaacaaggtaaaaggttttcattacctaattcaagaattatggttcaccaaccttccgcaggattccaaggacaagctacagatattgaaattcacgctaatgaggttttgtcattaaaaaaaagattaaatgaaatatattctaaacatacaggtaaaaatgtagaccaaataaaggatgcacttgagagagataatttcatgacaccagataatgctaaagactttgggttaattgatcaa

SEQ ID NO: 264008 - DNA, 514 bp, Unknown
  Bacterial polypeptide expressing nucleotide sequence isolated from the Sargasso Sea
tattaaaagaaagataatttttttaacaggtcctattgacgataatattgcaagcctaatttgtgcacaaattcttttcttagaatcagagaatccaaaaaaggaaatatcattttatattaattcacctggtggtattgtttggtctggtctggcaatctatgatacaatgcaatacatttcgtcaaaaattatgactatatgtgttggccaagctgcttcagctggatcattacttttaaccgctggagaaaaaggaatgcgtttttcacttcctaattctagaattatggttcatcagcctagcggaggttatcaaggtcaggtaactgatatagaaatacaaacaaatgaaattaagaaaacaaaacaaaaactaaatgaaatttattcaaaacatacaggaaaaaaaatttcagaaatttcaactattatggaaagagataaatatttttctgctaaagaagcaatagagtttggtttaatagataaagtggttgagaacagaaaataa

SEQ ID NO: 264009 - DNA, 328 bp, Unknown
  Bacterial polypeptide expressing nucleotide sequence isolated from the Sargasso Sea
atggtgcccatggtggtcgagcaatcggctcgcggggagcgagcttatgacatttattctcgattgcttaaagacagaattgtattcttggtcggtccagtagaggaccacatggcgaacttagtggttgcacagttgcttttcttagagtcggaaaatcctgacaaagatattcacttgtacattaactcgccgggcggatcggtatcagcgggcatgtcaatctatgacacgatgcaatttataagacctgacgttagtaccctgagcgtaggacaagcagcgagcatgggggcctttttattggcagccggagctgcggggaagc

SEQ ID NO: 264010 - DNA, 610 bp, Unknown
  Bacterial polypeptide expressing nucleotide sequence isolated from the Sargasso Sea
tatgaatataatacctgaacatctaaatactctgatcccaatggttgttgaacaatcaagtagaggagaaagggcttacgatatctattctagactattaaaggagagaatagtctttgttgttggaccaattaatgacaatgttgcctcacttgttactgctcaattattattcctggagtcggaagatccaaaaaaagaaatttctctgtacattaatagccctggtggtttagtaacagcaggacttggtatatatgatacaatgcagtatattaaaccacatgtatcgactttatgtattggtcaagctgcaagcatgggttcatttttattaggagcaggagctaaaggaaaaagattttctcttcctaattcaagaattatggttcatcaaccttcagctggatttcaaggacaagcaacagatattgaaatacatgccaatgaagtactttcattaaaaaaaagattaaacgaaatttattctaaacatacaaataaatctgttgatgaaataaagtcagcattagagagagacaattttatgactccagaacacgctaaagagtttggccttatagacaaagtagtggttaatagagaatag

SEQ ID NO: 264011 - DNA, 314 bp, Unknown
  Bacterial polypeptide expressing nucleotide sequence isolated from the Sargasso Sea
tatgacaaataaaatatcagaaaacatgagcacgttagtacctatggttgttgaacaatcaagcaagggagaaagagcatatgatatttactcaagacttttaaaagagagaataatttttctaacgggtcaaattaatgacaatgtcgcttctctagttactgctcaacttttatttttggaggcagaagatcccaaaaaagaaatttatttgtatataaatagtcctggggggttagtaactgcaggccttggtatctacgatacaatgcaatatgtaaagccagatatttccacattatgtattggtcaag

SEQ ID NO: 264012 - DNA, 409 bp, Unknown
  Bacterial polypeptide expressing nucleotide sequence isolated from the Sargasso Sea
catgccaataggaactccaagcgtgccttacagacttccaggaagtcaatacgaaagatgggttgacatatatacaagactaggagttgaaagaattctttttcttggacaagaagtgaatgatgggattgctaatagccttgttgcacaaatgctttatcttgattctgatgacaattccaaacctatctatctgtatataaatagcccaggaggatcagtaactgcaggtttagctatatatgacactattaaatacgtaaaaagtgatgtagtgactatatgcgtaggccttgcagcctccatgggagcgttcctgttggcggctggcacaaaaggcaaaagagttgctttacctcatagcaggataatgattcatcaacccttaggagggacatctcaacgtcaa

SEQ ID NO: 264013 - DNA, 349 bp, Unknown
  Bacterial polypeptide expressing nucleotide sequence isolated from the Sargasso Sea
tatgacaaataaaattaatgaacagatgaacacattagtgccaatggtagttgagcaatctaatagaggggagagagcttacgatatatattcaagacttcttaaagaaagagttgtttttgttgttggcccaattaatgataatgtggcatctttagtaacagctcaattactttttttagaatctgaaaacccaaaaaaagatatatctctttacattaattctccaggcggattagttacttctggacttggaatatacgacaccatgcaatacattaaacctgatgttacgactttatgtataggtcaagcagcaagtatgggatcttttttattagctgcatga

SEQ ID NO: 264014 - DNA, 589 bp, Unknown
  Bacterial polypeptide expressing nucleotide sequence isolated from the Sargasso Sea
tatgatccctttggttttagaagaatctggtggtagtgaaagagtctttgatatttattcgagattattaagagagagaataatttttttgggagaacaagttactagtgaaaccgctaatagaattgttgctcaattattattccttgaagcagaagaccccgagaaagatatctatatgtatattaattctccagggggatctgtttacgatggtttaggtatttttgacaccatgcaacatgttaagcccgatattcatacagtttgtgtaggtttggcagctagtatgggtgcttttttattggcggcagggactaaaggtaaaagaagcagtctaagacattcaagaataatgatacatcaaccactaggaggcgctagagggcaagcaagtgatataagaattcaagctgatgaaattttgtttttaaaagaacgtcttaatactgaattatcagagagaactggtaaagattatgaaactgttaaagaagatactgatagagatttttatatgtctccaaaagaagctgttgaatatggattgatagatttagttctagataaaaagcctattagaggttaa

SEQ ID NO: 264015 - DNA, 616 bp, Unknown
  Bacterial polypeptide expressing nucleotide sequence isolated from the Sargasso Sea
atggaaaaaataaattctggcttggtcccgatggttgtagagcagactcctcgaggggagcgtgcttttgatatatattctcgacttttaaaagaaagaattatttttttatcaggtcctatagacgattatatttctaatctggttgttgctcagcttctatttttagagtcagaaaatcccgaaaaagacattagtatttatattaattctcctgggggtgttatttcctcaggccttgctatatatgacactatgcaatttattgctcctgaggtttcgacattgtgcattggtcaggctgcaagcatggggtcgcttttgcttgctgggggagaaaaaggtaaaagatttgcgttaactaattctcgaatcatgattcatcaaccgcttggtggcttccaaggtcaagcttccgactttgagatacacgcaaaagaaatgcttttggttaaacaaaaggttaatgagatactttctaagcataccggtaagactttaaagaaagtagagcaagatactgatagagacaattttctgaatgctaaggaagcaaagacctatggcataatcgatgaaatattagagagcagaccaagtactaatggaaaataaa

SEQ ID NO: 264016 - DNA, 592 bp, Unknown
  Bacterial polypeptide expressing nucleotide sequence isolated from the Sargasso Sea
atgtttgatagtttttatacaaattcatctctttccaaaaataatagtgaaacaaaatcagcacttatacccatggtaattgaacaaactgcgaggggtgagagatcttttgatatatattctagactgcttaaagagcgtattatttttgtggttggacctgttgatgacaatatgtcaactttaatttgtgctcaattattatttttagagtctgaaaaccctaaaaaagatatttcgatgtatattaattcacctggagggattgttacttccgggttagctatatatgatacaatgcaatatataagacctgatgtctctactgtttgttttggacaggctgcttctatgggaagtttactgcttacttctggtgcaaaagggaaaaggtatagtttacctaattcaagaattatgttgcatcaaccttcaggaggctttcaaggtcaggcaacagacattcaaatacacgctaaagaaattttagatcttaaagctaggttaaatgaaatttatcagaaacatacaggcaagcctttaaaggaaattgaaaaggcacttgaaagggataattttatgaaatcaaatg

SEQ ID NO: 264017 - DNA, 601 bp, Unknown
  Bacterial polypeptide expressing nucleotide sequence isolated from the Sargasso Sea
atgaacaaaatacctgaacatttaaatactcttattcctatggttgtagaacaatcaagtagaggagaaagagcttacgatatttattcaagattattaaaagagagagtagtttttgttgttggaccaataaatgacactgttgcatcattggttactgcacaattactatttttagagtcagaagatccaaaaaaagaaatttcattatacataaatagtccaggaggcttagtaactgctggtttagggatttatgatacaatgcaatatattaaacccgatgtttcaactttatgtattggacaagctgcaagtatggggtcttttttattagcagctggaactaaaggaaaaagattatctctacctaattctagaattatggtacatcaaccttctgctggtttccaaggtcaagccacagatattgaaatacatgcaaatgaagttttatcattaaaaaaaagattgaacgaaatttattcaaaacatacaaataaatctgtagaagaaataaagttagctcttgaaagagataacttcatgactcctgaaagtgctaagaatttcggattgatagacaaagtagtagttaata

SEQ ID NO: 264018 - DNA, 604 bp, Unknown
  Bacterial polypeptide expressing nucleotide sequence isolated from the Sargasso Sea
tatgaataaagatcaaattaatcaattggtcccaatggttgtggaacagaccggacgttttgaaagagcatacgatatctattctcgtttacttaaggagagaattgtgtttttaggtacgcctattgatgatacgatttcttctttaattattgcacaactattatttttagaagccgaaaatagtgagaaagatatttttttatatattaattcacctggtggtatcattacatctggaatgggaatttatgatacgatgaattatataaagcctgatgttgcaacaatttgtatggggcaagcagcaagtatgggtgcgttcttattatcaggtggtgcaaaagggaaacgttctgcattaccaaatgcgagaattatgattcatcaaccacttggtggcgctgaaggacaagcttcagatataaaaattcaggctgatgaaatattacgattaagaacaaatttaaatagaattttggcaaaaaatactaagcagacattaaagaaaattgaaaaagatactgatcgtaatttttttatgagctctgatgaagctaaagattatggtattattgatacgattttggccaataggacttga

SEQ ID NO: 264019 - DNA, 610 bp, Unknown
  Bacterial polypeptide expressing nucleotide sequence isolated from the Sargasso Sea
atgacaaaaattgatgaacatatgaataatttaatacctatggtagttgagcaaactagcaggggtgagcgagcatttgatatttattctagacttctaaaggaaagaattgtttttgttattggaccaataaatgatcatgtagcttcgctagttactgcgcaattactttttttagagtcagaagatcctaaaaaagatatttttttatatattaatagcccaggcggattagtaacatcaggtttaggtgtttatgataccatgcaatatattaaaccagatgtctctacattatgtataggacaagctgcaagtatgggttcatttttattagccgcaggaacaaaaggtaaaagattttcattgccaaattcaagaattatggttcatcaaccatctgctggctttcaaggacaagcaaccgatatagaaattcatgcgaatgaagttttatctttaaaaaaaagattaaacgaaatctattctaaacatacaggtaaatcagttgatgaaattaaatctgcccttgaaagagataattttatgacacctgatgcggcaaaagaatttggtttagtggataaagtagtatcaaaaagagattaga

SEQ ID NO: 264020 - DNA, 499 bp, Unknown
  Bacterial polypeptide expressing nucleotide sequence isolated from the Sargasso Sea
atgaatacacttatacccatggttgtcgaacagacaaataaaggggaaagagcatttgatatttattcaagacttttaaaagagagaattgtttttctagttggacctgtaaatgatagtgttgcttcactagtaactgctcagcttttatttttagagtcagaaaatccaaaaaaagaaattaatttttatataaatagtcccggtggtttagtaacttcgggtctgggtatttatgacaccatgcaatatattaaatcaccggtgtctacactatgcataggacaagcctcttcgatgggttcttttctattagctgccggggaaaaaggaaaaagattttcacttcctcattcaaggattatggttcaccaaccatctgctggctttcaaggccaagcaactgacatacaaatacatgcaaaagaaattttgtctctcaaagaaaggttaaatcaaatttattcaaaacataccggcaagtccgttaaagaaattt

SEQ ID NO: 264021 - DNA, 282 bp, Unknown
  Bacterial polypeptide expressing nucleotide sequence isolated from the Sargasso Sea
ttttacttgcagctggtgctaaaggaaaaagattttcattaccaaattctagaataatggttcatcaaccttcagctggttttcaaggacaagcgacagatattgaaattcacgctaatgaagttttatctttaaagaaaagattaaacgaaatctattcaaaacatactggaaaagcagtagatgaaatcaaatctgcattagagagagataattttatgactcctgacaatgcaaaaagttttggtctgatagataaagtggtagaaaaaagagaatagg

SEQ ID NO: 264022 - DNA, 592 bp, Unknown
  Bacterial polypeptide expressing nucleotide sequence isolated from the Sargasso Sea
ctgaaaaaatctcaaattgttcctattgtagtagaacaaacaggaagaatggaaagagcttatgatatttattctaggctacttaaggaacgcatagttttcattggtacgccaattgatgatacaattgcatcgctaacaattgcacaacttctttttttagaagctgaagatccagataaagacatttctatttatatcaactctcctggtggttctgtgactgcaggacttggtattatggatacaatggattatataaaacctgatattgctacaatttgtatggggcaggcatcgagtatgggtgccgtattattagctgcgggtaaacaaggtaaacgttctgccttgcctaattcaaggataatgattcaccaaccatgggctggaatgcaaggaacagcaagtgatatacaaattcatgcacaggaacttttaatgatgaaggaccgtttgaattcaattctttcaaaaaagacaggcaaaactctaaaaaaaattgctactgatacagatagagattttttcatgaattctgagcaagcaaaatcttatggcattgttgattcaatcttgaaaaaaaggtgat

SEQ ID NO: 264023 - DNA, 202 bp, Unknown
  Bacterial polypeptide expressing nucleotide sequence isolated from the Sargasso Sea
ttttcaggacaggcaacagatattgaaattcatgctaacgaagttttatctttaaagaaaagattaaatgaaatctattcaaaacatacaggtaaaacagtagatgaaattaaatctgctttagagagagataactttatgactccagataatgcaaaaagttttggtttgatagataaagtagtagaaaagagagaataag

SEQ ID NO: 264024 - DNA, 478 bp, Unknown
  Bacterial polypeptide expressing nucleotide sequence isolated from the Sargasso Sea
atgaattattcagaagaatttaaaaaatatgctacaaaacatcatggtgtaaattccatgtattatgacaaaattattagtagcatgacaccttatatcattgaagaaaggcaactcaatgttgctcaaatggatgtgttttcaaggctcatgatggatagaataatttttttaggcactgcaattaatgactcagttgcaaatattattcaagctcaattattatttcttgaaagtacagataaagaaaaagatatacagatttacataaattctcccggcgggtctgtttatgcaggactcggtatttatgatacaatgcaatttattggaccgaatgttgctactatttgtactggaattgccgcttcaatgtcagcggttcttttatgcgctggtgagaaaggtaaaagatctggtttgactcattcaagagtcatgatacatcagcccttaggggagcacaaggccaagcatc

SEQ ID NO: 264025 - DNA, 588 bp, Unknown
  Bacterial polypeptide expressing nucleotide sequence isolated from the Sargasso Sea
attcaactttgatacctatggtagttgagcagactgccagaggagaacgtgcttttgatatatattcaaggttgctgaaagagagagttattttccttactggacctataaatgatcaaatctcaaatctggtagttgcgcagttattatttctagaatctgaaaatcctaagaaagacataagcatttatattaactcaccgggtggcgtcatatcatctggcttagcaatttatgacacaatgcaatttgtatctccttctatatctacattatgtataggtcaagctgcctcaatgggtgctctattgcttgctggaggtgagaaagggaaaagatttgctcttcctaattctaggattatgattcatcaaccacttggaggttttcaaggccaggcttcagatattgagattcatgctcaagaaatactgctaatgaagaagaaggtaaatgaaatattatctaaacataccggaaaaagcctcaaaactgttgaaaaagacactgatagagataactttctcaacgcagaggaatccaaaaaatatgggataattgatgaaatacttgaagaaagaaactaat

SEQ ID NO: 264026 - DNA, 613 bp, Unknown
  Bacterial polypeptide expressing nucleotide sequence isolated from the Sargasso Sea
atgattcgtaaaatagatgagcaaatgaatactttaattccaatggttgttgaacagacaaccaaaggagaaagagcttatgatatttattcaagacttttaaaagaaaggattgtctttttagttggtggtgtcaatgatagcgttgcatcgctagttactgctcaacttttgtttttagagtcagaaaacccaaaaaaagaaatttatttttacatcaatagcccaggtggcttagtcacttctggttttggtatatacgatacaatgcagtatataaagtcacctgtttctacgctgtgtattggccaagcttcttcaatgggctcttttttattatctgcaggcgaaaaaggaaaaagattttctttacctaactcacgaataatggttcatcaaccatctgctggatttcaaggtcaagcaactgatatacagatacatgcaaaagaaattctttctttaaaagaaagactaaataaaatatattcaaagcataccggtaaatcagttaaagaaatcgcatctgctcttgaaagggataaatttatgacccccgaagaagcaaaagattttggcctaatagactcagtagttgaaaagagaaaataat

SEQ ID NO: 264027 - DNA, 583 bp, Unknown
  Bacterial polypeptide expressing nucleotide sequence isolated from the Sargasso Sea
ggtggttgagcaaaccggtaaaggtgaaagagcatatgatatttattcaagattattaaaagaaagaattatttttttggtggggcctgtacatgatggactagcatccttaatttctgcgcagttattatttttagagtccgaagatcctgaaaaggaaatttacttgtatataaattctcctgggggggttgtatctgatggattggctatatatgacactatgcaatttatccagtgtccagtctctacattatgttttggtcaagctgcttctatgggatcttttcttctcgcggctggagaaaaaggcaaaagatttgcattgcctaatagtagaattatggttcatcagccatcagcgggttttcaaggtcaagctacagatattgaaattcacgcaaaagaaattgcttcaactaaaagtaaactaaacagcctatactcaaaacataccgggcaagatgttaaagctattgaagaagcattggagcgagataactttatggaccctgaatctgcaaaaaaatttggaattatcgatgaaattcaagaaaaaagagttccaaaaatcgagaaatag

SEQ ID NO: 264028 - DNA, 215 bp, Unknown
  Bacterial polypeptide expressing nucleotide sequence isolated from the Sargasso Sea
tatgagtcgaaaaatcgaagatcaaatgagcactttggtgcctatggttgttgaacaaacaaacagaggtgaaagagcatatgacatatattctagactactaagagagagaatagtatttttagttggagcagttaatgataatgttgcatcattggtaactgcacaactactttttttagagtctgaaaatcccaaaaaagaaattttttttt

SEQ ID NO: 264029 - DNA, 265 bp, Unknown
  Bacterial polypeptide expressing nucleotide sequence isolated from the Sargasso Sea
aaaaaagggaaaaagattctctttacctaattctagaataatggttcatcaaccctcagcaggtttccaaggacaagcgacagatatagagatacatgcgaatgaagttttgtctttaaaaaaaaggttgaatgaaatctattctaagcatacgggtaaatctgtggatgagataaaagaagctttggaaagagacaattttatgacaccgcagaacgctaaagaatttggattaatagatcaagtagtagaaaaaagagcataa

SEQ ID NO: 264030 - DNA, 258 bp, Unknown
  Bacterial polypeptide expressing nucleotide sequence isolated from the Sargasso Sea
catgccaataggaactccaagcgtgccatacagacttccaggaagtcaatacgaaagatgggtcgacatatatacaagactaggtgttgaaagaattctttttcttggacaagaagtaaatgatggtattgctaatagccttgttgcacaaatgctttatctagattccgatgataattccaaacctatctatctgtatataaacagcccaggaggatcagtaactgctggcttggcaatttatgacactattaaata

SEQ ID NO: 264031 - DNA, 356 bp, Unknown
  Bacterial polypeptide expressing nucleotide sequence isolated from the Sargasso Sea
tatgacaaacattcattcagctctaatcccaatggtaatagagcaaactccaagaggagagagatcttttgatatatattctcgtcttttaaaagaaagagttattttcttatctggaccaattgatgactatatttctaatttagttgtagctcagttactatttttagaatctgaaaatcctgaaaaagatatatctatttatattaattctcctggtggcagtatctctgctggtcttgcgatatacgacaccatgcaatttgtaacaccatccatatcaactttatgtatcggtcaggccgccagcatgggcgctttggtattagcaggtggagataagaaaaaaagatttg

SEQ ID NO: 264032 - DNA, 463 bp, Unknown
  Bacterial polypeptide expressing nucleotide sequence isolated from the Sargasso Sea
ttctttagtaactgcccagctttcttttttagagtctgagaatccaaagaaggagatttttttttatattaatagtcctggtggactagtaacttcaggtctaggtatttacgatactatgcaatatataaaatctccagtttcaactttatgcataggccaggcttcatctatgggatcttttttattagctgcaggagaaaaaggtaaaagattttctttgccaaattcaagaataatggttcaccaaccctctgctggttttcaaggtcaggcgaccgatatacaaatacacgcaaaagagattcttttattaaaagaaagattgaacaaaatatattcgaagcataccggaaagtcagttaaggaaatttcacaagcattggaaagagataatttcatgaccgctgatcaggcaaaagaatttggtctaatagactctgtagttgagaaaagaaaataa

SEQ ID NO: 264033 - DNA, 298 bp, Unknown
  Bacterial polypeptide expressing nucleotide sequence isolated from the Sargasso Sea
cttttagcagccggtgaaaaaggaaaacgttatgcacttccaaattgtagaattatggttcatcaaccctcagcaggatttaaaggtcaggcaactgacattgagattcatgcaaaagaagttctttcaatgaaagccaatctaaataagctttattctaaacatacgggtcagccagtagaagcagttgaaggagcgcttgaaagagataactttatgtccccagatgaagctttgaattttggaattattgatgaaattcatgaaaaaagagttccaagcaaatctgagaaatagc

SEQ ID NO: 264034 - DNA, 386 bp, Unknown
  Bacterial polypeptide expressing nucleotide sequence isolated from the Sargasso Sea
tatgacaacaaaattatcagaacatatgagtaatcttgtaccaatggttgttgagcaatcaagcaaaggtgagagagcttatgatatttattctagattactaaaagagagaattatttttttaacaggtcaaattaacgacaatgtagcttctttagttactgctcaattattatttttagaagctgaagatcccaaaaaagaaatttatttatatataaatagcccgggaggtttggttacagctggtcttggcatatatgatacaatgcaatatgtgaaaccagatatttctactttatgtataggtcaagcagcttctatggggtcctttttacttgctgcaggcactaaaggaaaaagattttcattaccaaattcaagaa

SEQ ID NO: 264035 - DNA, 584 bp, Unknown
  Bacterial polypeptide expressing nucleotide sequence isolated from the Sargasso Sea
taacttgataccaatggttgttgaacaatctagcaggggtgaaagggcatatgatattttttcaagattactcaaagaaagaatagttttcgtagtcggtccaatcaatgatagcgtagcatctctagttacagctcaaatgttatttttagaatctgaaaatcctaagaaagatatttttatgtacatcaacagtccaggaggattagtaacagcaggtcttggcatatacgatactatgcaatatataaaacctgaaatctcaactttgtgcattggtcaagcagctagcatgggatcttttcttttagcagcgggaacaaaaggaaaaagattttcattaccaaattctagaatcatggtgcaccaaccctcagcaggttttcagggtcaagctacagacattgaaatacatgcaaatgaagtcctctctttaaaaaaaagattaaatgaaatctattcaaggcatactggaaaaagtgttgaagatattaaatcagctcttgagagagataattttatgacaccagatgtggctaaagattttggtcttatagacaaagttgtggataaaagagaatagc

SEQ ID NO: 264036 - DNA, 460 bp, Unknown
  Bacterial polypeptide expressing nucleotide sequence isolated from the Sargasso Sea
tttggttacggctcaattattatttttagaggcagaggatccaaaaaaagaaatttttttttatataaatagtcctggtggtcttgtaactgctggacttggaatttatgacacgatgcaatatgtaaagcctgatatttcaacattatgtattggtcaagcagcttcaatgggatcttttttgttatctgcaggaacaaaaggaaaaagattttcattaccaaattcaagaataatggttcatcagccttctgctggttttcaaggacaagcaacagatattgaaatacatgcgaatgaagttttgtctcttaagaagagattaaatgaaatctactcaaagcatactggtaaatctgttgatgaaataaaatctgctttagaaagagataattttatgacagctgatacagctaaagaatttggtttaatagatgctgtagtagaaaaaagatcatag

SEQ ID NO: 264037 - DNA, 615 bp, Unknown
  Bacterial polypeptide expressing nucleotide sequence isolated from the Sargasso Sea
ctatgagtcgtgatttcgaagagaaaatgaacagcttgataccaatggtggttgagcaaactaataaaggtgaaagagcttatgacatttactcaagattattaaaagagagaatagtttttttagttggaccagtaaatgatgcagttgcttcattagtaacagcgcaactgttatttttagagtcagaaaacccaaataaagaaatcagtttttatattaatagcccgggcggtctagtaaccgcaggtttaggaatttacgatactatgcaatatattaattcaccagtctcgacattgtgtattggccaggcctcatctatgggatcatttttattatcagctggtgaaaagggaaagcgatattcattacctaactcaagaatcatggttcatcaaccttctgcaggttttcaaggtcaagctacagatattcagattcacgctaaagaaattttatccttaaaagagaggttaaataaaatttattcaaaacacacaggtaaatcattaaatgaaatttcagacgctctagagagagacaattttatgacagctgaagaagctaaaaaatttggtttgatcgactctgttgtggagaaaagaaaataag

SEQ ID NO: 264038 - DNA, 337 bp, Unknown
  Bacterial polypeptide expressing nucleotide sequence isolated from the Sargasso Sea
gacatacatacagtttgtgtaggtttggcagctagtatgggagcatttttgcttgcagcaggtactaaaggcaaaagaagcagccttagacattcaagaataatgattcatcagccacttggaggtgcaagaggtcaagctagtgatataagaattcaagcagatgaaattttgttcttaaaagagcgacttaatactgaattatcagaaagaaccggaagggactatgacaccattaaagaagatactgatagagatttttatatgtctccaaacgaggccgttgagtatggattaattgatctagtattagataagaaaccaataaaagtttagc

SEQ ID NO: 264039 - DNA, 319 bp, Unknown
  Bacterial polypeptide expressing nucleotide sequence isolated from the Sargasso Sea
atgccgatcggtacccccagcgttccctaccgcctgcccggcagccagatggagcgctgggtcgacatctacacccgtctgggagtggagcgcatcctcttcctgggctccgaggtgaatgacggcatcgccaacagccttgtggcccagatgctgtatctcgattccgaggacagcaccaagccgatctatctctacatcaactcccccggtggatccgtgacggccggtctggccatctacgacaccatcaagtacgtgaagagcgatgtggtgaccatctgcgtcggcctcgccgcctccatgggagcctttcggc

SEQ ID NO: 264040 - DNA, 361 bp, Unknown
  Bacterial polypeptide expressing nucleotide sequence isolated from the Sargasso Sea
aatggatagtaataaaatatttaatcagcttgtacctatggtggtagagcaaaccggtcgaggtgaaagggcttttgacatttactctaggcttctcaaagagagaattatttttttagttggtccagtaaatgatggtatggcatcattagtttctgctcagcttttatttttagagtccgaaaaccctgaaaaagaaatatcgttatacataaattcacctggtggcgtcgttagcgatggtttagcaatttatgatacaatgcaatttattcaatcacctgtttcaaccctatgttttggacaagccgcatccatggggtcgtttttactcgccgctggtgaaaaagataaaagattt

SEQ ID NO: 264041 - DNA, 589 bp, Unknown
  Bacterial polypeptide expressing nucleotide sequence isolated from the Sargasso Sea
atgaacaacttaattccaatggttgtcgagcaatcaagcaaaggcgaaagagcatatgatatttactctcgattgctaaaagaaagaatagtttttctagttggcccagtaaatgacaatgtagcttcattagtaactgcgcagctattgtttttagagtctgaaaatccaaaaaaagaaataagtttttatattaatagcccaggaggacttgtaacttctggattgggtatttatgacacaatgcaatacataaactctccagtttcaactttatgtataggtcaagcttcatcaatgggatcttttttattatctgctggtgaaaaaggaaaaagattttcacttcctaactctcgaattatggttcaccaaccatctgcaggatttcaaggtcaagctacagacatacagatacacgctaaagagatacaattgcttaaaactagacttaattcaatttactcgaagcacactggaaaatcagtagaggaaatttcaaaagccttagagagagataatttcatgactcctgaagaagcgaaaagttttggtttgatcgatactgttgtggaaaaaagaaaataac

SEQ ID NO: 264042 - DNA, 436 bp, Unknown
  Bacterial polypeptide expressing nucleotide sequence isolated from the Sargasso Sea
atgacaacaaagatacctgaatatatgaataatttaatcccaatggttgttgagcaatcaaataggggtgagagagcatatgatattttttcaagactactaaaagaaagaatagtttttttagttggcccaataaatgatagcgttgcttctttagtaactgctcaacttttatttttagagtctgaaaatccaaaaaaagaaatttcattatatattaatagtcctggtggcctcgtaactgctggtttaggtatttatgatacaatgcaatatattaaaccagaagtttcaactttatgtattgggcaggcagcaagcatgggatcatttttattagcggccgggaccaaaggtaaaagaatatctcttcctaattcaagaattatggtccaccaaccctctgctggtttccaaggccaagccacggatatga

SEQ ID NO: 264043 - DNA, 183 bp, Unknown
  Bacterial polypeptide expressing nucleotide sequence isolated from the Sargasso Sea
tatgaaagatccaattaaaaatttaactaataacttgataccgatggttgttgagcaatcttcaagaggtgaacgtgcttacgatatatattctaggcttttaaaagaaagaattatttttttgaccggacccattgacgataatattgctagtttggtttgtgcacaacttctttttttaga

SEQ ID NO: 264044 - DNA, 613 bp, Unknown
  Bacterial polypeptide expressing nucleotide sequence isolated from the Sargasso Sea
atgactaataaaattccagaacaattaaacaccctaatccttatggttgtcgaacaatcaagtagaggagaaagagcatatgatatttattcaagattacttaaagaaagaattgtatttgtagttggccccataaatgatgcagttgcatcattggtcactgcacaattattatttttagagtctgaagatcctaaaaaagaaatttttttatatatcaatagcccaggtggacttgtaacagcaggacttggtatttatgatacaatgcaatatatcaaaccagaaataagtactttgtgcattggtcaagctgcaagtatgggttcattcttattagcagcaggcgctaaaggaaaaagattttcattgcctaattcaagaataatggttcatcagccatcagctggttttcaaggacaagctacagatattgaaattcatgcaaacgaagttttgtcattaaagaaaagattaaatgaaatttattcaaaacatactggaaagtcggtagaagaaattaaaactgcattagaaagagataattttatgacgcctgagaatgcaaaaagttttggactgatagacaaagtagtagaaaaaagagagtaag

SEQ ID NO: 264045 - DNA, 385 bp, Unknown
  Bacterial polypeptide expressing nucleotide sequence isolated from the Sargasso Sea
tatgagtaatttaattcctatggtcgtagagcaatcaaataaaggtgaaagagcttacgatatttattcaagacttttaaaagagaggataatttttttaactggtcagattaatgataatgttgcttcattagtaactgcgcagcttctatttttagaagctgaagatcctaaaaaagaaatttatttatatattaacagtcctggtggtttagttacagctggtttaggaatttatgatactatgcaatatgtaaagccagagatatcaactatttgtattggtcaagcagcttcaatgggttcattcttattagcagcaggatcaaaaggaaaaagattttcattaccaaattctcgtattatggttcatcaaccgtcagct

SEQ ID NO: 264046 - DNA, 589 bp, Unknown
  Bacterial polypeptide expressing nucleotide sequence isolated from the Sargasso Sea
atgagtagtctagtgccaatggttgtagaacaatcaaataaaggagaaagagcttatgatatttattcaagattgttgaaagaaagaattatttttttaacaggacaaataaatgataatgttgcttctttagtgactgcacaacttttgtttttggaagcagaagatccaaaaaaagaaatctatttatatataaatagtcccggtggtttagtaactgctggtttaggtatttacgacacaatgcaatatatcaaacccgatatttcaactttgtgcattggccaagcggcctctatgggatcatttttacttgctgctggaactaaaggaaaaagattttctcttcctaattcaagaataatggtacatcaaccttctgctggttttcaaggtcaggcaacagatattgaaattcatgcaaatgaagttctttcattaaaaaaaagattgaatgaaatttactcaaaacatacaggtaaaactgttgaagaaattaaatctgctcttgagcgagataattttatgactgctgaaacggccaaatcatttggcttgatagatgaagtggtggaaaaaagatcttaaa

SEQ ID NO: 264047 - DNA, 205 bp, Unknown
  Bacterial polypeptide expressing nucleotide sequence isolated from the Sargasso Sea
tatgactgataaaatacctgaacatcttaataatcttattcctatggttgttgagcaatctagcagaggtgagagagcttatgatatttattctaggttattaaaagagaggatagtttttttagttggtccaataaatgatagcgtggcatcgcttgttaccgcacaacttttatttttagaatctcaagatccaaaaaaaaga

SEQ ID NO: 264048 - DNA, 613 bp, Unknown
  Bacterial polypeptide expressing nucleotide sequence isolated from the Sargasso Sea
atgacaacaaaaattccagaacatctaagtactttaatcccaatggtagttgagcaatcaagtcgtggcgaaagagcttatgatatttattcaagattattaaaagagagaatagtttttgtagttggaccaattaatgatgctgttgcatctttagttactgctcaattattatttttagagtctgaagatcctaaaaaagaaatttctttatatattaatagtccaggtggattagttactgcaggtttaggaatttatgatacgatgcaatatatcaaaccagaggtcagcacattatgtatcggccaagctgcaagtatgggatcatttttgttggcagctggatcaaaaggaaaaagattatcattaccaaattcaagaataatggttcaccaaccttctgcaggctttcaaggtcaagcaactgatatagaaattcatgctaatgaggttatgtctttaaaaaaaagactaaatgaaatttattctaaacatacgggtaagtctgtggatcaaattaaagaagcattggagagagacaattttatgactccagataacgctaaagattttggtttgatagataaagtagtagaaaaaagagattaaa

SEQ ID NO: 264049 - DNA, 613 bp, Unknown
  Bacterial polypeptide expressing nucleotide sequence isolated from the Sargasso Sea
atgacaacaaaaatacctgaatatatgaacaacctcattccaatggttgttgaacaatcgagcaaaggcgagagagcttacgatatatactcaagattattaaaagagagaattattttcttagtgggtcccataaatgataacgttgcttctttagtaactgctcaattattatttttagaatctgagaatccaaaaaaagaaataaatctttatattaattcacctggtggacttgtaactgctggtttaggaatttacgatacaatgcagtatattaagcctgaggtttctaccctatgtattggtcaagctgcatctatgggatcatttttacttgcagcaggggaaaaaggaaaaagattttcattgccaaattctagaataatggttcatcagccttcagcaggatttcaaggacaagcaactgacattgaaattcatgcgaatgaggtcttggcacttaaaaaaagattgaatgaaatctattctaaacacacaggaaaatcttcagatgaaattaaacaagctcttgaaagagataattttatgactcctgaaagtgcaaaagaatttggcttaatcgataaagtagtagaaaaaagaagttaat

SEQ ID NO: 264050 - DNA, 361 bp, Unknown
  Bacterial polypeptide expressing nucleotide sequence isolated from the Sargasso Sea
atgaacactttaataccaatggttgttgagcaatcaagcagaggtgaaagagcttatgatatctactcaagattattaaaggagagaattgtttttttagttggtccaattaatgataatgttgcgtcattagttactgcacaacttttgtttttagagtctgaaaatcctaaaaaagaaatttctttatacataaacagtcctggtggtttagtgacggctggtttagggatttacgataccatgcaatacattaaacctgatgtttcaacattatgtattggtcaagctgcttcaatgggatcttttcttttggctgcaggcgaaaaaggaaaaagattttctcttcctaattcaagaa

SEQ ID NO: 264051 - DNA, 256 bp, Unknown
  Bacterial polypeptide expressing nucleotide sequence isolated from the Sargasso Sea
tgtctgccgaactcccgagtgatgatccaccagccgctgggtggctatcagggtcaggcgacggatatcgagattcacacccgtgaaatcctgaagattcgtcataccctgaattcgatcctggcccatcacaccggtcaggatctggagactatcgccaaggatacggaccgtgacaacttcatggatccggctcaggcgaaagagtatgggctgatcgattcaatacttgataagcgcgtaccgaataaataat

SEQ ID NO: 264052 - DNA, 601 bp, Unknown
  Bacterial polypeptide expressing nucleotide sequence isolated from the Sargasso Sea
atgacagatattcattcagccttgataccaatggtaatagagcaaacccctagaggtgagaggtcatttgatatttattcgagactgcttaaagagagagttatttttctttctggtgcgattgatgactatatttctaatttagttgttgcacaattactattcttagaatctgagaatccagaaaaagatatttctatttatattaattcacctggtggcagtatttcagcgggactggcaatttatgacactatgcaatttattactccatctatttcaactatgtgtataggtcaagcagctagcatgggggcattattattggctggtggagataaaaagaaaagatttgctcttcctaattctaggattatgattcatcaacctcttgggggctttcaaggtcaagcatctgattttgaaatacatgcaaaagaaattatccatatgaaaaagatagtgaatgaaattcttgcaaaacatacaggtcaatcaattaaaaaaattgaaaaagatactgatagagataatttcttagatgcaagtgcagccaaaatctatggcatagttgataaaatattagaacaaaggagctaat

SEQ ID NO: 264053 - DNA, 478 bp, Unknown
  Bacterial polypeptide expressing nucleotide sequence isolated from the Sargasso Sea
catgaaaaaagagccttcaaattatgttgtacctacagttattgagaacacaaatagaggcgaaagagctttcgatatttattcaaggcttttaaaagatagaataatatttcttggtactcctattgatgatggagtcgcaaacctaattatggcacagcttttacacctagagtcagaagatcctgataaagatatctacgtatatataaactctccaggtggctcaattacatccttgtttgcaatttatgacacaatgaaatacattaagccagacgttgcaacagtctgtatgggacttgctgcatcagctggtgctgttattttagctggtggaaccccaggtaaaagatactcacttcctcatgcaagaattatgttgcaccaaccagcaggaggggctgaaggaacctctaaagacattgaaattcaagcaaaattgattacagacatgaggaatcaaattaatggtctt

SEQ ID NO: 264054 - DNA, 192 bp, Unknown
  Bacterial polypeptide expressing nucleotide sequence isolated from the Sargasso Sea
gatggccctgatacccatggtcgtggagcagaacagccgcggcgaaagagcatatgacatttattcaaggctgctcaaagaccggatcatcttccttgggacacccattgatgacaacgtcgcgaatgtgatgattgcccagcttctttttcttgaagcggaagatgctgaaagcgatattgctttttatat

SEQ ID NO: 264055 - DNA, 327 bp, Unknown
  Bacterial polypeptide expressing nucleotide sequence isolated from the Sargasso Sea
atatctcaactttatgtattggacaagctgcatcgatggggtcatttttattggcagctggaactaaaggaaaaagattttcattaccaaattcaaggataatggtacaccaaccatctgctggttttcaaggtcaagcaactgatatagagattcatgcaaatgaagttttatcattgaaaaaaagattaaatgaaatttactcaaaacatacaggtaagagtgttgatgaagtgaaatctgcgcttgaaagagacaatttcatgactgctgatgttgcaaagtcatttggtcttattgacgaagttgtagaaaaaagatcttaat

SEQ ID NO: 264056 - DNA, 499 bp, Unknown
  Bacterial polypeptide expressing nucleotide sequence isolated from the Sargasso Sea
ttgaccccaccacaaccgcggcccgtgatcgaagcagtcagccaccatccgatccacagccactggcagaacacctccgtgccgacggtggtggagcagtccggccgcggtgagcgggcgtttgacatctactcgcgcctgttgcgcgagcggatcatcttcctgggcacaggtgtggatgacgccgtcgccgatgcaattgtcgcgcagcttctcttcctagaagcggaagatcctgagaaggacatccagatctatgtaaattctccaggtggttcggtcaccgccggtttggcgatctacgacaccatgcagcaggtttcccctgatgtggtgaccatctgctacggactggcggcaagcatgggtgctttcctcctctccggaggcgccaaaggcaagcgcctagctctgccgaatgcgcgaatcatgatccaccagccccttggcggggcgcagggtcaggccgttgatatcgaaattcaggcgaaagaaattc

SEQ ID NO: 264057 - DNA, 463 bp, Unknown
  Bacterial polypeptide expressing nucleotide sequence isolated from the Sargasso Sea
atgtcccgcaatccttttatgcaaattccggacattcaggccgccggtggcctggtcccgatggtgatcgagcagtccgctcgcggcgagcgcgcctatgacatttattcccgactcctcaaggagcgggtgattttcatggtcggcgcaggtcgaagactacatggccaacctgatcgtcgcgcagatgctgttcctcgaggccgaaaatcccgagaaagacattcacctgtacatcaactccccgggcggctcggtgactgcaggcatgtcgatttacgacaccatgcagttcatcaagccggatgtgtcgaccatctgcatcggccaggcctgttccatgggggctctgttgttgaccggtggcaccgcgggcaagcgttactgcctgccgcattcgcggatgatgatccaccagccgctgggcggcttccagggtcaggcttcggatatcgagatccac

SEQ ID NO: 264058 - DNA, 554 bp, Unknown
  Bacterial polypeptide expressing nucleotide sequence isolated from the Sargasso Sea
aatgaacagtttgattcctatggttgttgaacaaacaggaaagggtgaaagagcctatgatatatactctaggcttttaaaagaaagaattgtttttttagttggtccggtcaatgacaatgttgcttctttggtgacagcgcaacttttgtttttagagtctgaaaaccctaaaaaagaaattaatttttatataaacagtcctggtggtttagtcacagcaggattaggaatttatgatacaatgcaatatattaattcaccagtttctacactatgtataggtcaagcttcttcaatgggttcttttttattagccgcaggtgaaaaaggaaaaagattttcacttccacattccagaattatggtccatcaaccttcagcaggatttcaaggacaggctactgatatccaaatacacgcaaaagaaattcttttgctaaaagagaggttaaataagatttactccaaacatactggcaaatctgttgatgaaattgcaaaagcattagagagagataattttatgacagctgatgaggctaaaaagtttg

SEQ ID NO: 264059 - DNA, 589 bp, Unknown
  Bacterial polypeptide expressing nucleotide sequence isolated from the Sargasso Sea
atgagcagcttgatacccatggttgttgagcaatccaacaaaggtgaaagagcttatgatatttactcaagactattaaaagaaagaattatttttttgacaggtcaaattaatgacaatctagcttcattaattacagctcaattattatttctagaagcagaagatcctaaaaaagaaatttttttatatatcaatagcccaggcggacttgttactgcaggtttaggtatttacgatacaatgcaatatgtaaaaccagatatttcaactttatgcattgggcaagcagcttcaatggggtcttttttattatcagcaggaacaaaaggaaaaagattttcacttccaaattcaaggattatggttcatcaaccatctgcaggttttcaaggacaagctactgatattgaaatccatgccaatgaagtgctttctttaaaaaaaagattgaatgaaatatactctaaacatactggtaaatctgtagaggaaattaaaactgctttagaaagagataattttatgactgcagatactgctaaatcttttggactaatagactctgtagtggaaaaaagatcttaga

SEQ ID NO: 264060 - DNA, 613 bp, Unknown
  Bacterial polypeptide expressing nucleotide sequence isolated from the Sargasso Sea
aatgaaggaaattgaaaatattactaataatttaataccaatggttgtagagcaatcatctcgtggagaaagagcatacgatatttattctagattactcaaggaaagaataatatttttaactggggcaattgatgacaacactgcaagtctaatttgtgctcaattactttttcttgaatcagaaaatccaaacaaagagatttcattttatattaattctccaggtggcatagtctggtccggtttagcaatttatgatactatgcaatacatttcaccaaaaattatgacaatttgtattggtcaggcagcttctgcaggctcattattactaacagctggatcagaaggtatgagattttcactacctaactcaagaatcatggttcatcagccaagtggcggatatcaaggtcaagttacagatatagaaatccacacaaatgaaattaaaaaaacaaaagaaaaattaaatcaaatttattccaaacatacaaaaaagaaaattaaggaaatagaaacaattatggagagagataaatacttttctcctgaagaggcaattcaatttggtttaatagataagatagtggaaagtagaaaaagttag

SEQ ID NO: 264061 - DNA, 500 bp, Unknown
  Bacterial polypeptide expressing nucleotide sequence isolated from the Sargasso Sea
tattttcttaacaggtcaaatcaatgacaacgtggcgtcattagttactgctcaattattatttttagaagctgaggatcctaaaaaagaaatttatttgtacattaatagccctggaggtttggttactgctggtcttggtatatatgatacaatgcaatatgtgaaaccagatatttctactttgtgtattggtcaagctgcatccatgggctcttttttattagcagctggaactaaaggaaaaagattttcattaccaaattctagaataatggttcatcaaccatccgcaggttaccaagggcaagcaacagatatagaaatccatgcaaaagaagtattgtctttaaaaaaaagattaaatgaaatctattcaaaacatacaggtaaaagtgttgatgaaattaaatctgccttagaaagagataattttatgaccgcagatgtcgcacaatcatttggtcttattgaccaagtagtagaaaaaagatcttaat

SEQ ID NO: 264062 - DNA, 562 bp, Unknown
  Bacterial polypeptide expressing nucleotide sequence isolated from the Sargasso Sea
gagcaaacctctagaggtgagcgtgcttttgatatcttttccagactactgaaagatagaatcgtttttattgttggtggcattgacgattacgtcgctaacctggtagtggcgcagcttttatttctagaatctgaagatcccaaaaaagatatatatatgtacattaactcccccggtggtgtgattacatcaggactttctattctagatacaatgaattacctcaaatgtgatgtttccacagtttgttttggtcaagccgcaagcatgggcgcagtgcttttagcaaacggtgcagataaaaaaagatttgccttaccaaatagcagagtcatgatccatcaacctttaggaggagcaagaggacaagcttctgatatagaaattcaagcaaaagaaattcttactttaaaagataagctcaacaaaattctagctgataaaactaaacaaagcctcaagaaaatccagactgatacagaaagagacttctttatgaatgcagatgaagcagttaaatatggaattattgacgaggttctcaaagaaagaaaataat

SEQ ID NO: 264063 - DNA, 565 bp, Unknown
  Bacterial polypeptide expressing nucleotide sequence isolated from the Sargasso Sea
gttgttgacagtcaatcgtggagagagagcttatgatatttattcaagattattgaaggaaagaatagtttttgttgtaggtcaaattacagataatgtggcttcattagttactgcgcaactgctttttttagaatcagagaatccaaaaaaagaaatttatttatatattaatagcccagggggtttagttactgcaggattaggtatttacgatacaatgcaatatgttaagcctgaggtttcaactctatgtattggacaagcatgttcaatgggatcttttttgttagcagctggtgaaaaaggaaaaagattttcattgcccaattctagaataatggttcatcagccttctgctggatttcaaggtcaagcaacagatatagaaatacatgccaatgaagttttgtcacttaaaaaaagattaaatgaaatttattctaagcataccgggctgtcagttgatgaaatcaaacttgctcttgaaagagataattttatgacagctgaaaatgcaaaatcatttggtctaattgataaagtagtcgacaaaagagtttaa

SEQ ID NO: 264064 - DNA, 109 bp, Unknown
  Bacterial polypeptide expressing nucleotide sequence isolated from the Sargasso Sea
atggcaaaccttgtcccgatggtcgtcgagcagacgagtcgcggcgagcgtgcctatgacattttctcgcgccttctgaaggagcgcatcatcttcctgaccgggccga

SEQ ID NO: 264065 - DNA, 301 bp, Unknown
  Bacterial polypeptide expressing nucleotide sequence isolated from the Sargasso Sea
gccgcaagcatgggcgctttgttattagcaggtgtagataagaaaaaaagatttgctttacccaattcaagaataatgatccaccaaccattgggtggatttcaaggacaggcttctgattttgaaatacatgctaaagaaatacttcatatgaaaaaaattgttaatgagatattatcaaaacatactggccatactattaaaaaaattgaaaaggatacagacagagataactttcttgatgctacagcagcaaagtcctatgggatagttgatagcattcttgaagaaagaggctaag

SEQ ID NO: 264066 - DNA, 554 bp, Unknown
  Bacterial polypeptide expressing nucleotide sequence isolated from the Sargasso Sea
gaacagaggtgaaagggcttatgatatatattctagacttttaaaagagcgtatagtttttttagtagggccagttaatgaccatgtagcaagtttgataacagctcagcttttatttttagagtctgaaaatccaaaaaaagaaatatctttttacataaatagcccaggaggtttagttacagcaggcttaggtatctatgatacaatgcaatatattaaacctgccgtttcaactttgtgcataggtcaagcctcttcaatgggatcatttttattagctgcaggaacaaaaggaaaaagatattcattaccaaactctagaattatggttcatcaaccttcagcagggtaccaaggacaggcaactgatatcgaaattcatgctaaagaaattctctctttaaaaaaacgtttaaatgcaatttattctaagcatacaaaaaaaaatgaagaagaaattagagaagctttagaaagagataaatttatgtctccgcaagaagcaaaagattttggtttaatagactctgttgtggaaaaaagatcttaaa

SEQ ID NO: 264067 - DNA, 427 bp, Unknown
  Bacterial polypeptide expressing nucleotide sequence isolated from the Sargasso Sea
atggatttaggaaaagaatttaaggattatgcaataaagcatcatggaatcaattcaatgtattatgataaaatcgtaagtagtatgactccctacattattgaagaaagacaattaaatgttgctcaaatggatgttttttcaagacttatgatggatcgaattatgtttttaggaactgcaataaatgataatgtagctaacattattcaagctcaattactttttctgcaaagcacagattcaactagcgacataaacatgtatattaattcacctggagggtcagtatatgctggccttggaatatatgatacaatgcaatttatttctccgaatgtagctacgatatgtactggtatagctgcatctatgagtgccattttgctttgtgccggagaaaaaggaaaacgttcagtcctcactc

SEQ ID NO: 264068 - DNA, 613 bp, Unknown
  Bacterial polypeptide expressing nucleotide sequence isolated from the Sargasso Sea
catgccaataggaactccaagcgtgccctacagacttccaggaagtcaatacgaaagatgggttgacatatacacaagactaggtgttgaaagaattctttttcttggtcaagaagttaacgatggtattgctaacagcctagttgcacaaatgctttatcttgattctgatgacaattccaaacctatctacctatatataaatagcccaggaggctcagtaaccgcaggcttggctatatacgacactattaaatatgtaaaaagtgatgtagttactatatgcgttggactggcagcctccatgggtgcgttcttattggccgctggcacaaaaggtaaaagagttgctttacctcacagtagaataatgattcatcaaccccttggaggaacatctcaacgtcaagcaagtgatattgaaatagaagctaaggaaattttaagaattaaagacatgttaaacatgtctatggctgatatgacaggtcaatcattcgagaaaattgaaaaggatacagatagagattattttctaagcgcagaagaggcaaaaaactatggcctaattgatagagtaatcacacatccaagtgaggcaaatcaggcctaa

SEQ ID NO: 264069 - DNA, 457 bp, Unknown
  Bacterial polypeptide expressing nucleotide sequence isolated from the Sargasso Sea
catgccaataggaactccaagcgtgccttacagacttccaggaagtcaatacgaaagatgggttgacatatatacaagactaggtgttgaaagaattctttttcttggacaggaagtgaatgatggtattgctaacagccttgttgcacaaatgctttatctagattctgatgataattccaaacctatctatctatatataaatagcccaggaggatcagttactgctggcttggcaatatatgacactattaaatatgtaaaaagtgatgtagtaacaatctgcgtaggcctagcagcctcaatgggagcgttcctactggccgctggcacaaaaggtaaaagagttgctttgcctcatagcagaataatgattcatcaacctttaggaggaacttctcaacgtcaagcaagtgatattgaaatagaagctaaggaaattttaagaattaaagac

SEQ ID NO: 264070 - DNA, 110 bp, Unknown
  Bacterial polypeptide expressing nucleotide sequence isolated from the Sargasso Sea
tatgaataaaatacctgaacatttaaacacactaataccgatggttgttgagcaatcaagcagaggcgaaagagcctatgatatctattcaagattattaaaagaaagaa

SEQ ID NO: 264071 - DNA, 449 bp, Unknown
  Bacterial polypeptide expressing nucleotide sequence isolated from the Sargasso Sea
tcaaatattatttttagagtctgaaaatccaaaaaaagaaatttctttttatattaattcaccaggtggtattgtttggtctgggttggccatttacgatactatgcaatatgtttcttcgaaaattatgaccatttgtattggtcaggctgcttctgctgggtcccttcttttaactgctggtgaaaaaggaatgagattttctcttccaaattcaagaattatgatacatcagcctagtggtggtatgcaaggacaagttacagatattgaaattcaaactaatgaaattaaaaaaacaaaattgaaattaaatgaaatttactcaaaacatacaggaaagaaattatcagaaatttcaagtataatggaaagagataagtatttctcagctgatgaagctattaaatttggtcttatagacaaggttgtaaaggatagaaaataat

SEQ ID NO: 264072 - DNA, 583 bp, Unknown
  Bacterial polypeptide expressing nucleotide sequence isolated from the Sargasso Sea
cctatggttgttgaacaaacaagtagaggagaaagatcatatgacatatactctagacttttaaaagaaagaataatttttcttgtaggacccgttgatgataatattgcttcattagtatgtgctcaattgttatttttagaagctgaaaatccaaaaaaagacatttcaatgtatattaattctccaggtggagtcgttacatcaggattatcaatatatgacactatggaatacataaggcctgatgtatcaactgtgtgtatagggcaagcggctagtatgggttctttattactgactgcaggagctaaaaataaaagatattgtctacccaatgcaagaataatgacacatcaaccatcaggaggctttcagggtcaggctagcgatatagaaattcatgcaaaggaaataatcaacctaagaagtagattaaacggtatttatgtaaaacattctggcaagaaaattgcagaaattgaaagattaatggatagagatacatttttatcacctgaggacgcatttaaacttggtttaatagatgaagttgtcgacaaaagaccaaatgctaaataaa

SEQ ID NO: 264073 - DNA, 322 bp, Unknown
  Bacterial polypeptide expressing nucleotide sequence isolated from the Sargasso Sea
gatgtagtgacaatatgctttggagtagccgcaagtatgggggcatttctactttctggaggagcaaaaggtaaaagattggctttacctaattctaggattatgattcatcagcctcttggaggtgcacaaggtcaagccgtagagattgaaatacaagctaaagaaatactttttctcaagaaaacattaaattcacttttagcagaacataccggtcaacctttagaaaaaattaatgaagatacagaaagagattactttttatctccctcagaagcagtcgaatatggattaattgataaagttatcaaaaagtgac

SEQ ID NO: 264074 - DNA, 326 bp, Unknown
  Bacterial polypeptide expressing nucleotide sequence isolated from the Sargasso Sea
aatgaaggatcctttagataaccttactaataatttaatccctatggttgttgagcaatcatcaaggggagaaagagcatatgacatttattctaggcttttaaaagaaagaattatttttttaacaggacccattgatgataatatagctagtttaatatgtgctcaaatactttttttagagtcagaaaaccctaaaaaagaaatttctttttatataaactctcccggtggaatagtttggtctggtttagcaatttatgacacaatgcaatatgtttcatcaaaaataatgacatatgtgttggtcaagctgcttcagctgg

SEQ ID NO: 264075 - DNA, 334 bp, Unknown
  Bacterial polypeptide expressing nucleotide sequence isolated from the Sargasso Sea
agataaggaaaaagatattcaaatatatattaactcacctggtggatctgtttatgccggattaggcatctatgatacaatgcaatttattggccccaatgttgcaacaatttgtacaggcatagctgcatctatggcagctgtattattatgtgctggtgaaaagggaaagagatcaggtcttactcattcaagagtaatgattcatcaaccacttggtggagcacaaggtcaagcatctgatattgaaattacagctagagagattgggaagttaaaaaaagaattatacgaaataatcgctagtcatactggtcagagatacgataaagtt

SEQ ID NO: 264076 - DNA, 479 bp, Unknown
  Bacterial polypeptide expressing nucleotide sequence isolated from the Sargasso Sea
tatgacaacaaatttatctgaacatatgagtaacctagtgcctatggtggtggagcaatctagcaaaggtgaaagagcttatgatatttattcacgattattaaaagaaagaataatttttttaaccggtcagattaatgataatgtggcttcacttgttacagctcagttattatttttagaagcagaggatccaaaaaaagaaatttatttatatgtcaatagccctggtggattagtaactgctggacttggtatttatgatactatgcaatatgtaaaacctgacatctcaaccttatgtattggacaagctgcatcgatgggatcatttttattggcagctggaactaaaggaaaaagattttctttaccaaattcaaggataatggttcaccaaccatctgctggttttcaaggtcaagcaactgatatcgagattcatgcaaatgaagttttgtcattaaaaaaaagattaa

SEQ ID NO: 264077 - DNA, 465 bp, Unknown
  Bacterial polypeptide expressing nucleotide sequence isolated from the Sargasso Sea
tatgaataatctgatcccaatggttgttgaacaatcaagtagaggtgagcgtgcttatgatatttattcaaggttactaaaggaaagaattgtttttgtagttggaccgataaacgatggtgtggcatctttagttacagctcaattattatttttagagtccgaagatccaaaaaaagaaatttctttgtatataaatagcccaggcggacttgttacagcgggtttaggaatttacgatacaatgcaatatattaaacctgaagttaatactttatgcataggacaggcagcaagtatgggatcttttttattatctgctggtgcaaaaggaaaaagattttcattaccaaattctagaataatggttcatcagccatctgctggtttccaaggtcaagcaacagatatagaaatccatgcaaatgaagttttatctttaaaaaaaagattaaacgaaattta

SEQ ID NO: 264078 - DNA, 229 bp, Unknown
  Bacterial polypeptide expressing nucleotide sequence isolated from the Sargasso Sea
aatgaacaatctaatcccaatggttgttgagcagtcgagtaagggagagcgggcatatgatatatattctcgacttctaaaagaaagaatagtttttctggttggtccggtaaatgacaatgtagcttcattagtgactgcgcaattattatttttagaatcagaaaacccaaaaaaagaaataagcttttatattaatagtccggggggactagttacttcaggtcta

SEQ ID NO: 264079 - DNA, 503 bp, Unknown
  Bacterial polypeptide expressing nucleotide sequence isolated from the Sargasso Sea
aattgtttttgtagtaggtccaattaatgacagtgtagcttctgttgttactgcgcaattattatttttagaatctgaaaatcctaagaaagatatttatttatatataaatagccctggtggattagttactgcaggtttaggaatttacgatacaatgcaatatataaagccagacgtttccactttatgcattggtcaggctgcttcaatgggatcttttcttcttgcagcaggccaaaagggtaaaagattttctttgccaaattcaagaattatggttcatcaaccttcagcaggttttcaaggtcaagcaactgatattgagatacatgcgaatgaagttctttctctgaaaaaaaggcttaatgaaatttattctacaaatactggcaaatctgttgatgaaattaaaaaggctcttgagcgagataattttatgactccaaaaaatgcaaaagactttggtttaattgatcaagtagttgaaaaaagaacttaat

SEQ ID NO: 264080 - DNA, 481 bp, Unknown
  Bacterial polypeptide expressing nucleotide sequence isolated from the Sargasso Sea
tatgacagacatgcaatcagctctaatcccaatggtaatagagcaaactccaagaggagagagatcttttgatatatattctcgtcttctaaaagaaagagttatattcttatctggaccaattgatgattatatttctaatttagttgtagctcagttactatttttagaatctgagaatcctgaaaaagatatttctatttatattaattctcctggtggaagcatctctgccggtcttgcaatatacgatactatgcaatttgtaacaccatctatatcaaccttatgcatcggtcaggctgcaagtatgggtgctttgctattagctggtggagataagaaaaaaagatttgccttacctaattcaagaataatgattcatcaaccattgggcggatttcaaggtcaggcttctgattttgaaatacacgctaaagaaatacttcatatgaaaaagattgttaatgagatatatcaa

SEQ ID NO: 264081 - DNA, 604 bp, Unknown
  Bacterial polypeptide expressing nucleotide sequence isolated from the Sargasso Sea
atgagttcattagtaccaattgtaatagagcaaacaagcaaaggcgaaagaagttatgacatcttctctcgactacttaaagacagaattataatgttagaaggaccaattggtgaacacaccgcttctgtgttatgtgcccaactgttatttttagaatcacaggcacctggcaaagacatagttttatacataaactcccctggcggactagtaactgctggtatggccatatacgataccatgcaatacgtgaaatcagatatacaaaccattgttattggacaggcttgctcaatgggatcgttgttggcttcagcaggaactaaaggcaaacgaatgatgttgccacactcaagacacatgatacaccaaccactaggtggtgctaaaggacaagcaacagacgtacaaatacaagcaaacgagttgttgcgttggaaaacagaacttacaaaaatctacgagaaacacacaggacaaaaacttgaaaaactcaaagacgacatggagcgagacaagtttatgacttctgaggaatcaatcgcttacggtttagcagacaaaatagtccacagcagagaagaagacaacaaagcctaga

SEQ ID NO: 264082 - DNA, 604 bp, Unknown
  Bacterial polypeptide expressing nucleotide sequence isolated from the Sargasso Sea
catgccgatcggtacccccagcgttccctaccgcctacccggcagccagatggagcgctgggtcgacatctacacccgtctcggggtggagaggatcctcttccttggctctgaagtcaatgacggcatcgcgaacagcctggtggcccagatgctctatctggactcggaagacagcagcaagccgatctacctgtacatcaactcccccggcggctccgtcacggctggactggcgatctacgacaccatccagtacgtcaagagcgaggtggtgaccatctgcgttggccttgctgcatccatgggcgcctttcttctcgccgctggcaccaaaggcaagcgggttgccctgccccacagcaggatcatgattcaccagcccctcggcggcaccagccgtcgccaagccagtgacatcgaaatcgaagcacgggagatcctgcgtatgaaggagatgctcaaccgctccctggccgacatgagtggccaaagcttcgagaagatcgagaaggacaccgaccgggactacttcctcagtgccgaagaagccaaggaatacggcctgatcgaccgcgtcatctcccatccgaacgaggcctga

SEQ ID NO: 264083 - DNA, 385 bp, Unknown
  Bacterial polypeptide expressing nucleotide sequence isolated from the Sargasso Sea
ggattggcaatttacgacacaatgcaatttatacagtctccagtctcaactctttgttttggacaggctgcgtcaatgggttcattcttactagcggcaggtgaaaaagggaaaagatatgctttacctaatagccgcataatggtgcaccagccatctgctggctttcaaggtcaagcaactgatatagagattcatgcgaaagaggtcttggcaatgaaagcaaatttaaacaaaatatacgcaaaacatacaggccaacccgttgaagcaatcgaagaagcgcttgaaagagataactttatgtcaccggaagaggctcagaaatttggcataattgatagcattcaggaaaaaagagttgagccaaaaactgagaaatagc

SEQ ID NO: 264084 - DNA, 589 bp, Unknown
  Bacterial polypeptide expressing nucleotide sequence isolated from the Sargasso Sea
catgaacacattagtgccaatggtcgttgagcaatccaatagaggtgagagagcttacgatatatattcaagattacttaaagaaagagttgtttttgtagtaggtcctattaatgataatgttgcatctttagtaactgctcaattactttttttagagtctgaaaaccctaaaaaagatatatctctttacataaattctcctggtggattggtaacttctggactaggtatatatgataccatgcaatacattaaacctgatgttacaactttatgcataggacaagcagcaagtatgggatcttttttattagcagcaggagctaaaggtaaaagattttcacttccgaattcaagaataatggttcatcaaccatcagcaggatatcaaggtcaagcaacagatattgaaattcatgctaaagaagtattatcacttaaaaaaagattgaatgaaatttattcaaaacatacaaataaatctgtcgatgaaataaaatctgctcttgaaagagataattttatgactcctgaatcagcaaaaagttttggtttaatcgacaaagtagtggaaaaaagggagtag

SEQ ID NO: 264085 - DNA, 607 bp, Unknown
  Bacterial polypeptide expressing nucleotide sequence isolated from the Sargasso Sea
agatcctatagatatttaactataaatcttatacctatggttgtcgaacaatcatcaagaggtgagagggcttatgatatttactctagattattaaaagaaagaataatttttcttactggcccaatcgatgataacattgcaagtttaatatgcgcacagattctttttttagaatctgaaaatccaaaaaaggaaatttctttttatataaattcaccgggcggtatagtttggtcaggtttagcaatttatgacacaatgcaatacgtatcttctaaaataatgaccatatgtgttggacaagctgcttcagctggatctttattgttaactgccggggataaagatatgcgtttttcacttccaaactctagaattatggttcatcaaccaagtggaggttatcaaggtcaagtaactgatattgaaattcaaacgaccgaaataaaaaaaacaaaagaaagattaaatgaaatttatgcaaaacatacaggaaaaaaaataaatgaaatatcttctataatggaaagagataaatatttttcacctaaagaagcaataagcttcggtttaattgataaaatcgtggaaaatagaaagtaat

SEQ ID NO: 264086 - DNA, 365 bp, Unknown
  Bacterial polypeptide expressing nucleotide sequence isolated from the Sargasso Sea
ttatgacaccatgcaattcgtggaacctgaggtaggaactatttgtatgggactaggggcttcaatgggtcagtttctactttgtgcaggagctaaaggcaaacgatttgctttgccacatgctcgcatcttgatgcaccagcctctaggtggtgttagaggtgatgcaactgatatagctattcaagctgagcaaatggcttttacaaaacaaatacttcaacaacgaatagcagaacatacaggtcaatcaatcgaaacaatagaaacagacagtgaccgggatcgctggttcacagctgaagaagctagcgattatggaattattgacaaagtaatcgtccgacggggcgaaatgcactgac

SEQ ID NO: 264087 - DNA, 589 bp, Unknown
  Bacterial polypeptide expressing nucleotide sequence isolated from the Sargasso Sea
tatgatccctttagttttagaagaatctggcggtagtgaaagagtctttgatatttattcaagattattgagagagagaataatctttttgggagaacaagttactagtgaaactgctaatagaattgttgctcaattattattcctcgaagcagaagatcctgagaaggatatctacatgtacattaattcaccaggtggatctgtctatgatggcctaggaatttttgacacaatgcagcatgtaaagcctgatattcatacggtatgtgtaggtttagctgctagtatgggcgcttttttgttggctgcaggtactaaaggtaaaagaagcagccttagacattcaagaataatgattcatcaaccactgggaggtgctagagggcaagccagtgacataaggattcaagctgatgaaattttgtttttaaaagaacggcttaataccgaactatcagaaagaactggaaaggattatgaaactattaaagaagatactgatagggatttttatatgtctccaaaagaggctgttgattatggattaatagatttagttttagataagaaaccagtcaaaacttaa

SEQ ID NO: 264088 - DNA, 454 bp, Unknown
  Bacterial polypeptide expressing nucleotide sequence isolated from the Sargasso Sea
gatgttatatttagaagcagaaaatcctgataaagatattcacctttttatcaattccccaggtggatctgtaacagcaggtctatcaatctatgacacaatgcagtttataaaacctgatgtttcaactttatgtatcggccaggccgcaagcatgggagctgttttactatcaggtggagcaaaaggaaaaaggcaagccctccctaattctagagttatgatccatcaagttttgggaggatttcaagggcaagccagtgatatagagatacacactcaagaaattttatctattaagaagaaattaaatgaaattttagcaaaccattctggtcaaaaggttgataagatcgctaaggatagtgaccgtgataattttatgtctcccgatcaggccgttaagtatggtttaattgatgcagtagtagacagtcgttcagtcaaaaagtaa

SEQ ID NO: 264089 - DNA, 361 bp, Unknown
  Bacterial polypeptide expressing nucleotide sequence isolated from the Sargasso Sea
tcgattctagatacaatgaacttcatcagaccgtcagtgagcacactttttgtaggtcaagcagcaagcatgggagctgttcttctaagtggcggagagaagaaaaagcgattctgtctatcaaacgctagagtaatgattcaccaaccacttggctcctttcagggtcaagcaactgattttgatatccaggcgaaggaaatattaagcattagatctaaactcaatcaaattttatcaaaaaataccggacaaactatcaaaaagatacaggctgataccgagagggataatttcatgcagccagatgatgcaaaaaaatatggtttaatcgatcagatactcttatccagagagtaaa

SEQ ID NO: 264090 - DNA, 286 bp, Unknown
  Bacterial polypeptide expressing nucleotide sequence isolated from the Sargasso Sea
atgcaagatcctattgatacatatatgaatacgctcgtgccaatggtcgttgagcaaactgctcgtggcgagcgatcttatgacatatattcgcggctactaaaagaaagaattatttttgtatccggtccagttcatgatggaatggcaactcttctagttgctcagttactatttttagaggcagaaaatccaaaaaaagatatttcaatgtatattaactccccgggcggggtagtaacgtctgggttgtctatttatgatactatgcagtatataaggccaa

SEQ ID NO: 264091 - DNA, 379 bp, Unknown
  Bacterial polypeptide expressing nucleotide sequence isolated from the Sargasso Sea
tatggataatattaaatcagcactcgttccaatggttgttgagcaaacttcaagaggtgagcgagcttttgatatatactcaagattgcttaaagaaaggataatttttgttgttggccccgtagacgatatgatgtcaactttagtgtgtgcgcaattattattcttagaatctgaaaatcccaaaaaagatatttctatgtatattaattctcccggtggcattgtgacttcaggtttagctatttatgatactatgcagtatatcaagcctgatatttctactgtttgttttggccaagcagcgtcaatgggaagtttgcttttaacttctggcgcaaaaggtaaaaggtatagtttacctaatagtaggattatg

SEQ ID NO: 264092 - DNA, 343 bp, Unknown
  Bacterial polypeptide expressing nucleotide sequence isolated from the Sargasso Sea
atgagtcgcgaatttgaagaaaaaatgaacagcttgatacctatggtagtcgagcaaacgggtaaaggtgaaagagcatatgacatttactcaagacttcttaaagaaagaatagtatttttagtaggaccagtaaacgatgcagttgcatcattagtcactgctcaactactttttttagaatctgaaaaccctaataaagaaataagtttttatatcaatagccctggaggtctagtaactgctgggttaggaatatatgatactatgcaatacatcaattctccagtttcaacgttatgcatcggacaggcatcttcaatgggatcatttttactatcag

SEQ ID NO: 264093 - DNA, 610 bp, Unknown
  Bacterial polypeptide expressing nucleotide sequence isolated from the Sargasso Sea
atgaataaaatacctgaacatctaaacacacttattcccatggttgttgaacaatcaagtaggggagaaagagcatatgatatttattcaagattattaaaagaaagagttgtttttgttgttggcccaataaatgataacgtagcatcattagttactgcacaattactatttttagagtcagaagatccaaaaaaagaaatatctttatatattaatagtcccggaggtttagtaacagcaggcttgggtatttatgatacaatgcaatatattaaacctgatgtttcaactttatgtattggacaagctgcaagcatgggttcatttttattagcagcaggaacaaaaggaaaaagattttcactacctaattctagaattatggttcatcaaccttctgctggttttcaaggccaagctacagacatagaaatacatgcaaatgaagttttatcattaaaaaaaagactgaatgaaatttattcaaaacataccaataaatcagtcgaagttataaaatcagcacttgaaagagataactttatgactcctgatagcgctaaagaatttggtttgatagataaagtagtagttaatagagaataat

SEQ ID NO: 264094 - DNA, 224 bp, Unknown
  Bacterial polypeptide expressing nucleotide sequence isolated from the Sargasso Sea
tatgagtcgtaaaattgaagaacatatgaacaatctaatacccatggtggttgaacagaccacaaaaggggaaagagcttacgatatatattctaggcttttaaaagagaggatagtttttttggtaggaccggtaaatgataatgttgcttcattagtaacagcacaattattgtttttggagtcagagaatccgaaaaagaaatttatttttatattaatag

SEQ ID NO: 264095 - DNA, 299 bp, Unknown
  Bacterial polypeptide expressing nucleotide sequence isolated from the Sargasso Sea
tatgacatcaaaaatatctgaacatatgaataatttgatacccatggttgttgaacaatcaaaccggggtgaaagagcttacgatatttattcaagactattaaaggaaagaatagtttttctcgtgggacaaattaatgacaatgttgcttctttggtaacagcacaattgctttttttagaatctgaaaatcccaaaaaagaagtttatctatatataaatagcccaggcggacttgttactgccggtatgggtatttacgatactatgcaatatattaaaccggaagtttctactt

SEQ ID NO: 264096 - DNA, 346 bp, Unknown
  Bacterial polypeptide expressing nucleotide sequence isolated from the Sargasso Sea
catgccgatcggtacccccagcgttccctaccgccttcccggcagccagatggagcgctgggtcgatatctacacccgtctcggtgtggaacgaatcctgttcctgggctctgaagtgaatgacggcatcgccaacagccttgtggcccagatgctgtatctcgattccgaagacagcagcaagccgatttacctctacatcaactcccctggcgggtcggtaacggcgggtttggcgatctacgacacgattcagtacgtcaaaagcgatgtggtcaccatctgcgtgggactcgctgcctcaatgggagcctttctattggcggctgggacaaaagggaagcgg

SEQ ID NO: 264097 - DNA, 616 bp, Unknown
  Bacterial polypeptide expressing nucleotide sequence isolated from the Sargasso Sea
aatgagttcattgataccggttgttgttgagcaaactaacagaggagagagatcatatgatattttttcaaggttgcttaaagaaaggatcatttttttaactggtgaagttaatgatgctgtttccagtgttatatgtgctcagtttttatttttagaatcagaagatcctaaaaaagacatttttttatatataaattcaccaggtggtgtggtttcatctggactagcaatttatgacacaattcaatatattaggcctgatgtttctacagtttgtgtaggtcaggctgcgagcatgggttctttgcttttagcctcaggaacgcgaggaaaaagatactgcttaccacattcccgtataatgactcatcaaccatcgggaggtgttcagggccaagccacagacattgaaattcatgcaaaagaaataattaaccttaaaaaaaaattaaatctaatctatgaaaaacatactggccagtctttggatgttattgagaaaatgatggaaagagactatttcatgagcgcagatgaggcaaaaaaaacaggtattgtagataaagttgtatcagaaagacctgattttgaaaaaaattcaaaaaaaaaataa

SEQ ID NO: 264098 - DNA, 458 bp, Unknown
  Bacterial polypeptide expressing nucleotide sequence isolated from the Sargasso Sea
tctttttttagaagctgagaatccaaaaaaagatatatcgatgtatatcaattctccaggaggtgttgttacatcaggtttatctatttacgacacaatgcaatacataaggccaaaaatatccaccctttgtgtggggcaggctgcttccatgggctctctattgctcgcggctggacagccagaaatgagattctctttacctaatagtagaatcatggttcaccagccatctggaggttttcaaggacaagcttcggatattgagttacaagctagagaaatcttagaattaaaaaaacgccttaaccttatttatgtcaaacactgtgggcagaaattagataaagtagaggccagcttagatagagacaactttatgacaccggatgaagcgttgaaatggggtttaatagatgaaattattgataagagaatagaagaagtagaggagtaaa

SEQ ID NO: 264099 - DNA, 364 bp, Unknown
  Bacterial polypeptide expressing nucleotide sequence isolated from the Sargasso Sea
aatgtccaattcccaggagttacagatgagtagtttgatccctatggttgttgaacaaaccaatcgtggagagcgtgcatttgatatatactcgcgcctattaaaggagagaatcatctttgtgattggtccaattgacgatgctgtatccagcgtagtttgtgcccaattactctttttagaggcagataacccaacaaaagatatttctatgtatataaattctccaggcggtatcgtaacctcgggattagccatgtatgacactatggagtatattcggccagacatatcgacagtatgtattggacaagcggcgtcgatgggttctttattgttgactgcaggcgctaaagggaagaga

SEQ ID NO: 264100 - DNA, 589 bp, Unknown
  Bacterial polypeptide expressing nucleotide sequence isolated from the Sargasso Sea
tatgagcaatcttgtaccaatggttgttgaacaatcaagtaaaggtgagagagcttatgatatttattctagattactaaaagagagaattatttttttaacaggtcaaattaatgataacgttgcatcattagttactgctcaattattatttttagaagctgaggatccaaaaaaagaaatttatttatatattaatagcccaggaggtttggttacagctggtcttggtatttatgacacgatgcaatatgttaagccagatatttctactttatgcattggtcaagcagcttcaatgggttcgtttttacttgctgcaggcactaaaggaaaaagattttctttaccaaattcaagaataatggttcaccagccatccgcaggttttcaaggtcaagcaactgatattgagatccatgcaaacgaagttttgtctttgaagaaaaggcttaatgaaatttattctaaacacactggaaaaagtgttgatgaaataaaatctgctcttgaaagagataattttatgacagcagatgtcgcacaatcatttggtcttattgacgaagtagtagaaaaaagatcttaa

SEQ ID NO: 264101 - DNA, 496 bp, Unknown
  Bacterial polypeptide expressing nucleotide sequence isolated from the Sargasso Sea
tttttagttggtccgataaacgacaatgttgcatctctagttacagcacaacttttatttttagagtctgaagatccaaagaaagaaatttctctttacataaatagtccaggtggtttagttactgcaggtttaggaatttacgatactatgcagtatataaaacctgatgtttcaactttgtgtattggacaagcagctagcatggggtcttttttattagcagcaggaaccaaaggaaaaagattctctcttccaaattcaagaataatggtccaccaaccttcagcaggttttcaagggcaagctaccgatattgaaatacatgctaacgaagttttgtcattaaaaaaaagattaaatgaaatttattcgaaacatactaataaatctgttgacgaaattaaatcagctcttgagagagataattttatgacaccagagaatgcaaaagattttggacttatagacaaagtagtagttaatagattgtaga

SEQ ID NO: 264102 - DNA, 247 bp, Unknown
  Bacterial polypeptide expressing nucleotide sequence isolated from the Sargasso Sea
atgtcaaatcttatacccatggttgttgaacaatctagcaaaggtgagagagcctatgatatctactcaagactattaaaagaaagaattatttttttaactggtcagattaatgacaatgttgcctcattggttactgcccaattattatttttagaggcagaggatccaaaaaaagaaatttatttatacataaatagcccaggaggcttggtaacagctggtcttggaatctatgatacaatgc

SEQ ID NO: 264103 - DNA, 283 bp, Unknown
  Bacterial polypeptide expressing nucleotide sequence isolated from the Sargasso Sea
atgacagacattcattcagctttaataccaatggtcattgaacaaacccctagaggtgagagatcatttgatatttattccagattgcttaaagaaagagttatatttttatctggacccattgatgactatatttctaatcttgttgttgctcaattacttttccttgaatcagaaaacccagaaaaggatatctctatttatattaactcacctggtggaagtatttctgcaggattagccatttacgataccatgcaatttatcaaaccatcgatatcaa

SEQ ID NO: 264104 - DNA, 414 bp, Unknown
  Bacterial polypeptide expressing nucleotide sequence isolated from the Sargasso Sea
aagaaatttatttatatattaacagcccaggtggtctggtaactgcaggtcttggtatttatgataccattcaatacattaaaccagaagtttcaactttgtgtatcggtcaagcatgttcaatggggtcttttcttttagcctcaggtcaaaaaggaaaaagattttctcttccgaattcaagaataatggttcaccaaccatcagctggatttcaaggtcaagcaacagatatagaaattcatgcgaacgaagttttatctttaaaaaaaaggctaaatgaaatttactcaaagcacacaggtaaatcagttgaagaaataaaattggcactcgaaagagataattttatgacagccgataatgcaaaatcttttggtttgatagactcagtagtggataaaagaatttaat

SEQ ID NO: 264105 - DNA, 613 bp, Unknown
  Bacterial polypeptide expressing nucleotide sequence isolated from the Sargasso Sea
tatgactattaaaattccagaacaattaaatactcttatccctatggttgttgaacaatctagtagaggagaaagggcatatgacatttattctagacttcttaaagagagaatagtatttgtagttggtcccataaatgatgcggttgcatcattagttactgcgcaattattatttttagaatcagaagaccccaagaaagaaatttctttgtatataaatagtcctggtggacttgtaacagctggacttggtatttatgatacaatgcaatacatcaaaccagaaataagtactttatgcataggtcaagcggcaagtatgggatcatttttacttgcggctgggactaaaggaaaaaggttttcattgccaaattccagaatcatggttcatcaaccctcggctggctttcaaggacaagcgactgatattgaaattcacgcaaatgaagttttatctttaaaaaaaagattaaatgaaatttattcaaaacatactggaaaatctgttgatgaaattaaatctgccttagaaagagataattttatgactcctgataatgcaaaattatttggcctgatagataaagtagtagaaaagagagaataa

SEQ ID NO: 264106 - DNA, 571 bp, Unknown
  Bacterial polypeptide expressing nucleotide sequence isolated from the Sargasso Sea
tatggttgtagaacaatcaagtagaggagaaagagcttatgatatttattcaagattattaaaagaaagaatcgtatttgttgttggaccgataaatgatgcggttgcctctttagtcactgctcaacttttatttttagaatctgaagatccaaaaaaagaaatttctttatacataaatagcccaggaggtcttgtcactgcaggtcttggtatttatgatacgatgcaatatgtaaaacctgaagtaacaacattgtgcattggtcaggctgctagtatgggttcttttttattagctgctggagctaaaggaaaaagattctcactacctaattctagaattatggttcaccaaccatcagcaggatttcaaggtcaggcaactgatatagaaattcatgctaatgaggttctttctttaaaaaaaagattaaatgaaatttattctaaacatacaggaaaatctgtcgatgatataaagcttgctttagaaagagataattttatgacaccagaaaatgcaaaagattttggattaatagacaaagtagtagttaaaagagaataa

SEQ ID NO: 264107 - DNA, 280 bp, Unknown
  Bacterial polypeptide expressing nucleotide sequence isolated from the Sargasso Sea
tctattagccgcaggtcaaaatggaaaaagattctcactaccaaattcacgaataatggttcaccaaccttcagctggatttcagggacaagctactgatatagaaatacatgcaaacgaagttctttcactaaaaaaaagattaaacgaaatatattccaaacatactggtaaatccgttgaagaaataaagtcagcactagagagagataattttatgactgctcaaaatgctaaaagttttggtttaatcgatgaagtagtcgaaaaaagatcataa

SEQ ID NO: 264108 - DNA, 550 bp, Unknown
  Bacterial polypeptide expressing nucleotide sequence isolated from the Sargasso Sea
tctggtaggggagaaagagcctttgatatatattcaagacttttgagggaaagaataatttttttaggtaccggaattaatgatcaagtatctgactctcttgttgcacaattattatttcttgaagctgaagatcccgaaaaagacattcaaatatatatcaattctcctggtggatcagtaactgcaggaatggccatatacgacactatgcaacaaatttccccagacgtagtgacaatatgttttggagtagctgcaagtatgggagcatttttactgtctggaggagcaaagggaaaaagattagcgttgcctaattctaggataatgattcatcagcctcttggaggtgcacaaggtcaggctgttgaaattgaaattcaagctaaagaaattctttttcttaagaaaacattaaattcgcttttagcagatcatactggacaacctttagacaagattaatgaagatacagaaagagattattttttatcgccgtcagaagcagtcgaatatgggttaattgataaagttatcaaaaagtgac

SEQ ID NO: 264109 - DNA, 607 bp, Unknown
  Bacterial polypeptide expressing nucleotide sequence isolated from the Sargasso Sea
acaaaatttcctgaacatctaaatactcttattcctatggtggtcgagcaatcaagccgaggagaaagagcttatgatatatattcaagattattaaaagaaagaatagtttttgttgtaggaccaattaacgattcaattgcatcacttgttacagctcaacttttatttttagagtcagaagatcctaagaaggaaatatctttatatataaatagtcctggtggcctagttacagctggcttaggtatttatgacactatgcaatacatcaaacctgaggtatctacattatgtattggtcaggctgcaagtatgggatcttttttgttagcagctggaactaaaggaaaaagattttcattacccaattctagaatcatggttcaccaaccatctgcaggatttcaaggacaagcaactgatatagagattcatgcaaatgaagttctgtctttaaaaaaaagattaaatgaaatttatgcaaagcatactaataaatcagtagatgatataaaaactgctttagaaagagataattttatgactccagataatgcaaaagattttggattaatagataaagtagtgtctaaaagagaataac

SEQ ID NO: 264110 - DNA, 538 bp, Unknown
  Bacterial polypeptide expressing nucleotide sequence isolated from the Sargasso Sea
atgagtcgtaaaactgaagaacagatgaactctttaattcctatggttgttgaacagacagccaaaggagaaagggcctttgatatttattcaagacttttaaaagagaggatagtttttttggttggtccagttaatgataatgttgcttctttggtaactgctcagctactttttctagaatcagaaaatccaaaaaaaggaataaatttttatattaatagtccaggaggccttgtaaccgcagggttaggtatttacgatactatgcagtatattaattctccagtctctactttgtgtataggccaagcttcttctatgggctctttcttgttagctgcaggagaaaaaggtaaaagattttctttaccaaactcaagaattatggttcaccagccttcttcaggttttcaaggccaagcaacagacatacaaattcatgcaaaagaaattcttgatctgaaaaatagattaaacaaaatttattccaaacatacaggaaagtctgttgaggaaatatcaaacgccctagaaa

SEQ ID NO: 264111 - DNA, 559 bp, Unknown
  Bacterial polypeptide expressing nucleotide sequence isolated from the Sargasso Sea
tatgaaagataaaatatcagagcaaatgaatactcttatacctatggtggttgaacaatcctctaaaggtgagagagcttacgatatctattctagacttttaaaagagagaataatttttttagttggaccaattaatgataatgtagcttcattagtgactgctcaaatgctttttttggagtctgaaaatccaaaaaaagaaatttatctttacatcaatagtcccggaggacttgttactgcaggtttaggaatttatgacacaatgcaatatattaaacctgatgtatccacattatgctttggtcaggctgcatctatgggatcctttcttttatctgctggacaaaaaggaaaaagattttcacttccaaattctagggtaatggttcaccagccatcagcaggctatcaaggacaagcaactgatatagaaattcatgctaatgaggtattggctttaaaaaaaagacttaatgaaatctactcgaaacacactggaaaatctgtagatgaaataaaagctgctctagaaagagataaatttatgacacca

SEQ ID NO: 264112 - DNA, 613 bp, Unknown
  Bacterial polypeptide expressing nucleotide sequence isolated from the Sargasso Sea
atgccaataggaactccaagcgtgccctacagacttccaggaagtcaatacgaaagatgggttgacatatatacaagattaggtgttgaaagaattctttttcttggtcaagaagttaacgatggtattgctaacagccttgttgcacaaatgctttatcttgattctgatgacaattccaaacctatttacctatatataaatagcccaggaggctcagtaaccgcaggcttggccatatacgacactattaagtatgtaaaaagtgatgtagttactatatgcgttggactagcagcctccatgggtgcgttcttattggccgctggcacaaaaggtaaaagagttgccttacctcacagtagaataatgattcatcaaccccttggaggtacatctcaacgtcaagcaagtgatattgaaatagaagctaaggaaattttaagaattaaagacatgttaaacatgtctatggccgatatgacaggtcaatcatttgagaaaattgaaaaggatacagatagagattattttctaagcgcagaagaggcaaaaaactatggcctaattgatagagtaatcacacatccaagtgaggcaaatcaggcctaaa

SEQ ID NO: 264113 - DNA, 511 bp, Unknown
  Bacterial polypeptide expressing nucleotide sequence isolated from the Sargasso Sea
gagaattatctttgtgtctggccctatccatgatgcattgtctactcttattgttgcccaattgctatttttagaatctgaaaatccgaagaaagaaatctccatgtatattaattctcctggaggtgtagtcacatcaggattatcaatttacgataccatgaggtatatccaaccaaagatttctacattatgcgtaggtcaagctgcttcaatgggttctttgctattaacggcgggagataaaggtcaaaggtttacattgcccaacagtagaataatgttgcatcaaccttctggaggatttcaggggcaagcttcagatattgcgttacatgcaaaagaaatccttcttcttaaggaaagattaaatttgatttatgttgagcatactggtcaaaaattagaagaagtggaaaaagctcttgatagagataactttatgactgctgaagaggcaaaggcttggggtatcatagataaaattattactagcagaggggaaagctga

SEQ ID NO: 264114 - DNA, 388 bp, Unknown
  Bacterial polypeptide expressing nucleotide sequence isolated from the Sargasso Sea
caactcttgtatttagaagctgaaaatccaaaaaaagaaatctcaatgtatattaattcacctggtggagttgtttcatctggcttggctatctatgatactatgcaatatattaaaccagaagtttcaacactttgtattggtcaggcagcctctatgggcagtttacttttggctgcaggcgaaaaaaataaaagatttgctctaccaaattctagaattatggttcatcagccatctggaggttttcaaggccaagcatcagatattgaaagacacgcaaaagaaataatttcacttagaagtagattaaatgagatttatgttaatcatactggaaaagatttaaaaaccattgaggcagcattagatagagatacttttatga

SEQ ID NO: 264115 - DNA, 320 bp, Unknown
  Bacterial polypeptide expressing nucleotide sequence isolated from the Sargasso Sea
ggccgcgtcgatggggtcattgttattgatggcgggtgcggcgggaaaacgtcatgcactgccaaattctcggattatgacgcatcaaccatctggtggctttcaggggcaggccagtgacattgagatacatgcaagagaaattttagatttgcgaaaacggctcaacagtatttatgaacatcataccggaaaaagtctgaagcaggtggaaaagatcatggagcgcgatacttttatgacggctgaagatgctaaatcttttgggctgatagatgaggtcgtcacgaaacggccggtacctgataaagaattgtaat

SEQ ID NO: 264116 - DNA, 352 bp, Unknown
  Bacterial polypeptide expressing nucleotide sequence isolated from the Sargasso Sea
atgaacaatttaatcccaatggttgtagaacaatcaagcaggggagaacgagcatatgatatttattcaagattactaaaagaaagaattgtatttgttgttggaccgattaacgatactgtagcatctttagttactgcgcagttattatttttagagtctgaagatccaaaaaaagaaatttcactttatataaatagtccaggtggtcttgttacagcaggattagggatttatgatacaatgcaatacataaaacctgaagttaatactttatgtattggtcaagctgcaagtatgggttcttttttattagcagctggtgcaaaaggaaagagattttctttaccaa

SEQ ID NO: 264117 - DNA, 321 bp, Unknown
  Bacterial polypeptide expressing nucleotide sequence isolated from the Sargasso Sea
atgtagtgacaatatgctttggagtagcggcaagtatgggagcatttctactttctggaggatcaaaggggaaaagattggctttacctaattctaggattatgattcatcaacctctgggaggtgcacaaggtcaagcagtagagattgaaatacaagctaaagaaatactttttctcaagaaaacattaaattcgcttttagcagaacatactggtcaacctttagaaaaaattaatgaagatacagaaagagattactttttatctccctcagaagcagtcgaatacggattaattgataaagttatcaaaaagtgac

SEQ ID NO: 264118 - DNA, 592 bp, Unknown
  Bacterial polypeptide expressing nucleotide sequence isolated from the Sargasso Sea
catttaagcaatctaattcctatggtagtagagcaatccagtcgaggtgaaagagcttatgatatttattcgagactattaaaagagagaatagtttttgttgttggaccaattaacgatagtgttgcttcagttgttactgcacaactgttatttcttgagtctgaagatccaaaaaaagaaatatctctttatataaatagtccaggtggtttagtaacagctggtctgggtatttatgatacaatgcaatatattaaaccagatgtttcaactttatgcataggacaagctgcaagtatgggatcatttctactagctgctggaactaaaggtaagagactatcactaccaaattctagaattatggtacaccaaccatctgctggttttcaaggacaagctactgatattgaaattcacgctaaagaagttttgtctttaaaagaaagattaaatgaaatttattccaaacatacaaataaatcagttgatgaaatcaaacaagcattagagagagataattttatgactccagaaaatgctaaagactttggtttaattgataaagtagtagataagcgcgattaat

SEQ ID NO: 264119 - DNA, 202 bp, Unknown
  Bacterial polypeptide expressing nucleotide sequence isolated from the Sargasso Sea
tatgactattaaaattccagaacaattaaatactcttatccctatggttgtcgaacaatctagtagaggagaaagggcatatgacatttattcaagactacttaaagagagaattgtatttgtggttggtccaataaatgatgcagttgcatcgttagttaccgctcaattattatttttagagtctgaagaccctaagaaa

SEQ ID NO: 264120 - DNA, 503 bp, Unknown
  Bacterial polypeptide expressing nucleotide sequence isolated from the Sargasso Sea
gatggtcgtcgaacagacgaaccgaggcgaacgggcttacgatatcttctcgcgtttgttaaaagaacgtattatttttctaaatggaccaattgatgacggtgttgcttccctcgtttcttcgcaattgctgtttttagagtcagaaaatcccaaaaaagacatttctatgtatgttaactcgcctggtggcattgtgacatctgggttagcaatttacgacaccatggaatatatacggccagatgtatcaactgtttgcatggggcaagccgcctctatggggtcattactgttgatggcaggtgcagagggaaaacgatatgcgttgccgaatgcgcggattatgacacatcaaccatcaggtggatttcaagggcaggccagtgatattgaaatccacgctcgtgaaattctagatttgcgcaaacgccttaacaatatttatgaacgtcacaccggagaaagtcttaaacaagttgaaaagatcatggagcgcgata

SEQ ID NO: 264121 - DNA, 724 bp, Unknown
  Bacterial polypeptide expressing nucleotide sequence isolated from the Sargasso Sea
atggacgtgcgcgcgggacagccgacgggaccggtggtgccgcgggactcgcagggggatccgttcggggcgctcttgcgtaacagaatcgtgttcctcggctcgcaggtggatgattttaacgccgatgcggtcatctctcagttgttgttgctcgatcagcaagacccgacgaaggaaattaagctctttatcaactctccggggggtagcgtcacggctgggatgggaatttacgacgccatgcagttctgccaggcgcccgtgagcacggtgtgcctcggcttagcggcatccatgggtgcttttttgctcgcttccggtgagaagggtcgccgtatgtccatgccgaacgcgcgcatcatgattcaccagccgctcggcggggcgcaagggagcgcggtggatatcgaaatccaagcgaaggagattatgcaccacaaggccaacttgaacaaattgatggcgttccacacgggtcaagatgtgaagcaaatagatgaggacaccgaccgcgatcgttacatgtccccgctcgaggcgaagcagtacggcgtgattgacgtcgtcatcggaggcgacgatgcgggcttgaagattgatggttccttcacggagaaactcaagacgaagaaggattacgtggcttggggtgacgagagtcaagatggttcctctggctcgcgattcaccggtgaaacggaagatgcaaagctctcctaag

SEQ ID NO: 264122 - DNA, 610 bp, Unknown
  Bacterial polypeptide expressing nucleotide sequence isolated from the Sargasso Sea
atgaaaaatacaattgaagaacaaatgaataatctaatcccaatggttgttgagcaatcaaaccgtggtgagagggcttatgacatttattcaagacttctaaaagaaagaattatttttttggttggacctgtaaatgataatgtagcaagtttagtaattgctcagcttttatttttagaatctgaaaatccaaaaaaagaaatatccttttatataaatagtccaggaggtttggttacatctggattaggaatatacgatactatgcaatacatcaaagctcctgtctctactttatgtatagggcaagcatcttccatgggatcttttttgctagctgctggggagaaaggtaaaagattctctcttccgaattcaagaattatggttcaccaaccatctgcaggctatcaaggtcaagctactgatatagaaatacatgctaaagaaatattatctctaaaaaaaagattaaataagatttatgctaagcatacaaaaaaatctgaagaagatataaaggtggcattggaaagagataacttcatgacacctgaagaggccaaagattttggtttaatagatcaagttgtggagaaaagataat

SEQ ID NO: 264123 - DNA, 379 bp, Unknown
  Bacterial polypeptide expressing nucleotide sequence isolated from the Sargasso Sea
catgattcgtaaaattgaagagcagatgaataatcttattccgatggttgttgaacagacaaccaaaggcgaaagggcttacgacatatattcaagacttttaaaagaaagaatagtttttttagtaggcggggttaatgatacagttgcttcattggtaactgctcagcttttatttttagagtctgaaaatccaaaaaaagaaatatatttttatataaatagtcctggaggactagtaacctctggtttaggtatatatgacacaatgcaatatattaaatcaccggtttctactttgtgtattggtcaagcatcatctatgggatcttttcttttggctgctggagaaaaaggaaaaagattttctttacccaac

SEQ ID NO: 264124 - DNA, 179 bp, Unknown
  Bacterial polypeptide expressing nucleotide sequence isolated from the Sargasso Sea
tatgactaataaaattccggaacaattaaataccctaatccctatggttgtcgaacaatctagtagaggagagagggcgtatgacatttattctagactcctcaaagagagaattgtatttgtagttggtcctatacatgatgcggttgcatcactagttactgcgcaattattatttt

SEQ ID NO: 264125 - DNA, 376 bp, Unknown
  Bacterial polypeptide expressing nucleotide sequence isolated from the Sargasso Sea
gtgactgctggtcttggaatatatgatactatgcaatatataaattccccagtttcaactttatgtattgggcaagcttcttccatgggatcttttttattagccgctggagaaaaaggaaaaagatattctttgccaaattctagaattatggttcatcaaccttcagctggttttcaaggtcaagcaacggatatacaaattcatgcgaaagaaattttatctttaaaagaaaggttaaataaaatttattccaaacatacaggtaaatcagttgatgaaatttctaaagctttagagcgagataattttatgacagctgaagacgctaaaaaatttggtttaatcgactcagttgtggaaaaaagaaaataaa

SEQ ID NO: 264126 - DNA, 409 bp, Unknown
  Bacterial polypeptide expressing nucleotide sequence isolated from the Sargasso Sea
tcaccaggtggcgttgttagcgatggtttagcaatttatgatacaatgcaatttattcaatcacctgtttcaactctatgttttggacaagcagcttccatgggatcgtttttacttgccgccggtgaaaaggataaaagatttgcacttccaaacagcagaattatggtacaccagccttcagctggttttcaaggccaagccacagatattgaaatacatgcaaaagaagtattagctcaaaaatccaatcttaataaaatttactcaaagcatacaggtcaacccgttgaagccattgaagaagcactcgaaagagataactttatgtcgccaaccgatgctcaaaaatttggtataattgatagtattcaagaaaaacgagttgccccaaaaattgagaaatagc

SEQ ID NO: 264127 - DNA, 433 bp, Unknown
  Bacterial polypeptide expressing nucleotide sequence isolated from the Sargasso Sea
atgtcagataaaattagtgaacatatgtcaaatttaattccgatggttgttgaacaatctagtcgtggtgaaagagcatatgatattttttcaagacttttaaaagagagaattatttttgttgtgggaccaataaatgataacattgcatcattagtaacagctcaaatgctatttttagaatctgaaaatccaaaaaaagatattttcatgtatataaatagtccaggtggactggtaacagctggattgggaatttatgatactatgcaatatataaaacctgaggtgtccacattatgtattggtcaggctgctagcatgggttcatttttattatctgcagggtgtaaaggcaaaagattttcattgcccaattctagaattatggttcatcaaccatcagcaggattccaaggacaagcaactgata

SEQ ID NO: 264128 - DNA, 280 bp, Unknown
  Bacterial polypeptide expressing nucleotide sequence isolated from the Sargasso Sea
tcttattatctgcaggaacaaaggaaaaagatactcacttccaaactcaagaattatggttcaccaaccatcagcaggctttcaaggacaagctactgatattgaaattcatgcaaatgaagtactttctttaaaaaaaaggttaaacgaaatttattctaaacacaccggtaaatctgtagatgaaattaaaactgctttagaaagagataattttatgactgcagacacagctaagtcttttggactaatagactacgtagtagaaaaaagatcttaa

SEQ ID NO: 264129 - DNA, 292 bp, Unknown
  Bacterial polypeptide expressing nucleotide sequence isolated from the Sargasso Sea
aatgtcgaacttgataccaatggttgtcgaacaatctagcaggggtgaaagagcatatgatattttttcaagattactcaaagaaagaatagttttcgtagttggtccaatcaatgatagcgtggcttctttagttacagctcaaatgttatttttagagtcagaaaatcctaagaaagatatttttatgtacattaacagtcctggaggattagtaacagcaggtcttggaatatacgatactatgcaatatataaaacctgaaatctcaactttatgtattggacaagca

SEQ ID NO: 264130 - DNA, 579 bp, Unknown
  Bacterial polypeptide expressing nucleotide sequence isolated from the Sargasso Sea
taatccctatggttgttgagcaaacaactaaaggcgaaagagcatttgatatttattccagacttttaaaagaaagaattgtttttttggttggaggagtaaacgataatgtagcctctttagttactgcccaacttctttttttggaatctgaaaatccgaaaaaagaaatatatttttacattaatagtcccggtggattagtaacttctggtctaggaatatacgatacaatgcaatatataaaatctccagtatcaaccctatgcattggccaagcttcgtctatgggatcatttcttttggcagcaggagaaaaggggaaaagattttcgcttccaaattctagaataatggtacaccaaccatcagctggtttccaaggtcaagcaacggatatacaaatccatgcaaaagaaattttatctttaaaagaaaggctaaacaaaatttattcaaagcatacaggaaaatctgtaaaagaaatttcaaccgcattagagagagataattttatgaccgcggaagaggcgaaagagtttggtttaattgataaagttgttgaaaaaagaaattaat

SEQ ID NO: 264131 - DNA, 460 bp, Unknown
  Bacterial polypeptide expressing nucleotide sequence isolated from the Sargasso Sea
attggttactgctcaattattgtttttagaatccgagaatccaaaaaaagaaataagcttctatattaatagccctggcggacttgttacatcaggcttgggcatttacgatacaatgcaatacataaattctcctgtttcaacattgtgtataggacaagcttcttcgatgggttcttttttattatctgcaggtgaaaagggcaaaagatattctcttccaaattctagaattatggttcaccaaccatctgctggatttcaaggtcaggctacagatatacaaatacacgctaaagaaatacagtctctaaaaaataggctaaatcaaatttattctaaacatactggaaagtcagttgatgaaatttctaaagctttagaaagagataattttatgactcctgaagaggcaaaaaattttggcttaattgactctgttgtggaaaaaagaaaataa

SEQ ID NO: 264132 - DNA, 478 bp, Unknown
  Bacterial polypeptide expressing nucleotide sequence isolated from the Sargasso Sea
ggcgcaaatttgatagtggcccagatgctttatttggaagcagagaatcctgataaggacatacacctttatatcaactctccgggaggatcggttacagctgggctttcaatttacgatactatgcagtttattaagccagatgtctctacgctttgcataggtcaagctgctagcatgggggcaattttattatgcggaggagctaaaggtaaaaggcaggctcttccaaattcaagagttatgattcaccaagtattagggggatttcaaggccaagcaagcgatatagagattcatactcaagagatactttctatcaaaaagaaattaaatgaaattttagcaagccattctggtcaaaaggttgataagatagccaaagacagtgacagagataatttcatgtctccagaacaagctgtaaagtatggattaattgatgatgtggttgatagccgttccgtcaaaaaataaa

SEQ ID NO: 264133 - DNA, 589 bp, Unknown
  Bacterial polypeptide expressing nucleotide sequence isolated from the Sargasso Sea
aatgaatagtttgattccaatggttgttgaacaaacaagcaaaggagagagagcttatgatatttactcaagacttcttaaggaaagaatagtctttttggttggaccagttaacgatgcagtagcttcattagtaactgcgcagttattatttttagagtcagaaaatccaaataaagaaattaatttttacataaatagtccaggcggtttagttactgctggcttagggatctatgatactatgcaatacattaactctcctgtttctactctatgtattggtcaagcttcttctatgggatctttcctattagctgctggagaaaagggaaaaagatattctttaccaaattcaaggattatggttcaccaaccatctgctggttttcaaggtcaagcaacagatattcaaattcatgctaaagaaattatgtctttaaaagagagattaaataatatctactctaagcatactggaaaatcagttagcgaaatatctgaagctttggaaagagataattttatgactgcagaagaggctaaaaattttggccttatagactctgttgtggaaaagagaaaataa

SEQ ID NO: 264134 - DNA, 472 bp, Unknown
  Bacterial polypeptide expressing nucleotide sequence isolated from the Sargasso Sea
actgttgcctcactagttacagcgcaattattatttttggaatcagaaaaccctaataaggaaataagtttttatataaatagccctggcggcctggtaacatctgggttaggtatttatgacactatgcaatacatcaattcacctgtttcaactttgtgtattggtcaagcttcatcaatggggtcatttttattggcagcgggtgaaaaaggaaaaagatattcattacctaactcaagaattatggttcatcaaccgtcagctggttttcaaggccaagccacggatattcaaatacatgctcaagaaattcaatcattaaaaaataggctaaataatatttattcaagacatacagggaaaactgttgatgaaatttcaaaagcgttagagagagacaatttcatgaccgctgatgaagcaaaaaaatttggcttaatagactctgttgtggaaaagagaaaataga

SEQ ID NO: 264135 - DNA, 181 bp, Unknown
  Bacterial polypeptide expressing nucleotide sequence isolated from the Sargasso Sea
gatggttgttgaacaaacaagcaaaggtgaaagagcttatgacatctactctaggcttttaaaagagagaatagttttccttgtcggaccagtaaatgatgcagtagcttctttagttacagcgcagctgttatttttagagtcagagaatccaaataaagaaattagatttttatattaa

SEQ ID NO: 264136 - DNA, 358 bp, Unknown
  Bacterial polypeptide expressing nucleotide sequence isolated from the Sargasso Sea
atggataaaattaattcaggcctagtgccaatggtagtagagcaaactccaagaggtgagcgagcctttgatatttattctcgtcttttgaaagaaagaattatttttttatctggccctatcgatgactatatttcaaatcttgtggttgcccaattgctatttctagagtcagaaaatccagaaaaagacattagcatctatattaattctcctggcggggtaatttcatcaggccttgcaatttacgacacaatgcagtttgtggttcctgaagtttcaactctctgcataggccaggccgcaagtatgggatcattattgcttgccggcggtcaaaaaggaaaaagattcgcac

SEQ ID NO: 264137 - DNA, 610 bp, Unknown
  Bacterial polypeptide expressing nucleotide sequence isolated from the Sargasso Sea
atgacaaaaatagatgaacatatgaatgctttaatacctatggtagttgaacaaactagcagaggggaaagagcttttgatatttattccagactactaaaggaaagaatagtttttgttgttggtcccataaacgatcatgtggcttctttagtaactgctcaattattatttttagagtcagaagatcccaagaaagacatttttttatatgttaatagtcccggtggattagtcacttcaggcttaggtatatatgacactatgcaatatattaaaccagatgtttcaactttatgtattggacaagctgcaagcatgggatcatttttattagctgctggcacaaacggaaaaagatattccttacctaattcaagaattatggttcatcaaccttctgcaggctaccaaggtcaagctacagacattgaaattcatgcgaatgaagtgatgtcattaaaaaaaagacttaatgaaatatattctaaacatacaggtaagtcagtggatgaaattaagtctgctttggaaagagataattttatgactccagatgcggcaaaagattttggacttgtggacaaagtagtatctaaaagagaataga

SEQ ID NO: 264138 - DNA, 628 bp, Unknown
  Bacterial polypeptide expressing nucleotide sequence isolated from the Sargasso Sea
atgaaagatccaattgacgtttatatgaataacttagttcctatggttgtggagcaaactagccgtggcgaaagagcgtatgatattttttcaagactgcttaaagaacgtatcatttttcttaatggcccagttcatgatggaatgtctagtttggtagtggctcaactgcttcaccttgaggctgaaaatcctactaaagatataagcatgtatataaacagtccgggcggagtggtgacttcaggtttatccatttatgatacaatgcagtatattaagccaaaagtatcgacacttgttataggacaagcggcctcaatgggatcgcttttgctgactgctggggagaagggtatgcgcttctcgctaccaaacagtcgagtaatggttcatcagccttctggtggctatgaggggcaggcgactgatataatgatacacgctgaagaaactttaaagcttaagaaaagattgaatgaaatctatgttcaccatactggacaaaaatatgagactgtcgaggcagcccttgagcgtgataactttatgtctcctgaagacgctaaggagtggggcctaattgatgaaattgtaacaaagcgtacaagtgatgatgaaaaataat

SEQ ID NO: 264139 - DNA, 333 bp, Unknown
  Bacterial polypeptide expressing nucleotide sequence isolated from the Sargasso Sea
catgccaataggaactccaagcgtgccttatagacttcccggaagtcaatacgaaagatgggttgacatatatacaagactaggtgttgaaagaattctttttcttggacaagaagtgaatgatggtattgctaatagccttgttgcacaaatgctttatctagattctgatgacaattccaaacctatctatctatatataaatagcccaggaggatcagtaactgctggcttggctatatatgacactatcaaatacgtaaaaagtgatgtggtaaccatttgcgtaggcctcgcagcctcaatgggtgcattcctattagctgctggcac

SEQ ID NO: 264140 - DNA, 185 bp, Unknown
  Bacterial polypeptide expressing nucleotide sequence isolated from the Sargasso Sea
gatccacgcacgtgagattctgaccatccgcgagcgtctgaacaaagtactggctcaccataccggtcagccgatggaagtgattgcccgcgataccgaccgcgataacttcatgagcggtgaagacgccgtcaagtacggcttgatcgaccaggttctgacccagcgccaactggcggtctgat

SEQ ID NO: 264141 - DNA, 397 bp, Unknown
  Bacterial polypeptide expressing nucleotide sequence isolated from the Sargasso Sea
attaatagtcctgggggggttagttacttccggtttgggtatctatgatacgatgcaatacataaaatcaccagtatctacattgtgcattggacaagcgtcatctatgggttcatttcttttagccgcaggcgaaaaaggaaaaagattttctttaccacactctagaataatggttcatcaaccctctgctggttttcaaggtcaggctacagatattcaaatccacgcaaaagagatactgtcactaaaagatagactaaatcaaatttattcaaaacataccggcaaatctgtaaaagatatttcacaggctcttgaaagagataagtttatgactgcagaagaggcaaaagaatttggattaatcgactcagttgttgaaaagagaaaataa

SEQ ID NO: 264142 - DNA, 463 bp, Unknown
  Bacterial polypeptide expressing nucleotide sequence isolated from the Sargasso Sea
aatttggttgttgcacaattactatatttagaagcagaaaatcctgataaggatatatctctatatatcaattctcctggaggttctgtaactgcaggattgtctatatatgacactatgcaatttattaagcctgatgtttctactttgtgtataggccaggcagcaagtatgggcgcagttttattggctggaggtgctaaaggtaagaggcatgctttgcctaattcaagagtacttattcatcaagttatgggaggattccaaggtcaagctagtgatatagagatacatgctcaagaaattctatccataaaagaaaaattgaataatattttatctaaacatacaggccaaaaagttaagaaagttgctgaagatagtgatagagataatttcttatcacccgaagaagctgttgaatacggattaattgattcagtcatggaggaaaggggttaat

SEQ ID NO: 264143 - DNA, 595 bp, Unknown
  Bacterial polypeptide expressing nucleotide sequence isolated from the Sargasso Sea
tatgtttaaaaataatttagttccaatggtagtcgaacaaacttccagaggagaacgagcctttgatattttttcaagacttctaaaagatagaattatattcattgtaggcggtatagacgactatgttgccaacttagttgttgcccaacttctttttttagagtccgaagatcccaaaaaagatatttttatgtacataaattcacctggaggagttattacttcagggctgtcaatattagatacaatgaattatctcaaatgtgatgtttcaactgtgtgctttggacaggcagctagcatgggagcagttcttttatcatgcggggctaaaggaaaaagatttgcactaccaaatagcagagtgatgattcatcagccacttggtggagcaagaggccaagcaacagacatagaaatacaggcaaaagaaatacttacactcaaagagaaattaaataaaattctttcagagaaaactaatcaatctcttaaaaaaattgcttctgatacagagagagattactttatgaatgccgaagaagcagttaagtacggtcttgttgatgaagttttaactcagagaaagtaa

SEQ ID NO: 264144 - DNA, 292 bp, Unknown
  Bacterial polypeptide expressing nucleotide sequence isolated from the Sargasso Sea
atgagtcgcaaatttgatgaacagatgaatagcttaattcctatggttgttgaacaaacaagcaaaggtgaaagagcttatgatatatattccagacttttaaaagaaaggattgtctttttagttggaccagtaaacgatgcagttgcttctcttgttacagctcaacttttatttttagagtctgaaaatccgaaaaaagaaattagtttttatattaatagtcccggaggacttgttactgctggacttggcatttatgacacccatgcaaatatattaattcaccctg

SEQ ID NO: 264145 - DNA, 324 bp, Unknown
  Bacterial polypeptide expressing nucleotide sequence isolated from the Sargasso Sea
taacaactttatgcattggtcaagcagccagtatgggttcttttttattagcggcaggagcaaaaggtaaaagatattcattacctaattctagaattatggttcatcaaccatcagcaggatttcaaggacaagctactgatattgaaattcacgcaaatgaagttttatctttaaagaaaagattaaatgagatttattcaaaacataccggcaaatcagttgaacaaataaaatctgcattagaaagagacaactttatgactccagataatgcaagagattttgggctaatagataaagtagtagataaaagagaataaa

SEQ ID NO: 264146 - DNA, 247 bp, Unknown
  Bacterial polypeptide expressing nucleotide sequence isolated from the Sargasso Sea
tatgacaaaaaacaatctttttaatagttctcttataccaatggtagttgagcagtcaaatagaggagaaagagcttatgatatttactctagactacttaaagaaaggattatatttttaacaggacctgttacagatgatgtagctagtgttataattgcacaattattatttctgggatctgaaaatcctaagaaagatatctttttttatattaatagccctgggagtttagttactgcagga

SEQ ID NO: 264147 - DNA, 613 bp, Unknown
  Bacterial polypeptide expressing nucleotide sequence isolated from the Sargasso Sea
tatgagtcgcgatatcgaagaaaaaatgaacaatttgattccaatggttgttgaacaatcaagcaagggtgaaagagcctatgatatatattctcgacttttaaaagagagaatagtttttttagttggaccagtaaatgacaatgttgcttcattagtaactgcacaattactttttttagagtctgaaaatccaaataaagaaataagtttttatataaatagcccaggaggacttgttacatctggcctaggtatttatgacactatgcaatatataaattcacctgtctccactttatgtataggtcaagcttcttctatgggatcttttttattatcagcaggagcaaaaggaaaaagatattcacttccaaactctcgaataatggttcatcaaccttctgcaggatttcaaggtcaagctacagatatacaaattcatgctaaagagatacaatcacttaaaaacagacttaatacaatttattctaagcatactggaaagtctgtagaagaaatttctaaagccttggaaagagataattttatgacaccagaagaagcaaaaaaatttggattgattgactctgttgtggaaaaaagaaaataa

SEQ ID NO: 264148 - DNA, 547 bp, Unknown
  Bacterial polypeptide expressing nucleotide sequence isolated from the Sargasso Sea
ggtgaaagagcttatgatatttattcaagacttttaaaagagcgaattatttttttaacgggtcaaataaacgataatgtcgcttcacttataactgcacaacttctttttttagaagcagaggatcctaaaaaagaaatttatttatacattaatagccctggtggattagtaacagcaggtttaggtatctatgacactatgcaatatattaagccagaaatttctacattatgtattggacaagctgcatctatgggatcatttttacttgcttctggtgctaaaggaaaaagattttctttaccgaattcaagaataatggttcatcaaccctctgcgggctttcaaggtcaagctactgacattgaaatacatgcaaatgaagttctatcattaaaaaaaagattaaatgaaatttactctaaacatactggtaagagtgtagatgagattaaaagtgctcttgagagggacaattttatgactgcagatgtggctaaatcatttggtttaatagatgaagttgtagaaaaaagaacttaac

SEQ ID NO: 264149 - DNA, 268 bp, Unknown
  Bacterial polypeptide expressing nucleotide sequence isolated from the Sargasso Sea
gggaaaaaaaggcaaaaggttttcattacccaattcaagaataatggttcatcaaccatctgcaggatttcaagggcaagctacagatattgaaattcacgctaatgaagttttgtcattaaaaaaaagattgaatgaaatatattcaaaacatacaggtaaaaatgttgaacaaataaaggatgcactcgagagagataattttatgaccccagatcatgccaaagactttggtttaattgatcaagtagttgagaaaagaatttag

SEQ ID NO: 264150 - DNA, 463 bp, Unknown
  Bacterial polypeptide expressing nucleotide sequence isolated from the Sargasso Sea
atgccgatcggtactcccagcgttccctatcgcctccctggcagccagatggagcgctgggtagacatctacacccgtcttggggtggaacggatcctgttcctcggttccgaagtcaatgacggcatcgccaacagccttgtggcccagatgctctatctcgattcggaagacagcagcaagccgatctacctgtacatcaattctccaggcggctcagtcacggccggcctggccatctacgacaccatccaatatgtgaaaagcgaggtggtgaccatctgcgtgggccttgccgcctccatgggcgcgttcctgcttgcagctggcaccaaaggcaagcgagtggcgcttccccacagccggatcatgatccaccagccgctggggggcaccagtcgccgacaggccagcgacatcgaaattgaagcccgtgaaattctgcggatgaaggagatgctca

SEQ ID NO: 264151 - DNA, 613 bp, Unknown
  Bacterial polypeptide expressing nucleotide sequence isolated from the Sargasso Sea
atgaaagataaaattgaagaacatatgaataatttaattcccatggttgtagaacaatcgaataggggagagagagcttacgatatttattctagacttcttaaggaacgtataatttttttagtaggaccagtaaatgatactgtttctactttagtaacagcacaattgttatttttagaatcagaaaatccaaaaaaagaaatatctttttatattaatagcccaggtggattagtaacttcaggactaggaatttatgatactatgcaatacataaaacctccagtttcaacattatgtataggacaagcctcttctatgggatcctttttattagctgctggagaaaaaggaaaaagattttcacttccaaattcaagaattatggttcaccaaccttctgctgggtaccaaggtcaagctactgatatagaaattcacgctaaagaaattttatctcttaaagaaagattaaataaaatttattcaaaacacacaaagaaaagtgaatcagaaattaagaaagccttagaaagagataattttatgactccaaatgaagccaaagattttggtttaattgatgaagttgtggaaaaaagatcttaac

SEQ ID NO: 264152 - DNA, 295 bp, Unknown
  Bacterial polypeptide expressing nucleotide sequence isolated from the Sargasso Sea
aatgtctcttattccaatggtcgtagagcagaatagtcgtggtgaacgtgcctacgatatatattctcgtcttctcaaggaccgcattatttttttaggttcacctgttgatgataatgttgctaatgttatgattgcgcaactactatttttagaagcagaagatccggaaagtgatatttcactttatttgaattgtcctggtggattagttacttcaggtatggctatttatgatacaatccagtatctgaagccggatgtgcagactatttgcattggtcaggcaacaagc

SEQ ID NO: 264153 - DNA, 503 bp, Unknown
  Bacterial polypeptide expressing nucleotide sequence isolated from the Sargasso Sea
aatgagcgaaatttttcaaccacaagctaacgcactcgttccaatggtcgtagaacagacgtcacgtggagagcgagcctacgatatctattctcgtcttttgaaggatagaatcatttttgttggctctggcatcaatgatcagatctctaacctgatcatcgctcaacttctgtttctggaggcagaagatcccgataaagatatttatatgtatattaacagcccgggtggagtgattgatgctggtctagcgatctatgacacgatgcagtatatcaagcctcaaatcacaaccatttgtgtgggcttggccgcttcgatggcagctgtattgctggctgctggcgaaaaaggcaaacgttattctctccctcattcgcgtattatgattcatcagcctctaggcggtgctcagggccaggcctctgacattgagatccaggcaagagaaatcctgagattacgcgagcttcttaacggcatcttagctcgacatacgg

SEQ ID NO: 264154 - DNA, 610 bp, Unknown
  Bacterial polypeptide expressing nucleotide sequence isolated from the Sargasso Sea
atgaataaaataccagaacatcttagtactttaataccaatggttgttgaacaatcaagtagaggagaaagagcctacgatatttattccagattattaaaagagagaataatatttgttgtaggaccaattaacgatcatgtagcttcattggttactgcgcaactcttatttttagagtcagaagatcccaaaaaagaaatttctctttatataaatagtccaggtggtctagttacagcagggcttggaatctatgatacaatgcaatatgttaagccagatatatcaacattatgtattggccaagctgcgagtatgggatcttttttattatccgctggatcaaaaggaaaaagattttctctaccaaattctagaataatggttcatcaaccatcagcagggtttcaagggcaagctactgatattgaaattcatgcaaatgaagtattagctttgaagaaaagattaaatgaaatttattcaaaacatacaaataaatctgtagatgaaattaagacagctcttgaaagagataattttatgactccagaaaatgccaaagagtttggtttaatagacaaagtagtagttaatagagaataat

SEQ ID NO: 264155 - DNA, 472 bp, Unknown
  Bacterial polypeptide expressing nucleotide sequence isolated from the Sargasso Sea
atcagtagcttcattagttactgctcaacttttattcttagagtcagaagacccaaagaaagaaatatctctttatattaacagtccaggaggattggtcacggcaggattaggaatttatgatacgatgcaatatgttaaaccagacatctcgacactttgtattggacaagctgcaagtatgggatcttttttattatcagcaggatcaaaaggtaaaagattttctcttccaaattctagaataatggtacatcaaccatcagcaggttttcaaggacaagctacagatatagaaattcatgcaaatgaagtattagctttgaaaaaaagattaaatgaaatttattcaaaacacacaaataaatcagttgaggaaattaagacagctcttgagagggataactttatgaccccagaaaatgcaaaagagtttggtttaatagacaaagtagtagttaatagagaataa

SEQ ID NO: 264156 - DNA, 598 bp, Unknown
  Bacterial polypeptide expressing nucleotide sequence isolated from the Sargasso Sea
atgtcagagcatcattccgtcagcgcgttgtccacgggaaccccggttggccctgctgagatttacaaccgtttactcaacgatcgaattgtttttctaggcactgaagtcgacgatgaaatagcgaacatcctctgcgctcagatgctgtttctcgaaggacaagatcgcgaaaaggacatatggctatacatcaatagcccaggtggttctgtgaccgctggtatggctatatatgacactatgcagtttgtctcttgcgatgtggcgactgtctgtatgggactcggcgcatcaatgggccagtttcttctcacagcaggagcagaggataagcggtactgcttgcctcatgcgagggtcatgatgcatcaaccgtcaggtggcgtacgaggtcaagcttcggatatagccattcaggcggaacaaatggcctacatcaaaaggcttatggctgaacgaatagcgcttcacagcgggcaagacgtagagcaaatccagatggacagcgaacgcgatcggtggttcacagcagaagaagctaaagactatggactgtgtgatcacgtcatagttaagcgaggcgaaatcatctaac

SEQ ID NO: 264157 - DNA, 607 bp, Unknown
  Bacterial polypeptide expressing nucleotide sequence isolated from the Sargasso Sea
aatgaatgaattagtgaatgccttagttcctatcgttattgaacaaaccgctaagggtgagcgttcttttgatatttactcgcgtttattaaaagagcgggtgatttttttaacgggtcaggttgaagaccatatggcaaacctgattgtcgctcagctgttatttttagaatctgagaacccggaaaaagatatttatatttatatcaattcaccaggcggctctgtcactgccggcatgtcgatttacgacaccatgcagtacataaagccaaatattgctaccgtctgtgtcggtcaggcttgcagtatgggtgcttttttattatctggtggtactaagggcaagcgttatgcgttgccaaacgctcgtgtgatgatccatcaacctttaggtggtttccagggccaggccacagattttgaaattcacgcccgtgaaatcctgaccatcaaagagaaattaaatcgtttgatggcagagcattgtggcaaaacttatgaacaggtttgtaaagacacagagcgtgataacttcttaagtgcacaacaagccttggaatatggcctaatcgatgccatattaactcaaagggatgcgaagtaa

SEQ ID NO: 264158 - DNA, 127 bp, Unknown
  Bacterial polypeptide expressing nucleotide sequence isolated from the Sargasso Sea
atgaaagatccgctagaaaatttaactaataatcttatcccaatggtagttgaacaatcttccagaggtgaaagagcatatgatatatactctaggcttttaaaagaaagaataatttttttaactg

SEQ ID NO: 264159 - DNA, 421 bp, Unknown
  Bacterial polypeptide expressing nucleotide sequence isolated from the Sargasso Sea
tatgtcagataaattagaagataaaatgtcgaacttgataccaatggttgtcgaacaatctagtaggggtgaaagagcatatgatattttttcaagattgctcaaagaaagaatagttttcgtagtcggtccaatcaatgatagtgtagcgtctctagttacagctcaaatgttatttttagaatccgaaaatcctaagaaagatatttttatgtacattaacagtccaggaggattagtaacagcaggtcttggaatatacgatactatgcaatatataaaacctgaaatctcaactttatgtattggacaagcagctagtatgggatcttttcttttagcagcgggaacaaaaggaaaaagattttcgttaccaaattccagaataatggtgcaccaaccttcagcaggttttcagggc

SEQ ID NO: 264160 - DNA, 370 bp, Unknown
  Bacterial polypeptide expressing nucleotide sequence isolated from the Sargasso Sea
aatggttgttgaacaaacaagcagaggggagagatcttatgatatttattcaaggcttttgaaagaaagaattatttttttagttggtcccattgacgataatatttcatctttggtatgtgcccaattactttttttagaagctgaaaaccctaagaaagatatctctatgtatataaattctcctggaggtatagttacttcaggactttctatatacgatacaatggaatacataaagccagatgtatccactgtatgtattggtcaagcagccagtatgggctctcttttattaacggcaggagctgccaagaagagatattgtttttgcaatgctagaatcatgactcatcagccatctgggggg

SEQ ID NO: 264161 - DNA, 519 bp, Unknown
  Bacterial polypeptide expressing nucleotide sequence isolated from the Sargasso Sea
gactccttaaagagagaattgtatttgtagttggtcccataaatgatgcggttgcatcattagttactgcgcaattattatttttagaatctgaagatcctaaaaaagaaatttctttatatataaatagtcctggtggacttgtaacagctggacttggtatttatgatacaatgcaatacatcaaaccagaaataagtactttatgtataggtcaggcagcaagcatgggttcatttttactagcagcaggtgctaaaggaaaaagattttcattgccaaattctagaataatggtccatcaaccgtctgctggttttcaaggacaagcgacagatattgaaattcatgctaatgaagttttatctctaaagaaaagattaaatgaaatttattcaaaacatacaggaaaatcagttgatgaaattaaatcagcattagagagagataattttatgacacctgataatgcaaaaagttttggcttgatagacaaagtggtagaaaagagagaataag

SEQ ID NO: 264162 - DNA, 601 bp, Unknown
  Bacterial polypeptide expressing nucleotide sequence isolated from the Sargasso Sea
atgtcaaatattaattcagccctgataccaatggtaatagaacagactcctagaggtgagaggtcttttgatatttattctagattgcttaaagaaagagttatatttctttcaggcgctatcgatgattacatttctaatttggttgtagcacaattattatttttagagtctgagaatccagaaaaagatatttctatatatattaattcacctggcggaagtatttcagctggattagcaatttatgacactatgcaatttattactccttctatttcaactatgtgtattggtcaagctgcaagcatgggagcattactattagctggtggagacaaaaagaaaagatttgctctacctaattcaagaattatgattcatcaacctttaggaggatttcaaggccaagcatctgactttgagatacatgctaaagaaataatacatatgaaaaaaatagttaatgaaattcttgctaaacataccggccaatcaataaaacaaattgaaaaagatactgatagagacaattttttagatgcaaatgcagcaaaatcatatggaattgttgacagtatattggaaaagagaaagtaag

SEQ ID NO: 264163 - DNA, 592 bp, Unknown
  Bacterial polypeptide expressing nucleotide sequence isolated from the Sargasso Sea
aatgaaagatccgatagataatattaccaataacctcattccaatggttgttgaacaatcatcaagaggagaaagatcttatgacatctattcgagattgttgaaagaaagaatcatatttcttactggtccaattgatgataacattgcaagtctaatctgcgctcaaatattatttttagaatctgaaaatccaaaaaaagaaatttctttttatattaattctccaggcggtattgtttggtctgggttagccatttacgatactatgcaatatgtttcttcgaaaattatgactatttgtattggtcaggctgcttctgctgggtcacttcttttgactgctggagaaaagggaatgaggttttctttaccaaattctagaatcatggttcatcaaccaagtggaggttatcagggtcaagtaactgacattgaaattcaaactaatgaaataaaaaaaacaaagttaaaactaaatgaaatttattcaaaacatactggaaaaaaaatatcagaaatatctactataatggaaagagataaatacttctctgctgaagaagctattaaatttgggtctatagattaa

SEQ ID NO: 264164 - DNA, 529 bp, Unknown
  Bacterial polypeptide expressing nucleotide sequence isolated from the Sargasso Sea
tatgatccctttagttttagaagaatctggtggtagtgaaagagtctttgatatttattcgagattattaagagagagaataatctttttgggagaacaagttactagtgaaaccgctaatagaattgttgctcaattattattccttgaagcagaagaccccgagaaagatatctatatgtatattaattctccaggtggatctgtttacgatggtttaggtatttttgacaccatgcaacatgttaagcccgatattcatacagtttgtgtaggtttagcagctagtatgggtgcttttttattggctgcagggactaaaggtaaaagaagtagtctaagacattcaagaataatgatacatcaaccacttggaggcgctagaggccaagctagtgatataagaattcaagcggatgaaattttgtttttaaaagaacgtcttaatactgaattatcagaaagaactggtaaagattatgaaactgttaaagaagatactgatagagatttctatatgtctccaaaa

SEQ ID NO: 264165 - DNA, 460 bp, Unknown
  Bacterial polypeptide expressing nucleotide sequence isolated from the Sargasso Sea
tctcaattattgttcctcgaggcagaggatccagataaggacatttatatgtacataaattcacctggaggatccgtatatgacggattgggtatctttgacacaatgcaacatgtaaagcctgacattcatacagtttgtgttggcttagcagctagtatgggtgcttttttgcttgcggcaggtactaaaggtaaaagaagcagccttagacattcaagaataatgattcatcaaccacttggaggtgctagagggcaagccagtgatataagaattcaggcagatgaaattttgttcttaaaagaacgtcttaatactgaattatcagagagaactggaaaggattttgatactatcaaagaagatactgatagagatttttatatgtccccaaacgaagcagttgagtacggtttgattgatctagtattagataagaaaccaataaaagtttagc

SEQ ID NO: 264166 - DNA, 228 bp, Unknown
  Bacterial polypeptide expressing nucleotide sequence isolated from the Sargasso Sea
aatgattccaatagttattgaagaatctggaagaggagaaagagcctttgatatttattcaaggcttttaagagaaagaattgtttttttgggtgaaccagtaacaagtgattctgctaacagaattgttgctcaactccttttccttgaagctgacgatcctgataaagatatctttctgtatatcaattctccaggtggatctgtttatgacggccttgggatttt

SEQ ID NO: 264167 - DNA, 494 bp, Unknown
  Bacterial polypeptide expressing nucleotide sequence isolated from the Sargasso Sea
tatgaaaacgtttgaaaatgaaaagttaatagaacactcagcattaattccaatggtagttgagcaaactaatagaggtgaaagatcttatgatatatattcaagactcttaaaagaaagaataatttttttagtaggtccaataaatgataatattgcttcattagcatgtgcacaattattatttttagaagctgaaaacccaaaaaaggatatttctatgtatattaactctcctggaggagtagtaacttctgggttatctatatatgatactatggaatacgttaaaccagatatttgtacggtttgttttggacaggcagcaagtatgggctcattacttttaacagctggagcaaaaagcaagaggttttgcttgccgaactctaggataatgactcaccaaccatctgggggatttcaaggtcaggcttctgatattgaaattcatgctaaagagataatgaatcttagatcagggttaaatgaaa

SEQ ID NO: 264168 - DNA, 292 bp, Unknown
  Bacterial polypeptide expressing nucleotide sequence isolated from the Sargasso Sea
tatgggttcatttttacttgcagcaggcaccaaaggaaaaagattttcattaccaaattccagaataatggttcatcaaccttcagctggttttcaaggacaagcgacagatattgaaattcatgctaatgaagttttatctttaaaaaaaagattaaatgaaatttactcaaaacataccggcaaaacagtagatgaaattaaatctgcattagagagagataattttatgactcctgacaatgcaaaaagttttggcctgatagataaagtggtagaaaaaagagaatag

SEQ ID NO: 264169 - DNA, 300 bp, Unknown
  Bacterial polypeptide expressing nucleotide sequence isolated from the Sargasso Sea
aatgattcaaagcaagttcctcgagcagcgaaaaatatttctttggggggaagtcagtgaccgttccgcaagggacttgaccgaaaagctgctttttctcgaatcttcggaccccggaaaggaaatcactttctatatcaattcaccgggaggctccattacggccggcatggccattttcgataccatgcagctcatcagctcacccatcaaggtggtcgttacgggcatggccgccagcatgggatcgatcctcctttgcggagctaccaagggacagcgtttcctctatccccactc

SEQ ID NO: 264170 - DNA, 613 bp, Unknown
  Bacterial polypeptide expressing nucleotide sequence isolated from the Sargasso Sea
tatgaatacaaagatatcagaacatatgaatactttaattcctatggttgtagaacaatcaagcaaaggagagagagcttatgatatctattcaagacttttaaaggaaagaataatttttttaactggaccaataaacgataatgttgcatcactagttacggctcaaatgttatttttagagtccgaaaatccaaaaaaagaaatatatttttatatcaacagcccaggtggtttagttactgctggtttaggtgtttatgatactattcaatatattaagccgcctgtttcaactttgtgtattggccaagcagcttcaatgggttcatttttacttgcttctggagaaaaaggaaaaagattttctctacctaattcaagaataatggtccatcaaccatcagcgggttttcaaggacaagctacagacattgaaattcacgcaaatgaggtgctagcactaaaaaaaagattaaatgaaatttattcaaagcatactggtcaatctaccgaggatataaaaaaagcattagaaagagataactttatgacaccggaaagtgctaaagaatttggtttaattgatgaggtagtagaaaaaagaatttaa

SEQ ID NO: 264171 - DNA, 406 bp, Unknown
  Bacterial polypeptide expressing nucleotide sequence isolated from the Sargasso Sea
ttatttatacgttaatagtcctggtggcttagtaacagctggacttggtatttatgatacaatgcaatatgtaaaacctgatatttcaaccttgtgtataggacaggctgcatcgatgggatcatttttattagcagctggaactaaaggaaaaagattttcattaccaaattctagaataatggttcaccagccctcagctggttttcaaggtcaagctactgatattgagatacatgcgaatgaagttttatcattgaaaaaaagattaaatgaaatttactcaaaacatacaggcaagagtgttgatgaagtgaaatctgcacttgaaagagataatttcatgacagctgatgtagcaaagtcatttggtcttattgacgaagttgttgaaaaaagatcttaa

SEQ ID NO: 264172 - DNA, 553 bp, Unknown
  Bacterial polypeptide expressing nucleotide sequence isolated from the Sargasso Sea
tatgactcttataccaatggttgtagagcagaatagtcggggagaaagagcatacgacatttattctagacttctcaaagatagaatagtttttcttgggaccccaattgacgatactgtagctaatgtgatgatagctcagcttttgtttttggaggcagaagattcagagagtgatatttcactctacttgaattgtccaggaggtctagttacttcaggtatggccatttatgatacgattcaatatttgaaacctgatgtgcaaactatttgcattggccaagctacgagtatgggagctgttttgttagcggcaggggctaccggtaagagacacgccctgcctcatgctagaattatgttacatcaaatgttgggtggtttttctggacaggctgaagatatcgatattcaagcaaaagaaattataaaaatgaccgatgttttaaacaatatattggcaagacatactgggcaaaagatcgaatctattgcagaagatacacaacgtgattattatttttcaagtcaggaagcaaaagaatatgga

SEQ ID NO: 264173 - DNA, 613 bp, Unknown
  Bacterial polypeptide expressing nucleotide sequence isolated from the Sargasso Sea
gatgaaagatccaatagataatttaactaataacttaatacctatggtagtagagcaatcttcaagaggtgagagagcatatgatatttattctaggcttttaaaagaaagaattatttttttaacaggacctatagatgataacattgcaagtttaatttgcgctcaactattattcttagaatcagaaaacccaaaaaaagaaatttctttttatattaattctcctggaggaatagtttggtcaggtttagcaatgtatgatacaatgcagtatatttcatcgaaaattatgacgatatgtattggtcaagcagcttcagcaggttcattattattaactgctggtgcagataatatgagatattctttgccaaactctagaattatgatgcatcaaccaagtggaggatatcaagggcaagtaacagatattgaaatacaaacaaaagagataattaaaactaaaaaaagattaaatgaaatttatgcaaaacatacaagaaaagacataaaagaagtagaggaaattatggaaagggataaatacttttctccacaggaggcaattaaatttggcttaattgataaaattgttgaaaatagaaaataa

SEQ ID NO: 264174 - DNA, 589 bp, Unknown
  Bacterial polypeptide expressing nucleotide sequence isolated from the Sargasso Sea
tatgagtagcttaatacccatggttgttgagcaatcaaacaaaggtgaaagagcttatgatatttattcaaggcttttaaaagaaagaattatttttctgacaggtcaaataaatgacaatgtagcctcattagtcacagctcaattattattcttagaagcagaggatcctaaaaaagaaatttttttatatattaatagtccaggtggacttgttactgcaggtctaggtatttacgatacaatgcaatatgtaaaaccagatatttcaactttatgcattggacaagcagcctcaatgggatcttttttactatcagcaggaacaaagggtaaaagattttcactcccaaattcaagaattatggttcatcaaccatctgcaggctttcaaggacaggctactgatattgaaatccatgccaatgaagtgctttctctaaaaaaaagattgaatgaaatatattctaaacacaccggtaaatctgtagaggaaataaaaactgctttagaaagagataattttatgactgcagatacagctaaatcttttggactaatagactctgtggtagaaaaaagatcttag

SEQ ID NO: 264175 - DNA, 445 bp, Unknown
  Bacterial polypeptide expressing nucleotide sequence isolated from the Sargasso Sea
attattatttttagaatctgaagatccaaaaaaagatatttttttatatataaacagtcctggaggcttggttacatcgggattaggtatatatgatacaatgcaatacattaaaccagatgtttcaactttatgtataggacaggcagccagcatgggttcatttttattatcggctggaactaaaggaaaaagattttcattaccaaactcaagaattatggttcaccaaccttctgctggctttcaaggtcaagcaactgatatagaaattcatgcaaatgaagttttgtcgttaaaaaaaagattaaatgaaatttactctaaacatactggtaaatctgtagaggaaataaagtcagctttagagagagacaactttatgactcctgagaccgctaaagatttcggtcttgtggataaagtagtgtctaaaagagaatag

SEQ ID NO: 264176 - DNA, 448 bp, Unknown
  Bacterial polypeptide expressing nucleotide sequence isolated from the Sargasso Sea
tctgaaaatcccgaaaaagagatttcattatatataaattcacctggaggagttgtaagtgatggattggcaatttacgacacaatgcaattcatacagtctccagtctcaactctttgttttggacaggctgcttcaatgggctcattcttacttgcagcaggtgaaaaaggaaaaagatatgctttacctaatagccgcataatggtgcaccagccatctgctggctttcaaggtcaagcaactgatatagaaattcatgcgaaagaggtcttggcaatgaaagcaaatttaaacaaaatatacgcaaaacatacaggccaacccgttgaagcaatcgaagaggcacttgaaagagataactttatgtcaccggaagaggctcagaaatttggcataattgatagcattcaggaaaaaagagttgagccaaaaactgagaaatagc

SEQ ID NO: 264177 - DNA, 613 bp, Unknown
  Bacterial polypeptide expressing nucleotide sequence isolated from the Sargasso Sea
atgccaataggaactccaagtgtgccttacagacttccaggaagtcaatacgaaagatgggttgatatttatacaagactaggtgttgaaagaattctttttcttggacaagaagtgaatgatggcattgctaatagcctcgttgcacaaatgctatatcttgattctgatgacaattccaaacctatctatctatatatcaatagccctggaggatcagtaactgctggcttggctatttacgatactatcaaatacgtaaaaagtgatgtagttaccatatgcgtaggccttgcagcctcgatgggtgcgttcctcttggccgcgggcacaaaaggtaaaagagttgctttgcctcacagcagaataatgattcatcaacccttaggagggacatctcaacgccaagcaagtgatattgaaatagaagctaaggaaattttaagaattaaagatatgttaaacatgtctatggcagatatgacaggccaatcatttgaaaaaattgaaaaggatactgatagagattattttctaagtgccgaagaagcaaaaaattatggattaattgatagagtaattactcatccaagcgaagcaaatcagtcttaaa

SEQ ID NO: 264178 - DNA, 439 bp, Unknown
  Bacterial polypeptide expressing nucleotide sequence isolated from the Sargasso Sea
tttttagagtcagaaaatcctaaaaaagaaatttatttttatatcaatagtcctggtgggttagtaacttccggtttaggaatctatgatactatgcaatatattaaatcaccagtgtcaaccttgtgtattggacaagcttcttcgatgggatcttttctacttgctgctggagaaaaaggaaaaagattttcattaccaaattcaaggataatggttcaccaaccgtcagccggatttcaaggtcaagcaacagatatacaaatacatgccaaggaaattcttttgttaaaagagaggcttaataaaatttattccaaacacactggtaaatccgttaaagaaatttcatctgccctcgaaagagataaatttatgaccgctgatgaagctaaagagtttggtctaatagacaaagttgttgacaaaagaatttgat

SEQ ID NO: 264179 - DNA, 419 bp, Unknown
  Bacterial polypeptide expressing nucleotide sequence isolated from the Sargasso Sea
tatgactattaaaattcaagaacaattaagtacactaatccctatggttgtcgaacaatctagtagaggagaaagggcatatgacatttattctagacttcttaaagagagaattgtgtttgtggttggtcccatacatgacgcggttgcatcattagttactgcgcaattattatttttagaatctgaagatcctaagaaagaaatttctttatatataaatagtcctggtggacttgtaacagctggacttggtatttatgatacaatgcaatatatcaaaccagaaataagtactttgtgtataggtcaagcagcaagcatgggttcatttttattagcagcaggtgctaaaggaaaaagattttcattgccaaattctagaataatggtccatcaaccgtcagctggttttcaag

SEQ ID NO: 264180 - DNA, 496 bp, Unknown
  Bacterial polypeptide expressing nucleotide sequence isolated from the Sargasso Sea
atgagcaatcttgtaccaatggttgttgagcaatctagcaaaggtgaaagagcttatgatatttattctagattactaaaagagagaattatttttttaacaggtcaaattaatgataacgttgcatcattagttactgctcaattattatttttagaagctgaggatccaaaaaaagaaatttatttatatattaatagcccaggaggtttggttacagctggtcttggtatttatgacactatgcaatatgttaagccagatatttctactttatgcattggtcaagcagcttcaatgggttcgtttttacttgctgcaggcactaaaggaaaaagattttcgttaccaaattcaagaataatggttcaccaaccatccgcaggttttcaaggtcaggcaactgatattgagatccacgcaaacgaagttttgtctttgaagaaaaggcttaatgaaatttattctaaacacaccggaaaaagtgttgagaaat

SEQ ID NO: 264181 - DNA, 400 bp, Unknown
  Bacterial polypeptide expressing nucleotide sequence isolated from the Sargasso Sea
tatattaatagcccaggtggacttgtaactgctggactaggaatttatgatacgatgcaatatataaaaccagaaattagtacattgtgcattggtcaggctgcgagcatgggttcatttttactagctgctggatcaaaaggaaaaagattttcattacccaactctagaataatggttcaccaaccctcagctggttttcaaggccaagcaactgatattgaaattcatgctaatgaagttttatcattaaaaaaaaggcttaatgaaatttattcaaaacatactggaaaaactgttgatgaaattaaatcagcattagagagagataattttatgactccagataacgcaaaaagttttggtctgatagataaagtggtagaaaaaagagaataag

SEQ ID NO: 264182 - DNA, 613 bp, Unknown
  Bacterial polypeptide expressing nucleotide sequence isolated from the Sargasso Sea
atgaaagatccaatagataatttgactaataatttaatacctatggtagttgaacaatcatcaagaggtgagagggcgtatgacatttattctagacttttaaaagaaaggattatttttttaactgggccaatagatgataatattgcaagtctaatttgtgcacaattattattcctggaatcagaaaatcctaaaaaagaaatttctttttatattaattctcctggtgggatagtttggtctggtttggcaatgtatgatacaatgcaatacatatcttcaaaaattatgacaatatgtattggtcaagcagcttcagctggctcattattgctaactgcaggagcagataatatgagatattctttgcccaattctagaattatgatgcatcaaccaagtggcggttatcaaggacaagtaacagatattgaaatacaaacaaaagaaattattaaaactaaaaaaagattaaatgaaatttatgcaaaacattctggaaaagatataaaagaagttgaggaaattatggaaagagataaatatttttctcctcaggaggcaattaaatttggtttaattgataagattgttgagaatagaaaataat

SEQ ID NO: 264183 - DNA, 481 bp, Unknown
  Bacterial polypeptide expressing nucleotide sequence isolated from the Sargasso Sea
atgaaagaattaccttcaaattatgtaatccctactgttattgaaaatactaataggggcgagagagcctttgatatatactcaaggcttttaaaagatagaattatatttttgggaacaccaattgatgacggtgtagcaaattctattatggctcagctattacatttagaatcagaagacccggataaagatatctttatgtatatcaactcgccaggaggatcaatcacttcattatttacaatttatgacacaatgaagtacattaagccagatatttcaacagtatgtatggggctagcagcatctgcagcttctgtcattttggctggtggtactcctggaaaaagatacagcctaccaaatgcaagaatcatgctccatcaaccatctggtggtatggagggtactgtagctgatatggagagaaattttgatcttattgtatcaatgagaacccaattaaacggtttattgg

SEQ ID NO: 264184 - DNA, 513 bp, Unknown
  Bacterial polypeptide expressing nucleotide sequence isolated from the Sargasso Sea
aagaaagagtaatttttattactggagctgttgaagatcatatggctaatcttattgtcgctcagcttctatttttagaggctgataatcctgacaaagatataaatctttatataaattcaccaggtggatcagttacagctggtatgtctatttatgacaccatgtcttacataaaacccgacataagtacactctgtattgggcaagcttctagtatgggtgcagtattattaacgggcggcactaaaggtaaaaggtttgctttgccgaattcaagaataatgattcatcaacctttaggtggctttcaaggtcaagcatctgatatagaaattcatgctaaagaagttttaaaaatcagaactaaattgaacgaggttttgtctaagcattccggtcaaaaaattgaaactattgagcaagatacagaaagagataattttatgtcaggtgaagaagcctgtgattatggtttaattgataaagttatttcaaaaagagataaataat

SEQ ID NO: 264185 - DNA, 445 bp, Unknown
  Bacterial polypeptide expressing nucleotide sequence isolated from the Sargasso Sea
cttttatttttggaatctgaaaatcctgaaaaagatatttcaatttatattaattcacctggtggcagcatttctgctggccttgctatttacgatactatgcaatttgtaaagccttctatttctacaatgtgcattggtcaagctgcaagtatgggagctttacttcttgctggtggtgatgaaaagaaaagatttgctttacctaattctagaatcatgattcatcagcctttaggcggtttccaaggccaagcatctgattttgaaattcatgcaaaagagattttacacatgaaaaaaattgtcaatgagatattggcaaagcatactggccaaactattaagaaaatcgaaaaagatacagatagagacaattttcttgatgcaaaagcagcgaaaacatatggaatagttgataaaatattagaccaaaggaattaaa

SEQ ID NO: 264186 - DNA, 415 bp, Unknown
  Bacterial polypeptide expressing nucleotide sequence isolated from the Sargasso Sea
tatgaattataagatacctgaagaactaaataccctgatccctatggtcgttgaacaatcaagccgaggtgaaagagcttatgatatttattcacgattacttaaagagaggatagtatttgttgtaggtccgatcaacgataatgtggcatctcttgtaactgctcaattactttttttagagtcagaagatccaaaaaaagaaatttcactatatataaatagccctggtggtttggtaacttcaggactaggaatttatgacacaatgcaatatataaaacctgatgtttccactttatgtatcggtcaagctgctagtatgggatcttttttattagctgcgggtacgaaaggaaaaagatattctctaccaaattcaagaattatggtccatcaaccttccgcaggatac

SEQ ID NO: 264187 - DNA, 211 bp, Unknown
  Bacterial polypeptide expressing nucleotide sequence isolated from the Sargasso Sea
atgagcaatcttataccaatggttgtagagcaatcaagcaagggtgaaagagcttatgatatttattctaggctattaaaagaaagaataatttttttaactggtcaaataaatgacaatgttgcttcattggttactgcccaattattattcttagaagcagaagatccaaaaaaaaaaatttatttatatataaatagtccaggaggtt

SEQ ID NO: 264188 - DNA, 658 bp, Unknown
  Bacterial polypeptide expressing nucleotide sequence isolated from the Sargasso Sea
gatggattactcaaaagaatttaagaaatatgctacaaaacatcatggtgtaagctctacatactacgataagattataagcagtatgactccttatattattgaagagagacaattaaatgtagcacagatggatgttttctcaagattaatgatggatagaattatgtttttaggaactgctattacagatagcgttgccaacgtcattcaggctcaattacttttcttgcagagtacagattcatcaagagatatccaaatgtatatcaattctcctggtggtggagtatatgcaggccttggaatatatgataccatgcaatacataaagccagatgttgctacaatttgtaccggatgcgctgcatctatggctgcagttcttctgtgtgcaggaaagaaggggaaacgatctgcactaaaacactctagagttatgatacaccagcccttaggtggagtttctggtcaagcagctgatattgaaattacagcaagggaaattcttaagcttaaagacgaactatataagattatttcaaaacattctggccaaactttcaaaaaggtaaatgcagatagtgatagagactattggatgaaagcagatgaagctcataaatatggtatggttgatgaagtattaaacaaataa

SEQ ID NO: 264189 - DNA, 140 bp, Unknown
  Bacterial polypeptide expressing nucleotide sequence isolated from the Sargasso Sea
tatgaataatttaattccaatggttgttgagcaatcaagtagaggagagcgtgcatatgatatttattcgagattattaaaagaaagaattgtatttgtggttggtccaattaacgataatgttgcatctttagttactg

SEQ ID NO: 264190 - DNA, 220 bp, Unknown
  Bacterial polypeptide expressing nucleotide sequence isolated from the Sargasso Sea
atgaacaaaatacctgaacacttaaatacattaattcctatggttgttgaacagtcaagtagaggtgaacgtgcatatgatatttattctagattattaaaagaaagaatagtttttgttgttggccccataaatgatgctgttgcatctttagttacagcacaacttttgtttttagaatctgaagatccaaaaaaagaaatttctctttatattaata

SEQ ID NO: 264191 - DNA, 376 bp, Unknown
  Bacterial polypeptide expressing nucleotide sequence isolated from the Sargasso Sea
tggttctgctggattaggaatatatgatactatgcaatatattaaaccagatgtttcgactttgtgtattggtcaagctgcgagtatgggatcttttttattagcagctggcactaaaggaaaaagattttcattacctaactctagaataatggttcatcaaccatcggcaggttaccaagggcaagcaactgacattgaaattcatgctaaagaagttttggcattaaaaaaaagattaaatgaaatttattcaaaacatactaacaaatctgtcagtgaaattaatgatgcattagaaagagataactttatgactccagaaagtgcaaaagaatttggtttgattgataaagtagtagctcaaagagaataa

SEQ ID NO: 264192 - DNA, 366 bp, Unknown
  Bacterial polypeptide expressing nucleotide sequence isolated from the Sargasso Sea
ttttgacacaatgcaggcatgttaagcctgatattcatacggtttgtgttggcttagcagctagtatgggtgcatttttgcttgcagcaggtactaaaggtaaaagaagcagccttagacattcaagaattatgattcatcaaccactggggggagctagaggacaggccagtgatataagaattcaagcagatgaaattttgtttttaaaagagcgacttaatactgaattatcagagagaactggaaaagattatgacactattaaagaagatactgatagagatttttatatgtccccaaacgaagcagttgagtacggtttaattgatctagtattagacaagaaacctgttaaagtctagc

SEQ ID NO: 264193 - DNA, 344 bp, Unknown
  Bacterial polypeptide expressing nucleotide sequence isolated from the Sargasso Sea
aatgacaaagtctaaagtaaataatttaagtactctaatcccaatggttgtagagcaaacatctagaggggaaagatcttacgatatatattcaaggttattaaaagaaagaataatttttcttacaggagtcatagaagataatgttgcttcattaatttgtgcgcaattactttttttagaatctgagaatcctaataaagatatttcattttatattaattcttctggaggagcagttacatcaggcttggcaatatatgatactatgcaatatataaaacctgatattactacagtatgtattggacaggcagcatctatgggatccttacttttagctg

SEQ ID NO: 264194 - DNA, 661 bp, Unknown
  Bacterial polypeptide expressing nucleotide sequence isolated from the Sargasso Sea
tatgaattactcagaagaatttaaaaaatatgcaaccaagcatcacggtgttaattctatgtattatgacaaaatagtaagcagcatgacaccatatataatcgaagaaagacagctaaatgttgctcaaatggatgttttttcaagattgatgatggatagaataatttttttaggtactgcaattaatgattctgttgcaaatataatccaagcacaactcctttttttagaaagtactgacaaagaaaaagatattcaaatttatataaactcacctggaggttcagtttatgctggtcttggtatatatgatactatgcagtttattggtcctaatgtagctactatttgtactggaattgcagcttcaatgtcagcagtacttttgtgtgctggtgaaaaaggtaaaagatctggtttaactcactcaagagtaatgattcaccaacctttaggtggtgctcagggacaagcatctgatattgaaattactgcaagagaaattgtaaaattgaagaaggaattatatgaaataattgcaaatcatactggccaaaaatatgataaagtttatgaagattctgatagagattattggatgaaagctcctgaagctaaaaagtatggaatgattgacgaagttctttcaaaaaaataa

SEQ ID NO: 264195 - DNA, 340 bp, Unknown
  Bacterial polypeptide expressing nucleotide sequence isolated from the Sargasso Sea
atgtttgaaaataacttagttccaatggtcgttgagcaaacctctagaggtgagcgtgcttttgatatcttttccagattacttaaagatagaattgtttttattgttggtggcattgatgattacgttgctaatctagtagtggcacaactcttatttcttgagtctgaagatcctaaaaaggacatttatatgtacatcaattcacctggtggtgtaattacgtcaggactatcgattttagacacaatgaattatctgaaatgtgatgtttcccacagtttgttttggacaagcagcaagtatgggggctgttcttcttgcaaacggtgcagataaa

SEQ ID NO: 264196 - DNA, 633 bp, Unknown
  Bacterial polypeptide expressing nucleotide sequence isolated from the Sargasso Sea
tatgaataaaatacctgaacatcttaatactttaattcccatggttgttgagcaatcaagtagaggagagagagcatacgatatatactcacgattgttaaaagagagagtggtttttgttgttgggcctataaatgataacgtagcatctttaattactgcacaacttcttttcttagaatctgaagacccaaaaaaagaaatttctctttatataaatagccccggaggcttagtcacagctggcttaggtatatatgacactatgcaatatattaaacctgatgtttcaactttgtgtataggacaagcggcaagtatgggctcttttttattagctgctggaactaaaggaaaaagattttctttacctaactctagaattatggttcaccaaccttcagctggttttcaaggtcaagcaactgatattgagattcatgcaaatgaagttctatctttaaaaaaaagattaaatgaaatttattcaaagcatactaataaaacacccgatgaaataaaaactgctctagagagagataattttatgagtcctgaaacggcaaaagagtttggactgatagataaagtagtggttaaaaagagaataaattactataatatagtttttcc

SEQ ID NO: 264197 - DNA, 613 bp, Unknown
  Bacterial polypeptide expressing nucleotide sequence isolated from the Sargasso Sea
tatgagcataaaaatatctgaacacatgaatacccttatacctatggttgttgagcaatcatctaggggggagagagcttatgatatttactcaagacttttaaaggagagaattgtttttttagtgggcccaattaatgataatgtagcttcattagttactgcccaattattatttttagaatctgaaaatccaaaaaaagaagtctttttatacataaatagtcctggtggtttagttacagctggactgggtatttatgatactatgcaatacatcaaaccagatgtatcaactttgtgcattggtcaagcggcttcgatggggtcttttttattagctgcaggaaaaaagggtaaaaggttttctttacctaattctagaattatggttcatcaaccatctgcaggatttcaaggacaagctacagatatagaaatacatgctaatgaggttttgtctttaaaaaaaagattaaatgaaatttattcgaagcacacaggtaaaaatgttgatcaaataaaggaggcattagagcgagataactttatgacgcctgaaaacgcaaaagaatttggactaattgatcaagttgttgagaaaaggatttag

SEQ ID NO: 264198 - DNA, 253 bp, Unknown
  Bacterial polypeptide expressing nucleotide sequence isolated from the Sargasso Sea
tatgagtaatttaattccaatggtagtagaccaaacttcaagaggcgaaagaagttatgacatctactcgagacttttaaaagaaagaattgtatttgtaactggaccaattgacgactcagtttcaagtgtagtttgtgcccaattattatttttagaatcacaagatcctaaaaaagatatctttatgtacattaactctccaggtggagttgtaacatcaggattagctatgtatgacactatgcaatat

SEQ ID NO: 264199 - DNA, 526 bp, Unknown
  Bacterial polypeptide expressing nucleotide sequence isolated from the Sargasso Sea
tatgaaagaattccaatcagcattaataccaatggttgtagagcagactccaagaggtgagagatcttttgatatttattcgcgtctcttaaaagagagggtgatttttctatctggtgcaattgatgattacatatctaatcttgttgttgcacaactgctgtttttggagtctgaaaatcctgaaaaagatatatctatatatataaattcgcctggtgggagtatttcagcaggcttggcaatatatgacactatgcaatttattactccttcaatttctacaatgtgcatagggcaagctgcgagcatgggtgcattactattagcaggtggagataaaaagaaaaggtttgctcttgctaattcaagaattatgatacaccaacctcttggtggttttcagggacaggcatctgattttgaaattcatgcaaaagaaattttacatatgaaaaaaattgtcaacgagattcttgcaaaacatacagggcaaacaataaaaaagattgaaaaagatactgat

SEQ ID NO: 264200 - DNA, 589 bp, Unknown
  Bacterial polypeptide expressing nucleotide sequence isolated from the Sargasso Sea
atgaataaccttattcctatggttgtcgagcagacaagcaaaggggaaagggcatatgatatttattcaaggcttttaaaagaaagaatagtttttttggtggggccggttaatgataatgttgcttcattagtgactgcccaacttttatttttagagtctgagaatcccaataaagaaataagtttctatatcaatagtccgggaggacttgttacagctggtcttggaatctacgatactatgcaatacattaactcacctgtttctactctgtgcatcggacaagcttcttcaatgggatcttttttgctttcggcaggggaaaaaggcaaaagatattcattaccaaattcaagaattatggttcatcagccatctgcaggatttcaaggtcaagcaactgatatacagatacatgctaaagagattctttctttaaaagaaagattaaacacaatatattctaaacacactggtaaatcagttgatgaaattgctaaagctttagagcgagataattttatgactgctgatgatgccaaaaaatttggtttaattgacactgttgtggaaaagagaaaataaa

SEQ ID NO: 264201 - DNA, 460 bp, Unknown
  Bacterial polypeptide expressing nucleotide sequence isolated from the Sargasso Sea
atggaagaacataattcaactttaatacctatggtagttgagcaaactgccagaggtgaacgtgctttcgatatatattcaaggctattaaaagagcgagttatttttctaaccggacccataaacgatcaagtctcaaatcttgtagttgctcaattattatttttagaatcggaaaatcccaagaaagacatcagcatttacattaactcaccaggtggcgtcatatcatctggtttagcaatttatgacacgatgcagttcatatctccgtctatatctactttatgtattggtcaagctgcctcaatgggagcattacttcttgctggtggtgaaaaggagaagcgatttgctttacctaattcaagaattatgatccatcaaccactcggaggtttccaaggtcaagcttcagatattgagattcatgctcaagagatattactaagaagaaaaa

SEQ ID NO: 264202 - DNA, 505 bp, Unknown
  Bacterial polypeptide expressing nucleotide sequence isolated from the Sargasso Sea
atggttgttgagcaaacaagcagaggtgaaagatcgtatgatatttattctagacttctgaaggaaagaataatttttcttgttggccctgttgatgataatttagcttcattagtttgtgctcaattattatttttagaagctgaaaatccaaaaaaagatatttcaatgtacattaactcaccaggtggagtagttacttcaggattatcaatatatgatacaatggaatatattaggccagatgtttctacagtatgtattggacaagctgcaagcatggggtcattattgttaactgctggtgctaaaaataaaagatattgcctacctaatgcaagaataatgacacaccaaccttctggtggctttcaaggacaagccagtgatattgaaattcatgctaaagagataattaatttaagatcaagacttaacggtatttacgtaaaacattctggcaagaaaattgcagaaattgaaactctaatggatagagacactt

SEQ ID NO: 264203 - DNA, 643 bp, Unknown
  Bacterial polypeptide expressing nucleotide sequence isolated from the Sargasso Sea
atgaactaccgtcctccacgatttgaagatttttctcctggattcctaaaacctgaaaatattgtaccgatggtagttgagacaagtgctcgtggtgaacgcgcatatgatatttattctctgcttctgaaagaacggattgtttttttgggcactggtattgacgatcaggtagcaaatagtatcgtagctcaattgctatttttggacagagaagatcctgatcgcgatatttcaatgtatgtccattctcccggaggaatggtttatgctggcttagctatatatgacactatgaacttgattcgtgcagatgtttctacaatcgcagtcggtgttactgcttctatgggaacagtattacttgctgcagggactaaaggtaaacgcttcgcacttcctaatgccactgtacatatgcatcaagcactaggtggcggatctggacaagcttcggatgtccaaattcaagctcaagaacttatgcgtaataaccaaaaaattcgtgaaattcttgccaaggctacagatcaaccgatggatagaattgagcaagatactgatcgagacttttatatgtctgcacaagaagcgcaagagtacggtctaatcgacgaagttttgtctgctcaaagtggataag

SEQ ID NO: 264204 - DNA, 265 bp, Unknown
  Bacterial polypeptide expressing nucleotide sequence isolated from the Sargasso Sea
tatgagtagcttaatacccatggttgttgagcaatcaaacaaaggggaaagagcctatgatatttactcaagacttttaaaagaaagaattatttttttgacaggtcaaataaatgacaatgtagcttcattaatcacagcacaattattatttctagaagcagaagaccctaaaaaagaaatttttttatatattaatagtccaggtggacttgttacagcaggtctaggtatttacgatacaatggcatatgtaaaaccagat

SEQ ID NO: 264205 - DNA, 517 bp, Unknown
  Bacterial polypeptide expressing nucleotide sequence isolated from the Sargasso Sea
attgttaaaagaaagaataatttttttaactggcccaattgacgacaatgttgcaagtctaatctgcgctcaaattttatttcttgagtctgaaaatccaaaaaaagagatttctttttatattaattctccaggtggaattgtttggtctggattagctatttatgacactatgcaatatgtttcttcgaaaattatgactatttgtattggtcaagctgcttctgctggatcactccttttgactgctggagaaaaagggatgagattttctttgcctaattctagaatcatggttcatcaaccaagcggaggttaccagggtcaagtaactgatatcgaaattcaaactaatgaaataaaaaaaacaaagttaaaattaaatgaaatttattcaaaacatactggaaaaaaaatatcagaaataactactataatggaaagagataaatacttctctgctgacgaagctattaaatttggtcttattgataaggttgtaaaggctaggaaataa

SEQ ID NO: 264206 - DNA, 549 bp, Unknown
  Bacterial polypeptide expressing nucleotide sequence isolated from the Sargasso Sea
cttatgacatctattctcgacttcttaaagagagaatagtttttgttacaggacctattgaagattatatggctagtgtaatcactgcgcaacttttgtatctagaagctgaaaatccaaaaaaagaaatctcaatgtatattaattcacctggtggagttgtttcatctggtttggctatttatgatacaatgcaatatatcaaaccagaagtatcaactctttgtataggccaggcagcttctatgggtagtttgcttttagctgcaggcgaaaaaaataaaagatttgctctaccaaattcaaggattatggttcatcaaccatcaggaggttttcaaggccaagcatcagacattgaaagacatgcaaaagaaataatatcgttacgaagtagattaaatgagatttatgttaatcatacaggaaaagatttaaaaacaattgaagcagcattagatagagatacttttatgacttcagatgatgctaaaaaattcggtttaattgataaagttgttcaaaaaagggatattgaagagaaataat

SEQ ID NO: 264207 - DNA, 510 bp, Unknown
  Bacterial polypeptide expressing nucleotide sequence isolated from the Sargasso Sea
catgccaataggaactccaagcgtgccttacagacttccaggaagtcaatatgaaagatgggttgacatttatacaagactaggtgttgaaagaattctttttttgggacaagaagttaatgatggcattgctaatagccttgttgctcaaatgctgtatcttgattctgatgataactccaaacctatttatttatacataaatagtccaggaggatcagtaactgctggcttagcaatttatgatactattaaatacgttaaaagtgatgtagtgactatatgtgtaggcctcgcagcatcgatgggtgcgttcttattggcagctggtacaaaaggcaaaagagttgctttgccccacagcagaataatgattcatcaaccccttggaggaacatctcaacgtcaagcgagtgatatagaaatagaagctaaggaaattttaagaattaaagatatgttaaatatgtctatggcagatatgacaggtcaatcattcgagaaaattga

SEQ ID NO: 264208 - DNA, 346 bp, Unknown
  Bacterial polypeptide expressing nucleotide sequence isolated from the Sargasso Sea
gatgcaatatataaaaccagacgtttcaacattatgcattggtcaagctgctagtatgggatcatttttgttagctgcaggaactaaaggaaaaagactttcgctaccaaattcaagaataatggttcatcaaccttccgcaggttttcagggccaagctacagatatagaaatacatgcaaacgaagttttatctctaaaaaaaagactaaatgaaatttattcaaagcatacaaataaatctgttgatgaaataaaatcagcacttgaaagagacaattttatgacgcctgataacgcaaaggaatttggtctcattgataaagtagtagttaatagatcataa

SEQ ID NO: 264209 - DNA, 627 bp, Unknown
  Bacterial polypeptide expressing nucleotide sequence isolated from the Sargasso Sea
taaataatttgtattatgataaaattgtaaagcaaattacaccaacaggaatgactccctatatcatggaagaacgtcaattaaatgtttctcaattagatgttttttctcgtttaatgatggacagaattatattcttaggaactggtgttgatgatcaaattgcaaatattgttcaagcacaattgttgtttttagaaagtacagatgcttctaaagatattcaaatttatatcaattctcctggaggaagtgtttatgctggattgggaatttatgatactatgcaattcatcaaaccagatgtagctacaatttgtacaggaatggctgcttcaatgggagctgttttattatgtgcaggtgctgatggaaaaagaagtgctttgccacattcacgtgtaatgattcatcaaccaagcggtggagctcaaggagttgcttcagacatggaaatcaacttacgtgaaatgttgaagttaaaagatgagttgtatcatattatttctaagcattcaaagcaagattttgataaagtctataaagattcagaaagagattactggatgattgcagctgaagctaaagaatatggtatgattgatgaagtattagaaagaaaataaa

SEQ ID NO: 264210 - DNA, 526 bp, Unknown
  Bacterial polypeptide expressing nucleotide sequence isolated from the Sargasso Sea
atggatgttttttcaagacttatgatggacaggataatgttcttaggaacctctattactgatagtgtagcaaatgttattcaagctcaattactttttcttcaaagtaccgattcttcaagggacattcagttatatataaattctcctggcggaggagtttatgctggacttggtatatacgatacaatgcaattcattaaacctgatgttgcaacaatttgcactggatgtgctgcttctatgtcggcaattcttttatgtgctggtaagaagggtaaaagatctgcacttaaacattctagggtaatgattcaccagccacttggaggagtttcaggtcaggctgctgatattgaaattacagctagagagatcttaaaacttaaggatgagctttacaaaattatatctaagcattctggtcaaagcttaaagaaagttgcttctgatagtgatagagattattggatgaaatctgaagaagcattgaaatatggaatggttgatgaagttctaaattaat

SEQ ID NO: 264211 - DNA, 409 bp, Unknown
  Bacterial polypeptide expressing nucleotide sequence isolated from the Sargasso Sea
gatgaatcaagttcctgaaaatattatcccttatgttgtcgagagagaccctagaggcgaacgtacttatgacatatattcattactacttaaagaaagaatcgtttttttaggaaccggtataaatgatcaagtcgctaatgcaataattgcacaactactatttttagatcgtgaagaccctgatagagatattaatttatacataaattctccaggtggggttataacttcaggattagctatatatgacactatgcaactaataagacctgacgtatccacaatttgtgtaggcatggcagctagtatgggaacagttttgttatcaggtggagcagacggaaagagatttgcacttcctaattcaactattcatatgcaccaagctttaggtggagctcaagga

SEQ ID NO: 264212 - DNA, 484 bp, Unknown
  Bacterial polypeptide expressing nucleotide sequence isolated from the Sargasso Sea
tatgatcgaaaaaatttataatccagtttcttcaattaatgaaattggcgctttagtgcccatggttgttgagcaaacaagtagaggtgaaagatcgtatgatatttattctagacttctaaaggaaaggataatttttcttgttggacctgttgatgataatttagcttcattagtttgtgctcaattattatttttagaagcagaaaatccaaaaaaagatatttctatgtacataaattcgccaggtggggtggttacttctggattatcaatatatgataccatggagtatattagaccagatgtttctacagtttgtattggtcaagctgcaagcatgggatctttattgttaactgctggtgctaaaaataaaagatactgtttacctaatgctagaataatgacacatcaaccttctggtggatttcaaggtcaagctagtgatattgaaattcatgctaaagagataataattaag

SEQ ID NO: 264213 - DNA, 209 bp, Unknown
  Bacterial polypeptide expressing nucleotide sequence isolated from the Sargasso Sea
aatgaaagaccctattgataatctatcaaataatttagttcctatggtagttgagcaatcttctcgtggagaaagagcttatgatatttattcaagattacttaaagaaagaataatttttttaactggaccaatagatgataatatagctagtttagtctgtgctcaattattgtttttagaatcagaaaatccaaaaaaagaaatat

SEQ ID NO: 264214 - DNA, 121 bp, Unknown
  Bacterial polypeptide expressing nucleotide sequence isolated from the Sargasso Sea
tatgaaagatttaccatcaaattatgttatccctacagtaattgaaaatactaataggggtgaaagagcctttgatatatattcaagacttttaaaggatagaattatatttttaggaaca

SEQ ID NO: 264215 - DNA, 367 bp, Unknown
  Bacterial polypeptide expressing nucleotide sequence isolated from the Sargasso Sea
ggacttggtatttatgatacaatgcaatacatcaaaccaggaataagcactttgtgcataggtcaagcagcaagcatgggttcatttttacttgcagctggcgctaaaggaaaaagattttcattgccaaattcaagaataatggttcatcaaccttcagctggttttcaaggacaagcgacagatattgaaattcatgctaatgaagttttatctttaaagaaaagattaaatgaaatttactcaaaacataccggaaaatcagttgatgaaattaaatcagcattagagagagataactttatgactcctgataatgcaaaaagttttggtcttatagataaagtggtagaaaaaagagaataag

SEQ ID NO: 264216 - DNA, 529 bp, Unknown
  Bacterial polypeptide expressing nucleotide sequence isolated from the Sargasso Sea
atttattcaagattattaaaagagagaattatttttttaacaggtcaaatcaatgacaatgttgcttctttagtaacagcacaacttttatttctagaagcagaagatccaaagaaagaaatttatttatatattaatagtcctggtggtcttgttactgctggtttaggaatttatgatacgatgcaatatgttaaacctgatatttctactttatgtattggtcaagctgcttcaatgggctcatttttactttcagctggaactaaaggaaaaagattttcattacccaattctagaataatggttcatcaaccatctgcaggttttcaaggacaagctacagatattgaaattcatgcaaacgaagttttatcattaaaaaaaagattgaatgaaatttattctaaacatacaggtaaatcagttgatgaaattaaatctgcattggaaagagataattttatgacagcagatgcagctaaatcttttggtttagtagatgaagtagtagaaaagagatcttaaa

SEQ ID NO: 264217 - DNA, 432 bp, Unknown
  Bacterial polypeptide expressing nucleotide sequence isolated from the Sargasso Sea
acccagataaggatatttatatgtatataaattcaccaggtggatcagtctatgatggattgggtatctttgatactatgcaacatgttaagcctgacattcatacagtatgtgtaggtttggcagctagtatgggagcgtttttgcttgcagcaggaactaaaggtaaaagaagcagtcttagacattcaagaataatgattcatcaaccccttggaggtgctagaggacaagccagtgacataaggattcaggcagatgaaattttgttcttaaaagagcgacttaatactgaattatcagaaagaactgggaaagattatgaaactgttagagaagacactgatagagacttttatatgtcacctaacgaagcagttgagtacggattaattgatcttgtattagataaaaaaccaattaaagtttaac

SEQ ID NO: 264218 - DNA, 131 bp, Unknown
  Bacterial polypeptide expressing nucleotide sequence isolated from the Sargasso Sea
catggcaatagcacacaataattcgtcactgaactcaatttcgattccgatggtggttgagcaaagttcgcgaggtgagaggtcgtacgacatttactcgcgtcttctaaaagagcgaattattttccttg

SEQ ID NO: 264219 - DNA, 322 bp, Unknown
  Bacterial polypeptide expressing nucleotide sequence isolated from the Sargasso Sea
atgaaagatccattagataatttcaccaataatcttattccaatggttgtggagcaatcatcaagaggtgaaagatcttatgacatctattcgagactgttaaaagaaagaattatttttttaactggccctattgacgacaacattgcaagtctaatatgtgcacaaatattatttttagagtctgaaaacccaaacaaagaaatttctttttatatcaattcgcctgggggcattgtttggtcaggattagcaatttacgatactatgcagtatgtttcttctaaaataatgactatttgtgttgggcaagcagcatcgg

SEQ ID NO: 264220 - DNA, 442 bp, Unknown
  Bacterial polypeptide expressing nucleotide sequence isolated from the Sargasso Sea
ttatttttagaagccgaggatcctaaaaaagaaatttacttatatattaatagccctggtggtttagttaccgctggattgggtatttatgatactatgcaatatattaaaccagagatctcaactttatgtataggacaggctgcttctatgggatcgtttcttctttcagctggaacaaagggtaaaagattctcattacctaattctcgaattatggtacatcaaccttcagcaggttttcagggccaagctactgatatagaaattcatgctaacgaagttttatctttaaaaaaaagattaaacgaaatttactcaaaacacacaggtaaatcagttgatgaaattaagaccgctttagaaagagataattttatgactgcagagggcgcaaaagcatttggtcttgtggacgaagttgttgaaaaaagatcataaa

SEQ ID NO: 264221 - DNA, 405 bp, Unknown
  Bacterial polypeptide expressing nucleotide sequence isolated from the Sargasso Sea
aatgaatgatatccagcaagctttaataccaatggtaattgagcaaacaccaagaggtgagagatcttttgatatatattctcgtttattaaaagaaagagtaatttttttgtcaggacctattgatgactatatttcaaatttagttgttgctcagcttttatttttggaatctgaaaatcctgaaaaagatatctcaatttatattaattcaccaggtggcagcatttctgctggacttgctatttacgataccatgcaatttgttaaaccttcaatttctacgatgtgtattgggcaggctgcgagcatgggagctttacttcttgctggtggtgatgaaaagaaaagatttgctttacctaattctagaatcatgattcatcagcctttaggaggtttcaa

SEQ ID NO: 264222 - DNA, 169 bp, Unknown
  Bacterial polypeptide expressing nucleotide sequence isolated from the Sargasso Sea
gcccgcgagatcctgaaagtgaaagggcggatgaatgaactgatggcacaccatacgggtcaatcccttgcgcagattgagaacgacaccgagcgtgaccgtttcttgtcagcctccgaagcggtggaatacggcctggtcgattccattttgacccatcgtaattgat

SEQ ID NO: 264223 - DNA, 241 bp, Unknown
  Bacterial polypeptide expressing nucleotide sequence isolated from the Sargasso Sea
tccaaattcaagaattatggttcatcaaccatctgcgggctttcaaggacaggcaactgatattgaaattcatgctaatgaagtgctgtccttaaaaaaaagattgaacgaaatatattctaaacatactggcaaatctgtagatgaaattaaaactgctttagaaagagataattttatgactgcagactcagctaaatcttttggacttatagactctgtagtagagaaaagatcttag

SEQ ID NO: 264224 - DNA, 115 bp, Unknown
  Bacterial polypeptide expressing nucleotide sequence isolated from the Sargasso Sea
tatgagcaaaagtgaaatacatgcattaaatttggttccgatggtagttgaacagacatcgaggggcgagagggcctatgatatttattctcgtcttttaaaggagcgtgtaatt

SEQ ID NO: 264225 - DNA, 158 bp, Unknown
  Bacterial polypeptide expressing nucleotide sequence isolated from the Sargasso Sea
tatggtagttgaacaatcaagtagaggagaaagagcatacgacatatattcaagattgcttaaagaaagaatagtatttgtagtaggacctattaacgacacaatagcttcattggttacggcacaactattatttttggagtcagaagatccaaaga

SEQ ID NO: 264226 - DNA, 310 bp, Unknown
  Bacterial polypeptide expressing nucleotide sequence isolated from the Sargasso Sea
tatgagtcgcgaatttgaagaaaaaatgaatagccttatccctatggttgttgagcagacaagcaaaggagagagagcttacgacatctattccagactattaaaggagagaatagtatttttagtaggcccagttaatgatgctgtagcatcacttgttactgctcaattattatttttggagtcagaaaatcctaaaaaagaaatcaatttttatatcaatagtcctggtggtttggttactgctggattaggaatttatgatacaatgcaatatataaattcaccagtttcaacattatgtattggt

SEQ ID NO: 264227 - DNA, 169 bp, Unknown
  Bacterial polypeptide expressing nucleotide sequence isolated from the Sargasso Sea
atgacatcaaaacttaatgaacacatgaacaatctaatcccaatggttgtcgaacaatcaagcagaggtgagagagcgtatgatatttattcaagattactaaaagagagaatagtatttgtcgttggtccaataaacgataatgtagcttcattagttactgctcaaa

SEQ ID NO: 264228 - DNA, 292 bp, Unknown
  Bacterial polypeptide expressing nucleotide sequence isolated from the Sargasso Sea
atgccaataggaactccaagtgtgccttacagacttccaggaagtcaatatgaaaggtgggttgatatatatacaagattaggcgttgaaagaattctttttcttggacaggaagtgaatgatggtattgctaatagccttgttgcacaaatgctttatctagattctgatgataattccaaacctatctatttatatataaacagcccaggaggatcagtaactgctggcttggctatatatgacactattaaatacgttaaaagtgatgtagtaaccatatgcgtagggc

SEQ ID NO: 264229 - DNA, 595 bp, Unknown
  Bacterial polypeptide expressing nucleotide sequence isolated from the Sargasso Sea
atgaacattcccacccaagcatctgacgatatttcccgaatagcggggcaatttaatatctattcacaattattaagaaaccgaattgtcatgctttgggaccaagttgatgatgagattgccaaggagatcaccgcacaactgctgtatctagaaggtgaggattcagaaaaagatatttggctatatatcaattctccaggaggttcggtgaccgctgggatggcaatctacgatactatgcagttaataaaaccagacgtttctactttgtgtttaggtttaggagcttctatggggcaattccttctcggagcaggagctcaaggaaagcgatattctctcaaacatgcccgcataatgatgcatcagccacttggaggtattcaaggtcaagcatcagacatcgcaatccaagcagagcaacttagctatattaagaaactaatggcggaactaatagctgggcacaccggacaaacagtagaacaggtacaagctgattccgaccgagaccgctggttcactgctgaagaagcaaaggaatacggaattgtcgatcacgttatcacgagtcgtggagaggttgactaga

SEQ ID NO: 264230 - DNA, 281 bp, Unknown
  Bacterial polypeptide expressing nucleotide sequence isolated from the Sargasso Sea
tatggtagttgagcaatctacccgaggtgaaagagcttatgatatttattcaagactattaaaagagagaatagtttttgttgttggacctattaacgatagtgttgcctcagttgttactgctcaattgttatttcttgagtctgaagatccaaaaaaagaaatatctctttatataaatagtccaggtggtttagtaacagctggtctgggtatttatgatacaatgcaatatattaaaccagatgtctcaactttatgtataggacaagctgcaagca

SEQ ID NO: 264231 - DNA, 218 bp, Unknown
  Bacterial polypeptide expressing nucleotide sequence isolated from the Sargasso Sea
aatgaaagatccaatagataatttaactaataatttaatacctatggtagtagagcaatcatcaagaggtgaaagagcatatgatatttattctagacttttaaaagaaagaattatttttttaacaggtccaatagatgataatatcgcaagcttaatttgtgctccattattgtttctagaatcagaaaacccaaaaaaagaaatctctttttata

SEQ ID NO: 264232 - DNA, 613 bp, Unknown
  Bacterial polypeptide expressing nucleotide sequence isolated from the Sargasso Sea
atgacaaataaaatatcagaacacatgagcacgttagttcctatggttgttgaacaatctagtaaaggggaaagagcatatgatatttactcgagattattaaaagagagaataatttttttaacagggcaaattaacgataatgttgcatctctagttactgctcaacttttattcttagaggcagaagatccaaaaaaagaaatttatttatatataaatagtccaggaggactggtaacagccggtcttggtatttatgatactatgcaatatgtaaagcctgatatttccactttatgcatcggtcaagcggcatcaatgggatcatttttactttcagctggaaaaaaaggtaaaagattttcattaccaaactctagaataatggtccaccaaccatctgctggttttcaaggacaagcaactgatattgagattcatgcaaatgaagttttatctttaaaaaaaagattgaacgaaatttattcaaaacatacaggtaagtctgtagacgaaatcaaatctgctttagaaagagataattttatgacagctgatgcggcaaagtcatttggcttgatagatgaagtggtagaaaaaagatcttaat

SEQ ID NO: 264233 - DNA, 472 bp, Unknown
  Bacterial polypeptide expressing nucleotide sequence isolated from the Sargasso Sea
aatgtagcaactttagttactgctcagcttttatttttagaatcagaaaatccaaaaaaagagatatctttttatattaatagtccaggaggtttagttactgctggtttaggaatttatgacaccatgcagtatattaaaccaccagtttctaccttatgtattggtcaagcttcttctatgggatcatttttactagcagcgggagaaaaaggaaaaagattttcacttcctaattcaagaattatggtacaccaaccttcagctggttatcaaggtcaagcaacagatatagaaattcatgcaaaagagattttagcacttaaagaaagattaaataaaatttattccaagcatacaaaaaaaagtatggaagagattaaaaaagctttagaaagagataatttcatgacaccaagcgaggcaaaagattttggtttaattgatgctgttgtggaaaaaagatcttaag

SEQ ID NO: 264234 - DNA, 467 bp, Unknown
  Bacterial polypeptide expressing nucleotide sequence isolated from the Sargasso Sea
ggcttcactaattactgcacagttactttttctagagtctgaaaatccaaaaaaagaaatttttttatacataaatagtccaggtggacttgttacagctggaatgggaatttatgacactatgcaatacatcaaatcagaagtctctactttatgtattgggcaagcttgttcaatgggatcatttttattagctgctggagaaaaaggtaaaagattttcattaccaaattctagaataatggttcatcaaccttcagctggttttcaaggacaggccactgatatagaaatacatgctaatgaagttttatctttaaaaaaaagattaaatgaaatttactcgaaacacactggccaatcagttgatgaaattaaacttgctcttgaaagagataattttatgagcccagataatgcaaaatcttttggattaatagataaagtagttgataaaagaatttaaa

SEQ ID NO: 264235 - DNA, 541 bp, Unknown
  Bacterial polypeptide expressing nucleotide sequence isolated from the Sargasso Sea
atgagcaatcttgtaccaatggttgttgagcaatctagcaaaggtgaaagagcttatgatatttattcaagactgttaaaagaaagaattatttttttaacaggtcaaattaatgacaatgttgcttcgttagttactgctcaattattatttttagaggctgaagatccaaaaaaagaaatttacttatacattaatagcccaggaggtttggttacagcaggacttggcatttacgatacaatgcaatatgtgaaaccagatatttctactttatgtattggtcaagcagcttctatgggttcttttttgcttgctgcaggaactaaaggaaaaagattttcattaccaaattcaagaataatggttcatcaaccatccgcaggttttcaaggtcaggcaactgatattgaaattcatgctaatgaagttttgtctttaaagaaaagacttaatgaaatttattcaaagcatactggaaaaagtgttgaggaaataaaatctgctcttgaaagagataatttcagacagcagatgtcgc

SEQ ID NO: 264236 - DNA, 433 bp, Unknown
  Bacterial polypeptide expressing nucleotide sequence isolated from the Sargasso Sea
ttggagtctgaagatcccaaaaaagaaatttctctttatataaacagccccggtggtttggtaacagccggtttaggaatttatgatactatgcaatatattaaacctgatgtatcaaccttatgtattggacaagcagctagcatgggttctttcttgttagcagcaggcacaaaaggaaaaagatattctcttccaaattcaagaattatggttcaccagccttcagcaggatttcaaggacaggcaacagatatagaaattcatgctaatgaagttttatctttaaaaaaaagattaaacgaaatttattctaagcatacaagtaaatctgttgatgaaattaaatctgctcttgaaagagataattttatgactccggataacgcaaaagattttggtcttatagacaaagtagtggttaatagataaa

SEQ ID NO: 264237 - DNA, 370 bp, Unknown
  Bacterial polypeptide expressing nucleotide sequence isolated from the Sargasso Sea
ctgggattaggtatttacgacactatgcaatacataaattctccagtatccactttgtgcattggtcaagcttcttctatgggatcttttttattagctgcgggagaaaaagggaaaagattttcattgccaaactctagaataatggttcaccaaccttcagccggttaccaaggtcaagcaactgatatacaaattcatgcaaaggaaatactttccttaaaagatagattaaataaaatttacgccaagcatacgggcaaatctatcgatgaaatttcaagcgcattagagagagacaattttatgactcctgatgaagctaaaaaatttggattaatagactctgtggtagacaagaggaaataat

SEQ ID NO: 264238 - DNA, 304 bp, Unknown
  Bacterial polypeptide expressing nucleotide sequence isolated from the Sargasso Sea
ggtcagctgcagtatgggatcatttttattagcagctggaactaaaggtaaaagatgttcattacccaattcaagaataatggttcatcaaccttcggcaggatttcaaggacaggctacagatatagaaattcatgcaaatgaagttttgtcgttaaaaaatagattaaacgaactttattccaaacatacaggcaaaggtgttgatgaaataaaatcagctcttgaaagagataattttatgactccaaaaaatgcaaaagattttggtttaatagataaagtggtagagaagagagaataa

SEQ ID NO: 264239 - DNA, 523 bp, Unknown
  Bacterial polypeptide expressing nucleotide sequence isolated from the Sargasso Sea
tggcgtcgagcgaatcctgttcctaggtggtgaagtcaatgacggcgtcgccaatgccttggtggctcaaatgctctacctcgattccgatgacagcagcaagccgatctacctgtacatcaactcaccaggcggatcggtcaccgccggcctggccatctacgacacgatccagtacatcaagtccgatgtggtcaccatctgtgtgggtctggccgcttcgatgggtgccttcctgctagcagctggcaccaagggcaaacgggtggccctgccccacagccggatcatgattcaccagcccttgggcggtaccgctcagcgccaggccagcgacatcgagatcgaagcgcgcgaaatcctgcgcatgaaagatcagctcaacaaccagctcgctgagatgagcggccagaccatcgaaaaaatcaccaaggacaccgaccgcgactatttcctcagcgcagaggatgccaaggcctatggcctgatcgatcgggtgatcagccatcccaacgaggcctaa

SEQ ID NO: 264240 - DNA, 556 bp, Unknown
  Bacterial polypeptide expressing nucleotide sequence isolated from the Sargasso Sea
caaacaccaagaggtgaaagggcatttgatatatactctcgactcttgaaagagcgcataatatttgttgtagggccaatcgatgatcatatggcaaatttagttgtagctcagcttttgtttctagaatctgaaaatcctaccaaagaaattaatctttatgtgaattcgcctggtggttcagttacagcaggattatctgtgtatgatactatgcagttcattaaacccaatataagtacactgtgtataggccaggctgctagtatgggtgcaatattacttgctggaggagcgaagaagaagcgatttgctttgcctaattctagggtaatgattcatcagccattgggtagttttcaaggtcaagcaactgattttgatattcaagctaaagagatactgagtatacgctcgcgattaaatgagatactttcaaagcataccggtcaaactcttaaaaaaatacagaatgataccgaaagagacaattttatgacgtcttcagatgcattgaagtacggaataattgacgaaatattagaatctcgttaat

SEQ ID NO: 264241 - DNA, 380 bp, Unknown
  Bacterial polypeptide expressing nucleotide sequence isolated from the Sargasso Sea
ctatgacaccatgcagttcatcaagccggatgtcagcacgatctgcgtgggccaggcggccagcatggggtctttgttgttagcgggcggtaaggaaggaaaacgtcattgcttgccccattcccgaataatgattcatcagcccagcggtggttttcaggggcaggcctccgacatcgatatccacgctaaagaagtccttaagctacgcgagcgactcaatcagattatggcgaaacacacaggacaatccgttgagacgattgagaaagacagcgaccgggacaagtttatggacggagaaaccgccgtcgaatacggtctaattgacacgattcttgaaaagagaatcgaaaaggcgccgtcaggatcgaagtaga

SEQ ID NO: 264242 - DNA, 601 bp, Unknown
  Bacterial polypeptide expressing nucleotide sequence isolated from the Sargasso Sea
gatgaataatataactaataatttggtaccgatggtagtcgaatcaacttctagaggcgagagagcatttgatatatattcaaggcttcttaaggaaagaattattttcttaactggacccatcgatgataacttatctaatttaatagtcgctcagcttttatttttggagtctgaagatcctaaagctgatatctctctttatatcaattccccaggtggtagcgtcacagctggcttatctatattagatactatgaattttattaagcctgctgttagtacactatgtattggacaggcagctagtatgggcgcagttcttttatctggaggtgacaaaaaaaagagattctgtctatctaattcaagagttatgattcaccagcctctaggatcatttcaaggacaagcaactgactttgatattcaagcaaaagaaatattgagtattagaaaaagacttaatcaaatcttatcaaattcaactggacaaaccattaaaaaaatagagtctgatacagaaagagacaactttatgagtccagaagaagctaagaaatatggcttgattgacgatattcttcaaacaagaaaataa

SEQ ID NO: 264243 - DNA, 566 bp, Unknown
  Bacterial polypeptide expressing nucleotide sequence isolated from the Sargasso Sea
tgagcaatcatctcgcggagaaagagcttatgatatttactctagattacttaaagaaagaattatttttttaacaggcccaatagatgataatattgcaagcttgatttgtgctcaattacttttccttgagtctgaaaatccaaacaaagaaatctctttttatattaattcgcctggtggcatagtttggtctggtcttgcgatttatgatacaatgcaatatatttcacctaaaataatgactatttgtattggtcaggcagcttctgcaggctctttgttgcttactgccggggcagaaggaatgaggttttctttacctaactcaagaattatggttcatcaacctagcggaggatatcaaggacaagttacagatatagaaatacaaaccaatgaaattaaaaagactaaagagagattgaatcaaatctactcaaagcatactagaaagaaaataaaagaaatagaatcaattatggaaagagataaatatttttcacctgatgaagcaattaaattcggtttgatcgacaaaattgtggaaagtagaaaagcctagt

SEQ ID NO: 264244 - DNA, 613 bp, Unknown
  Bacterial polypeptide expressing nucleotide sequence isolated from the Sargasso Sea
aatgaaagacccaatagataatttgacaaataatttaattccaatggtagtagagcaatcatcaagaggtgagagagcatatgacatttattctagattattaaaagaaaggataattttcttaacaggaccaatagatgataatattgcgagtctaatttgtgcccaattgctatttttagaatcagaaaatccaaaaaaagaaatttctttttatatcaattctcctggtgggatagtctggtcaggtttggcaatgtatgatacaatgcaatacatatcatccaaaattatgacaatatgtattggtcaagcagcttcagctgggtcattgttactaaccgctggagaagataatatgagatattctttacctaattctagaattatgatccatcaaccaagtggtgggtttcaaggacaagtaacagatattgaaatacaaacaaaagaaattattaaaactaaaaaaagattaaatgaaatttatgcaaaacattcaggaaaagatataaaagaagttgaggaaattatggaaagagataaattcttttctcctcaagaggcaattaaatttggattaatagataaaattgtagaaaatagaaaataa

SEQ ID NO: 264245 - DNA, 427 bp, Unknown
  Bacterial polypeptide expressing nucleotide sequence isolated from the Sargasso Sea
atgaaagacatgcaatcagctctaatcccaatggtaatagagcaaactccaagaggagagagatcttttgatatatattctcgtcttttaaaagaaagagttatcttcttatctggaccaattgatgattatatttctaatttagttgtagctcagttactatttttagaatctgagaatcctgaaaaagatatatctatttatattaattctccaggtggaagcatctctgccggtcttgcgatatacgatactatgcaatttataaaaccatccatatcaactttatgtatcggtcaagctgctagtatgggtgcgttattattagctggtggagataagaaaaaaagattcgccttacctaattcaagaataatgattcaccaacctttaggcggatttcaaggtcaggcttctgattttgaaa

SEQ ID NO: 264246 - DNA, 613 bp, Unknown
  Bacterial polypeptide expressing nucleotide sequence isolated from the Sargasso Sea
tatgacaacaaagatatcagaacacatgaatactttaattcctatggttgttgaacaatcaagcaagggggaaagagcatatgacatctattctagacttttaaaagaaagaataatttttttaactggaccaattaatgataatgtagcttcgcttgcgacagctcaaatgttgtttttagaatctgagaattcaaaaaaagaaatatatttgtatattaacagcccaggcggtttagttacagccggcttaggagtttatgatacaatgcaatatattaagccacccgtatcaaccttgtgcataggtcaagcagcatcaatgggttctttcttactagcagctggagagaaaggaaaacggttctctctgcctaattcaagaataatggttcatcaaccatcagcaggttttcaaggacaagctacagatattgaaattcatgccaatgaagtacttgcattaaaaaaaagattaaatgaaatttatgcaaaacatacaggtcaatcaactgaagatattaaaaaggcattagaaagagataattttatgactcctgaaaatgcaaaagaatttggtttaatcgaccaagtagtagaaaaaaggatttaa

SEQ ID NO: 264247 - DNA, 604 bp, Unknown
  Bacterial polypeptide expressing nucleotide sequence isolated from the Sargasso Sea
tctgattccaatggtggttgagcaaactcccagaggagaaagagcgtttgatattttctctcgtctgcttaaagacaatgtcatattcgcagttggcccaatcgaggatcacatggcaaatttgatcattgcacagatgttatttcttgaaagtgagaatcccagtaaggacatttacctatatataaattcgccaggcggatcgatcacatcaggattatccatttatgacaccatgcaattcatcaaacctgatgtgagtacaatttgcgttggtcaagcagcaagtatgggagccatcctgctagcaggtggagctgaatcgaagcgtttttccctgcccaattcaaggatgatgattcatcaaccaatttctgggtttcaaggtcaagccagtgacattgatatccatgcgaaagaggttcttaagatgaaatcattggtcaattcaatattatcgaaacacacaggcaagactgaaaaacaaattgcaaaagacacagacagggataacttcatggatgcagattcagcattaaaatatggattgattgatcaaatccttaacgaaagaacagaggctctaaatcaagatggcaggtaa

SEQ ID NO: 264248 - DNA, 391 bp, Unknown
  Bacterial polypeptide expressing nucleotide sequence isolated from the Sargasso Sea
gatgactaaaatatttaataatctagttcccatggtcgttgagtctacatcaagaggagagcgagcatttgatatatattcaaggctcttgaaagagagaataatattccttactggtccaatagatgacaacttgtctaatttagtagtagctcagctcttatttcttgaatctgaagatccaaaggctgatatttctctgtacatcaactcacccggagggagtgtgaccgctggcttatcgattcttgatacgatgaatttcatcaggccgtcagtgagcacgctttgtgtaggtcaagcagcaagcatgggagctgtccttctaagtgggggagaaaagaaaaaaagattctgtctatcgaatgccagagtaatgattcatcaacca

SEQ ID NO: 264249 - DNA, 514 bp, Unknown
  Bacterial polypeptide expressing nucleotide sequence isolated from the Sargasso Sea
aatgagtcgcgattttgaagaaaaaatgaatagtttaatcccaatggttgttgagcagacaagcaaaggggagagagcttacgatatttattcaaggcttttaaaagaaagaattgtttttttagttggaccggttaatgacgcagtagcatccttagtaactgctcaacttttatttcttgagtcagaaaatcctaataaagaaattaatttttacataaacagtccaggggggttagtaacagctggattaggcatctatgatactatgcaatatattaactcacctgtttcaacgttgtgtataggccaagcatcttccatgggatcatttttattagctgctggagaaaaaggcaaacggtactctttgcctaattctagaattatggttcaccagccttctgcaggatttcaaggtcaggcaacagacattcaaattcacgctaaagaaattttatctttaaaagaaagacttaataatatttattctaaacatactggaaaatctgtg

SEQ ID NO: 264250 - DNA, 593 bp, Unknown
  Bacterial polypeptide expressing nucleotide sequence isolated from the Sargasso Sea
gattccaatagttatagaagaatctggaagaggtgaaagagcctttgatatttattcaaggcttttaagggaaagaattgtttttttgggtgaacctgttactagtgattctgcaaatcgtattgtcgctcaactccttttcttagaggctgacgatcctgagaaagatatttttctctatataaattctccaggtggatctgtttatgacgggtttggcatttttgacacaatgcaacatgtaaagcctgatattcataccgtttgcgttggccttgcagcaagtatgggagcttttcttctttgtgcaggagcaaaaggaaagagaagcagtttgcttcattcaagaataatgattcatcagccgcttggtggcgcaagaggacaagcaagtgatattaggattcaagctgatgaaatattgtttattaaggataaattaaacaaagaattatctgaaagaacgggacaacctattgaaagaataagtgaggatacagatagggatttttatatgtctccatcagaagcagttgaatatggcattattgataatgtattcaataaaaggcctataaactcagtcagataat

SEQ ID NO: 264251 - DNA, 226 bp, Unknown
  Bacterial polypeptide expressing nucleotide sequence isolated from the Sargasso Sea
catggccgcgctggttcctatcgttatcgagcagtcgaaccgtggcgagcgcagcttcgacattttttcgcgcctgttgcgtgagcggatcatcttcgtgaccggccaggtcgaggatcatatggcctcgctgattgtcgcccagttgctgttcctcgaatcggaaaatccgaagaaggacatctggatgtacatcaactcgcccggtggcgtggtgacggcgggc

SEQ ID NO: 264252 - DNA, 589 bp, Unknown
  Bacterial polypeptide expressing nucleotide sequence isolated from the Sargasso Sea
tatgatccccttagttttagaagaatctggcggaagtgaaagagttttcgatatctattcgagactactaagagagagaattatttttttgggggaacaagttactagtgaaactgctaataggattgtcgctcaattgttattcctcgaagcggaagaccccgagaaagatatttatatgtatataaattcaccaggcggatctgtatacgatggtctagggatctttgatacgatgcaacatgttaagcctgatattcatacagtttgtgtcggtttagcagctagtatgggtgcttttttgttggcagcaggtactaaagggaaaagaagcagtttaagacattcgagaataatgatacatcaaccacttggtggtgctagaggtcaggctagtgacattagaattcaagcagatgaaatcctttttttaaaagaaagacttaatactgaattatctgaaagaacagggaaagattatgaaactattaaagaagataccgatagagatttttatatgtctccaaaggaagctgttgagtatggacttattgatctagtattagacaagaaacctattaaagtctaa

SEQ ID NO: 264253 - DNA, 465 bp, Unknown
  Bacterial polypeptide expressing nucleotide sequence isolated from the Sargasso Sea
ctcagcttctttttttggaggctgagaatccgagtaaagatatatctatgtatatcaattcgccagggggtgtggttacatcgggtttgtctatttatgatacaatgcaatatattcgaccaaaaatatcaacgctttgcgtagggcaggctgcgtcgatggggtcgcttttgttggcagctggagagtcaggtatgaggttttctttaccaaatagtaggatcatggttcatcaaccctctggtggctttcagggccaggcctctgatattgagttgcaggctaaggagatcttggagttgaagaaaagattgaatttgatatacgttaaacattgtggtcaaaagttagataaagtagaggcaagcttagatagagataactttatgacgcctgatgaagcaaaaaagtggggcttgattgatgaaattatagaaaaacgtctagaagagaaggaagagtaat

SEQ ID NO: 264254 - DNA, 613 bp, Unknown
  Bacterial polypeptide expressing nucleotide sequence isolated from the Sargasso Sea
atgactaataaaatacctgaacatcttaataaccttattcctatggttgttgaacaatcgagtaggggagagagagcttacgatatttattctagattattaaaagaaagaattgtatttgttgtgggacctattaatgacacgatagcatctttagttactgcacaacttttgtttttagagtcagaagatccaaaaaaagaaatatctttatatataaatagtcctggaggtttagttactgctggtctaggaatttatgacacaatgcaatatgttaaacctgaagtaacaacattatgcataggacaagctgcaagcatgggttcatttttgttagcagctggagcaaaaggtaaaagattttctctacccaattctagaattatggttcaccagccatcagcaggctttcaaggtcaggccacagatatagaaattcatgcaaatgaagttttatctttaaaaaaaagattgaatgaaatttattcaaaacatactggaaaatcagttgatgaaataaaattagctttagaaagagacaactttatgactccggaaaatgcaaaagattttggattgatagataaaatagtagacaaaagagattaaa

SEQ ID NO: 264255 - DNA, 613 bp, Unknown
  Bacterial polypeptide expressing nucleotide sequence isolated from the Sargasso Sea
atgtctattaaaattccagaacaattaaacacccttatccctatggttgttgaacaatctagtagaggagaaagagcatatgacatttattctagactgcttaaagagagaattgtttttgtagttggtcctataaatgacgcagttgcgtcattagttactgcgcaattattatttttagaatcagaagatcctaaaaaagaaatctctttatatataaatagtcctggtggacttgtaacagctggactaggtatttatgatacaatgcaatacattaaaccagaaataagtactttgtgtataggtcaagcagcaagcatgggttcatttttactggcagctggcactaaaggaaaaagattttcattgccaaattcaagaataatggttcatcaaccttctgctggttttcaaggacaagcgacagatattgaaattcacgctaatgaagttttatctctaaagaaaagattaaatgaaatttactcaaaacataccggaaaatcagttgatgaaattaaatcagcattagagagagataactttatgactcctgataatgcaaaaagttttggtcttatagataaagtggtagaaaaaagagaataag

SEQ ID NO: 264256 - DNA, 297 bp, Unknown
  Bacterial polypeptide expressing nucleotide sequence isolated from the Sargasso Sea
tatgagtcgtgaatttgaagaaaaaatgaatagccttattcctatggttgttgagcaaacaagcaagggtgaaagagcttatgatatttattctagacttttaaaggagagaattgtttttttagtaggtccagttaatgatgcggtagcatctttagtaactgcacaattgttatttttagagtcagaaaatcccaataaagaaattaatttttatattaatagtcctggaggattagtgacggctggattaggaatttatgacacaatgcaatatataaattctcctgtttctac

SEQ ID NO: 264257 - DNA, 619 bp, Unknown
  Bacterial polypeptide expressing nucleotide sequence isolated from the Sargasso Sea
atgaaaaaagagccttcaaattatgttgtacctacagttattgagaacacaaatagaggcgaaagagctttcgatatttattcaaggcttttaaaagatagaataatatttcttggtactcctattgatgatggagtcgcaaacctaattatggcacagcttttacacctagagtcagaagatcctgataaagatatctacgtatatataaactctccaggtggctcaattacatccttgtttgcaatttatgacacaatgaaatacattaagccagacgttgcaacagtctgtatgggacttgctgcatcagctggtgctgttattttagctggtggaaccccaggtaaaagatactcacttcctcatgcaagaattatgttgcaccaaccagcaggaggggctgaaggaacctctaaagacattgaaattcaagcaaaattgattacagacatgaggaatcaaattaatggtcttttggcagattttactaagaaagacattgagcaaatttcagtcgatacagatagagatttttggatgaccgcgcaagaagcgttggaatacggtatagtagatgaagtactaactcaaagggagttagcagacaaaaaataac

SEQ ID NO: 264258 - DNA, 454 bp, Unknown
  Bacterial polypeptide expressing nucleotide sequence isolated from the Sargasso Sea
catgccaataggaactccaagcgtgccttatagacttcccggaagtcaatacgaaagatgggttgacatttatacaagattaggtgttgaaagaatactttttcttggacaagaagtgaatgatggtattgctaatagccttgttgcacaaatgctttatctagattctgatgacaattccaaacccatctatctatatataaatagcccaggaggatcagtaactgctggcttggctatatatgacactatcaaatacgtaaaaagtgatgtggtaaccatttgtgtaggcctcgcagcctcaatgggggcattcctattggccgctggcacaaaaggtaaaagagttgctttgcctcatagcagaatcatgattcatcaacccttaggaggaacatctcaacgccaagcaagtgatattgaaatagaagcccaaggaaatttaagaataaag

SEQ ID NO: 264259 - DNA, 592 bp, Unknown
  Bacterial polypeptide expressing nucleotide sequence isolated from the Sargasso Sea
atgacttcaaaaataccagagcacttaaatacacttattccaatggttgttgaacaatccagtagaggagaaagagcttacgatatttattcacgattattgaaagagagaattgtgtttatagtaggagcaattaatgattcagttgcatcattagtgacagcgcaacttttgtttcttgagtctgaggacccaaaaaaggaaatttctttatacataaatagccctggaggacttgttacctcagggttggggatttatgacaccatacaatacattaaacctcaagtgaccacactatgcattggacaagcagctagcatgggatcattcttgttggcagcaggagcagaaggtaagagattttcattaccaaattcaagaattatggtccatcaaccctctgcaggttttcaaggccaagttacagatattgaaatacatgctaatgaagtattggctttaaaaaaaagattaaatgaaatttattctaaacatactggaaaatcagttgaagagattaaagaggcacttgagagagataattttatgacccccagaaaatgcaaaagattttggattaatagataaa

SEQ ID NO: 264260 - DNA, 572 bp, Unknown
  Bacterial polypeptide expressing nucleotide sequence isolated from the Sargasso Sea
tatggtagttgaacaatccagcaaaggtgaaagagcttatgatatttattctagacttttaaaagaaagaattatttttttaacaggtcagataaatgataatgtagcatcattggttaccgctcaattgttatttttggaagctgaaaatcctaaaaaagaaatatatttatatattaatagtcctggaggattagttacagcaggcctaggtatttatgatactatgcaatatataaaaccagatatttcaactttgtgtattggtcaggctgcatccatgggctcttttttactggcggctggaactaaaggaaaaagattttctttaccaaattctagaataatggttcatcaaccatccgcaggttatcaaggtcaagcaacagatatagaaattcatgcgaaagaagttttgtctctaaaaataagattgaatgaaatttattcaaaacacacaggtaaaagtgttgatgaaattaaatctgccttagaaagggataattttatgaccgcagatgtcgcacaatcatttggtctgatagatgaggtagtagaaaaaagatcttaat

SEQ ID NO: 264261 - DNA, 289 bp, Unknown
  Bacterial polypeptide expressing nucleotide sequence isolated from the Sargasso Sea
gggatcttttctattatctgctggatcaaaaggtaaaagattttctctccctaattcaagaattatggttcatcaaccttccgctggttttcaaggtcaagctacagatatagaaattcatgccaatgaagttttatctttaaaaaaaagattaaatgaaatttattctaagcacacaaataaatcagttgaagaaataaaatctgctcttgaaagagataactttatgactccagaaaatgctaaagagtttggtttaatagataaagtagtagttaacagagaatag

SEQ ID NO: 264262 - DNA, 341 bp, Unknown
  Bacterial polypeptide expressing nucleotide sequence isolated from the Sargasso Sea
aatgtgcgttggtcaagcggcttcaatgggttctcttttgctggccgccggtgagcagggtatgaggctctgtttacctaatagcagagttatggtccatcagccttcgggaggctttcagggtcaagcatctgatattgctcttcacgctcaagaaatattggatcttaaaaagagattaaatatgatttatgtaaaacatactaatcaaaagataagtgctgtagaaaaggctttagatcgagataactttatgaccccggaacaatctcttgaatggggtatcattgataagataattgatcaacgagaacccgatgtggcagataaagtggaataag

SEQ ID NO: 264263 - DNA, 505 bp, Unknown
  Bacterial polypeptide expressing nucleotide sequence isolated from the Sargasso Sea
atgaatattgatgaaaaagtacttaaccaattggttccaatggttgtggaacaaacaggccgttcagaacgtgcgtttgacatattttctcgattacttaaagagagaatagtttttttgggcacaccaataaatgactcaatggcttctctcatcattgcccagctgctctttcttgaggctgaggattctgaaaaagatattaatttatacataaattctccaggtggggtaatcacatcaggaatgggaatatacgacactatgcaatatattaagcctgatgtagcaaccatatgtttaggacaggctgctagcatgggtgcttttttgcttgctggtggtgctaaggggaaaagatcggcattgcccaattccaggattatgattcatcagcctatggggggggctgaaggccaggccacagacattgagattcaggcagaggagatactaaggatgaaaaaacaattgaattctattcttgctaagaactcaggtcaga

SEQ ID NO: 264264 - DNA, 628 bp, Unknown
  Bacterial polypeptide expressing nucleotide sequence isolated from the Sargasso Sea
aatgaataatgttggagatccgcatatgaatacgctaattccaatggtggttgaacagactgccagaggagaaagatcatatgatatctattcgagactacttaaagaaaggattattttcgtgtcgggtcctgttcacgatgcaatggcgacggtgttggtagcgcagctactttttcttgaagcagaaaaccctaagaaagatatatcgatgtacattaactctcctggcggtgttgtgacagctgggctatctatatacgatacaatgcaatatatcaggcctaagatttcgacattgtgtgttggtcaggcagcttcaatgggctctctgcttctagcagctggcgagcctggcatgcgttttgctcttcctaatagtcgaattatggtgcatcagccgtctggagggttccaagggcaggcatcggatatagagttgcaagcaaaagaaatcgtagagctaaaaaaacgattaaatctaatatatgttaaacattgtgatcaaaagttagaaaaagtagagcaaagtctggatcgagataacttcatgacgccagatgatgcagtgaaatggggattgatagacgaaataatagaaaaacgtttggagagcggcgaggattga

SEQ ID NO: 264265 - DNA, 613 bp, Unknown
  Bacterial polypeptide expressing nucleotide sequence isolated from the Sargasso Sea
atgaaagatccaatagataatttaactaataatttaatacctatggtagtagagcagtcgtcaagaggtgagagagcatatgatatttattctagacttttaaaagaaagaattatttttttaacaggaccaattgatgataatattgcaagtttaatttgtgctcaattactattcttggaatcagaaaatccaaaaaaagaaatctctttttatataaattctcctggtgggatagtgtggtctggtttggcaatgtatgatacaatgcaatatatatcatcaaaaattatgacaatatgtattggtcaagcagcttcagcaggttcattattattaactgctggagaaaatgatatgagatattctctcccaaattctagaattatgatgcatcaaccaagtggaggatatcaagggcaagtaacagatattgaaattcaaacaaaagaaatcattaaaactaaaaaaagattaaatgaaatttatgcaaaacattcaggaaaagacataaaagaagttgcagaaattatggaaagagataaatatttttctcctcaggaggcaattaaatttggtttaattgataaaattgttgaaaatagaaaataat

SEQ ID NO: 264266 - DNA, 535 bp, Unknown
  Bacterial polypeptide expressing nucleotide sequence isolated from the Sargasso Sea
ttatgatatttattcaagactattaaaagaacgaataatttttttaacaggtcaaataaatgataatgttgcatctcttgtaactgctcaattattatttttagaggcagaagatccaaaaaaagaaatctatttatatatcaatagtccaggaggattagtgacatcaggtttaggtatttatgacactatgcaatatatcaaaccagatgtctcaactttatgtatagggcaagctgcttcaatgggatcattcttattatctgcaggcacaaaaggaaaaagattttcattaccaaactctagaataatggtccaccaaccttctgctggatttcaaggtcaagctactgatattgaaattcatgctaatgaagttttatcattaaaaaaaagattgaatgaaatttattcaaagcacactggtaaatcagttgaagaaattaaaactgcattagagagagataactttatgacagccgagtccgcaaaatcttttggcctagtagacgaagtagtagaaaaacgatcttaa

SEQ ID NO: 264267 - DNA, 406 bp, Unknown
  Bacterial polypeptide expressing nucleotide sequence isolated from the Sargasso Sea
atgataacaaaattgacagagcacatgagtaatcttgtaccaatggttgttgaacaatctagcaagggtgagagggcctatgatatttattccagacttcttaaagagagaattatttttttaactggtcaaattaatgacaacgtggcatcagtggttacagctcaattattatttttagaggctgaagatccaaaaaaagaaatttatttgtatattaatagccctggaggtttagttacagctggtcttggtatttatgacacaatgcaatacgttaagccagatatctctactttatgtataggccaagcagcttctatgggttcttttttactctctgctggtacaaaaggaaaaagattttcattaccaaattcacgaattatgttcatcaaccatcagc

SEQ ID NO: 264268 - DNA, 382 bp, Unknown
  Bacterial polypeptide expressing nucleotide sequence isolated from the Sargasso Sea
ttggcaatttatgacactattaaatacgtaaaaagtgatgtggtaaccatatgcgtaggcctcgcagcttccatgggagcgttcctattggccgctggtacaaaaggtaaaagagttgctttgcctcacagcagaataatgattcatcaacccttaggagggacatctcaacgtcaagcaagtgatattgaaattgaagctaaggaaattttaagaattaaagatatgttaaacatgtctatggcagatatgacaggccaatcatttgagaaaattgaaaaggatactgatagagattattttctaagtgcggaagaagcaaaaaattatggattaattgatagagtaattacacatccaagtgaagcaaatcagtcttaaa

SEQ ID NO: 264269 - DNA, 259 bp, Unknown
  Bacterial polypeptide expressing nucleotide sequence isolated from the Sargasso Sea
tatgaacaatcttgtaccaatggttgttgaacaatcaagcaaaggtgaaagagcttacgatatttattcgagactattaaaagaaagaattatttttttaacaggtcaaatcaatgacaacgttgcttctttggttacagctcaattattgtttttagaagccgaagatccaaaaaaagaaatttatttatatattaatagcccaggaggtctggtaacggcagggcttggtatttatgatacaatgcaatatgtaaaa

SEQ ID NO: 264270 - DNA, 447 bp, Unknown
  Bacterial polypeptide expressing nucleotide sequence isolated from the Sargasso Sea
tcctgagagcagaggaccctgataaagatatctatatgtatataaattctcctggtgggtctgtttatgatggtttgggtatcttcgacacaatgcaacatgttaaacctgacattaatacagtttgtgtagggttagcagctagtatgggtgcatttttgctggcggcaggtactaaaggtaagagaagcagcctaagacattcaagaataatgattcatcaaccacttggaggcgctagaggacaggccagtgatataagaattcaagcagatgaaattttgttcttaaaagaacgccttaatactgaattatccgaaagaactgggaaagattatgacactatcaaagatgatacagatagagatttttatatgtctccaaaagaagcggttgagtatggattaattgatctaatactagataaaaaaccaataaatacttaac

SEQ ID NO: 264271 - DNA, 385 bp, Unknown
  Bacterial polypeptide expressing nucleotide sequence isolated from the Sargasso Sea
ggaggacttgttacctcaggcttaggtatttatgatactatgcaatatataaattctccagtttcaactttatgcataggtcaagcttcatctatgggatcttttttattatctgcaggtgaaaaaggtaaaagatattcactaccgaattctagaattatggttcaccaaccttcagcaggatttcaaggtcaggccactgatatacaaattcatgctaaagagatacaatctttaaaaaccaggctgaattcaatttactctaagcacacaggaaaatcagtagatgaaatttctaaagctttagaaagagataattttatgactccagaagaggcaaaaacatttggtttaatagactctgttgtggaaaaaagaaaataac

SEQ ID NO: 264272 - DNA, 613 bp, Unknown
  Bacterial polypeptide expressing nucleotide sequence isolated from the Sargasso Sea
atgccaataggaactccaagcgtgccttacagacttcccggaagtcaatatgaaagatgggttgacatatatacaagactaggtgttgaaagaattctttttcttggacaagaagttaatgatggtattgctaatagccttgttgctcaaatgctttatcttgattctgatgacaattccaaacctatttatctatacataaatagtccaggaggatcagtaactgctggcttagcaatatacgacactatcaaatacgtaaaaagtgatgtagtgactatttgtgtaggccttgcagcctcgatgggtgcgttcttattggcagctgggacaaaaggcaaaagagttgctttgccccacagcagaataatgattcatcaaccccttggaggaacatctcaacgtcaagcaagtgatatagaaatagaagctaaggaaattttaagaattaaagatatgttaaatatgtctatggcagatatgacaggtcaatcattcgagaaaattgaaaaggatactgatagagattattttttaagtgcggaagaggcaaaaaactatggcttaattgatagagtaattacacatcctagcgaagcaaatcaggcttaaa

SEQ ID NO: 264273 - DNA, 503 bp, Unknown
  Bacterial polypeptide expressing nucleotide sequence isolated from the Sargasso Sea
aatgaaaaagactccaaataaccaattaattccaatggtagttgagcaaactggtcgatttgaaagagcttatgacatctactctagattattaaaagagcgcatagtttttttgggaactccaatcgatgataacgttgcgtcattaattatttcgcaacttctgtttctagaagcggacgatagcgaaaaagatatatacttatatattaattcaccgggtggaattattacatcgggaatggggatttacgacactatgaattacattaaacctgacgtcgccactatttgtcttggccaagcagcaagcatgggtgcttttcttctttccggaggaacaaaaggcaaaagatctgcgttgccaaattcaagaataatgattcatcagccattgggtggagctgaagggcaagcatcagatataaaaatactatctgacgaaatactgagattacgagccaatctaaacgctattttggtaaaaaatactaaagcaaatt

SEQ ID NO: 264274 - DNA, 562 bp, Unknown
  Bacterial polypeptide expressing nucleotide sequence isolated from the Sargasso Sea
atgaatactggtattacagatcccctaaatgcattggtccctatggttgttgagcaaacaccaaaaggtgagcgctcgtatgatatttattcgcgacttttaaaagagcgtattatttttttaacaggccaagttgaagacaacatggcaaacctaattttagcgcaaatgctatttttagaatcagagaaccctgataaagatattttcttatacataaattcaccgggtggctcagtaactgctggtatggcaatttacgacacaatgaactttatcaaacctgatgtgagtactatttgtgtaggacaagcagcgagcatgggggcatttttgcttaccgctggtgctaaaggtaaacgtttttgcttacctaactcacgtgtaatgatccaccaacctttaggtggtttccaaggtcaggcgtctgactttgaaatacacgccaaagaaatactatctattaaagataagctaaatcgcttaatggcagaacacacgggtcagccgttagatgtgatttcaaaagatactgatcgtgacaacttcatgagcgcttcag

SEQ ID NO: 264275 - DNA, 220 bp, Unknown
  Bacterial polypeptide expressing nucleotide sequence isolated from the Sargasso Sea
tatgagtgaaaaaatctttgaacaaatgaatactctgataccaatggttgttgagcaatcaagtagaggtgaaagagcttatgatatttactcaagattactaaaagagagaattgtttttttagttggtccaattaatgacaatgttgcgtcattagtaactgcacaacttttgtttttagagtctgaaaatctaaaaaagaaatttctttatacataa

SEQ ID NO: 264276 - DNA, 613 bp, Unknown
  Bacterial polypeptide expressing nucleotide sequence isolated from the Sargasso Sea
atgacaacaaaaatatcagagcacatgaatactttaattcccatggttgtagaacaatcaagcaaaggagagagagcttatgatatttattctagacttttaaaagaaagaattatttttttagtaggaccaataaatgacaatgttgcttcattagttactgcacaaatgttatttttagagtctgaaaatcctaaaaaagaaatatatttatatatcaatagccccggaggtttagttacagctggtttgggagtttatgacacaattcaatatattaagcctccagtatcaactttgtgtattggacaagctgcgtcaatgggttcttttttgttagctgctggggaaaaaggaaaaagattttcactacctaattcaagaattatggttcatcaaccttcagcaggttttcaaggacaagcaactgatattgaaattcatgcaaatgaagttttatcattgaaaaaaaggttaaacgaaatttactcaaagcatactggtcaatcgacagaagatataaaaaaagcactagaaagagataattttatgactcctgaaagtgctaaagattttggtttaattgacgaagtagtagaaaaaagaaattaat

SEQ ID NO: 264277 - DNA, 223 bp, Unknown
  Bacterial polypeptide expressing nucleotide sequence isolated from the Sargasso Sea
tatgacagatatacattcagccttaatcccaatggttattgaacaaaccccaagaggagaaaggtcctttgatatatattcaaggttgttaaaagaaagagttattttcttatctggacctattgacgattatatttcaaaccttgtagttgcacagttgctttttcttgaatcagagaatccagataaagatatatcaatttatattaattctcctgggtgg

SEQ ID NO: 264278 - DNA, 583 bp, Unknown
  Bacterial polypeptide expressing nucleotide sequence isolated from the Sargasso Sea
atggctcttgtcccagttgtcgttgagagcacaagtcgaggagagaggtcttgggatatatattcgcggctgctaaaggaccgaatcattatagtaggttcgccgattactgacgaaatggcaaatgtcattgtcgcgcagttattgttccttgaaagcgaggatgctgaaaaagacatccatttctatttaaactgtcctggtggtgttgttacggctggaatggccatttatgacactatgcaaacaatcaagccaaatgtgagaacttactgtttaggtcagtgtgcgagcatgggggcatggcttcttgcagctgggcatcctggaaaacgctacagcctaccgaatgcaagaattatgattcaccagccgttaggtggtgctacagggcaagcaacagatatcaaaattcaggcacaagaaattgtttatcttaaaaatcgcatgtgcagtgtactagctagtcatacgggtaaaaagattgaagatatatatgctgatattgaccgtgattattacatgtcagctgttgaagcgaaggaatatggcatagtggatcaagttgtgccacccaaatgat

SEQ ID NO: 264279 - DNA, 571 bp, Unknown
  Bacterial polypeptide expressing nucleotide sequence isolated from the Sargasso Sea
atggtagttgagcaaacaaccaaaggtgaaagagcttttgatatttattccagacttttaaaggagagaattgtatttttggttgggccagttaatgataatgttgcctctttagtcaccgcacaacttcttttcttagaatctgaaaatccaaaaaaagaaatttatttttatataaatagccctggtggtcttgttacctctggtctgggtatttatgatactatgcaatatattaagtctccagtttcaactttgtgtattggtcaagcttcttctatgggttcttttcttttagctgcaggtgaaaaaggaaaaagattctctttgcctaattccagaatcatggttcaccaaccctcagcaggttttcagggtcaagcaacagatatacaaatacatgcaaaagaaattttatctttaaaagaaagattaaataaaatttattcaaagcatactggaaaatctattaaagaaattggaaatgctttggagagagataaattcatgacagctgaagaagcaaaggattttggtttaatagacaaagttgttgaaaaaagaaattgat

SEQ ID NO: 264280 - DNA, 448 bp, Unknown
  Bacterial polypeptide expressing nucleotide sequence isolated from the Sargasso Sea
acaacttttattcttagaatctgaaaatccaaaaaaagaaattttcttttatattaatagcccgggtggtttagttacttctggccttggaatatatgatacgatgcaatatatcaaatctccagtttctacactatgcataggccaagcttcttcaatgggatcatttttattggctgcaggtgaaaaaggaaagagattttctttaccaaattcaagaattatggttcatcaaccttcagctggttttcagggacaggcaacagatatacaaattcatgcaaaagaaatactttcattaaaagagagattaaacaaaatttattctaaacacactggcaagtctcttaaggagatttccatagccctcgagagagataattttatgactgccgaagaggccaaaaattttggtttaatagactcagtagttgaaaaaagaaagtaa

SEQ ID NO: 264281 - DNA, 199 bp, Unknown
  Bacterial polypeptide expressing nucleotide sequence isolated from the Sargasso Sea
caaggtcaagcaaccgacattgaaattcatgcttttgaagtcctgtccttaaaaaaaagattaaatgaaatatattcaaagcataccggaaaatccgtagatgaaattaaatctgcattagaaagagataatttcatgaccccagataatgcaaaagattttggattaatagataaagtagtagagaagagagaataaa

SEQ ID NO: 264282 - DNA, 592 bp, Unknown
  Bacterial polypeptide expressing nucleotide sequence isolated from the Sargasso Sea
atgaatctagtacccatagtcattgaacaatctggtaagggggagagatcttttgatattttctccagactactcagagaaagaattatttttttgacaggcgccatcaatgatgagactgcctctttaatatgcgctcaacttttatttttggaatctgaaaatcccgaagaaccaattaatctatatattaactcaccaggaggtttagttactgctggtttagccatgtatgatactatgcaatatattaaatgtcccgttcatactgtttgcataggtcaagctgcctctgcaggttcattaatactcgctgcaggaaaagagggcaacaggtatgctttaccacactctaaaataatgattcatcaaccatctggtggtttttcaggacaggcgagtgatattaaaattcatgccgaagagatattaaagacaaaaaaaagactcaatgaaatttatcaaaagcataccaaaataagcattggtgaaatagaaaaggcaatggaaagagatagattctttgaccctgaagaggcccaaaaatttggtttgatagataaagtaattactactagaattgaaaaataaa

SEQ ID NO: 264283 - DNA, 565 bp, Unknown
  Bacterial polypeptide expressing nucleotide sequence isolated from the Sargasso Sea
tatggaaaataaatttacaccgcaaagtaatctaatacctatggttgttgaacaatcaaataggggtgaaagggcttatgatatttattctcgacttcttaaagagagaatagtttttgttacgggaccaattgaagattatatggcaagtgtaattaccgctcaactcttgtatttagaagctgaaaatccaaaaaaagaaatctcaatgtatattaattcacctggtggagttgtttcatctggtttggctatctatgatactatgcaatatattaaaccagaagtttcaacgctttgtattggtcaggcagcctctatgggcagtttacttttggctgcaggcgaaaaaaataaaagatttgctctaccaaattcaagaattatggttcatcaaccatcaggaggttttcaaggccaagcatcagatattgagagacatgcaaaagagataatttcacttagaagtagattaaatgagatttatgttaatcatactggaaaagatttaaaaaccattgagtcagcattagatagagatacttttatgacttcagatgatgct

SEQ ID NO: 264284 - DNA, 613 bp, Unknown
  Bacterial polypeptide expressing nucleotide sequence isolated from the Sargasso Sea
tatgacaacaaaaatacctgaatatatgaacaacctcattccaatggttgttgaacaatcgagcaaaggcgagagagcttacgatatatactcaagattactaaaagagagaattattttcttagtgggtcccataaatgacaatgtagcttctttagtaactgctcaattactatttttagagtctgaaaatccaaaaaaagagataaatctttatattaattcacctggtggacttgtaactgctggtttaggtatttacgatacaatgcagtatattaaacctgaagtttcaactctatgcataggacaagctgcatctatgggatcatttttacttgctgcaggagaaaaaggtaaaagattttcattgccaaattcaagaataatggttcatcaaccttcagcaggatttcaaggacaagcaactgatattgaaattcatgctaatgaggttttatcacttaaaaaaaggttgaatgaaatatactctaaacacacaggaaaatctttagacgaaattaaacaagctcttgaaagagataattttatgacacctgatagtgcaaaagaatttggtttgatagataaagtagtagaaaaaagaagttaa

SEQ ID NO: 264285 - DNA, 613 bp, Unknown
  Bacterial polypeptide expressing nucleotide sequence isolated from the Sargasso Sea
tatgacaacaaaaattccagaacatttaagcactctgatcccaatggttgttgagcaatcaagccgtggtgaaagagcttatgatatttattcaagactattaaaagagagaattgtttttgtagttggaccaattaatgatgcagttgcatctttggttactgctcaattattatttttagagtctgaagacccaaaaaaagaaatctcattatatattaatagtccaggtggattagttacagcaggtttaggaatttatgatacgatgcaatatatcaaaccagaagtcagcacattatgtattggacaagctgcaagtatgggatcatttttgttagctgcaggatcaaaaggaaaaagattatctttgcccaattcaagaataatggttcaccaaccatctgcaggttttcaaggtcaagcaactgatatagaaatccatgctaatgaggttatgtctttgaaaaaaaggttaaacgaaatttattctaaacatacaggtaagtcggttgatcaaatcaaagaagctttggagagagacaattttatgactccagataacgccaaagattttggtttgatcgataaagtagtagaaaaaagagactaa

SEQ ID NO: 264286 - DNA, 328 bp, Unknown
  Bacterial polypeptide expressing nucleotide sequence isolated from the Sargasso Sea
gaagtttcgactttatgtattggtcaagctgctagcatgggttcttttttgctttctgcaggagcgaaaggtaaaagattttcattgcccaattctagaataatggttcttcaaccttcagcaggatttcaaggtcaagccaccgatatagaaatacatgccaatgaagttttttctttaaagaaaagattaaatgaaatttattccaaacatacaggaaaatcagtggatgaaattaaattagctttggaaagagataactttatgacgccagaaaatgcaaaagaatttggattaatagacaaagtagtagttaaaagagaataat

SEQ ID NO: 264287 - DNA, 470 bp, Unknown
  Bacterial polypeptide expressing nucleotide sequence isolated from the Sargasso Sea
tatgacaaataaaatatctgaacatatgaatactttagtacctatggttgttgaacaatcaaataaaggtgagcgcgcatatgatatttattcaagattattaaaagagagaattatttttttaacaggtcaaatcaatgacaatgttgcttcattagtaacagcacaacttttatttctagaagcagaagatccaaagaaagaaatttatttatatattaatagtcctggtggtcttgttactgctggtttaggaatttatgatacgatgcaatatgttaaacctgatatttctactttatgtattggtcaagctgcttcaatgggctcatttttactttcagctggaactaaaggaaaaagattttcattacctaattctagaataatggttcatcaaccatctgcaggttttcaaggacaagctacagatattgaaattcatgcaaacgaagttttatcattaaaaa

SEQ ID NO: 264288 - DNA, 426 bp, Unknown
  Bacterial polypeptide expressing nucleotide sequence isolated from the Sargasso Sea
agatcctaaaaaagaaaatttatttatacatcaatagtcccggtggattagttacagctggtcttggtatttatgatactatgcaatacgttaaacctgaaatttcaactttgtgtataggacaggctgcatcgatggggtcatttttattagcggcaggaactaaaggaaagagattttcattacctaactcacgaataatggttcaccaaccatctgctggttttcaaggtcaagcaactgatattgaaatacatgctaatgaggttttatctttgaagaaaagattaaacgaaatttactcaaaacataccggtaaaagtgttgaagaaataaagtctgctcttgaaagagataattttatgacagctgagatagcaaagtcatttggtcttattgacgaagtggtagaaaaaagatcttaat

SEQ ID NO: 264289 - DNA, 429 bp, Unknown
  Bacterial polypeptide expressing nucleotide sequence isolated from the Sargasso Sea
cagaaaatccaaataaagaaataagtttttatattaatagtcctgggggacttgttacatctggattgggaatttacgacacaatgcaatatattaattctcctgtttcaactttatgtattggtcaagcctcttcgatgggatcatttcttttgtcagcaggtgagaaaggtaaaaggtattcactgccgaattctagaattatggttcaccaaccgtcagcaggatttcaaggtcaagcaacagacattcaaattcacgctaaagaaattcaacaattgaaaactagattaaatacaatttactccaaacatacaggcaaatcggtagaagaaatatcgaaagctctagagagagataattttatgacacctgaagaagcaaaaaaatttgggctaattgactctgttgtggaaaaaagaaagtaac

SEQ ID NO: 264290 - DNA, 598 bp, Unknown
  Bacterial polypeptide expressing nucleotide sequence isolated from the Sargasso Sea
gaagaacagatgaatagcttgataccaatggttgttgagcaaacaagcaaaggggaaagagcctacgatatttattcaaggcttctgaaggaaagaatagtatttcttgtagggccagtaaacgacgctgtagcatcattagtaacagcgcaactattgtttttggagtctgaaaatccaaataaagagattaatttttatattaatagccctggaggattggtcacagcaggattaggtatatacgacacaatgcaatacattaattctcctgtatcgactctctgtattgggcaagcatcttctatgggatcatttctactagcatctggtcaaaaagggaaaagattttccttaccaaactcaagaataatggtccatcaaccatctgcaggatttcaaggacaagcaacggatatacaaattcacgctaaagaaattttatctttaaaagaaagattaaataaaatttactcaaaacatacaggaaaaactgtagatgaaatttctaaagctttggaaagagataacttcatgacagcagaagaagctaaaaacttcggtttaatcgacactgttgtggaaaagagaaaataac

SEQ ID NO: 264291 - DNA, 292 bp, Unknown
  Bacterial polypeptide expressing nucleotide sequence isolated from the Sargasso Sea
aatgaatacattaatacctatggtggttgaacaaacaaccaagggtgagagggcttacgatatttattcaagactgctgaaagaaagaatagtttttttggttggcccggtaaacgatagtgttgcttctttggttactgctcaacttttatttttagagtcagaaaatccaaaaaaagaaataaatttttatataaatagtcctggtggattagttacatctggtctgggtatttatgatacaatgcaatatataaaatctcccagtttctacactctgtatggacaagca

SEQ ID NO: 264292 - DNA, 432 bp, Unknown
  Bacterial polypeptide expressing nucleotide sequence isolated from the Sargasso Sea
aatccgaagatccaaaaaaagaaatttcactttatataaacagtcctggaggattagttaccgcaggcttgggtatttatgatacaatgcaatatgttaagccagatatttcaacattatgcattggacaagcagcaagcatgggatcttttttattatcagcaggaacaaaaggtaaaagattttcacttcctaattcaagaattatggttcatcaaccttcagcaggatttcaaggtcaagccacagatatagaaatccatgcaaatgaagttttgtctttaaaaaaaagattaaatgaaatttattcgaaacacacaaataaatctgttgaagaaataaaaacatctcttgaaagggacaattttatgactccggaaaatgcaaaagattttggtttaatcgacaaagtagtagttagccgagaataat

SEQ ID NO: 264293 - DNA, 576 bp, Unknown
  Bacterial polypeptide expressing nucleotide sequence isolated from the Sargasso Sea
aatgaataatcttattcctatggttgttgaacaatctagtagaggagaaagagcttacgatatttattcaagattacttaaagaaagaatagtttttgttgtgggtccaattaacgactcgatagcatcattggttacagcacaacttttatttttagagtcagaagatccaaagaaggaaatttctttatacataaatagtcctgggggtttagttaccgctggattaggtatttacgataccatgcaatatattaaacccgaggtaacaactttatgcataggtcaagctgcaagcatgggttcttttctgttagcagctggcgccaagggtaaaagattttctttacctaattctagaattatggtccatcaaccatcagcaggatttcaaggtcaagcaacagatatagaaattcatgctaatgaagttttatctttaaaaaaaagattaaatgaaatttattcaaaacatactagcaaatcagttgatgagataaaatctgctttagagagagataattttatgactgcagaaaatgcaaaagattttggattgatagataaagtagtaga

SEQ ID NO: 264294 - DNA, 613 bp, Unknown
  Bacterial polypeptide expressing nucleotide sequence isolated from the Sargasso Sea
atgaaaaatagaattgaagaacatatgaataatttaattcctatggttgttgaacaatctaataggggtgaaagggcgtatgatatttattctagacttttaaaagaacgtataatttttttagtcggacctgtaaatgacaatgtttccactttagtaacagcacaattattgtttttagaatcagaaaatcctaaaaaagaaatatctttttatatcaatagcccaggaggattagtaacttctggattagggatttatgatacgatgcagtacataaaacctgctgtttctactttgtgcattggccaagcttcatcaatgggatcttttttattagcagcaggagaaaaaggtaaaagattttctctacctaattcaagaattatggttcatcaaccttcagcgggatatcaagggcaggcaacagatattgaaattcatgctaaagaaatactttctcttaaagacagactaaataaaatttattcaaaacatacaaaaaaaagcgaatcagaaattaaaaaagccctagagagggataattttatgactccatctgaagcaaaagattttggcttaattgatgaggttgtggaaaaaagatcttaag

SEQ ID NO: 264295 - DNA, 517 bp, Unknown
  Bacterial polypeptide expressing nucleotide sequence isolated from the Sargasso Sea
atgattcgtaaaatagaagagcagttaaataatcttgttcctatggttgttgagcaaacaaacaagggagaaagagcttatgatatatattcaagacttttaaaagaaagaatcgtttttttagttggaggcgtaaacgatacagtggcatcattggttacagcacagcttttatttttagaatcagaaaatccaaaaaaagaaatttttttctatataaatagtcctggaggattagtgacctcaggtttaggtatatatgatacgatgcaatatattaaatcaccggtttctactttgtgtataggtcaagcatcatccatgggctcatttcttttatctgctggagaaaaaggaaaaagattttctcttccaaattctagaatcatggttcatcaaccttctgcgggttttcaaggacaagccactgatatacaaattcatgctaaagaaatactttctttaaaagagaggctgaataagatttactcaaaacatacaggtaaatcagttaaag

SEQ ID NO: 264296 - DNA, 556 bp, Unknown
  Bacterial polypeptide expressing nucleotide sequence isolated from the Sargasso Sea
caaggtagaggagaaagagcatatgatatttattcaagacttcttaaagaaagaataatttttttagttggaccaataaatgataacgttgcatctttagttacagcgcaaatgctatttttagaatctgaaaacccaaaaaaagaaatatatttgtacataaatagcccaggtggattagttactgcaggcttaggagtttatgatacaatgcaatatataaaaccaccagtttcaactctttgtattggccaggcagcttcaatgggatcatttcttttagcagcaggagaaaaaggaaaaagattttcgttgccaaattcaagaataatggttcatcaaccttctgcaggttttcagggacaagcaactgatattgaaattcatgcaaatgaagtactagcgttgaagaaaagattaaatgaaatttattcaaaacatactggacaatctactgaagatattaaaaaagctttagaaagagataattttatgacaccagaaagtgcaaaaaagtttggtttaattgatgaagttgtagaaaaaagaagttaat

SEQ ID NO: 264297 - DNA, 223 bp, Unknown
  Bacterial polypeptide expressing nucleotide sequence isolated from the Sargasso Sea
ctactttctggaggagcaaaggggaaaagattggctttacctaattctaggattatgattcatcaacctctgggaggtgcacaaggtcaagcagtagagattgaaatacaagctaaagaaatactttttctcaagaaaacattaaattcgctcttagcagaacatactggtcaacctttagaaaaaataaatgaagatactgaaagagattactttttatctc

SEQ ID NO: 264298 - DNA, 142 bp, Unknown
  Bacterial polypeptide expressing nucleotide sequence isolated from the Sargasso Sea
atgacaaataaattatctgaacatttaaatactctaatccctatggttgttgaacaatcaagtaggggagagagagcttatgatatctactcaagattattaaaagaaagaattatttttgttgtaggtccaattaatgatt

SEQ ID NO: 264299 - DNA, 283 bp, Unknown
  Bacterial polypeptide expressing nucleotide sequence isolated from the Sargasso Sea
atgaaaactttcaaccaactagttccaatggttgtggaacaaacccccaggggcgaaagagcattcgatatttactcaaggcttctcaaggaaagagtaatatttatcacgggaacagttgaggaccagatggcaaatttaattgtggctcaacttttatttttagaagctgaaaatcctgataaagatataaatttgtatataaactctcctggaggatcagtaacttcaggtctttctatatatgacacgatgacttacataaagcctgacataagtactt

SEQ ID NO: 264300 - DNA, 443 bp, Unknown
  Bacterial polypeptide expressing nucleotide sequence isolated from the Sargasso Sea
attatttttagaagcagaggatcctaaaaaagaaatttatttatatgtcaatagccctggaggattagtaactgctggacttggtatttatgatactatgcaatatgtaaaacctgatatctcaactttatgtattggacaagctgcatcgatggggtcttttttattggcagctggaactaaaggaaaaagattttcattaccaaattcaaggataatggtacaccaaccatctgctggttttcaaggtcaagcaactgatatagagattcatgcaaatgaagttttatcattgaaaaaaagattaaatgaaatttactcaaaacatacaggtaagagtgttgatgaagtgaaatctgcgcttgaaagagacaatttcatgactgctgatgttgcaaagtcatttggtcttattgacgaagttgtagaaaaaagatcttaat

SEQ ID NO: 264301 - DNA, 584 bp, Unknown
  Bacterial polypeptide expressing nucleotide sequence isolated from the Sargasso Sea
tatgattcgcaaaattgaagaacacttaaacaatctcattcctatggttgttgaacaaaccacaaagggagagagagcttacgatatatactctaggcttctaaaagaaaggattgtttttttggttggagcagtcaatgatagtgtagcttcattagtaactgctcagttactttttctagaatccgagaatccaaaaaaagaaatttatttttatataaacagtcccggaggattagttacttctggtttaggtatatatgatactatgcagtacattaaatctcccgtgtctactttatgtattggacaagcatcttcaatgggttcctttcttttggccgctggagaaaaaggaaaaagattttcactaccaaattctagaattatggttcaccagccttcagctggttttcaaggccaagcaacagatatacagatacatgccaaagaaattctttcgctgaaagaaagacttaacaaaatttattctagacacactggaaaatccgttaaagaaatctcggcggctctcgaaagagataaatttatgaccgcagaagaagccatggattttggtttaa

SEQ ID NO: 264302 - DNA, 498 bp, Unknown
  Bacterial polypeptide expressing nucleotide sequence isolated from the Sargasso Sea
tatgtcagaatttcaatcagcattaataccaatggttgttgaacaaactccaaggggtgaaaggtcatttgatatatactctagattattaaaagaaagagtgatttttctatctggtgcaattgacgattacatttctaatcttgttgttgcacaattacttttcttagaatctgagaatcctgaaaaagatatttccatatatattaactctcctggcggaagtatttctgcgggtcttgctatttacgatactatgcaatttgttaagccttcaatctcaacaatgtgcattggtcaggccgcaagtatgggagctcttctgcttgctggcggtaataaaaagaaaagatttgccttacctaattccagaataatgattcatcaaccattaggtggttttcagggacaggcttctgattttgaaattcatgctaaagaaatactacacatgaaaaaaattgttaatgaaattcttgcaaaacatactgggtcaac

SEQ ID NO: 264303 - DNA, 409 bp, Unknown
  Bacterial polypeptide expressing nucleotide sequence isolated from the Sargasso Sea
aatgagtcgtgaactaaatgaaaaattgagtagcttaattcccatggttgttgaacagacaagcaagggtgaaagagcttatgatatttattcaagattattaaaagaaagaatagtatttttagtaggaccagttaatgatgccgttgcatctttagttactgctcaattattatttttagaatcagaaaatccaaataaagaaattaatttttatataaatagtccaggtggattagttactgctggtttagggatttatgacacaatgcaatatatcaattcaccggtttctacattatgtataggccaagcatcttcaatgggatcatttttactttcagctggcgaaaaaggaaaaaggtattctttacctaactcgagaataatggttcatcaaccatcagct

SEQ ID NO: 264304 - DNA, 371 bp, Unknown
  Bacterial polypeptide expressing nucleotide sequence isolated from the Sargasso Sea
tatgattcgtaaaattgaagaacaattaaacaacctcatccctatggttgttgaacaaactaacaaaggtgaaagagcctacgatatatactcaaggcttttaaaagagagaatagtttttttggtaggcggtgtaaatgataacgtagcttcattagttactgctcaattactttttttagaatcagaaaatccaaaaaaagaaatatatttttatataaacagtcccggcggattagtaacttccggtctaggtatttatgatactatgcagtacattaaatcacccgtatctactttgtgtataggacaagcgtcttcaatgggttccttccttcttgctgcaggagaaaaaggaaaaagattttctc

SEQ ID NO: 264305 - DNA, 439 bp, Unknown
  Bacterial polypeptide expressing nucleotide sequence isolated from the Sargasso Sea
attttagaatcagaagatcctaaaaaagaaatctctttatatataaatagtcctggtggacttgtaacagctggactaggtatttatgatacaattcaatacattaaaccagaaataagtactttgtgtataggtcaagcagcaagcatgggttcatttttacttgcagctggcactaaaggaaaaagattttcattgccaaattcaagaataatggttcatcaaccttctgctggttttcaaggacaggcaacagatattgaaattcatgctaatgaagttttatctctaaagaaaagattaaatgaaatttactcaaaacatactggaaaatcagttgatgaaattaaatcagcattagaaagagataactttatgactcctgataatgcaaaaagttttggtcttatagataaagtggtagaaaaaagagaatagg

SEQ ID NO: 264306 - DNA, 349 bp, Unknown
  Bacterial polypeptide expressing nucleotide sequence isolated from the Sargasso Sea
tatgacaacaaaattatcagaacacatgtcaaatcttgtaccaatggttgttgaacaatctagtaaaggtgagagggcctatgatatctactcaagacttttaaaagaaagaattatttttttaactggtcagattaatgacaatgtagcctcattggttactgcccaattattatttttagaggcagaggatccaaaaaaagaaatttatttatacataaatagcccaggaggtttagttacagctggacttggaatttatgatacaatgcagtatgtaaaaccagatatttctactttatgtattggtcaagcagcttcaatgggatcctttttactagcagctggt

SEQ ID NO: 264307 - DNA, 607 bp, Unknown
  Bacterial polypeptide expressing nucleotide sequence isolated from the Sargasso Sea
atgataaccagcgccggtctggtgccgatggtaattgaacagacggcacgtggagagcgttccttcgacatttattcacgtctgctcaaggagcgggtgattttcctggttggcccggttgaagatcacatggcgaaccttgtggttgcccagctgctattcctggaatccgaaaacccggacaaagatatccacctgtacatcaacagcccgggtggctccgtaactgcgggtatgtcgatctacgacaccatgcagttcatcaagccggacgtttctaccctgtgtattggccaggcggccagcatgggtgctttcctgcttgccggtggtgccaagggcaagcgtgcctgcctgcctaattcccgcgtgatgatccaccagccgctgggcggatatcagggccaggcaacggatatcgagatccacacccgcgagattctgaagattcgccataccctgaactccattctggcccaccataccggccaggacctggagaccatcgcccgtgataccgaccgtgataatttcatggacccggtccaggcgaaggagtacgggttgatcgatacagtacttgataagcgcgtatcgaataactaat

SEQ ID NO: 264308 - DNA, 592 bp, Unknown
  Bacterial polypeptide expressing nucleotide sequence isolated from the Sargasso Sea
atgcccctaatcccttatgttgttgaaaaaagtggccgcgaagagcgggcaatggacatttacagccggctgttaaaagatcgcatcatattccttggctctcaggtaaatgatgaaatggcgaatgccattgtcgcgcaaatgctctttcttcagactgacgatccaaagagtgatatccatctctatatcaattcaccaggaggaagcgttacagcagggctggcaatttatgacacaatgcaatttgttagttgtgatgttgcaacatattgcataggtcaagctgcatccatgggtgctttgcttttgactgctggaacggccggaaaacggcgtgctctaccaaatgcacgaatcatgattcatcaaccactcgctggcatggaaggcaccgcagaagaaatcatgattcatgccaatgaattccgaaatatcaaaagtaaattgaacaaaattttgctgaaacatactggtcagcctcttgagaaaattgaagaggatactgatcgtgatcgatttatgtcagcagacgaagcatgtgaatatcatcttattgatgaggtgatagagcaaattcccacgggctaat

SEQ ID NO: 264309 - DNA, 471 bp, Unknown
  Bacterial polypeptide expressing nucleotide sequence isolated from the Sargasso Sea
aattactctatctgcagagtgaaaatcgtcgaaaagatatccatttttacattaactcgcctggcggaagcgtcactgcaacaatggcaatttatgacacaatgcagatactttcgtgtccggtagccacttattgtgttggtcttgctgccagcggtggtgccgtattgctcgccggcggtgcctctggcaaacgattttctttgcctcacgccaaagtaatgattcatcagccatacgggcaagttggtggacaagtaagtgatattgaaattcaagctgatgaaataattaaaactcgtgccgtactaaatgaaattcttgcatcgcatactggtcaaccaattgaacagatagcgcaagacacagaccgagacaggtacctcacggcgacggaggctaaggaatatggtctcgtcgatgacattctcaccaaaccccctggagaagaagacaaagacgtcgactagg

SEQ ID NO: 264310 - DNA, 445 bp, Unknown
  Bacterial polypeptide expressing nucleotide sequence isolated from the Sargasso Sea
atgaaaaaagagccttcaaattatgttgtacctacagttattgagaatacaaatagaggcgagagagctttcgatatttattcaaggcttttaaaagatagaattatatttcttggcactccaattgatgatggagtagcaaatctaataatggcacagcttttacatttagagtcagaagatccagagaaagatatctacgtatatatcaactctccaggaggatcgattacatcattgtttgcaatctatgacacaatgaaatacatcaagccagatgttgcaactgtttgtatgggacttgctgcttcagcaggtgctgtgattttagctggtggaaccccaggtaaaagatactcacttccacatgcaagaattatgttacatcaaccagctggtggggcagaaggcacctcaaaagatatcgaaatccaagcaaagtgat

SEQ ID NO: 264311 - DNA, 601 bp, Unknown
  Bacterial polypeptide expressing nucleotide sequence isolated from the Sargasso Sea
tatgacagatattcaatcagcgcttataccaatggtaattgaacagactccaagaggtgagaggtctttcgatatttattcacgtcttttaaaagagagagttatatttctatctggacctattgatgattacatctctaatttagttgttgctcaattattgtttttagagtcagagaatccagaaaaagatatatccatatatattaattcacctggtggaagtatctctgcaggacttgccatatatgacaccatgcaatttgttactccatcaatctcaacgatgtgtattggacaggctgcaagcatgggagcacttttattagccggaggtgataacaaaaagaggtttgccttacctaattcaagaataatgattcatcaaccacttggtggttttcaaggtcaggcatctgattttgagatccatgcaaaggaaatactacatatgaaaaaaattgtgaatgaaattcttgcaaagcatactggacaaacaattaagaaaattgaaaaagatactgacagagataatttcttagatgcaagtgcagcaaaagcttatggcattgttgataaaatattagagcaaaggagctag

SEQ ID NO: 264312 - DNA, 444 bp, Unknown
  Bacterial polypeptide expressing nucleotide sequence isolated from the Sargasso Sea
tattatttttggaatctgaaaatccagaaaaagatatatctatatatattaattctccaggtggtagtatatcagcaggactagctatatatgatactatgcaattcatttcaccttcgatttctacaatgtgtattggacaagctgcaagcatgggagccttacttcttgctggaggggataaaaataaaagatttgccttacctaattcaaggattatgatccatcaaccattaggtggttttcagggccaagcatctgattttgaaatccatgcaaaagaaatacttcatatgaaaaaaattgtaaatgaaatacttgcaaaacatactggacaaactatcaaaaaaattgaaaaagatactgatagagataatttcttagatgcaagcgcagccaaagcctatgggatagttgataaaatattagaacaaaggagctaat

SEQ ID NO: 264313 - DNA, 589 bp, Unknown
  Bacterial polypeptide expressing nucleotide sequence isolated from the Sargasso Sea
atgagtagcttaatacccatggttgttgagcaatctaacaaaggggaaagagcctatgatatttactcaagacttttaaaagaaagaattatttttttaacaggtcaaattaacgacaatgttgcctcattaatcacagctcaattattatttttagaagcagaggatcctaaaaaagaaatttttttatatattaatagtcctggtggacttgttactgcaggtttgggtatttacgatacaatgcaatatgtaaaaccagatatttcaactttatgcattggacaagcagcttcgatgggatcttttttattatcagcaggaacaaaaggaaaaagatattcacttccaaattcaagaattatggttcatcaaccatctgcgggatttcaaggacaggctactgatatcgaaattcatgccaatgaagtattatcattaaaaaaaagattgaatgaaatatattctaaacatactggcaaatctgtagatgaaattaaaactgctttagaaagagataattttatgactgcggacgctgccaaatcttttggacttatagattctgtagtagagaaaagatcttaga

SEQ ID NO: 264314 - DNA, 574 bp, Unknown
  Bacterial polypeptide expressing nucleotide sequence isolated from the Sargasso Sea
gatggtagtggagcaatcttctcgaggagagagagcctatgatatttattcaagattattgaaagaaagaattatttttttaacaggtcctattgatgataacattgcaagtttgatttgcgctcaactactttttcttgaatcggaaaacccaaaaaaagaaatttcattttatattaattcgcctggtggtattgtttggtcaggacttgctatatacgataccatgcaatacatttcatctaaaattatgactatatgtattggtcaagctgcttcagcaggttctttgttactaacagctgggtcagaaggtatgagattctctttgcctaattcaagaataatggttcatcagccaagtggaggttatcagggccaggttacagatatagagattcatactaatgaaattaaaaaaactaaagagagattaaatcaaatttattcaaagcacactaaaaagaaaattaaggaaattgaattaattatggaaagagataaatatttctctcctgaagaagcaattaagtttggcctaattgacaagatagtagaaagtagaaaaagttag

SEQ ID NO: 264315 - DNA, 382 bp, Unknown
  Bacterial polypeptide expressing nucleotide sequence isolated from the Sargasso Sea
ggtttagtgacagcaggattaggtatttatgacccaatgcaatatataaattctcctgtctcaactttatgcatacgtcaagcatcttcaatgggttcctttttgttagctgcaggagcaaaaggtaaaagatactctttacctaattcaaggattatggtgcatcaaccatctgcaggttttcaaggacaagcaacggatatccaaatacacgctaaagaaattttatctctaaaagagagattaaacaaaatttactcaaaacatacaggaaaaaatattgacgaaatctcagatgctctagaaagagataattttatgaccgcagaagaggcaaaaaaatttggtttaatagacactgttgtggaaaaaagaaaataaa

SEQ ID NO: 264316 - DNA, 415 bp, Unknown
  Bacterial polypeptide expressing nucleotide sequence isolated from the Sargasso Sea
atggttgttgaacaaacgccaagaggagaaagggcttacgatatttattcaagattgcttaaagagagagtgatatttttaacaggacctgtagaagattacggatcaaatttgatagtggctcaaatgttatatttagaggcagaaaatcccgataaagatatccatctgtatattaattctcctggaggatcggttacagcagggctttcaatttacgatactatgcagtttatcaaacctgatgtatcgacactctgcattggccaagctgccagtatgggagctatccttttatgtggaggtgctaaaggtaaaagacaggctcttccaaactcaagagtcatgattcatcaagtgctaggagggtttcaaggtcaagcaagcgatatagagattcatactcaagaaatac

SEQ ID NO: 264317 - DNA, 637 bp, Unknown
  Bacterial polypeptide expressing nucleotide sequence isolated from the Sargasso Sea
gatggaaaaaaattataatcaggttttttcatttaatgaaattggtgcattagttccaatggtagtagagcaaactagccgtggcgaaagatcgtatgatatttactcaaggctcttaaaagaaaggatcatttttcttgtaggaccggttgatgataacttagcttcattagtttgtgctcaattgttgtttttagaagcagaaaatccaaaaaaagatatatcaatgtatattaactcaccaggcggtgtggttacttctggtttgtcgatatacgatacaatggagtatattcgtcctgatgtttcaacattatgtattggtcaagcagcaagtatggggtcattgttattaactgctggtgcaaaaaataaaagatattgtttacctaacgcaaggataatgacccatcaaccttcaggaggttttcaaggtcaagcaagtgatattgaaattcatgccaaagaaataattaatttaagatcaagacttaacggaatttatgttaaacattctggcaagaaaattgcagaaattgaatctttaatggatagagacacttttttgtctccagaagatgcattaaagattggtttaatagatgaagtcgttgaaaaaagacctaacgttaaataa

SEQ ID NO: 264318 - DNA, 364 bp, Unknown
  Bacterial polypeptide expressing nucleotide sequence isolated from the Sargasso Sea
ctggtgcccatggtcattgagaccacaggaaggggcgagcgtgcctttgacatctactcgcgtttgctgaaggagcgagtggtgtttatggtcggcccggtcgaagaccacatggccaacctgattgtggcgcagctgctgtttcttgaatcggagaatccggataaggatatacatctgtacatcaattcaccgggcggtgcggtgaatgctggcatggccatctatgacactatgcagtttgttcggccgaatatcagcacggtctgcatgggccaggctgccagtatgggcgcagtaatattgggccggcggtgctcctgggcagcgcttttacctgccgcatggccgaatcatgatccac

SEQ ID NO: 264319 - DNA, 604 bp, Unknown
  Bacterial polypeptide expressing nucleotide sequence isolated from the Sargasso Sea
tatgccaattggagtaccaaaggttgcttatcgtttaccaggtgaagcaaccccacaatgggttgatttatacaaccgtttatatcgtgaacgtgttctttttttaggttctgggcttgatgatgagttagcaaaccagttaaatggtattatgctttatttgagtgctgaggattcaagccgttcattatttttatatattaattcaccaggtggttctgtaacagctggtctttcagtatttgatattatgaattatgtgcaagcatctgttactactattggtattggatttgcagcttcaatggcatcatttattttagctggaggtgaacgaggaagccgtattgcattaccacactgccgtgtaatgattcaccaacctcaaggtggtatggaaggtcaagcttctgaagttgtccttgaaaaggaagaaattgttcgacttcgacgtttaatcgggcgtttatatgtagacttaacaggacagcctttatcaactattgcaaatgatttagaccgtgataagtatttatcggctcgtgaagctcgtgagtacggtttagtagatttagtagctactactgaaactgcaacagtttaa

SEQ ID NO: 264320 - DNA, 604 bp, Unknown
  Bacterial polypeptide expressing nucleotide sequence isolated from the Sargasso Sea
catgagcaaaaacgatattttaaataacttagtaccaatggttgttgagcaaacaccaagaggtgagagagcatttgatatatactctcgacttttaaaagagagaataatttttgttgtaggaccaattgatgaccatatggctaatttagttgtagctcagctcttgtttctagaatctgaaaatcccaccaaagaaattaatctttatgttaattcacccggaggttcagtaactgcaggattatctgtctatgacactatgcagttcatcaaaccaagtattagtacgctgtgcataggccaggctgccagtatgggtgcaatattacttgctggagggtctaagaaaaagaggtttgccttgccaaattcaagagtgatgatccatcagcctttgggcagttttcaaggtcaagctacagattttgatattcaagccaaagagatattaaatatacgttcgagattaaatgagatactctctaagcataccggccaaactcttaaaaaaatccagaatgataccgaaagggacaattttatgacatcttctgatgctttaaagtatggaataattgatgaaatactagaatctcgctaa

SEQ ID NO: 264321 - DNA, 496 bp, Unknown
  Bacterial polypeptide expressing nucleotide sequence isolated from the Sargasso Sea
tttgtagttggtccgataaatgacgcagttgcatcattagttactgcgcaattattatttttagaatctgaagatcctaagaaagaaatttctttatatattaatagtcctggtggactggtaacagctggacttggtatttacgatacaatgcaatatatcaaaccagagataagtactttgtgcataggtcaagcagcaagcatgggttcatttttactagcagcaggtgctaaaggaaaaagattttcattgccaaattcaagaataatggtccatcaaccgtcagctggttttcaaggacaagcaacagatattgaaattcacgctaatgaagttttatctttaaagaaaagattaaatgaaatttattcaaaacatacaggaaaatcagttgatgaaattaaatcagcattagagagagataattttatgacacctgataatgcaaaaagttttggcttaatagataaagtggtagaaaagagagaataga

SEQ ID NO: 264322 - DNA, 406 bp, Unknown
  Bacterial polypeptide expressing nucleotide sequence isolated from the Sargasso Sea
tatgactacaaaaatatcagaacacatgaataacctaattccaatggttgtagaacaatctagcagaggtgaaagagcttatgatatttattcaaggcttttaaaagaaagaattgtatttgtagtagggcctataaatgacaatattgcatctttagttactgctcagttactttttttagaatcagaaaatccaaaaaaagaaatttatttatatataaacagtccaggaggtttggttaccgctggattaggaatttatgacaccatgcaatatataaaacctgacgtgtcaactttatgtattggacaagctgcatcaatgggatcttttcttttagcagctggacaaaaaggtaaaagattttctttacctaattcaagaataatggtccatcaaccatca

SEQ ID NO: 264323 - DNA, 679 bp, Unknown
  Bacterial polypeptide expressing nucleotide sequence isolated from the Sargasso Sea
attgaatacgggtgtatcaacatacgtaatattcttcattaggaccatttacgcgcaacaaggcaaagggccgtcgccgctggtggtggagaggtttcagagtgtagctagccaactcatgaatcaacgcatcattcggctgggtggtgcagttgatgacgatagttgcaacttaatcgttgcacaattgttatggttggatgcgaatgatccggataaagacatcacgctatacgtaaactctcccggcggttcggtcacggcagggatggcagtatttgacaccatgcgacatatacgcccagacgtttcaactgtctgtgttggtcttgcagcttccatgggtgcgttccttctcgcttcaggcacacaaggaaagcgtttcagtctaccgaatagtcggatcatgattcaccaaccacttggcggtgcgcagggtcaggctgcagacattgagatccaggcaaatgagatcatgcaccacaagtccactttgaatggataccttgcagaattcaccaatcagtcattggaaaaagttatggaagacaccgaccgtgactttttcatgtcagcggaggaggcagtcacgtatggtttaattgactctgtcatcgaacacccaacacatctcgctgtcaatacttcaggaattcccatgtatgcgagcgaattctaa

SEQ ID NO: 264324 - DNA, 613 bp, Unknown
  Bacterial polypeptide expressing nucleotide sequence isolated from the Sargasso Sea
atgagtgaaaaaatcttagaacaaatgaatactcttatcccaatggttgttgagcaatcaagtagaggtgaaagagcttatgatatttactccagattattaaaagagagaattgtttttttagttggtccaattaatgataatgttgcatcattagtaaccgcacaacttttgtttctagaatctgaaaatcctaaaaaagaaatttctttgtacataaacagccctggcggtttagtgactgctggtttagggatttatgatactatgcaatatataaaacctgatgtttcaacattatgcatcggtcaagctgcttcaatgggatcttttcttttagctgcaggtgaaaaaggaaaaagattctctcttcctaattcaagaattatggttcatcaaccctctgcaggatttcaaggccaggcaacagatatagagatacatgcaaatgaagttctttctctaaaaaaaaggttaaatcaaatatattccaaacacactggaaagagtgaagatgaaattaaaattgcacttgaaagagataattttatgacgtcagaaaatgctaaagaatttggtttgatagatcaagttgttgaaaaaagatcatagt

SEQ ID NO: 264325 - DNA, 400 bp, Unknown
  Bacterial polypeptide expressing nucleotide sequence isolated from the Sargasso Sea
atgaataaaatctctgaatatatgaataacttaatcccaatggttgttgaacaatcaaacaaaggtgagagagcatatgatatttattcaagacttttaaaagaaagaattatttttttaactggccaaattaacgataatgttgcttctttagtcaccgctcaacttctttttttagaagcagaggatccaaaaaaagaaatttatttatatattaacagtcctggtggtttagttactgctggcttaggtatttatgatacaatgcaatacattaagcctgaaatttctactttatgtattggtcaagctgcttcgatgggttcttttttacttgcagcaggatcaaaaggaaaaagattttctttacctaactcaagaataatgttcatcaaccatc

SEQ ID NO: 264326 - DNA, 601 bp, Unknown
  Bacterial polypeptide expressing nucleotide sequence isolated from the Sargasso Sea
atgacagatattcattcagccttgataccaatggttatagagcaaaccccaagaggtgagaggtcttttgatatttattcgagattgcttaaagagagagttattttcctttcaggtgcgattgatgactatatttctaatttagttgttgcacaattactattcttagaatcagagaatccagaaaaagatatttctatttatattaattcacctggcggcagtatttcagcaggactggcaatttatgacactatgcaatttattactccatctatttcaactatgtgtataggtcaagcagctagcatgggagcattattattagctggcggagataaaaagaaaagatttgctcttcctaattctaggattatgattcatcaacctcttggagggtttcaaggccaagcatctgactttgaaatacatgcaaaagaaattattcatatgaaaaagatagtgaatgaaattcttgcaaaacataccgggcaatcaattaaaaaaattgaaaaagatactgatagagataatttcttagatgcaagtgcagccaaaacctatggcatagttgataaaatattagaacaaaggagctaat

SEQ ID NO: 264327 - DNA, 463 bp, Unknown
  Bacterial polypeptide expressing nucleotide sequence isolated from the Sargasso Sea
atgaataaaataccagagcatttaaatactttaatccctatggttgttgagcaatcaagtagaggagaaagagcctacgatatttattctagattattaaaagagagaatagttttcttagttggtccgataaatgataatgttgcatcgctgattacagctcagcttttatttttagaatccgaagatccaaaaaaagaaatttctctttatataaacagtccaggaggcttagtaaccgcaggtttaggaatctacgataccatgcaatatataaaacctaatgtatcaactttgtgcattggacaagctgctagcatgggttcttttttattagcggcaggcactaaaggtaaaagattttcacttccaaattcaagaataatggttcatcaaccttcagcaggttttcaaggccaagccactgatattgaaattcatgcaaatgaagttctgtcttgaa

SEQ ID NO: 264328 - DNA, 511 bp, Unknown
  Bacterial polypeptide expressing nucleotide sequence isolated from the Sargasso Sea
atgaaaaatatagaacaaatgagcagttttgtaccaatagtggttgagcaatcttccagaggcgaaagggcgttcgatattttttctcgcctgcttaaagacaatgtcatatttgctgttggcccaattgatgattacattgcaaaccttattgttgctcaaatgctttttcttgagagtgaaaatccaaaaaaagacatatacctctatatcaattcaccaggtggatcaattacatcaggattatctatatacgacaccatgcaattcattaaacctgatgtcagcacaatctgtgtcggtcaggcagcgagtatgggagccttacttcttgccgggggagctgaatcaaagcgtttttctctaccgaattcaaggatgatgattcatcaaccaatttctgggtttcaaggtcaggccagtgatattgacatccatgcaaaagaggtgcttaagatgaaatcattggtcaattcaattttatctaaacatacaggcaaaactgaaaaac

SEQ ID NO: 264329 - DNA, 343 bp, Unknown
  Bacterial polypeptide expressing nucleotide sequence isolated from the Sargasso Sea
atgaataatttagttccgatggttgttgaacagacacctaggggcgaaagggcttatgacatatattctagacttctcaaagaaagaataatatttatggtaggcccagtagatgattattcttctaatcttatagttgcccagttactttttctagagtctgaaaaccctaccaaggatatcagtctatacattaattcgcctggagggtctgttacagcaggaatgtcaatatacgacactatgcaattcgtcaaacccgatataagcacgttatgtatcggtcaggcggccagcatgggagcagatattgttgtgcggagggaaaaaagacaaacgttcg

SEQ ID NO: 264330 - DNA, 537 bp, Unknown
  Bacterial polypeptide expressing nucleotide sequence isolated from the Sargasso Sea
cttatgatatttactcacgactattaaaagaaagaataatttttttaacaggtcagattaatgataatgtggcttcacttgtcacagctcagttattatttttagaagcagagaatcctaaaaaagaaatttatttatatatcaacagccctggcggattagtaactgctggacttggtatttatgatactatgcaatatgtaaaacctgatatctcaactttatgtattggacaagctgcatcgatgggatcatttttattagcagctggaactaaagaaaaaagattttcattaccaaattctaggataatggttcaccaaccatctgctggttttcaaggtcaagcaaccgatatagagatccatgcaaatgaagttttgtcattaaaaaaaagattaaatgaactttactcaaaacatacaggtaagagcgttgaagaagttaaatccgcgcttgaaagagacaatttcatgacagctgatgttgcaaagtcatttggtcttattgacgaagttgtagaaaaaagatcttaat

SEQ ID NO: 264331 - DNA, 607 bp, Unknown
  Bacterial polypeptide expressing nucleotide sequence isolated from the Sargasso Sea
gatggccctgatacctatggtcgtggagcagaacagccgcggcgaaagagcatatgacatatattcaaggttgctcaaagaccggatcatcttccttgggacccccattgatgacaacgtcgcgaatgtgatgattgcccaacttctttttcttgaagcggaagatgccgaaagcgatattgctttttatatcaactgtccgggtggcctggtatcttccgggcttgctgtctatgacaccatccagtatctcaaggcagaagttcagaccatctgcatcggacaggcttccagcatgggagcggttttgctggctgctggagcaaaaggcaagcgctttgcacttcctcattctaggatcatgattcatcagccaaccgggggattttccggacaagcggaagatatcgatatccaggccaaagaaatacttagaaccacagaaactttaaacaacatccttgcatctcatacagggcaggatgtagaaaaagtcgcaaccgatacccagcgtgattattatttttctagcaatgaagccaaggcttatggcatcatcgattctgtgatgcatgaccgcaaattgcaggcagtgccctctaattga

SEQ ID NO: 264332 - DNA, 376 bp, Unknown
  Bacterial polypeptide expressing nucleotide sequence isolated from the Sargasso Sea
gtttggctattatgacactatcaaatacgtaaaaagtgatgttgtaaccatttgcgtaggccttgcagcctcaatgggtgcgttcctattggctgctggcacaaaaggaaaaagagttgctttgcctcatagcagaataatgattcatcaaccccttggaggaacatctcaacgccaagcaagtgatattgaaattgaagctaaggaaattttaagaattaaagatatgttaaatatgtctatggcagatatgacaggccaatcattcgagaaaattgaaaaggatacagacagagattattttctaagtgctgaagaggcaaaaaactatggcttaattgatagagtaatcacacatccaagcgaagcaaattaa

SEQ ID NO: 264333 - DNA, 444 bp, Unknown
  Bacterial polypeptide expressing nucleotide sequence isolated from the Sargasso Sea
gatggtggtagagcaatccagcagaggagaaagagcgtatgacatttattcaagacttctcaaagaaagaattgtttttgtagttggcccaataaatgacactgttgcatcattagttacagcccagctattatttcttgaaagtgaagatccaaaaaaagaaatctctttatatataaatagcccaggtggattagttacagctggattaggaatttacgatactatgcaatatattaaacctgaagttaacactttatgtataggccaagcagcaagtatgggatcttttttattagctgcaggtgcaaaaggaaaaagattttccctgccgaattccagaattatggttcatcaaccatcagcaggatttcaaggacaagcgactgacatagaaattcatgctaacgaagttctgtccttaaaaaaaagattaaatgaaat

SEQ ID NO: 264334 - DNA, 610 bp, Unknown
  Bacterial polypeptide expressing nucleotide sequence isolated from the Sargasso Sea
tatgaataaaataccagaacacctaaatactctaatccccatggttgttgaacaatcaaacagaggtgaaagagcttatgatatatattcaaggcttttaaaagaaagaattgtttttttaactggtcctataaatgatcaagttgcctccttagcaactgctcaacttctttttttagaatctgaaaatccaaaaaaagaaatatatctttatataaatagtccaggaggactcgttacagctggactaggagtttacgatacaatgcaatatattaaaccagatgtatcaactttatgtattggtcaagcagcttcgatgggatcttttttactagccgcaggaacaaaaggaaaaagattttctttaccaaactcaaggattatggtgcatcaaccatcagcaggttttcaaggtcaagctacagatattgaaattcatgcaaatgaagttttatctttaaaaaaaagattgaatgaaatttattctaagcatacaggtaagtctgtggatgaaataaaaaccgctttagagagagacaactttatgacaccacaggatgcaaaaaattttggtttaatagacaaagtagtagaaaaaagacagtaa

SEQ ID NO: 264335 - DNA, 595 bp, Unknown
  Bacterial polypeptide expressing nucleotide sequence isolated from the Sargasso Sea
atgaaccagctaattccgatggttgttgaacaaactcctagaggagaaagggcttacgatatttattccagattgcttaaggagagggtcatttttttaactggtccggtagaagattatggagctaaccttgttgttgctcaaatgctttttttagaagcagaaaatcctgataaggatatacatctttatattaattctccaggcggctcagtaacatcaggcatgtctatatacgacactatgcaatttataaaacctgatgttagcactttatgtattggtcaagctgcaagcatgggagcggtattgctggctggtggtgctgagggaaaaagacaggctttacctaactcgagggtaatgatccaccaagttcttggaggcttccaaggtcaggctagcgatattgaaatacacactaaggaaatattatcaattaaatctaaacttaatgaaatcttagcaaagcattcaggacaaaaagtagataaagttgcaaaagacagcgatagagataactttatgtctcctcaagaagccgttaagtatggtttaatagataatgtagtggatagcagattaaaggaataat

SEQ ID NO: 264336 - DNA, 613 bp, Unknown
  Bacterial polypeptide expressing nucleotide sequence isolated from the Sargasso Sea
aatgaaagatccgatagataatattaccaataacctcattccaatggttgttgaacaatcatcaagaggagaaagatcttatgacatctattcgagattgttgaaagaaagaatcatatttcttactggtccaattgatgataacattgcaagtctaatctgcgctcaaatattatttttagaatctgaaaatccaaaaaaagaaatttctttttatattaattctccaggcggtattgtttggtctgggttagccatttacgatactatgcaatatgtttcttcgaaaattatgactatttgtattggtcaggctgcttctgctgggtcacttcttttgactgctggagaaaagggaatgaggttttctttaccaaattctagaatcatggttcatcaaccaagtggaggttatcagggtcaagtaactgacattgaaattcaaactaatgaaataaaaaaaacaaagttaaaactaaatgaaatttattcaaaacatactggaaaaaaaatatcagaaatatctactataatggaaagagataaatacttctctgctgaagaagctattaaatttggtcttatagataaagttgtaaagggtaggaattaa

SEQ ID NO: 264337 - DNA, 578 bp, Unknown
  Bacterial polypeptide expressing nucleotide sequence isolated from the Sargasso Sea
tatgaataaaatacctgaacatcttaatacacttatccctatggttgttgaacaatcaagtagaggagaaagagcatacgatatctattcaagattattaaaagagagaatagtttttgtagttggaccaattaacgataatgttgcatccttggtaactgcacaacttttatttttagaatctgaagaccctaaaaaagaaatttctctttatattaatagcccaggtggtttggtaactgcaggactaggtatttatgatacgatgcaatatattaaacctgatgtatcaactttatgtatcggacaggcagctagtatgggatcttttttattagcagctggaactaaaggtaaaagattttctcttcctaattcaagaataatggttcatcaaccttctgcaggttttcaaggacaagcaacagatattgaaattcatgctaacgaggtattatctttaaaaaaaagattaaatgaaatttattcaaaacacacaaacaaatctgttgaagaaataaaatccgctcttgaaagagataattttatgactccagataatgcaaaagactttggac

SEQ ID NO: 264338 - DNA, 574 bp, Unknown
  Bacterial polypeptide expressing nucleotide sequence isolated from the Sargasso Sea
aatggtagttgagcaaactcctcgtggagagaggtcttttgatatttactcaagactactaaaagaaagagtaatttttttatctggtcctattgatgattacatttcaaatcttgttgttgctcaattgctttttttagaatctgagaatcctgaaaaagacatttcaatttatattaattctccaggaggaagcatttcagcaggcttggctatatacgatactatgcaatttataaaaccctcaatctcaacattatgcataggtcaagctgcaagtatgggcgcattattattagctggcggagataagaaaaaaagatttgctcttccaaattctagaattatgattcaccaacctcttggtggttttcaaggtcaggcttcagattttgaaatacatgcaaaagaaatacttcatatgaaaaaaattgttaatgaaattctttcaaaacataccggtcaaacattaaagaaaattgaaaaagacacagatagggataattttttagacgcaaaagcagcaaagacatatggaattgtagatagtattcttgagcaaagaggttcttaa

SEQ ID NO: 264339 - DNA, 655 bp, Unknown
  Bacterial polypeptide expressing nucleotide sequence isolated from the Sargasso Sea
aatgatcactcgcgctgaattgctggacatgcttgcttcgaacgcgccgcagggtttcgaggcgcaagcgctggggctggtgccgatcgtcgtcgaaacgagcggccgcggcgagcgttcgtacgatatctactcgcgtctcctgaaggagcgcctggtgttcatggtcggcgaagtgaacgaccagaccgccaacctcgtggttgcgcagctgctgttcctcgagagcgagaatcccgacaaggacatcagcctgtacatcaacagcccgggcgggtcggtgtcggccggcatggcgatctacgacacgatgcagttcatcaagccggacgtgtcgacgctgtgcatgggcctcgcggccagcatgggcgcgttcctgctcgcgtcgggtgcgaagggcaagcgtttcgcgctgccgaactcgcgcgtgatgattcaccagccgctcggcggcgcacgcggccaggcatccgacatcgagatccaggcacgcgaaatcctctacctgaaggagcggctgaaccagttgctcgcgcagcacacgggccaggacgtcgaacgcatcgcgcgcgacaccgaccgtgataacttcatgtcgagcgaggacgcgaaggcatacgggctgatcgatcaggtgctgttgaagcgtccgtga

SEQ ID NO: 264340 - DNA, 571 bp, Unknown
  Bacterial polypeptide expressing nucleotide sequence isolated from the Sargasso Sea
aatggtaattgaacagactcctagaggtgagaggtcgtttgatatttattcacgtcttttaaaagaaagagttatatttctatctgggcctattgatgactacatctctaatttggttgttgctcaattattatttttggagtcagagaatccagaaaaagatatatctatatacattaattcacccggtggaagtatctctgcaggacttgcaatatatgacaccatgcaatttgtttctccatcaatctctacgatgtgcattggacaggctgcaagcatgggagcattgttgctagcaggaggcgacaataaaaagaggtttgctttacctaattcaagaataatgattcaccaacctttgggcggatttcaaggtcaagcatctgactttgaaattcatgcaaaggaaattttgcatatgaaaaaaatagttaatgaaatattagcaaaacatacttgtcaaactataaagaaaattgaaaaagatactgacagagataatttcctagatgcaaattctgcaaaagcatatggtattgttgataaaatattagaggaaagaaaataa

SEQ ID NO: 264341 - DNA, 589 bp, Unknown
  Bacterial polypeptide expressing nucleotide sequence isolated from the Sargasso Sea
tatgatccctttagttttagaagaatcgggcggtagtgaaagagtctttgatatttattcgagactattaagagagagaataatctttttgggagaacaagttactagcgaaactgctaatagaattgttgctcaattattgttcctcgaggcagaggatccagataaggatatttatatgtatataaattcacctggcggatccgtttatgacggattgggtatctttgacacgatgcaacatgtaaagcctgatattcatacagtttgtgttggcttagcagctagtatgggtgcatttttgcttgcggcaggtactaaaggtaaaagaagcagccttagacattcaagaataatgattcatcaacctcttggaggagctagagggcaagccagtgatataagaattcaagcagatgaaattttgttcttaaaagaacgactgaatactgaattatcagaaagaactggaaaggattatgacactatcaaagaagatacagatagagatttttatatgtccccaaacgaagctgttgaatatggtttaattgatctggtattagataagaaaccaataaaagtttag

SEQ ID NO: 264342 - DNA, 610 bp, Unknown
  Bacterial polypeptide expressing nucleotide sequence isolated from the Sargasso Sea
gatgaacattgatgaaaaaacattaaatcagctggttcctatagttgttgagcaaacaggacggtctgaacgtgccttcgatatttattcgcgtttgcttaaagagaggattgtctttcttggtacgcctattgatgattctatcgcgtctttgatcattgcacaattactttttttagaagcggaagacccagaaaaagatatatatctttatattaattctcctgggggaattattacatcaggcatgggtatctatgacactatgcaatatataaaaccagatatttcaacaatatgtttggggcaggctgcaagtatgggtgcctttctattagcaggtggcgcaaaagggaaacgttctgccttaccaaattctagaattatgatacatcagccaatgggtggcgctcaagggcaggcaactgatataaagatccaggcagaagagatcttacgtatgaaaaaacaattaaattcaattcttgccaagaatacagggcaaactctaaaaaaaatagaggctgatacagagagagataattatcttacgtcaaaagaggctaagacctatggtatcattgattccattcttgcaaaaagaaaatga

SEQ ID NO: 264343 - DNA, 625 bp, Unknown
  Bacterial polypeptide expressing nucleotide sequence isolated from the Sargasso Sea
atggatagtaataaaatatttaatcagcttgttcctatggtggtagagcaaactggtagaggtgaaagagcttttgatatttactctaggcttctaaaagagagaatcatttttttagttggcccagtaaatgacagtatggcatcattagtatctgctcagcttttatttttagagtcagaaaatcctgagaaagaaatatctttatacataaactcacctggtggtgttgttagcgatggtttagcaatttatgatacaatgcaatttattcaatcacctgtttcaactctatgttttggacaagcagcttccatgggatcgtttttacttgccgcaggtgaaaaggataaaagatttgcacttccaaatagcagaattatggtacatcagccttcagctggatttcaaggtcaagccacagatattgaaatacatgcgaaagaagtattagctcaaaaatccaatcttaataaaatttattcaaagcatacaggccaacccgttgaagctatcgaagaagcactcgaaagagataacttcatgtcaccaaccgatgctcaaaaatttggtataattgatagtattcaagaaaaacgcgttgccccaaaaattgagaaatagc

SEQ ID NO: 264344 - DNA, 610 bp, Unknown
  Bacterial polypeptide expressing nucleotide sequence isolated from the Sargasso Sea
aatgagtaaagatcagaaaataattgaccaactagttccaatcgttgttgagcaaacagggaggtcagagagagcttttgatatctactccagactattaaaagagagaataatttttttgggcacaccgattgaggatacgatgtcatcgctaacaattgcccagttgttattcttagagtcagaggacccagagaaagatatctatctttatatcaattcacctggtggaatcattacttcgggatttgggatctatgatacgatgcagtacatcaaaccagatgttgcaacgatctgcatgggccaggccgctagtatgggagcttttttacttgcgggcggtgcaaaagggaaaagatccgcactcccaaatagcaggatcatgatccaccagcctatgggcggggcagaaggtcaggccgctgatattaggattcaggcggatgaaatcctaagaatgaagacacagttaaataaaattttagcaaaaaatacaggtcaaacagtcaagaagatagaggtggacacagaccgtgataatttcatgaccgcagctgaagcaaaacgctacggaattattgacacaatccttacatctagaaaataa

SEQ ID NO: 264345 - DNA, 619 bp, Unknown
  Bacterial polypeptide expressing nucleotide sequence isolated from the Sargasso Sea
catgaaaaaagagccttcaaattatgttgtacctacagttattgagaatacaaatagaggcgagagagcttttgatatatattcaaggcttttaaaagatagaattatatttcttggcacaccaattgatgatggtgtagcaaaccttataatggcacaattattacatctagaatctgaagatccagaaaaagatatttatatttatatcaattcacctggtggctcaattacatcattatttgcaatctatgacacaatgaaatacatcaaaccagatgtagcaacagtgtgtatgggacttgcagcttctgccggtgcagtaatactagctggtggaacacctggaaaaagatactctcttccacatgcaagaataatgttacatcaaccagctggtggtgcagaaggtacttcaaaagacattgaaattcaagcaaaattgattacagatatgagaaatcaaataaatggtcttttggctgattttactgataaagacgtagaacaaatcgctgttgatactgacagagatttttggatgaccgcgcaagaagcgttggaatacggtatagtagatgaagtactaactcaaagggagttagcagacaaaaaataa

SEQ ID NO: 264346 - DNA, 622 bp, Unknown
  Bacterial polypeptide expressing nucleotide sequence isolated from the Sargasso Sea
atggaaaataaatttacaccacaaagtaatcttatacctatggtagttgagcaatcaaatagaggagagagagcctatgatatctactctagattgctaaaagagagaattgtttttgttacgggaccgattgaagattatatggcaagcgtaattactgctcagcttttatatttagaagctgaaaacccgaaaaaggaaatttcaatgtatattaattctcctgggggagttgtttcatcaggtttagctatatacgatactatgcaatacattaaacctgaggtgtctacactttgtataggtcaagctgcttctatgggaagcttacttctagcagcaggcgccaagagtaaacgatttgctttaccaaattcaagaataatggttcaccaaccttcaggtggttttcaaggtcaagcatcagatattgagagacatgcaaaagaaataatatccttacgaagcagattaaatgagatttatgtaaaccatactggcaaagacttaaaaacaattgaggcagcattagatagagatacatttatgacatcggatgatgctaaaaaatttggtttaattgataaagttgttcaaaaaagggatgttgaagagaaataat

SEQ ID NO: 264347 - DNA, 625 bp, Unknown
  Bacterial polypeptide expressing nucleotide sequence isolated from the Sargasso Sea
tatgtacaagaactataacgatgtgactgaatccccacgcaatgcgctcatcccgatggtggtagagcaaaccgcgaaaggggagcgttcctacgacatctattctcgtctgctgaaggagcgggtgatcttcctgaccggtcaggttgaagatcacatggcgaatctggtggtggctcagctgctgttcctggaatctgaaaatccggatcaggacatcagcatctacatcaactctccgggtggggccgtcacggccggtatgtccatttatgacaccatgcagttcatcaagccggacgtcagcacggtgtgcatggggcaggcctgctccatgggtgccttcctgctggccggtggtgccaagggcaagcgtttctgcctgcccaatgcccgcgtgatgatccaccagccgctgggcggtttccagggccaggcatctgatatccagatccatgcccaggagatcctgaagatcaagaataccctgaacgagcgtctggccttccataccggtcaggacatggccaccatcgagcgtgacaccgaccgtgacaacttcatgtcggccgagcaggccgtggcctatggtctggttgacggtgtcctgagccgccgcagctga

SEQ ID NO: 264348 - DNA, 589 bp, Unknown
  Bacterial polypeptide expressing nucleotide sequence isolated from the Sargasso Sea
atgtctaatctaataccgatggttgtcgaacaatcaagtagaggagagcgagcatatgatatttactcaagattacttaaagagagaataatatttatagttggacctatcaatgatgctgtagcatcattagtaaccgcacaaatgttatttttagaatctgaaaatccaaaaaaagatatttttatgtatattaatagtcctggaggcctggtaactgctggactagggatttatgacacaatgcagtatattaaaccagaagtttcaacaatttgtattggtcaagcggctagcatgggttcatttcttttatcagctggatgtaaaggtaaaagattttcattacctaattcaagaattatggttcatcaaccatctgctggttttcagggtcaagcaactgacatagaaattcatgctaatgaagtattgtctctgaagaaaagattaaatgaaatttactctaaacatacagggaaaactgttgatgaaataaaagctgccctagagagagataatttcatgacacctgatgcggcaaaaaattttggattaatagataaagttgtggaaaaaagagactgat

SEQ ID NO: 264349 - DNA, 613 bp, Unknown
  Bacterial polypeptide expressing nucleotide sequence isolated from the Sargasso Sea
tatgactactaaaattccagaacaattaaataccttaatccctatggttgtcgaacaatctagtagaggagaaagggcatatgacatttattcaagactccttaaagagaggattgtatttgtagttggtcccattcatgatgcggttgcatcattagttactgcgcaattattatttttagagtctgaagaccctaagaaagaaatttctttatatataaatagtcctggtggacttgtaacagctggacttggtatttatgatacaatgcaatacataaagccagaaataagtactttgtgtataggtcaagcagcaagcatgggttcatttttactagcagcaggtgctaaaggaaaaagattttcgttgccgaattctagaataatggttcatcaaccttctgctggttttcaaggacaggcaacagatattgaaattcacgctaatgaggttttatctttaaagaaaagattaaatgaaatctattcaaaacatactggaaaatctgttgatgaaattaaatcagcattagagagagataattttatgactcccgataatgcaaaaagttttggccttatagataaagtggtagaaaagagagaatag

SEQ ID NO: 264350 - DNA, 610 bp, Unknown
  Bacterial polypeptide expressing nucleotide sequence isolated from the Sargasso Sea
tatgaataaaatacctgaacatttaaatacgttaataccaatggttgttgaacaatcaaatagaggggaaagagcttacgatatctattcaagattattaaaggaaagaattgtttttgtagttgggccaataaacgatactgttgcatcacttgttactgcccaacttttatttttagagtctgaagatccaaaaaaagaaatttcactttatataaatagcccgggaggtttggtaaccgcaggtttaggcatttatgatactatgcaatacataaaacccgatgtatcaacattatgtataggacaagctgctagcatgggatcttttttgctggctgctggtacaaaaggaaaaagattttctcttcctaactcaagaataatggtacatcaaccttcagcaggttttcaaggacaagctactgatattgaaattcatgctaatgaagtattgtcattaaaaaaaaggttaaatgaaatttattcacaccatacaaataaatctgttgatgaaataaaatcagcacttgaaagagacaattttatgaccccagagaatgcaaaggattttggtctaatagataaagtggtggtaaacagacagtag

SEQ ID NO: 264351 - DNA, 613 bp, Unknown
  Bacterial polypeptide expressing nucleotide sequence isolated from the Sargasso Sea
atgccaataggaactccaagcgtgccatacagacttccaggaagtcaatacgaaagatgggtcgacatatatacaagactaggtgttgaaagaattctttttcttggacaagaagtaaatgatggtattgctaacagccttgttgcacaaatgctttacctagattctgatgataattccaaacctatctatctgtatataaatagcccaggaggatcagtaactgctggcttggctatatatgacactattaaatacgtaaaaagtgatgtagtaaccatatgcgtaggcctcgcagcctccatgggagcgttcctattggctgctggtacaaaaggtaaaagagttgctttgccccatagcagaataatgattcatcaacccttaggtgggacatctcaacgccaagcaagtgacattgaaattgaagctaaggaaattttaagaattaaggatatgttaaacatgtctatggcagatatgacaggccaatcatttgagaaaattgaaaaggatactgacagagattattttcttagtgcggaagaagcaaaaaattatggattaatcgatagagtaattacacatccaagcgaagcaaatcattcttaaa

SEQ ID NO: 264352 - DNA, 574 bp, Unknown
  Bacterial polypeptide expressing nucleotide sequence isolated from the Sargasso Sea
atgagcataaaaatacctgaacatctaaatactctaatcccaatggttgttgagcaatcaaatagaggggaaagagcttatgatatttattcaagattattaaaagaaagaattgtttttcttgtaggtcctattaatgataacgttgcttctttggtaaccgcccagttattatttttagagtctgaagatccaaaaaaagaaatttcgttgtatattaatagcccaggaggccttgtcactgcaggattaggtatttacgacacaatgcaatatataaaacctgacgtttcaactttatgtattgggcaagcagctagcatgggttcttttctgttagcggctgggacaaaaggaaaaagattttctcttcccaattcaagaataatggtccaccaaccttcagcaggctatcaaggtcaagctactgatattgaaatccatgcgaatgaagtattgtcattaaaaaaaagacttaatgaaatttattctaagcatacaaaaaaatcagtagatgaaattaaaacagcacttgaaagagataatttcatgacaccagataatgcaaaagatt

SEQ ID NO: 264353 - DNA, 598 bp, Unknown
  Bacterial polypeptide expressing nucleotide sequence isolated from the Sargasso Sea
gatggtgctcgaacaaaccaatcgaggcgagcgtgtgttcgacatttactcgcgtctgttgaaggaacgcatcgttttcatcaacggcgcgatcgatgataacatttcctcgctcacggtggcgcagttgttgttcttggagagcgtgagtccgacgcaaccgatctggatgtacatcaactcgccgggggggagcgtgacggcgggtttgggcatttacgatacgatgcagtacatctcaccgcccgtgcacacgctttgcgtgggacaggcgagcagtatggggagcctgttgctcgcggcgggtgaaccgggagagagacggagtttgccgaacgcgcgcgtgatgcttcaccaaccgagcggaggcgcgagcgggcaggcgagcgacatcgccattcacgcgcaagagattttaaacgtgcgcgagaaactcatcaaaatatacatgcagcacaccaagcaggagtttaaccagatcggcgtgactctggagcgggacacgttcatggatccggaggatgcgaaatcgttcgggatcatcgacgaagtcatcgcgaagaggccggatactacggtggacgagacgaaaaagtaa

SEQ ID NO: 264354 - DNA, 589 bp, Unknown
  Bacterial polypeptide expressing nucleotide sequence isolated from the Sargasso Sea
tatgagtaatttagttcccatggttgtagaacaatcaagcaagggtgagagagcttatgatatttactctcgtctattgaaagagcgtataatttttctaactggtcaaattaacgacaatgttgcatctttaattactgcacaacttttatttttagaagctgaagatccaaaaaaagaaatttatttatatataaatagtccaggaggtttagttaccgctggtttaggtatttatgatacaatgcaatatgttaaacctgacatctctactttatgcattggacaggcagcatcaatgggatcatttttattagcagctggaactaaaaataaaagattttctttaccaaactccagaataatggtccatcaaccctcagcaggatttcagggtcaagcaactgatattgaaattcatgctaaagaagttttgtctttaaaaaaaagattaaatgaaatttattccaaacatacaggtaaatcagaagatgaaattaaagcagctctagagagagataattttatgactgctgaaactgctaaatcttttggtttgattgatgaagtagtagaaaagagatcataa

SEQ ID NO: 264355 - DNA, 610 bp, Unknown
  Bacterial polypeptide expressing nucleotide sequence isolated from the Sargasso Sea
atgaacattgatgaaagagtacttaaccaattggttccaatggttgtggaacaaacaggccgctcagaacgtgcgttcgacattttttctcgattacttaaagaaagaatagtttttttaggtacaccaataaatgattcaatggcctctctcataattgctcagttactctttttagaagcagaagactcagaaaaagatattaatttatatataaactcaccaggtggggtaattacctctggaatgggaatatatgatactatgcaatatatcaagcctgatgtggcgaccatatgtttaggacaggctgctagcatgggtgcttttttgcttgctggtggtgctaaggggaagagatctgcactgcccaattccagaattatgatacaccagcccatgggcggagctgaaggccaggccacagacattgagattcaggcagaggagatactaagaatgaaaaaacaattaaattctattcttgctaagaattcaggtcagacgcttaagaagattgaggctgataccgatcgagataattatttaacctcaaaagaagctaaagcctatggtctaattgatacaattcttgtaaaaaggaaatgag

SEQ ID NO: 264356 - DNA, 613 bp, Unknown
  Bacterial polypeptide expressing nucleotide sequence isolated from the Sargasso Sea
atgacaacaaaaattccagaacatttaagtactttgatcccaatggtagttgagcaatcaagccgtggtgaaagagcttatgatatttattcaagattactaaaagagagaattgttttcgtagttggaccaattaatgatgcagttgcatctttagttactgctcaattattatttttagagtctgaagatccaaaaaaagaaatttctttatatataaatagtccaggtggattagtaacagcaggtttaggaatttatgacacgatgcaatatattaaacctgaggtcagcacattatgtattggtcaagctgcaagtatgggatcatttttgttagctgcaggatcaaaagggaaaagattatctttgccaaattcaagaataatggttcatcaaccatctgcaggttttcaaggtcaagcaactgatatagaaattcatgctaatgaggttatgtctttgaaaaaaagattgaatgaaatttattctaaacacacaggtaagtcagttgatcaaatcaaagaagctttggaaagagataattttatgactccagacaacgcaaaagattttggtttgatcgataaagtagtagaaaaaagagactaaa

SEQ ID NO: 264357 - DNA, 511 bp, Unknown
  Bacterial polypeptide expressing nucleotide sequence isolated from the Sargasso Sea
atgccaataggaactccaagcgtgccttacagacttccaggaagtcaatacgaaagatgggtcgacatatatacaagactaggtgttgaaagaattctttttcttggacaagaagtgaatgatggtattgctaatagccttgttgcacaaatgctttatttagattctgatgataattccaaacctatctatctgtatataaatagcccaggaggatcagtaactgctggcttggcaatttatgacactattaaatacgttaaaagtgatgtagtaactatatgcgtaggcctcgcagcctccatgggagcgttcctattggccgctggtacaaaaggtaaaagagttgctttgccccacagcagaataatgattcatcaacccttaggagggacatctcaacgtcaagcaagtgatattgaaatagaagccaaggaaattttaagaattaaagatatgttaaatatgtctatggcagatatgacaggccaatcatttgagaaaaattgaa

SEQ ID NO: 264358 - DNA, 604 bp, Unknown
  Bacterial polypeptide expressing nucleotide sequence isolated from the Sargasso Sea
atggaaactttcaaccagctggttccaatggtagtggaacaaactccaagaggggagagagcattcgacatttactcaagacttctcaaagaaagagtaatatttatcaccggaacagttgaagaccagatggcaaatttaattgtggctcaactcttatttttggaagctgaaaatcctgacaaagatattaatctttacattaattctcctggaggatctgtgacttcgggtctttcgatatatgacacaatgacttacatcaagcctgacataagtactttatgcatcggacaagcttgcagcatgggagcagtgcttctcgctggaggttctaagggtaaaagatttgctcttccaaattctagaataatgattcatcaacctatgggcgggttccaaggacaagcaacagacattgaaattcaggctaaagaaatgttaaaaataagaactaaattaaatgaaattttgtcaaatcattgcggtcaatcacttgataaaatttctgaagatacggaacgtgataattttatgtcgggtgaagaagcttgtgaatatggtctgattgataaagttttaagtgaaagaatagaaaaatgac

SEQ ID NO: 264359 - DNA, 193 bp, Unknown
  Bacterial polypeptide expressing nucleotide sequence isolated from the Sargasso Sea
atgacaaaaattgatgaacatatgaatactttaattccaatggtggttgagcaaaccagtagaggagagagggcttttgatatttattcaaggcttttaaaagagagaattgtttttgttgttggtccaataaacgatcatgttgcatctttagttactgctcaattattatttttagaatctgaagatccaa

SEQ ID NO: 264360 - DNA, 284 bp, Unknown
  Bacterial polypeptide expressing nucleotide sequence isolated from the Sargasso Sea
tatgacatcaaaattatccgaacagctaaatactcttgtccctatggttgtggaacaatccagtagaggtgaaagagcttatgatatttactcaagacttttaaaagaaagaattgtttttgtagtagggccaattaacgacaccgttgcttcattagtaacagcgcaattattatttttagaaagtgaagatccaaaaaaagaaatatctttatatataaatagcccaggcggattggtaactgctggattaggtatatatgatactatgcaatatattaaac

SEQ ID NO: 264361 - DNA, 286 bp, Unknown
  Bacterial polypeptide expressing nucleotide sequence isolated from the Sargasso Sea
tcttttttattagctgctggaactaaaggaaaaagattttcttttcccaactccagaattatggttcaccaaccttccgcaggttttcaaggtcaagcaactgatattgaaattcatgcaaatgaagttttatctttaaagaaaagattaaatgaaatttattcaaaacatacaaacaaaacatctgatgaaataaaaagtgctcttgagagggacaattttatgagtcctgaaacagcaaaagagtttggccttatagataaagtagtggttaaaagagaataaa

SEQ ID NO: 264362 - DNA, 460 bp, Unknown
  Bacterial polypeptide expressing nucleotide sequence isolated from the Sargasso Sea
tatgactataaaaattccagaacaattaaataccctaatccctatggttgtcgaacaatctagtagaggggaaagggcatatgatatttattcaagactccttaaagagagaattgtatttgtagttggccccataaatgatgcggttgcatcattagttactgcacaactattatttttagagtctgaagatcctaagaaagaaatttctttatatataaatagtcctggtggacttgtaacagctggacttggtatttatgatacaatgcaatacataaagccagagataagtactttgtgcataggtcaagcagcaagcatgggttcatttttactagcggcaggtgctaaaggaaaaagattttcattgccgaattctagaataatggttcatcaaccttctgctggttttcagggacaggcaactgatattgaaattcacgctaatgaggtttta

SEQ ID NO: 264363 - DNA, 589 bp, Unknown
  Bacterial polypeptide expressing nucleotide sequence isolated from the Sargasso Sea
tatgatccctttagttttagaagaatcgggcggtagtgaaagagtctttgatatttattcgagactattaagagagagaataatctttttgggagaacaagttactagtgaaactgctaatagaattgttgctcaattattgttcctcgaggcagaggatccagataaggacatttatatgtacataaattcacctggcggatccgtatatgacggattgggtatctttgacacaatgcaacatgtaaagcctgacattcatacagtttgtgttggcttagcagctagtatgggtgcatttttgcttgcggcaggtactaaaggtaaaagaagcagccttagacattcaagaataatgattcatcaaccacttggaggtgctagagggcaagccagtgatataagaattcaagcagatgaaattttgttcttaaaagaaagactaaatactgaattatcagaaagaactggaaaggattatgacactatcaaagaagataccgatagagatttttatatgtccccaaacgaagctgttgagtacggtttaattgatctggtgttagataagaaaccaataaaagtttag

SEQ ID NO: 264364 - DNA, 271 bp, Unknown
  Bacterial polypeptide expressing nucleotide sequence isolated from the Sargasso Sea
tatggataaaataaattctggcttagtgccaatggtagtagagcaaacgccaagaggtgaacgggcttttgatatctactctcgtcttttaaaagagagaattatttttttatcaggccctattgatgactacatctcaaatctcgtggtagctcaactcctatttttagagtcagaaaatcctgaaaaagacattagcatatatattaattctcctggcggagtgatttcgtcaggccttgcaatctatgacaccatgcaatttgtggct

SEQ ID NO: 264365 - DNA, 324 bp, Unknown
  Bacterial polypeptide expressing nucleotide sequence isolated from the Sargasso Sea
tttgtgttggccaggcagccagtatgggcgcacttctcctcggtggaggtgcttcagggaaaagatttgcactgccacattcgagaattatggttcatcaaccaagtgctggttttcaaggtcaagctacagatattgatattcatgcaagagaagtactagagctaaagaatcgtttgaataaaattatggcaaaacacacgggtcaaaaaatcacaaagattgagaaagatctagaacgtgataatttcatgagttctattgaagctcaaaaatatggccttattgatacagtattaaataacagaaaagaattaaaataac

SEQ ID NO: 264366 - DNA, 271 bp, Unknown
  Bacterial polypeptide expressing nucleotide sequence isolated from the Sargasso Sea
gctgggtgaaaagggtaagcggtactcattacctaattcaagaattatggttcatcaaccctctgccggtttccaaggtcaagctacggatattcaaatacatgctaaagaaattttatccttaaaagagagattgaataaaatttattcaaaacatactggtaagtcattagctgaaatttcagacgctcttgagagagacaacttcatgactgcagaagaagctaaaaaatttggtttgatagactctgttgtggagaaacgaaaataa

SEQ ID NO: 264367 - DNA, 424 bp, Unknown
  Bacterial polypeptide expressing nucleotide sequence isolated from the Sargasso Sea
atggtcgttgaacagacgggaagaggggaacgtgcttttgatatttattcaagattattaaaggaaagaataatatttttagttgggccagttaacgatcacatggcctctttagtttcagcccagcttttgtttcttgaatctgaaaatcccgaaaaagagatatcattatatataaattcacctggaggagttgtaagtgatggattagcaatttacgacacaatgcaattcatacagtctccagtctcaactctttgttttggacaggctgcttctatgggctcattcttacttgcagcaggtgaaaaaggaaaaagatatgctttacctaatagccgcataatggtgcaccagccatctgctggctttcaaggtcaagcaactgatatagaaattcatgcgaaagaggtcttggcaatga

SEQ ID NO: 264368 - DNA, 613 bp, Unknown
  Bacterial polypeptide expressing nucleotide sequence isolated from the Sargasso Sea
atgacaattaaaataccagagtatatgaacaacttagttccgatggttgttgagcaatcaagccgaggtgagagagcattcgatatatattctaggctattaaaagaaagaattgtttttgttgtaggaccaataaacgataacattgcatcactggtaacagctcaattattatttttagagtctgaagacccaaagaaagatatatctttatatattaatagtcctggtggattagtaacagctggtttaggaatttatgataccatgcaatacattaaaccagaagtatcaactctttgtattggtcaagccgcaagcatgggatcttttttattatctgcaggaaaaaaaggtaagagattttcattaccaaattcaagaatcatggttcatcaaccgtcagcaggttatcaaggacaagcaaccgatattgaaatacacgcaaatgaggtcatgtcattaaaaaagagattaaatgaaatatattcaaagcataccggaaaagctgttgaggaaatcaaaagtgccttagagagagataactttatgacaccagaaaatgcaaaagaatttggtttaattgataaagtagtagataagagagaataat

SEQ ID NO: 264369 - DNA, 361 bp, Unknown
  Bacterial polypeptide expressing nucleotide sequence isolated from the Sargasso Sea
atgaacaaaatacctgaacacctaaatactcttattcctatggttgttgaacaatcaagtaggggagaaagggcctatgatatttattcaagattattaaaagaaagagttgtttttgttgttggacctataaatgatactgttgcatctttagttactgcacaattattatttttagaatcagaagatccaaaaaaagaaatatctttatacattaatagtcctgggggtttggtaacagctggcttaggtatttatgatacaatgcaatatatcaaaccaagatgtttctactttatgtataggacaagcagcaagtatgggttcatttttattagcagccaggtacaaaaaggaaaaa

SEQ ID NO: 264370 - DNA, 448 bp, Unknown
  Bacterial polypeptide expressing nucleotide sequence isolated from the Sargasso Sea
aatgaaagatcctatagataatttaactaataatcttattccgatggttgttgaacagtcatcaaggggggagagagcttatgatatttactcaagattattaaaagaaagaataatttttctcactggtccaattgatgataatattgccagcttaatatgtgcacaaattctttttttagagtctgaaaatccaaaaaaggaaatttctttttacataaattcaccaggtggcatagtttggtcaggtttagcaatttatgataccatgcaatatgtttcatctaaaataatgactatatgtgttggtcaagcagcttcagctggatctttattattaactgctggagataaagatatgcgtttttcacttccaaactctagaattatggttcaccaaccaagcggaggttatcaaggtcaggtaacagatatagaaattcaaaca

SEQ ID NO: 264371 - DNA, 613 bp, Unknown
  Bacterial polypeptide expressing nucleotide sequence isolated from the Sargasso Sea
catgattcgtaaaattgaagagcaactaaataatctagttccaatggttgttgaacaaacaaccaagggagagagagcttacgatatttattcacggttattgaaagagagaattgtattcttagttggaggagtaaacgatacagcagcatctttagtaacagcacaacttttatttttagagtccgaaaatccaaaaaaagaaattttcttttatattaatagcccaggaggacttgttacatcaggtttaggtatatatgatactatgcaatatattaaatcacctgtttcaacactttgtattggacaagcatcatcaatgggttcatttttattatctgctggggaaaagggaaaaagattttctttaccaaattcaagaataatggttcatcagccgtcagcaggatttcaaggtcaagctactgatatccaaattcatgcaaaggagattttagccttaaaagaaaggcttaataaaatttattctaaacataccggaaaatctctcaaagaaatttctcaggctttagaaagagataactttatgactccagaagaagccaaagattttggattaatagactctgtagtcgaaaaaagaaaataa

SEQ ID NO: 264372 - DNA, 474 bp, Unknown
  Bacterial polypeptide expressing nucleotide sequence isolated from the Sargasso Sea
acgcaattgcatcattagttactgcgcaattattatttttagaatcagaagatcctaagaaagaaatttctttatatataaatagtccaggtggacttgtaacagctggacttggtatttatgatacaatgcaatacattaaacccgaaataagtactttgtgtataggtcaagcagcaagcatgggttcatttttacttgcagctggcgctaaaggaaaaagattttcattgccaaattcaagaataatggttcatcaaccttcagctggttttcaaggtcaggcaacagatattgaaattcatgctaatgaggttttatctctaaaaaaaagattaaatgaaatttactcaaaacatactggaaaatcagttgatgaaattaaatcagcattagaaagagataactttatgactcctgataatgcaaaaagttttggtcttttagataaagtggtagaaaaaagagaatagg

SEQ ID NO: 264373 - DNA, 625 bp, Unknown
  Bacterial polypeptide expressing nucleotide sequence isolated from the Sargasso Sea
atgactaaaaaagaggaccttgcaatgaacctaataccaatggttgttgagcaatcgaatagaggtgagagagcttacgacatattctcaaggcttttgaaggagaggataatttttataacaggtccaattgatgatagtgttgctacaatagtgacagcgcaattattatttctggaagctgaaaatcctaaaaaagagatatctctgtatatcaactcacctggtggtgtagtaactgccggcatggcaatttatgacactatgcaatttattagacctcccgtatcaactctctgcattggtcaggcggcatcaatgggttccttactgttggctgcgggtgagaaggggatgaggtattgcctcccgcactcgagggttatggtccatcaaccatctggaggtttttctggtcaggctagtgatattgaaaggcatgcggaagatatcatcaagataaaaaagagactcaatgatctttatgttaatcatacagggcaatcatacaatacaattgaaaaaaccttagaccgagattactttatggattctaaggaagcaaaaaaatttggaatcgttgatgcggtaatcgcatccagggaagaatctgatgaaaaataac

SEQ ID NO: 264374 - DNA, 215 bp, Unknown
  Bacterial polypeptide expressing nucleotide sequence isolated from the Sargasso Sea
aatggaagaacataattcaactttaatacctatggtagttgagcaaactgccagaggtgaacgtgcttttgatatatattcaaggctattaaaagagcgagttattttcttaaccggacccataaatgatcaagtttcaaatcttgtagttgctcaaattattatttttagaatcggaaaatcccaagaaagacatcagcatttatataactcac

SEQ ID NO: 264375 - DNA, 622 bp, Unknown
  Bacterial polypeptide expressing nucleotide sequence isolated from the Sargasso Sea
atggaaaataaatttacaccacaaagtaatctaatacctatggttgttgaacaatcaaataggggcgaaagggcttatgatatttattctcgacttcttaaagagagaatagtttttgttacgggaccaattgaagattatatggcaagtgtaattaccgctcaactcttgtatttagaagctgaaaatccaaaaaaagaaatctcaatgtatattaattcacctggtggagttgtttcatctggtttggctatctatgatactatgcaatatattaaaccagaagtttcaaccctttgtattggtcaggcagcctctatgggtagtttacttttggctgcaggcgaaaaaaataaaagatttgctctaccaaattcaagaattatggttcatcaaccatcaggaggttttcaaggccaagcatcagatattgagagacatgcaaaagagataatttcacttagaagtagattaaatgagatttatgttaatcatactggaaaagatttaaaaaccattgagtcagcattagatagagatacttttatgacttcagatgatgctaaaaaatttggcttaattgataaagttgttcaaaaaagggatattgaagagaaataat

SEQ ID NO: 264376 - DNA, 459 bp, Unknown
  Bacterial polypeptide expressing nucleotide sequence isolated from the Sargasso Sea
tagttactgcacaattattatttttagagtctgaagatccaaaaaaagaaatttcattatatattaatagccctggtggacttgtaactgctgggctaggaatttatgatacgatgcaatatataaagccagaaattagtacattatgcattggtcaggctgcgagcatgggttcttttttactagcagctggatctaaaggaaaaagattttcattaccaaattcaagaataatggttcatcaaccctcagctggttttcaaggccaagcaactgatattgaaattcatgctaatgaagttttgtctttaaaaaataggctaaatgaaatttattcaaaacatactggaaaaaccgttgatgaaataaaatcagcattagaaagagataattttatgactccagataacgcaaaaagttttggtctgatagataaagtggtagaaaaaagggaataag

SEQ ID NO: 264377 - DNA, 571 bp, Unknown
  Bacterial polypeptide expressing nucleotide sequence isolated from the Sargasso Sea
atggttgttgaacaatctagtaagggagaaagagcatatgatatttattcgagattattaaaagagagaataatttttttaacaggtcaaattaacgataatgttgcttctttagttactgcccaacttttatttttggaggcagaagatcctaaaaaggaaatttatttatatataaatagtcctggggggttagtaactgcgggtcttggtatttatgatacaatgcaatatgtaaagccagatatttccacattatgtattggtcaagcagcgtcaatgggatcatttttactttcagctggaaaaaaaggtaaaagattttcattaccaaattctagaataatggttcatcaaccatctgctggttttcaaggacaagcaactgatattgagattcatgctaatgaagttttatctttaaaaaaaagattgaatgaaatttattcaaaacatacgggtaaatcagtagacgaaatcaaatctgctctagaaagagataactttatgactgctgatgctgccaagtcatttgggttgatagatgaagtggtagaaaaaagatcttaat

SEQ ID NO: 264378 - DNA, 568 bp, Unknown
  Bacterial polypeptide expressing nucleotide sequence isolated from the Sargasso Sea
ggttgtcgaacaatccagtagaggagaaagagcttacgatatttattcaaggttactcaaagaaagaatagtatttgtagttggacccataaatgatgcagtagcatccttagttaccgcacagttattatttttagagtctgaagatccaaaaaaagaaatttctttatacataaatagtcctggtggtcttgttactgccggacttggtatttacgatactatgcaatatataaaaccagaaataagtactctatgtattggtcaagcagcaagtatgggttcatttttattggcagcaggttctaaaggaaaaagattttcattaccaaattctagaataatggttcatcagccctcagctggttttcaaggtcaagcaacagatatagaaattcatgctaatgaagtattatcattaaaaaaaagattaaatgaaatttattcaaaacatacaggaaaatctgttgacgaaattaaatcgtcattagaaagagacaactttatgactccagataatgcaaaaagttttggccttatagacaaagtagtagaaaagagagaataa

SEQ ID NO: 264379 - DNA, 652 bp, Unknown
  Bacterial polypeptide expressing nucleotide sequence isolated from the Sargasso Sea
aatggatttaggaaaagaatttaaggattatgcaaccaaacatcatggtatcaattcaatgtattatgataaaattataagtagtatgactccttatattattgaagaaaggcaattaaatgttgctcaaatggatgttttttcaagactcatgatggatcgaatcatgtttttaggaactgcaataaatgacaatgtagctaatgttattcaggcccaattactttttttacaaagtacagattcatctagtgatataaatatgtatattaactcacctggaggatctgtttatgctgggcttgggatatatgataccatgcaatttatttctccaaatgttgctacaatatgtactggtatagctgcatctatgagcgcaattttactttgcgctggagaaaaaggtaaacgttcagtacttactcattctagagtaatgattcatcaaccattaggtggtgtacacggacaagcttcagacattgaaattactgccagagaaatattaaaattaaaagaggagttatatcagattattgcaaaacactcaggacaagattacaaaaaggtaagtcaggatggagatcgtgattattggatgaaagcgaatgaggcaaaatcatatgggatggttgatgaagttcttacc

SEQ ID NO: 264380 - DNA, 613 bp, Unknown
  Bacterial polypeptide expressing nucleotide sequence isolated from the Sargasso Sea
tatgtctattaaaattccagaacaactaaacacccttatccctatggttgtcgaacaatctagtagaggagaaagagcatatgacatttattcaagactgcttaaagagagaattgtatttgtagttggtcctataaatgacgcagttgcatcattagttactgctcaattattatttttagagtctgaagatcctaagaaagaaatttctttatatataaatagtcctggtggacttgtaacagctggacttggtatttatgacacaatgcaatacatcaaaccagagataagtactttatgtataggtcaagcagcaagcatgggttcatttttacttgcagctggcgcgaaaggaaaaagattttcattaccaaattctagaattatggttcatcaaccctctgcaggttttcaaggacaagcgacagatattgaaattcacgctaatgaagttttatctttaaagaaaagattaaatgaaatctactcaaaacatactggaaaatcagttgatgaaattaaatcagcattagagagagataattttatgactcctgataatgcaaaaagttttggtctgatagataaagtagtagaaaagagagaatag

SEQ ID NO: 264381 - DNA, 613 bp, Unknown
  Bacterial polypeptide expressing nucleotide sequence isolated from the Sargasso Sea
aatgaaagatccattagaaaatttttataataacttagtacctatggttgttgagcaatcttcaagaggtgaaagagcatatgatatatattcgagacttctaaaagaaagaatcatttttttaacaggtcctattgatgataacattgctagcttaatttgtgcccaaatactttttctagagtcagagaatcctaaaaaggaaatatcattttacataaattctcccggaggcattgtatggtctggattagctatatatgatacgatgcaatatgtttcttcaaaaataatgactatctgcgttggtcaggcagcatcagcaggttctttgctgttaactgctggagcaaaagatatgcgtttttctttacctaattcaagaataatggttcatcaaccaagtggaggtttccaaggtcaagtaactgatattgaaattcaaactaatgaaattaaaaaaacaaaacagaaattaaatgaaatatattctaaacatactggaaaaaaaatcactgacatatccagtattatggaaagagataagtttttttcaccagaagaggctattaaattcggtctaatcgataaaatagttgaaagtaggaaataa

SEQ ID NO: 264382 - DNA, 607 bp, Unknown
  Bacterial polypeptide expressing nucleotide sequence isolated from the Sargasso Sea
aatgggtaagaatgcaatggcccagttagttccaatggttgtagagcaatctggacgaaccgaacgtgcatacgatatctactcaagactattgaaggaaagaataattttcctgggcacgccaattgatgatactgtggcttctttagttattgcccagttattattcttagaagcagaaaattctgataaagatatattcttgtatattaattcaccaggaggttatgtttctgcagggttgggtatttttgatacaatgaattatataaaaccaaatgtagctactatttgcatgggcgctgcttctagtatggctgcagtcctattagctggtggatcacctggtaagagatcagctttaccaaattctcgtgttatgatccatcaacctctaggtggcgcagaaggacaagcttcagatataaaaatacaagctgatgagatattaagactgcgacaacgattaaattctattttgtcaaaaagcaccaaacaaacgataaaaaaaatagagaaagatactgatagaaacttttttatgagtgctgacgaagcaaaagcatatggaattattgatacaattttaacagctcgtaaaaaatga

SEQ ID NO: 264383 - DNA, 601 bp, Unknown
  Bacterial polypeptide expressing nucleotide sequence isolated from the Sargasso Sea
atgaaagatattaaatcagccctaattccaatggtaattgaacagactccaagaggtgagaggtcgtttgatatttattcacgtcttttaaaagagagagttatatttctatctgggcctattgatgactacatctctaatttagttgttgcccaattattatttttggagtcagagaatccagaaaaagatatatccatatatattaattcacctggtggaagcatctctgctggacttgcaatatatgacacaatgcaatttgttactccatcaatatctacgatgtgtattggacaggctgcaagcatgggagcattgctgctagcaggaggcgacaaaaataagaggtttgccttacctaattcaagaataatgattcaccaacctttgggtggatttcagggtcaagcatctgactttgaaattcatgcgaaggaaattttgcatatgaaaaaaatagttaatgaaatattagcaaaacacacgggtcaaactattaaaaaaattgaaaaagatactgacagagataatttcctagatgcaaatgctgcaaaagcatatggtattgttgataaaatattagaggaaagaaaataag

SEQ ID NO: 264384 - DNA, 214 bp, Unknown
  Bacterial polypeptide expressing nucleotide sequence isolated from the Sargasso Sea
atggtagttgaacaaagttcaagaggtgaaagagcttttgatatttactctaggttgttgaatgagagaataatattcataggtggtccaattgacgataatcttgcgaatattgttgttgcacaattactatttttagaatcggtcgacaaaaaaaaagatattagtatatatataaattcacctggaggtagtgttactgccggtctgcaat

SEQ ID NO: 264385 - DNA, 280 bp, Unknown
  Bacterial polypeptide expressing nucleotide sequence isolated from the Sargasso Sea
tttacttgccgcaggaactaaaggaaaaagattttctctaccaaattcaagaataatggttcatcaaccttcagcaggttttcagggtcaagccactgatatcgaaattcatgcaaatgaagttttatctttaaaaaaaagattgaatgaaatttattcaaaacatacagggaaatcagttgatgaaattaaaactgcattagaaagagataattttatgaccgctgatactgctaaaacatttggtttaatcgatgaagtagttgagaaaagatcttaa

SEQ ID NO: 264386 - DNA, 477 bp, Unknown
  Bacterial polypeptide expressing nucleotide sequence isolated from the Sargasso Sea
tatggttgttgaacagtctagtagaggtgaaagagcttatgatatttattcaagacttcttaaagaaagaattgtatttgtcgttggaccaattaatgattcagttgcatctttggtaactgctcaattattatttttagaatctgaggatccaaaaaaagaaatttctttatatgtaaatagcccaggtggtcttgtaacagcaggattaggtatttatgacacaatgcaatatatcaaacctgaaataagtacattatgtattggtcaagcagcaagcatgggttcttttttgttagctgcaggaacaaaaggaaaaagatactcattgccaaattcgagaataatggtgcaccaaccctcagctggctttcaaggccaggcgacagatatcgaaattcatgctaacgaagttttatctttgaaaaaaagattaaatgaaatttatgctaaacatactggaaaatcggttgacga

SEQ ID NO: 264387 - DNA, 604 bp, Unknown
  Bacterial polypeptide expressing nucleotide sequence isolated from the Sargasso Sea
atgaatgatatccagcaagctttaataccaatggtaattgagcaaacaccaagaggtgaaagatcttttgatatttattctcgtttattaaaagaaagagtaatttttttgtcaggacccattgatgactacatttcaaatttagttgtcgctcagcttttatttttggaatctgaaaatcctgaaaaagatatctcaatttatattaactcaccaggtggcagcatttctgctggacttgctatttacgatactatgcaatttgttaaaccttctatttctacgatgtgcattgggcaggctgcgagcatgggagctttacttcttgctggtggtgatgaaaagaaaagatttgctttacctaattctagaatcatgattcatcagcctttaggaggtttccaaggccaagcatctgattttgaaattcatgcaaaagaaattttacacatgaaaaaaattgtcaatgagattttggcaaagcataccggccaaactattaagaaaatcgaaaaagatacagatagagataattttcttgatgcaaaagcagctaaaacttatggaataatagataatattctagaggtaaggaattcttaat

SEQ ID NO: 264388 - DNA, 592 bp, Unknown
  Bacterial polypeptide expressing nucleotide sequence isolated from the Sargasso Sea
atgcccctgatcccttatgttgttgaaaaaagtggccgcgaagagcgggcaatggacatttacagccggctgcttaaggaccgtatcattttccttggctctcaggtgaatgacgaaatggcgaatgccattgtcgcgcagatgctctttcttcagactgatgatccgaagagcgatatccatctctatatcaattcaccaggaggaagcgttacggcagggctagcaatttacgacacaatgcaatttgtgagttgtgatgttgcaacgtattgcataggacaagctgcatccatgggtgctttgcttttgactgctggaacggccgggaaacggcgtgctctcccaaatgctcgaatcatgattcatcaaccactcgctggcatggaaggtaccgcagaagaaatcatgattcatgccaatgaatttcgaaatatcaaaagtaaattgaataaaattttgctgaaacatactggtcagcctcttgaaaaaattgaagaggatactgatcgtgatcgatttatgtcagcagacgaagcatgtgaatatcatcttattgatgaggtgatagagcaaattcccacgggctaag

SEQ ID NO: 264389 - DNA, 652 bp, Unknown
  Bacterial polypeptide expressing nucleotide sequence isolated from the Sargasso Sea
atgcctgctcaaaggtttccattaccatcgtcaaacgctccaattgatccaagcgctgccagtgcttacagagactaccaacggcagcgacagatgactcttggtgatcttctgttggaaaacagaatcattcttttacagggcgagatctatgatggaaatgcaaatgagcttgtcatgaaattactctatcttcagagtgaaaatcgtcgaaaagacattcatttttatatcaactcgcctggcggtagtgtcactgcgacaatggcgatttatgacacgatgcagattctctcgtgcccggtagccacttactgcgttggtctcgctgccagtggtggtgccgtgttgctcgctggaggtgccgccggcaagcgattttctctgcctcatgccaaagtgatgatccatcagccgtatggacaagttggtgggcaggtaagtgatattgaaatccaggctgatgaaattattaaaacccgtgccgttttaaatgaaattcttgcatctcatacgggtcaaccaattgatcgcatcgctcaagacacagaccgagataggtatctcacggcgacggagtccaaagaatatggtctcgtcgatgacattctcaccaaaccccctggagaagaagacaaagacgttgactagt

SEQ ID NO: 264390 - DNA, 613 bp, Unknown
  Bacterial polypeptide expressing nucleotide sequence isolated from the Sargasso Sea
tatgattcgtagaatagaagagcaattaaataatcttatacccatggttgttgaacaaacaaacaaaggtgaaagagcttacgacatttactccagacttttaaaggaaagaattgtatttttagtaggaggagttaatgataatgttgcatctctagttactgctcaacttctttttttggagtcagaaaatcccaaaaaagagattttcttttatataaatagtccaggaggattagttacatcgggtttaggtatctacgatactatgcaatatattaaatcaccagtttcaactttatgtataggacaagcctcctcaatgggctcctttcttctagctgccggagaaaaaggaaaaagattttcacttccaaattcaagaattatggttcatcaaccttcagcaggttttcaaggacaagctaccgatattcaaatccacgctaaagaaattttatctcttaaagaaaggcttaataaaatttattccaagcatactggaaaaacagtcaaggaaattgcttcagcattagaaagagataaatttatgactgctgaagaagcaaaagattttggcctcatagacaaagttgttgaaaaaagaaactaa

SEQ ID NO: 264391 - DNA, 619 bp, Unknown
  Bacterial polypeptide expressing nucleotide sequence isolated from the Sargasso Sea
gatggaaaaagaaccttcaaattatgtagtgcctactgttattgaaaatactaacagaggtgaaagagcctttgatatttattcaagacttttaaaagatagaattattttcttagggacaccaatagatgatggtgttgcaaatttaattatggctcaattgttacatttggagtcagaagatcctgaaaaagatatatatgtatatattaactctccaggaggatcaataacttctctatttgctatatatgacaccatgaaatatataaaaccagatgttgcaactgtatgtatgggtctagcagcttcagctggagcagtaattttggctggtggaactccgggtaaaagatactcccttccacatgcacgaataatgcttcatcaacctgcaggtggtgcagaaggaacatcaaaagatattgagattcaagcaaagcttataaccgatatgaggcaccaaattaatggattattggcagaatttacaaagaaagatatagatcaaatctctgttgatacagatagggatttctggatgactgcacaagaagccttagaatacggtatagtggatgaagtactaactcaaagggagttagtagacaaaaaataa

SEQ ID NO: 264392 - DNA, 537 bp, Unknown
  Bacterial polypeptide expressing nucleotide sequence isolated from the Sargasso Sea
tcagggaacggatcatttttctcggcaccggcgtggatgacgccgttgccgatgctctcgttgcccagatgctgttcctcgaagccgaggacccggagaaggacattcagatctacatcaactccccggggggttcggtgacggctggcctggccatctacgacacgatgcagcaggtggcccctgatgtggtgaccatctgctatggcctggcggcgagcatgggtgccttcctgctgtctggaggctgcaaaggcaagcgcctggctctgcccaacgcccggatcatgatccaccaaccccttggcggcgcccagggccaggccgttgatatcgagatccaggccaaggagatcctcttcctcaaggaaacgctcaatggtctgatggccgaccacaccggtcagcccctggacaagatcgctgaagacaccgatcgcgactacttcctttccccggcagaagcggttcaatacggcctgatcgatcgggtggtggacagctccgggggcgaaggaatcgttacggagggctgac

SEQ ID NO: 264393 - DNA, 97 bp, Unknown
  Bacterial polypeptide expressing nucleotide sequence isolated from the Sargasso Sea
gtgattgaacgtgataccgaccgcgacaacttcatgagtgcgactcaagcagttgaatatggtttagttgatgcagtgatgactaaacgcggctgat

SEQ ID NO: 264394 - DNA, 616 bp, Unknown
  Bacterial polypeptide expressing nucleotide sequence isolated from the Sargasso Sea
gttaactctatgtactatgatgaaataatcagtagtttaactccctacataattgaagagaggcaattaaatgttgctcaaatggatgtattttcaaggttaatgatggacagaattatgtttttaggaacagctataaatgacaatgtagcaaatgtaatccaagctcaacttttattccttcaaagtactgactctaaaagagatattcaaatgtatataaattctccaggaggtggagtttatgctggtctaggaatttatgacacgatgcaatttattacacctgatgttgctactatatgcactggaattgctgcctcaatgagtgcagttttattaagtgcaggaaaatctggtaaaagatctgctttaccacattctagggttatgattcatcaaccattaggtggagcacaaggtcaagcctcagacatagaaattaccgcaagagagatactcaagctaaaggatgaattatatcaaataattgctaaacattctggacagccaataaaaagagtgactgaagacagtgatagagattattggatgaaagctgaggaggcaaaaaaatacggaatggttgatgaggtattaaaatcttctaaataat

SEQ ID NO: 264395 - DNA, 589 bp, Unknown
  Bacterial polypeptide expressing nucleotide sequence isolated from the Sargasso Sea
tatgatccctttagttttagaagaatcgggcggtagtgaaagagtctttgatatttattcgagactattaagagagagaataatctttttgggagaacaagttactagcgaaactgctaatagaattgttgctcaattattgttcctcgaggcagaggatccagataaggatatttatatgtatataaattcacctggcggatccgtttatgacggattgggtatctttgacacgatgcaacatgtaaaacctgacattcatacagtttgtgttggcttagcagctagtatgggtgcatttttgcttgcggcaggtactaaaggtaaaagaagcagccttagacattcaagaataatgattcatcaacctcttggaggtgctagagggcaagccagtgatataagaattcaagcagatgaaattttgttcttaaaagaacgactaaatactgaattatcagaaagaactggaaaggattatgacactatcaaagaagatacagatagagatttttatatgtccccaaacgaagctgttgaatacggtttaattgatctggtattagataagaaaccaataaaagtttag

SEQ ID NO: 264396 - DNA, 583 bp, Unknown
  Bacterial polypeptide expressing nucleotide sequence isolated from the Sargasso Sea
tatggtggttgagcaaactccgagaggggagagggcgtttgatatcttttcaagactgctaaaagacaacgtcatatttgctgttggaccgattgaagaccacatggcaaatctcatcattgcacaaatgttatttctcgaaagtgaaaatcccaataaagacatctacttatatataaattctcctggtggatcaattacatcaggattatcaatatatgacaccatgcaattcattaagcctgatgtcagtacaatttgtgttggtcaagctgccagtatgggcgccatacttctagctggaggagcacaatcaaaacgtttttctttgcccaattcaagaatgatgattcatcaaccaatctctggttttcagggtcaggcgagtgacattgatattcatgcaaaagaggttctcaagatgaaatccttggttaattcaatattatccaaacacacaggcaaaactgaaaagcaaattgcaaaagacactgacagagataacttcatggatgcaaaatctgcattagattatggtctaattgatcagatccttgaagaaagagatgaggctctaaaataa

SEQ ID NO: 264397 - DNA, 376 bp, Unknown
  Bacterial polypeptide expressing nucleotide sequence isolated from the Sargasso Sea
atgacaacaaaaattccagaacatctaagcactttgatcccaatggttgttgagcaatcaagccgcggtgaaagagcttatgatatttattcaagattattaaaagagagaattgttttcgtagttggaccaataaatgatgcagttgcatctttggtgactgctcaattattatttttagagtctgaagatcctaaaaaagaaatttctttgtacattaacagcccaggtggcttggttacagccggattgggaatttacgacacgatgcaatatatcaaacctgaagttagcacattatgtattggtcaagctgcaagcatgggatcatttttgttagctgctggatcaaaaggaaaaagattatcattaccaa

SEQ ID NO: 264398 - DNA, 256 bp, Unknown
  Bacterial polypeptide expressing nucleotide sequence isolated from the Sargasso Sea
taaaagattttcactcccaaattcaagaataatggtacatcaaccttctgcgggatttcaaggccaagcaactgatattgaaattcatgctaaagaagtcttgtcgttaaaaaaacgtctaaatgaaatttactcaaaacatactggcaagtcagttgatgaaataaaatcagcattggaaagagataattttatgacggctgatgcggcaaagtcatttggtttaatagacgaagtagtagaaaaaagatcttaa

SEQ ID NO: 264399 - DNA, 166 bp, Unknown
  Bacterial polypeptide expressing nucleotide sequence isolated from the Sargasso Sea
atgaacgacccagcagaattttacatgaacacactggtacctatggtagttgagcaaaccagccgcggggaacgtgcttacgatatattttcgcgtcttttaaaagagcgaattatttttataaatggtgccgtacatgatggcatgtccagtttagttgtagccc

SEQ ID NO: 264400 - DNA, 628 bp, Unknown
  Bacterial polypeptide expressing nucleotide sequence isolated from the Sargasso Sea
tatgaacgatccagcagaattttacatgaacacactagtacctatggtagttgagcaaaccagccgtggggaacgtgcttacgatatattttcgcgtcttttaaaagagcgaattatttttctcaatggtgccgtacatgatggtatgtctagtttagttgtagcccaactgctacatttagaggctgaaaacccatctaaagatatcagtatgtatataaatagtccgggtggcgtagttacctctgggttatcaatttatgatacgatgcagtacatcaaaccaaaggtttcaacattagtaattgggcaggcggcctcaatgggctcattattgctaactgcaggagaaccaggcatgcgatactccttaccaaatagtcgaataatggtgcatcaaccttctggcggctatcagggacaggccacggatataatgatccatgcagaagaaacccttaaactgaaaaagcgattaaacgaaatatacgtaaagcacacgggtcaatctttgaaaacggttgaggcagctcttgaaagagacaattttatggcagcagaagatgctaagaaatggggattgattgacgaaattgtcacgcagcgtacgagcagtgatgaagagtaa

SEQ ID NO: 264401 - DNA, 655 bp, Unknown
  Bacterial polypeptide expressing nucleotide sequence isolated from the Sargasso Sea
catgacctttcgcgcccaaatgctggacacgctgacctcccagtcttcgcgggatctcgaagcgcaggcgctcggactggtgccgatcgtcgtggaaacgagcggccgcggtgagcgctcgtatgacatctattcgcgtctgctaaaggaacggatcgtgttcctggtgggcgaggtgaacgaccagacggccaatctcgtcgtcgcgcagatgttgttccttgaaagcgaaaacccggacaaggacatcagtttctacatcaacagcccgggcgggtcggtttcggctgggatggcgatctacgatacgatgcagttcatcaaaccggacgtgtcgactttgtgcatgggcctcgcggccagcatgggtgcgttcctgctggcggccggtgccaagggcaagcgttttgcgctgccgaattcgcgcgtgatgattcaccagccgttgggcggcgcgcgcggccaggcgtcggacatcgaaatccaggcacgtgaaatcctgtacctgaaggaacggctcaatcatctgctcgcgcatcacacgggccagcctgtcgagcgtatcgcacgcgacaccgaccgggacaatttcatgtccggcgatgacgcacaagcttacggtctggtcgaccaggtggcgcacaagcgtccctga

SEQ ID NO: 264402 - DNA, 595 bp, Unknown
  Bacterial polypeptide expressing nucleotide sequence isolated from the Sargasso Sea
gatgatccccattgtgattgaggagtccggccggggagaaagggcctttgacatttattcccggcttctgcgcgagcgaatcatcttccttggtgaggctgtcaccagtgactccgccaaccggatcgtggcgcaaatgttgttcctcgaagctgaggaccctgaaaaagatatctacctctacatcaactcgcccggtggttcggtttacgacggcctcggcattttcgacacgatgcagcacatcaaaccggatgtgcacacggtttgtgttggcttggccgcaagcatgggagcttttctgctttgtgccggcaccaagggcaagcgcagcagcctgcagcactcccggatcatgattcaccagcccttgggtggtgcccagggccaagccagtgacattcgcattcaggctgacgaaatcctcttcctgaaggatcgcctcaacaaggagctgtccgatcgcactgggcaaccccttgatcggattcagcaggacaccgaccgtgacttcttcatgtcacccaccgaagcggtgaactacggcttgattgactcggtgatcgacaagcgtcccgttcaggccgttgcttga

SEQ ID NO: 264403 - DNA, 337 bp, Unknown
  Bacterial polypeptide expressing nucleotide sequence isolated from the Sargasso Sea
ttcatcaagccggacgtcagcactatgtgcattggtcaggccgcgtcaatgggtgcttttttgctgagtggcggcacgcaaggtaagcgctacatcctgcccaatgcgcgcaccatgatccaccagcccagtggcggtgctcaggggcaggccacggatatcgaaattcaggccaaggagattttgtttctccgagagcgcctaaatggcctcctagctgatcacacgggccaaaccatggaagtgattgagcgcgacacggagcgagatcgcttcatgagcgccgagcagagcgtggaatatgggctggtcgatgaggtcatcaccagtcgctagg

SEQ ID NO: 264404 - DNA, 613 bp, Unknown
  Bacterial polypeptide expressing nucleotide sequence isolated from the Sargasso Sea
tatgaaagatccaattgaaagtttgaataataacctagttcctatggttgtagaacaatcatcaagaggtgaaagagcttatgatattttttccagattattaaaagaaagaattatttttttaacaggaccaatagatgacaatatatcaagtttagtatgcgctcaattattatttttggaatctgaaaatcctaaaaaagaaatatctttttatattaattccccaggaggtgttgtttggtcaggtttagcaatgtatgatactatgcaatatatatcttctaaaattatgactatttgtataggtcaagcagcctcagcagcatcattattgctagcatctggtgaaaaagatatgagattttctcttcccaactcaagaataatggtgcatcaaccatctggaggatttcaaggacaagttacagatatagaaatacaaactaaagaaattattaaaactaaaaaaagattaaatgaaatttatacaaaacacacaggtaaagacttgaaagaagtagaacaaattatggaaagggataaattcttttctccagatgaggcagttaaatttggactaattgataaaataattaaaaataggaaataa

SEQ ID NO: 264405 - DNA, 364 bp, Unknown
  Bacterial polypeptide expressing nucleotide sequence isolated from the Sargasso Sea
tatgacaaataatgtatctgaacacatgaacaatcttgtaccaatggttgtggagcaatcgaataagggtgaacgtgcgtatgatatttattcaaggttattaaaagaaagaataatttttttaactggtcaaataaacgataacgttgcttcgttaattacagcacaactattatttttagaggcagaagatccaaaaaaagaaatttatttttatataaatagtcctggtggattggttactgcgggtttaggaatttacgatactatgcaatatgttaaaccagacatatcaactatgtgcattggacaagctgcttcaatgggatcttttttactctcagcaggaacaaaaggtaaaaga

SEQ ID NO: 264406 - DNA, 322 bp, Unknown
  Bacterial polypeptide expressing nucleotide sequence isolated from the Sargasso Sea
ttcactttgtgtattggacaggcatcatctatgggttcttttttattagcagctggagaaaaaggaaaaagattttctttgcctaattctagaattatggttcaccaaccttcttctggctttcaaggacaagccacagatattcaaatccacgctaaagaaattcttgatctaaaaaacagattaaataaaatttatgctaagcacactggaaaatcagtggaagaaatctccagtgctctagagagagacaattttatgaccgcagatgaagcaaaaaaatttggtcttatagactcagtagtggaaaagagaaaataat

SEQ ID NO: 264407 - DNA, 637 bp, Unknown
  Bacterial polypeptide expressing nucleotide sequence isolated from the Sargasso Sea
atggcaaatcataacgaaacatttaatccaaaaaatcttaacctcataccaatggttgtagaacaaacttcaagaggtgaaagagcatatgatatttactcaagacttttaaaagaaagggtaatctttgtagttggaccagtggaagattacatggctaatgttatcattgcacaaatactttttcttgaatctgaggatcctaataaagaaatttcaatttatatcaactctcctggagggtctgttacggctggcttagctatttatgacacaatgcaattttgtaaacctagtataaacacattatgcattggtcaagcagcaagtatgggcgctgtactacttgctggcggggataaaaataagcgttttgcattacctaattctagaataatgatccatcaacctctaggaggatttcagggtcaagcttctgatattagtattcatgcccaagagattttaaaagttagagaaaaattaaatgaaattctctcaaagcacactggaaatgatgtgaataaaatatcggaagatactgaaagagacaactttatgactgctgaagaggcaaagcagtatgggattatagataatatccttacaaatagggttgacatgaaaaaagattaat

SEQ ID NO: 264408 - DNA, 603 bp, Unknown
  Bacterial polypeptide expressing nucleotide sequence isolated from the Sargasso Sea
aaatatttgaacatatgagtaatttaataccaatggtggtagagcaatctagccgtggtgaaagagcatacgatatattttcaagattactaaaagagagaataatttttttagttggtccaataaatgacaacgtcgcttcacttgttacagctcaaatgttgtttttagaatctgaaaacccaaaaaaagaaatttatttttatataaatagtccaggaggattagttacttcaggtttaggcatttatgatacaatgcaatatattaaaccagatataagcacactatgcataggtcaagcagcaagtatggggtcttttcttttgggagctggcactaaaggaaaaagattttcattgcctaattcaagaattatggttcatcaaccatcagcaggtttccaagggcaagcaactgacatagaaattcatgctaatgaaattctttcattaaaaaaaagattaaatgaaatttattcaaaacataccggaaagggagttgatgaaattaaaattgctttagaaagagataattttatgactcctattgatgcaaaaaaatttggtttgattgatgaagttgtggaaaaaagatcatgat

SEQ ID NO: 264409 - DNA, 613 bp, Unknown
  Bacterial polypeptide expressing nucleotide sequence isolated from the Sargasso Sea
aatgaaagatccgatagacaacattacaaataacttaattcctatggttgttgagcaatcttcaagaggtgaaagatcttatgacatctactcaagattgttaaaagaaagaataatctttctaactgggcctattgacgataacattgcaagtctaatatgtgcgcaaatactatttctagagtctgaaaacccaaaaaaagaaatttctttttacattaattctcctggaggtattgtttggtcaggattagcaatttacgatactatgcaatatgtttcttctaaaattatgactatttgtatcgggcaagcagcatcagcaggatcccttcttttaactgctggtgaaaaaggaatgagattttctcttcccaattcaagaattatggttcatcaacctagtggtggtatgcaagggcaggttacagatattgaaattcaaactaatgaaattaaaaaaaccaaattgaaattaaatgaaatttactcaaaacacacaggaaagaaattatcagaaatttcaagtatcatggaaagagataagtatttctctgctgaagaagcaattaaatttggtcttatagataagattgtaaaggataggaaataa

SEQ ID NO: 264410 - DNA, 613 bp, Unknown
  Bacterial polypeptide expressing nucleotide sequence isolated from the Sargasso Sea
atgccaataggaactccaagcgtgccttacagacttccaggaagtcaatacgaaagatgggtcgacatatatacaagactaggtgttgaaagaattctttttcttggacaagaagtgaatgatggtattgctaatagccttgttgcacaaatgctttatctagattctgatgataattccaaacctatctatctgtatataaatagcccaggaggttcagtaactgctggcttggcaatttatgacaccattaaatatgtaaaaagtgatgtagtaactatatgcgtaggcctcgcagcctccatgggagcgttcctattggccgctggtacaaaaggtaaaagagttgctttgcctcacagtagaataatgattcatcaacccttaggaggcacatctcaacgccaagcaagtgatattgaaatagaagctaaggaaattttaagaattaaagatatgttaaacatgtctatggcagatatgacaggccaatcatttgagaaaattgaaaaggatactgatagagattattttctaagtgcggaagaagcaaaaaattatggattaattgatagagtaattacacatccaagcgaagcaaatcagtcttaaa

SEQ ID NO: 264411 - DNA, 589 bp, Unknown
  Bacterial polypeptide expressing nucleotide sequence isolated from the Sargasso Sea
atgagtaacctagtgcctatggtggtggagcaatctagcaaaggtgaaagagcttatgatatttattcaagattattaaaagaaagaataatttttttaaccggtcagattaatgataatgtggcttcacttgttacagctcaattattatttttagaagcagaggatcctaaaaaagaaatttatttatatgtcaatagccctggtggattagtaactgctggacttggtatttatgatacaatgcaatatgtaaaacctgacatctcaaccttatgtattggacaagctgcatcgatggggtcatttttattggcagctggaactaaaggaaaaagattttcattaccaaattcaaggataatggttcaccaaccatctgctggttttcaaggtcaagcaactgatatagagattcatgcaaatgaagttttatcattgaaaaaaagattaaatgaaatctactcaaaacatacaggcaagagcgttgatgaagtgaaatctgcgcttgaaagagacaatttcatgactgctgatgttgcaaagtcatttggtcttattgacgaagttgtagaaaaaagatcttaat

SEQ ID NO: 264412 - DNA, 589 bp, Unknown
  Bacterial polypeptide expressing nucleotide sequence isolated from the Sargasso Sea
atgagtaacctagtgcctatggtggtggagcaatctagcaaaggtgaaagagcttatgatatttactcacgattattaaaagaaagaataatttttttaaccggtcagattaatgataatgtggcttcacttgttacagctcagttattatttttagaagcagaggatcctaaaaaagaaatttatttatatgtcaatagccctggaggattagtaactgctggacttggtatttatgatactatgcaatatgtaaaacctgatatctcaactttatgtattggacaagctgcatcgatggggtcatttttattggcagctggaactaaaggaaaaagattttcattaccaaattcaaggataatggtacaccaaccatctgctggttttcaaggtcaagcaactgatatagagattcatgcaaatgaagttttatcattgaaaaaaagattaaatgaaatttactcaaaacatacaggtaagagtgttgatgaagtgaaatctgcgcttgaaagagacaatttcatgactgctgatgttgcaaagtcatttggtcttattgacgaagttgtagaaaaaagatcttaat

SEQ ID NO: 264413 - DNA, 613 bp, Unknown
  Bacterial polypeptide expressing nucleotide sequence isolated from the Sargasso Sea
tatgattcgaagaatagaagaacaattaaacaatctcgtgccaatggttgttgaacaaacaactaaaggcgaaagagctttcgatatttattcaagattattaaaagaaagaattgtttttttagtgggtggcgtaaacgatacagtagcttccctggtcacagcacaacttttgtttcttgagtccgaaaatccaaaaaaagaaatttttttttatattaatagccctggtggactagttacttcaggcttaggtatttatgatacaatgcaatatatcaaatcacctgtttcaacactttgcataggccaagcatcttcaatgggatcttttttattatctgccggtgaaaagggaaaaagattttccttaccaaattcaagaataatggttcaccaaccatcagcaggatttcagggtcaagctactgatattcaaattcatgcaaaagaaattttagctttaaaagagagactaaacaaaatttattcaaaacatacaggcaaatctgttaaggaaatttcccaagctttagaaagagataattttatgactcccgaagaggctaaggatttcggactaatagactctgtagttgaaaaaagaaaataa

SEQ ID NO: 264414 - DNA, 362 bp, Unknown
  Bacterial polypeptide expressing nucleotide sequence isolated from the Sargasso Sea
tatttacgatactatgcaatttgttaaaccttcaatttctacgatgtgtattggacaggctgcgagcatgggagctttacttcttgctggtggtgatgaaaagaaaagatttgctttacctaattctagaatcatgattcatcagcctttaggtggtttccaaggccaagcgtctgattttgaaattcatgcaaaagaaattttacacatgaaaaaaattgtcaatgagattttggcaaagcatactggccaaactattaagaaaatcgaaaaagatacagatagagacaattttcttgatgcaaaagcggctaaaacttatggaataatagataatattctagaggtaaggaattcttaaa

SEQ ID NO: 264415 - DNA, 517 bp, Unknown
  Bacterial polypeptide expressing nucleotide sequence isolated from the Sargasso Sea
tatgagcaatcttgtaccaatggtagttgaacaatctagcaaaggtgaaagagcttacgatatttattcaagactattaaaagaaagaatcatttttttaacaggtcaaattaatgacaatgttgcatcattagttactgctcaattattatttttagaagctgaagatccaaaaaaagaaatttatttatacatcaatagtcctggaggtttagttacagctggtcttggcatttatgatactatgcaatatgtgaaaccagacatttccactttatgtattggtcaagcagcttctatgggatcctttctacttgctgcaggtactaaaggaaaaagattttcattaccaaattcaagaataatggttcaccaaccatctgctggtttccagggtcaggcaactgatattgaaattcatgctaatgaagttttgtctttaaagaaaaggcttaatgaaatttattcaaaacatactggaaaaagcgttgaagaaataaagtctgctcttgaaaga

SEQ ID NO: 264416 - DNA, 406 bp, Unknown
  Bacterial polypeptide expressing nucleotide sequence isolated from the Sargasso Sea
atgacaacaaaaattcctgaacatctaagtactttgatcccaatggtagttgagcaatcaagccgtggtgaaagagcttatgatatttattcaagattattaaaagagagaattgtttttgtagttggaccaattaatgatgcagttgcatctttggttactgctcaattattatttttagagtctgaagatccaaaaaaagaaatttctttatacataaatagtccaggtggattagtgacagctggtttaggaatttatgatacgatgcaatatatcaaacctgaagttagcacattgtgtattggtcaggctgcaagcatgggatcatttttgttagcagctggatctaaaggaaaaagattatcattaccaaattcaaggatcatggttcaccaaccttccg

SEQ ID NO: 264417 - DNA, 589 bp, Unknown
  Bacterial polypeptide expressing nucleotide sequence isolated from the Sargasso Sea
atgaataatctgataccgatggtagttgagcagactagcagaggtgagagagcctttgatatttattcaagattattaaaagagagaatagtttttgttgttggaccaattaatgacaatgttgcatcattggttactgcacaattattatttttagaatcagaagatccaaaaaaagatatttttttatacataaatagtcctggaggtctagtaacttcaggtttagggatttatgatacaatgcaatacattaaacctgatgtgtcaactctttgtattggacaagcagctagcatgggatcttttttattagcagctggcacaaaaggaaaaagattttctttacctaattcaagaattatggttcatcaaccttcagcaggatttcaaggtcaagcaacagatattgaaattcatgcaaacgaagttctttctttaaaaaaaagattaaacgaaatttattcaaagcatactggaaaatctgttgatgaaattaaatcagccttagaaagagataactttatgactccagatgccgcagaagaattcggccttgtggataaagtagtgtctaacagagattaac

SEQ ID NO: 264418 - DNA, 601 bp, Unknown
  Bacterial polypeptide expressing nucleotide sequence isolated from the Sargasso Sea
tatgacagatatacattcagccttaataccaatggttatagaacaaactccaagaggagaaagatcatttgatatatactcaaggctattaaaagaaagagtcattttcttatcaggcccaattgatgattatatttccaatcttgtagttgcacagctgctatttctagaatcagagaatccagataaggatatttctatatacataaattcacccggtggaagtatttctgctggattagcaatatatgacaccatgcaatttataaaaccatcaatttcgactttatgcattgggcaagccgcaagcatgggagcattattactagcaggtggcaataagaaaaaaagatttgcattgcctaattcaagaattatgatccatcagcctctaggaggctttcaggggcaagcatctgattttgagatacatgcaaaagaaatacttcatatgaaaaaaattgttaatgaaattctttctaaacatacaggacagtcattaaaaaaaattgagaaagatacagatagagataattttttggatgctaacgctgcaatgacttatgggatagttgatagtatattagagcaaagggattaa

SEQ ID NO: 264419 - DNA, 610 bp, Unknown
  Bacterial polypeptide expressing nucleotide sequence isolated from the Sargasso Sea
aatgcataatgcgtcagacatacaaagtgctttagtgcctatggtgatcgaacagacggctaagggtgaacgctcattcgatatttattctcgtctgttaaaagagcggattatcttcttagtgggtcaagttgaagagcatatggcgaatctgattgtggcgcagttgctattcctcgagtcagaaagcccagataaagatatcttcttatacatcaactcacccggtggctcggtcactgcgggcatggcgatttacgataccatgcaatttattaagccgaacgtcagcactgtgtgtattggtcaagcggccagcatgggcgcgtttttattagcgggtggcgaaaagggcaagcgtttctgcttacctaactctcgcgtgatgatccaccaaccactaggtggattccaaggtcaggcttctgatatcgctattcatgcccaagagatcttaggcatcaagcataaactgaacctgatgttgtcagagcacactggccagccactcgaagtgattgaacgtgataccgaccgcgacaacttcatgagtgcgactcaagcagttgaatatggtttagttgatgcagtgatgactaaacgcggctga

SEQ ID NO: 264420 - DNA, 613 bp, Unknown
  Bacterial polypeptide expressing nucleotide sequence isolated from the Sargasso Sea
atgaatgaagaaataaacagtctaatacctatggtggttgagcaaaccccaagaggggagagggcgtttgatatcttttcaagactgctcaaagacaacgtcatatttgctgttggaccgattgaagaccacatggcaaatctgatcattgcacaaatgttatttcttgaaagtgagaatcccaataaagacatctacttgtatataaattctcctgggggatcaattacatcaggattatcgatatatgacaccatgcaattcattaaacctgatgtgagcacaatttgcgttggtcaagcggccagtatgggcgccatacttttagctggcggagcacaatcaaaacgtttttctttgcctaattcaagaatgatgattcatcagccaatctctggttttcagggtcaggcaagtgacattgatattcatgctaaagaggttctgaagatgaaatccttggttaattcaatattatccaaacacactggtaaaactgaaaagcaaattgcaaaagacactgacagagacaacttcatggatgcaaaatctgcattagattatggtcttattgatcagatccttgaagaaagaagtgaggctctaaaataaa

SEQ ID NO: 264421 - DNA, 589 bp, Unknown
  Bacterial polypeptide expressing nucleotide sequence isolated from the Sargasso Sea
atgaccaatttagtacctatggtggtagagcaatctagtaaaggtgagagagcttacgatatatattctagacttttaaaagagagaataatttttttaactggtcaaataaatgataatgttgcatctttgattaccgcacaattattatttctagaagcagaagatcctaaaaaagatatttatttatacattaatagtccaggaggtttagtgacagctggtcttggtatttacgatactatgcaatatgtgaaacctgatatttcgacattatgcattggccaagcagcatcgatgggatcatttttacttgcagcaggaactaaaggtaaaagattttcattgccaaattctagaattatggttcatcaaccctcagctggttttcagggacaagctacagatattgaaattcatgcaaatgaagttttatctttaaaaaaaagacttaatgaaatttattctaaacatacgggtaaatcagttgatgaaattaaaacagcactggaaagagataactttatgaccgcagagtcagcaaaagtttttggtctagtggatgaagtagtagaaaaaagatcctaaa

SEQ ID NO: 264422 - DNA, 589 bp, Unknown
  Bacterial polypeptide expressing nucleotide sequence isolated from the Sargasso Sea
atgaataatttaattccaatggttgttgaacaatcaagcagaggagagcgtgcatacgatatttattcaagactactaaaagaaagaattgtatttcttgttggaccaataaacgataccgttgcatctttggttactgctcaattattgtttttagaatctgaggatcccaaaaaagaaatttccctatatataaatagccccggtggtcttgtaacagcaggactgggaatttatgatactatgcaatacattaaacccgatgttactactttatgtattggacaagcagcaagtatgggttcatttttgttatccgctggagccaaaggtaaaagattttcattgccaaattctagaataatggttcaccaaccttccgcaggatttcaaggtcaagcaacagacattgaaatacatgcgaacgaggttttatctttaaaaaaaagattaaatgaaatttattcaaaacatacagctaaaacagtagatgaaatcaaagtagctcttgaaagagataattttatgactcctgaaaatgcaaaagactttggtctaatagataaagtagtagataagagacaataag

SEQ ID NO: 264423 - DNA, 292 bp, Unknown
  Bacterial polypeptide expressing nucleotide sequence isolated from the Sargasso Sea
tatgggctcttttctattagcagcgggagagaaggggaaaagattttctttaccaaattcaagaattatggttcaccaaccatcggctggttttcaaggccaagcaacagatatagaaatacatgccaaagagattcttttattaaaagaaaggttaaataaaatatactcaaaacatacaggtaaatctatcaaggatatctcgcaggcattagaaagagataagtttatgactgcagaagaggctaaagatttcgggttaattgactcggtagttgaaaagagaaaataa

SEQ ID NO: 264424 - DNA, 601 bp, Unknown
  Bacterial polypeptide expressing nucleotide sequence isolated from the Sargasso Sea
agtaaagattcaataaatcaattaattcccatggttgtcgagcagacagggaggtttgaacgtgcctatgatatttattctagactgctcaaggaaagaatagtttttcttggtacgcccattgatgacaatgtcgcatcattagttattgcacaattactctttcttgaagctgatgacagtgaaaaggatatatatctttatataaactcaccgggcggtatcataacttctgggatgggcatatacgatacgatgaattatattaaacctgatgtagcaacaatctgtatggggcaagcagctagtatggcggcatttctcttgtcaggaggcactccaggaaaaagatccgctttgccaaattcaagaattatgattcatcaaccactcggcggtgctgagggtcaggcttctgacattaaaattttatcagatgagattttaagattaaggaaaaatctaaactctattctttctaaaaatacgaaacagactctaaaaaagattgaaaaagatacggacagaaatttcttcatgagcgcacatgaagcaaaaggttatggaatcattgataccatacttgataaaaggaaataat

SEQ ID NO: 264425 - DNA, 526 bp, Unknown
  Bacterial polypeptide expressing nucleotide sequence isolated from the Sargasso Sea
gcttaaagagcgcattatttttgttgtcggtccgatagatgacgctgttgcaagtgttgtttgtgctcagttgctatttcttgaagctgataatccgacaaaagatatttcaatgtatataaattcgccgggaggcatagtcacttctgggctggctatgtatgatacgatggaatacattcgacccgaaatttcgaccgtatgtattgggcaagcggcctcaatggggtctttgctacttactgctggggcgaaggggaagcgttttagtttaccaaactcaaaaataatgattcaccagccttctggtggttttcaaggccaagccaccgatattgaaattcatgcaaaagagatattgtcgacgcgctcacggctgaacgagatatatgttaagcatactgggcaaaaattagacaaaatagaaaaagcgatggagcgtgataactttatgacccctgaggaggcgttgtcgtttggcttgatcgacgaagttgtcgaaaagagaccggcagatcaagagtag

SEQ ID NO: 264426 - DNA, 613 bp, Unknown
  Bacterial polypeptide expressing nucleotide sequence isolated from the Sargasso Sea
tatgacttctaaaataccagaacatttaaatactcttattccaatggttgtggaacaatctagccgaggagagagagcatatgatatttactcaagattattaaaggaaagaatcgtttttgttgttggaccaattaatgatgcaattgcatcacttgttacagcgcaattgttatttttagaatctgaagatccaaaaaaagaaatttctttatacattaatagtccaggtggtttagtcactgcaggtttaggaatatatgatactatgcaatatgttaaaccagaagtaagcaccctatgcataggccaagctgcaagtatgggatcgtttttgttggcagctggatctaaaggaaaaagattttcattacctaattctagaattatggttcatcaaccatcagcaggttttcaaggtcaagctacagatatcgagattcacgctaatgaggttttgtctttgaaaaaaagattgaacgagatttattctaaacataccggcaagtcagtagtagatataaaagaagcattagaaagagataattttatgactcctgataatgcaaaagagtttggtttaatagacaaagtagtggacaagagagagtag

SEQ ID NO: 264427 - DNA, 613 bp, Unknown
  Bacterial polypeptide expressing nucleotide sequence isolated from the Sargasso Sea
atgaaaaatccaattgataatttaacaaacaatttaataccaatggttgttgagcaatcgtctaggggtgaaagagcatatgatatttattctagactattaaaagaaagaattatatttttgactggaccaatagatgataacatagctagtttaatttgcgctcaaattctttttttagaatcagaaaatcctaagaaagaaatctcattttatataaattcgcctgggggcattgtctggtcgggtttagcaatttatgatacaatgcaatacgtatcttcaaaaataatgactatatgtgttggtcaagcagcatctgcaggatcattattattaactgctggtgaaaaagatatgcgtttttcattaccaaattcaagaattatgactcatcaaccaagtggaggttatcaaggtcaggttactgatatagaaatacaaacgaatgaaattaaaaaaactaaacagaaactaaatgaaatatatgccaaacatactggaaaaaaaatatcagaagtttctagcatcatggagagagacaagtatttttctgcagaagaagctgtagaatttggattaatcgataaaattattaaaagcagaaaataat

SEQ ID NO: 264428 - DNA, 448 bp, Unknown
  Bacterial polypeptide expressing nucleotide sequence isolated from the Sargasso Sea
attgtttttagaatctgaaaatcctgaaaaagacgtctctatatatattaattcaccaggaggaagtatttctgctggattggcaatatatgacactatgcagtttatcactccttcaatttctactttgtgtattggacaagctgcaagcatgggtgctttgcttttagcaggaggggataaaggtaaaagatttgcattaccaaattcaagaataatgatccatcaaccattaggtggatttcaaggtcaagcctccgattttgagatacatgcaaaagagatattgcatatgaaaaaagttgttaatgagattttatctaaccataccggccaatcattaaagaaagtagaaaaagatacggatagagataattttttagatgctgaatccgcaaaaacatatggtattgttgataaaattttaaatgaaagaggaacaaaataa

SEQ ID NO: 264429 - DNA, 485 bp, Unknown
  Bacterial polypeptide expressing nucleotide sequence isolated from the Sargasso Sea
tcaaattaatgacaacgttgcatcattagttacagcacaattactatttttagaagctgaggatccaaaaaaagaaatttatttatacattaatagccctggaggtttggttacagctggacttggtatttacgatacaatgcaatatgtgaagccggacatctctaccttatgtataggtcaagcagcttcaatgggttcttttttgcttgcagctggcacaacagggaaaagattttcattaccaaattcaagaataatggttcatcaaccatctgcaggttttcaaggtcaagcaactgatattgaaattcatgctaatgaagttttatctttaaagaaaagacttaatgaaatttattcaaaacatactggaaaaagtgttgaagaaataaaatctgctcttgaaagagataattttatgactgcagatgtcgcacaatcatttggtctaattgacgaagtagtagaaaaaagatcttgat

SEQ ID NO: 264430 - DNA, 274 bp, Unknown
  Bacterial polypeptide expressing nucleotide sequence isolated from the Sargasso Sea
tcaccaaccttctggtggtgctcaagggcaagcaacagatattgaaattcaagctaaagagatattagatttaaggaagcggttaaatgatatttatgtggctcacacagggcaggattttcaagtgattgaagaggcagttgagagagataggtatatgagtcccgaagaagcaaagaaatttggtttaattgatgaggtggtggataagcgacctgaattagaagaagtgagttcagataagagttctaatgaagataataatgctgactaa

SEQ ID NO: 264431 - DNA, 364 bp, Unknown
  Bacterial polypeptide expressing nucleotide sequence isolated from the Sargasso Sea
tatgacaataaaattatttgaacatatgagcaccttagtacccatggttgttgaacaatcaagcaagggtgagagagcatacgatatttattcaagactcttaaaagaaagaataatttttctaacaggccaaattaacgataatgtagcttcactagttacagctcaattattatttttagaggcagaagatcccaaaaaagaaatttatttatacatcaatagccctggaggattagttacagctggacttggtatttatgacactatgcaatatgtgaaacctgacatatcaacattatgcatagggcaggctgcatctatgggatcatttttattagcagctggaactaaagaaaaaaga

SEQ ID NO: 264432 - DNA, 658 bp, Unknown
  Bacterial polypeptide expressing nucleotide sequence isolated from the Sargasso Sea
atggattattcaaaagaatttaagaaatatgctacaaaacatcatggtgtaagctctacttattatgataagattataagcagtatgactccatatattattgaagagagacaattaaatgtagcacagatggatgttttttcaagattaatgatggatagaattatgtttttaggaactgctattacagatagcgttgctaacgtcattcaggctcaattacttttcttgcagagtacagattcatcaagagatatccaaatgtatattaattctcctggtggtggagtgtatgctggccttggaatatatgatacaatgcaatatataaagccagatgttgctacaatttgtactggatgtgctgcatctatggctgcagttcttctatgtgcaggaaagaagggaaaaagatctgcactaaaacactcaagagttatgatacatcaacctttaggtggagtttctggtcaggcagctgatattgaaattacagctagggaaattcttaagcttaaagacgaactatataagattatttcaaaacacactggccaaactttcaaaaaggtaaatgcagatagtgatagagactattggatgaaagcagatgaagctcataaatatggtatggttgatgaagtattaaacaaataat

SEQ ID NO: 264433 - DNA, 553 bp, Unknown
  Bacterial polypeptide expressing nucleotide sequence isolated from the Sargasso Sea
tatgacagattttaattcagcattaataccgatggttattgagcagacacctcgtggagaaagatcttttgatatttactctagactgcttaaagaaagagtaatttttttatcaggtcctattgatgattacatatctaatcttgtagtagcacaattattatttttagaatctgaaaatcctgaaaaagatatctcaatatatattaattcacctggcggtagtatttcagcaggcttagcaatatacgatactatgcaatttgtaaaaccaagtatttccacattatgtattggtcaagcagcaagcatgggagcattattattggcaggaggagatagcaaaaaaaggtttgctcttccaaactctagaattatgatccaccaacctttaggaggttttcaaggacaggcatcagattttgaaatacatgcaaaagaaatccttcacatgaaaaaaatagtaaatgagatactatctaaacatacaggccagtcgattaaaaaaattgaaaaaggtactgatagagataatttcttagatgcaaaagct

SEQ ID NO: 264434 - DNA, 589 bp, Unknown
  Bacterial polypeptide expressing nucleotide sequence isolated from the Sargasso Sea
atgagcaatttagtgccaatggttgtagagcaatcatctaaaggtgaaagagcttatgatatttattcaagacttctaaaggaaagaattatttttttaacaggtcagataaatgacaatattgcatccttggtaacagctcagttattatttttagaagctgaagatcccaagaaagaaatttatttatatatcaacagtcctggtggactggttacagctggtcttgggatttatgataccatgcaatatgtaaaacctgatatatcaactttatgtatcggacaagctgcatcaatgggatcatttttgttggctgcaggaactaaaggtaaaaggttttctttaccgaactcaagaataatggttcatcaaccttcagcaggttttcaaggacaagctacagatatagaaattcatgctaatgaagtcttgtcattaaagaaaaggttaaatgaaatttattcaaaacatacaggcaaaactgttgatgaaataaaatctgctttagagagagataatttcatgaccgctgatgtcgcaaaatcatttggtctcattgacgaagtagtagaaaaaagatcataat

SEQ ID NO: 264435 - DNA, 597 bp, Unknown
  Bacterial polypeptide expressing nucleotide sequence isolated from the Sargasso Sea
caagcgtgccttacagacttccaggaagtcaatatgaaagatgggtcgacatatacacaagactaggtgttgaaagaattctttttcttggtcaagaagtgaatgatggtattgctaatagcctcgttgcacaaatgctttatttagattctgatgataattccaaacctatctatttgtacataaatagcccaggaggatcagtgactgctggcttggcaatttatgacacaattaaatacgtaaaaagtgatgtagtaaccatatgcgtaggcctcgcagcctccatgggcgcgttcctattggctgctggtacaaaaggtaaaagagttgctttgccccacagcagaataatgatacatcaacccttaggagggacatctcaacgccaagcaagtgatattgaaatagaagctaaggaaattttaagaattaaagatatgttaaacatgtctatggcagatatgacaggccaatcatttgagaaaattgaaaaggatactgatagagattattttctcagtgcggaagaagcaaaaaattatggattaattgatagagtaattacacatccaagcgaagcaaatcagtcttaaa

SEQ ID NO: 264436 - DNA, 380 bp, Unknown
  Bacterial polypeptide expressing nucleotide sequence isolated from the Sargasso Sea
gtcatatcatctgggtttagcaatttatgacacgatgcagttcatatctccgtctatatctactttatgtattggtcaagctgcctcaatgggagcattacttcttgctggtggtgaaaaggagaagcgatttgctttacctaattcaagaattatgatccatcaaccactcggaggtttccaaggtcaagcttcagatattgagattcatgctcaagagatattactaatgaagaaaaaagttaacgaaatattatcaaggcataccggaaagaatttaaagacagttgaaaaagatactgacagagacaacttccttaatgctgaggaagcaaaaaaatatggaatcattgacgatatattagaagaaagaagctaat

SEQ ID NO: 264437 - DNA, 631 bp, Unknown
  Bacterial polypeptide expressing nucleotide sequence isolated from the Sargasso Sea
atgaagaatatagaagaaatcagcaatctgattccaatggtggttgagcaaactcccagaggagaaagagcttttgatatcttctctcgtctgcttaaagacaatgtcatattcgcagttggtccaatcgaagatcacatggcaaatttgatcattgcacaaatgttatttcttgaaagtgagaatcccagtaaggacatttacctatatataaattcgccaggcggatcaatcacatcaggattatccatttatgacaccatgcaattcatcaaacctgatgtgagcacaatttgcgttggccaagcagcaagtatgggagccatcctgctagcaggaggagctgaatcgaagcgtttttctctgcccaattcaaggatgatgattcatcaaccaatttctgggtttcaaggtcaagccagtgacatcgatatccatgctaaagaggttcttaagatgaaatctctggtcaattcaatattatcgaaacacacaggcaagactgaaaaacaaattgcaaaagacacagacagggacaacttcatggatgcagaatcagcattaaaatatggattgattgatgaaattcttaacgaaagaacagaggctttaaatcaagatggcaggtaaa

SEQ ID NO: 264438 - DNA, 613 bp, Unknown
  Bacterial polypeptide expressing nucleotide sequence isolated from the Sargasso Sea
tatgacaactaaaatacctgaacatttaagcaatctaattcctatggtagtagagcaatccagtcgaggtgaaagagcttatgatatttattcgagactattaaaagagagaatagtttttgttgttggaccaattaacgatagcgttgcttcagttgttactgctcaactgttatttcttgagtctgaagatccaaaaaaagaaatatctctttatataaatagtccaggtggcttagtaacagctggtctgggtatttatgatacaatgcaatatattaaaccagatgtatcaactttatgtataggacaagctgcaagtatgggatcatttctactagctgctggaacaaaaggtaagagactatcactaccaaattctagaattatggtacaccaaccatctgctggttttcaaggacaagctactgatattgaaattcacgctaaagaagttttgtctttaaaagaaagattaaatgaaatttactccaaacatacaaataaatcagttgatgaaatcaaacaagcattagagagagataattttatgactccagaaaatgctaaagactttggattaattgataaagtagtagataagcgcgattaa

SEQ ID NO: 264439 - DNA, 526 bp, Unknown
  Bacterial polypeptide expressing nucleotide sequence isolated from the Sargasso Sea
catgattccaatcgtgatcgaggagtcaggccgtggtgaaagggcttttgacatttattcgcgcttgctgcgcgaacgcatcatttttttaggtgaagccgttaccagtgactcggccaaccggatcgtggctcagatgctcttccttgaagcggaagatcctgagaaagacatttacctctacatcaattcaccgggcggttccgtttacgacggtctcggcatctttgacacgatgcagcacatcaaacccgatgtgcacaccgtttgcgttggtctggccgccagcatgggagcgtttctgctctccgctggaaccaaagggaagcgcagcagccttcagcattcccggatcatgattcaccaacccttgggtggtgcccgtggccaggccagtgatatcaggattcatgccgacgaaattctttatttgaaggatcggctcaaccaggagctgtcggatcgcactgggcaaccgctcgatcgaattcaacaggacaccgatcgggatttcttcatggcccca

SEQ ID NO: 264440 - DNA, 502 bp, Unknown
  Bacterial polypeptide expressing nucleotide sequence isolated from the Sargasso Sea
atgacagattttaattcagcattaatcccaatggttgttgagcaaacaccccgtggagagagatcttttgacatttactctagactccttaaagaaagagtaattttcttatcaggacctattgatgactacatatcaaatcttgtggttgcacaattgctatttttagagtctgaaaatcctgaaaaagacatttcaatatacataaactcacctggtggcagtatttcagcaggattggcaatatatgacactatgcagtttgtaaaaccaagcatttctactttatgtattggtcaagcagcaagtatgggagcattattacttgcaggaggagatagcaaaaaaaggtttgcgcttccaaactctagaataatgattcatcaacccctaggaggttttcaaggtcaagcatcagattttgaaatacatgctaaggaaattcttcacatgaaaaaaatagttaatgaaatattatctaaacatacaggccagtcgatta

SEQ ID NO: 264441 - DNA, 658 bp, Unknown
  Bacterial polypeptide expressing nucleotide sequence isolated from the Sargasso Sea
atggattattcaaaagagtttaagaaatatgcaactaaacaccatggagtaagttcgacctactatgataaaatagtaagcagtatgactccatatattattgaggaaaggcaacttaatgtagctcagatggatgtgttttctaggttgatgatggatcgcataatgtttttaggaactgcaatcaatgacagtgtagctaatgttatacaggctcaattacttttcttacagagtacagattcatcaagagatatacaaatgtatataaactcaccaggtggtggagtttatgcgggccttggaatatatgataccatgcaatatattaaacctgatgtagcaacaatctgtactggatgtgctgcctctatggctgcagtacttttatgtgcaggtaaaaagggtaaaagatctgctctaaagcactcaagggtaatgattcatcaacctctaggaggagtttctggtcaagctgctgatatcgaaattactgctcgtgaaatattgaaattgaaagatgaactttataaaataatttcaaaacattctggtcagaccttcaaaaaagttaatgctgatagtgacagggattattggatgaaggctgatgaagctcacaagtatggaatggttgatgaagtcttaaacaagtaaa

SEQ ID NO: 264442 - DNA, 322 bp, Unknown
  Bacterial polypeptide expressing nucleotide sequence isolated from the Sargasso Sea
ctctactttatgtattggacaagcagctagtatgggatcttttcttttagcagctggaacaaaaggaaaaagattttcgttaccaaattccagaataatggtgcaccaaccttcagcaggttttcagggtcaagccacagacattgaaatacatgcaaatgaagtcctctctttaaaaaaaagattaaatgagatctattcaaagcataccggaaaaagtgttgaagatattaaatcggctcttgagagagataattttatgacaccagatgcggcaaaagattttggtcttttagataaagttgtggataaaagagaatag

SEQ ID NO: 264443 - DNA, 670 bp, Unknown
  Bacterial polypeptide expressing nucleotide sequence isolated from the Sargasso Sea
attgataccgaggaagaagaacaaagtgagtaacgcccccaacaactaccttgtccctaccgtcgtggagcaaacaaaccgcggagaacggggatatgacctgtactcgaagctattaaaagaaaacatcatctttattggaactcccattgatgacggaattgcaaatctggtttgtgcgcaactcctccatttagagtcagaaaatccagacaaagatgttagcctctacatcaactctccaggcggaaacataaattcagtatttgcaatatacgacactatgtcctacatcaaaccggagattgcaaccatttgctacgggcaagcagtcgcagctgcagcggtacttcttgcagccggaacacgtggaaagcgtttagctttaccacactcacggattctcatccatcagccatacgcgggagcgcaaggacaagtatctgacttggagatcgcatcaagggaagttcagcgacttaaaaatcaactggaagaagtattagcagcccacacaggtcaatcgatagagaaaatacaaacagatacagaccgcgacaacataatggacgcctacgaggcgaaagactatggcatcattgacgaagtaatcgaatcccgaggtgaagtagacaacagtggcccaataaccgctgtagaaaatggatag

SEQ ID NO: 264444 - DNA, 622 bp, Unknown
  Bacterial polypeptide expressing nucleotide sequence isolated from the Sargasso Sea
atggtaaataaatttacaccgcaaagtaatctaatacctatggttgttgagcaatcaaataggggtgaaagggcttatgatatttattctcgacttcttaaagagagaatagtttttgttacgggaccaattgaagattatatggcaagtgtaattaccgcacaactcttgtatttagaagctgaaaatccaaaaaaagaaatctcaatgtatattaattcacctggtggagttgtttcatctggcttggctatctatgatactatgcaatatattaaaccagaagtttcaaccctttgtattggtcaggcagcctctatgggcagtttacttttggcagcaggcgaaaaaaataaaagatttgccctaccaaattctagaattatggttcatcagccatcaggaggttttcaaggccaagcatcagatattgaaagacacgcaaaagagataatttcacttagaagtagattaaatgagatttatgttaatcatactggaaaagatttaaaaaccattgaggcagcattagatagagatacttttatgacttcagatgatgctaaaaaatttggtttaattgataaagttgttcaaaaaagggatactgaagagaaataat

SEQ ID NO: 264445 - DNA, 367 bp, Unknown
  Bacterial polypeptide expressing nucleotide sequence isolated from the Sargasso Sea
catgaatctggtacccatagtcattgaacaatctggaaaaggagaaagatcatttgatattttctctagacttcttagagaaagaataatttttcttacaggtccaattaatgatgaaactgcctcattaatttgtgctcaactattatttttagagtctgaaaacccagaagaacctattaatttatatatcaattcacctggtggactggttactgctggcttagctatgtacgacactatgcaatatattaaatgccctgttcacacagtgtgtatcggtcaagctgcctccgcaggctcattgatactcgctgctggtaaagagggaaatagatacgccttacctcatgctaaaattatgatc

SEQ ID NO: 264446 - DNA, 628 bp, Unknown
  Bacterial polypeptide expressing nucleotide sequence isolated from the Sargasso Sea
atgaaaaatatagaagaaatgagcagttttgtaccaatagtggttgagcaatcttccagaggcgaaagggcgtttgatattttttctcgcctgcttaaagacaatgtcatatttgcggttggcccaattgatgattacatcgcaaaccttattgttgctcaaatgctttttcttgagagtgaaaatccaaaaaaagacatatacctctatatcaattcaccaggtggatcaattacatcaggattatctatatacgacaccatgcaattcattaaacctgatgtcagcacaatctgtgtcggtcaggcagctagtatgggagcattacttcttgccgggggagctgaatcaaagcgtttttctctaccgaattctaggatgatgattcatcaaccaatttctgggtttcaaggtcaggccagtgatattgacatccatgctaaagaggtgcttaaaatgaaatcattggtcaattcaattttatcgaaacacacaggcaaaactgaaaaacaaattgcaaaagatacagacagagataatttcatggatgcagaagaagcattaaaatatggattaatagatcagattcttgaagagagagttgaggctttagaaagtaatggttgat

SEQ ID NO: 264447 - DNA, 293 bp, Unknown
  Bacterial polypeptide expressing nucleotide sequence isolated from the Sargasso Sea
tatgagtcgaaatttcgaagaaaaaatgaatagcctaataccaatggtagttgagcaaactaataaaggtgagagagcttatgacatttattcaagattattaaaagaaagaatagtttttttagttggaccagttaatgatgcagttgcctcattagttacagcacaactattatttttagagtcagaaaatccaaataaagaaatcagcttttacattaatagcccaggtggcctagtaactgcaggtttaggtatttatgacactatgcaatacattaattcacccagta

SEQ ID NO: 264448 - DNA, 652 bp, Unknown
  Bacterial polypeptide expressing nucleotide sequence isolated from the Sargasso Sea
aatgctaatcaaccctttcgaatcctacgagagaagtatccgggaccaagaaccagaacaaaacatcgttcccatggttattgaaacaagtaacagaggtgaacgagcattcgatatatactccttactcctcaaagaacgcatagtctttctaggcacccctattgcggatcctgttgcgaacctcatagtcgcgcaacttctttacttagaaagagaagacccagacaggccaatcagtatgtatattaatagcccgggaggagtaattagttctgggttagccatatatgacaccatgcaaatgataaaacccgaagtgtctacagtatgcctcggaatggcagcgagcatggcaaccgtacttctttgcggcggagccaaaggcaaacgatatgccttacctagctcaaccattcatatgcatcaagctcttggcggagctcaaggacaagctactgatatagaaatcgctgcaaaagaaattctcagactccaagataaactgaggaccatactttcaactcaaactggtcagacttatgagaaaattgctcaagatagtgaccgagactactacttaacttccgaccaagcggtggaatacggcttgatagacgaaattttgggttcagactccaacaaatcataa

SEQ ID NO: 264449 - DNA, 613 bp, Unknown
  Bacterial polypeptide expressing nucleotide sequence isolated from the Sargasso Sea
catgccaataggaactccaagcgtgccttacagacttccaggaagtcaatacgaaagatgggttgacatttatacaagactaggtgttgaaagaatactttttcttggtcaagaagtaaatgatggtattgctaacagccttgtggcacaaatgctttacttagattctgatgataattccaaacctatctatctgtatataaatagcccaggaggatcagtaactgctggcttggctatatatgacactattaaatacgtaaaaagtgatgtagtaaccatatgcgtaggcctcgcggcctccatgggagcgttcctattggctgctggtacaaaaggtaaaagagttgctttgccccacagcagaataatgattcatcaacccttaggagggacatctcaacgccaagcaagtgacattgaaatagaagctaaggaaattttaagaattaaggatatgttaaacatgtctatggcagatatgacaggcaaatcatttgagaaaattgaaaaggatactgacagagattattttcttagtgcggaagaagcaaaaaattatggattaatcgatagagtaattacacatccaagcgaagcaaatcattcttaa

SEQ ID NO: 264450 - DNA, 545 bp, Unknown
  Bacterial polypeptide expressing nucleotide sequence isolated from the Sargasso Sea
ggcatttgatatttactctcggttacttcgtgaaagaatcatctttctaggaactgatgtaaatgatcaagttgctgatgcattagtagctcaaatgctttttttagaagctgatgatccagaaaaagatattcagctgtacgtgaactctcctggagggtcagtaactgcgggcctggctatttacgacaccatgcagcaagttagtccggatgtcataacaatttgctacgggcttgcagcaagcatgggtgcttttcttctctctggagggacaaaagggaaaagacttgcattgccaaattcgagaataatgattcatcaacctcttggtggagctcaaggtcaagctgtcgaaattgaaattcaagccaaagaaattctctatttaaaagagactcttaattcacttttggctgagcatactggacaaaatattgaaaaaatttcagaagacactgatcgagaccactttctttctccccaagaagcggttgaatatggcctgatcgacaaagtggtttctaatctcaactccatatgaa

SEQ ID NO: 264451 - DNA, 474 bp, Unknown
  Bacterial polypeptide expressing nucleotide sequence isolated from the Sargasso Sea
acgattatgttgctaatgtaattcaagcacaattattgtttctagaaagtacagatgcatctaaagatatacaaatatatatcaattctccaggaggaagtgtttatgcaggacttggaatttatgatacaatgcaatacatcaaaccagatgttgctacaatttgcacaggaatggcagcctctatgggagcagttttattgtgtgctggtgcagaaggaaaacgttcggctttgccacattcacgcgtaatgattcatcaaccatctggtggcgcgcaaggtgttgctactgatatggaaatcaacttaaaagaaatgttaaagttgaaagatgaattgtatcaaattatttcaaaacattctggacaatcttttgataaagttcataaagattctgaacgcgattattggatgattgcagacgaggccaaagaatacggaatgattgacgaggttttaagaagaagttaaa

SEQ ID NO: 264452 - DNA, 433 bp, Unknown
  Bacterial polypeptide expressing nucleotide sequence isolated from the Sargasso Sea
agagtctgaagatcctaaaaaagaaatttctctctatataaatagtccaggcggacttgttactgctggactaggaatttatgatacaatgcagtatataaaacctgaagttaacactctatgcattggtcaagcagcaagcatgggatcatttttattagcagctggagcaaaaggtaaaagattctctttaccaaattctagaataatggttcatcaaccgtctgcaggttttcaaggtcaggcgacagatatagagatacatgccaatgaagttttatcattaaaaaaaagattaaatgaaatttattctaaacacacagaaaaatctgttgatgaaattaaagctgctcttgaaagagataattttatgactccagaaaatgcaaaagattttggattaatagataaagtagtagataaaagagaataa

SEQ ID NO: 264453 - DNA, 685 bp, Unknown
  Bacterial polypeptide expressing nucleotide sequence isolated from the Sargasso Sea
atggtgaaaaagtatacctgcaagatgtatacaatcaagagagtgaaacaggagaggaagaataggatggaaaaagaaccttcaaattatgtagtgcctactgttattgaaaatactaacagaggtgaaagagcctttgatatttattcaagacttttaaaagatagaattattttcttagggacaccaattgatgatggtgttgcaaatttaattatggctcaattattacatttggagtcagaagatcctgaaaaagatatatatgtgtatattaactctccaggagggtcaataacttctctctttgctatatatgacactatgaaatacattaagccagatgttgcaactgtttgtatgggtctagcagcttcagctggagcagtaattttagctggtggaactccaggtaaaagatactctcttccacatgcacgaataatgcttcatcaacctgcaggtggtgcagaaggaacatcaaaagatatagagattcaagcaaaacttataactgacatgaggcaccaaattaatgggttattggcagaatttacgaagaaagatatagatcagatatctgttgatacagatagagatttctggatgactgcacaagaagccttagaatacggtatagtggatgaagtactaactcaaagggagttagtagacaaaaaataac

SEQ ID NO: 264454 - DNA, 685 bp, Unknown
  Bacterial polypeptide expressing nucleotide sequence isolated from the Sargasso Sea
atggtgaaaaagtatacctgcaagatgtatacaatcaagagagtgaaacaggagaggaagaataggatggaaaaagaaccttcaaattatgtagtgcctactgttattgaaaatactaacagaggtgaaagagcctttgatatttattcaagacttttaaaagatagaattattttcttagggacaccaatagatgatggtgttgcaaatttaattatggctcaattgttacatttggagtcagaagatcctgaaaaagacatatatgtatatattaactctccaggaggatcaataacttctctatttgctatatatgacaccatgaaatatataaaaccagatgttgcaactgtatgtatgggtctagcagcttcagctggagcagtaattttggctggtggaactccgggtaaaagatactcccttccacatgcacgaataatgcttcatcaacctgcaggtggtgcagaaggaacatcaaaagatattgagattcaagcaaagcttataaccgatatgaggcaccaaattaatggattattggcagaatttacaaagaaagacatagatcagatctctgttgatacagatagggatttctggatgactgcacaagaagccttagaatacggtatagtggatgaagtactaactcaaagggagttagtagacaaaaaataac

SEQ ID NO: 264455 - DNA, 613 bp, Unknown
  Bacterial polypeptide expressing nucleotide sequence isolated from the Sargasso Sea
atgacaacaaatttatctgaacatatgagtaacctagtgcctatggtggtggagcaatctagcaaaggtgaaagagcttatgatatttactctcgattattaaaagaaagaataatttttttaacaggtcagattaatgataatgtggcttcacttgttacagctcagttattatttttagaagcagaggatcctaaaaaagaaatttatttatatgtcaatagccctggcggattagtaactgctggacttggtatttatgatactatgcaatatgtaaaacctgatatctcaactttatgtattggacaagctgcatcgatggggtcatttttattggcagctggaactaaaggaaaaagattttcattaccaaattcaaggataatggttcaccaaccatctgctggttttcaaggtcaagcaactgatatagagattcatgcaaatgaagttttatcattgaaaaaaagattaaatgaaatttattcaaaacatacaggcaagagcgttgatgaagtgaaatctgcgcttgaaagagacaatttcatgactgctgatgttgcaaagtcatttggtcttattgacgaagttgtagaaaaaagatcttaat

SEQ ID NO: 264456 - DNA, 685 bp, Unknown
  Bacterial polypeptide expressing nucleotide sequence isolated from the Sargasso Sea
aatggtgaaaaagtatatcttcaagatgtgtacaatcaagatacagatacaagagaggaagaataacatgaaaaaagagccttcaaattatgttgtacctacagttattgagaatacaaatagaggcgagagagctttcgatatttattcaaggcttttaaaagatagaattatatttcttggcactcctattgatgatggagtagcaaatctaataatggcacagcttttacatttagagtcagaagatccagagaaagatatctacgtatatatcaactctccaggaggatcgattacatcattgtttgcaatctatgacacaatgaaatacatcaagccagatgttgcaactgtttgtatgggacttgctgcttcagcaggtgctgtgattttagctggtggaaccccaggtaaaagatactcacttccacatgcaagaattatgttacatcaaccagctggtggggcagaaggcacctcaaaagacatcgaaatccaagcaaagttgataacagacatgagaaaccaaataaacggacttttggcagattttaccaaaaaagacatagaacaaatcgctgttgataccgatagagatttctggatgactgcgcaagaagcgttggaatacggtatagtagatgaagtactaactcaaagggagttagcagacaaaaaataa

SEQ ID NO: 264457 - DNA, 602 bp, Unknown
  Bacterial polypeptide expressing nucleotide sequence isolated from the Sargasso Sea
gatgaatcatttttttaaatcaaataatagcggtacttttgaagcagataatacatctcttgtaccactatcaatagattggaggaaaaaaggggttgtatctagtgtaaaagatcaagggaagtgtggttcatgttggtctttcagtgcaactggttctattgagagtattaatgcaattactaatggtatactcttaaatatatctgaacaagaacttatcgattgttctattaactatggtaataatggttgtaaaggaggttcaatggataatgctttcaaatatgttattaaaaatggattatgttctgaaaatgaatatccgtatatggcacaagatggtcaatgtcaagaatgtaaatcaattgtaaatatcgagggatatcaagatatcacacctaataatgaaaaagcacttaaaagggttgtttctcaacaaccggtttcagtggctatacaagcaaatttaaaatcttttcaaatgtattctaatgggatatattcagatatcagttgtggagataaattagatcatggagtacttattgtaggttatgggtatgatttattccatgatatgggatattgggattgtaaaa

SEQ ID NO: 264458 - DNA, 189 bp, Unknown
  Bacterial polypeptide expressing nucleotide sequence isolated from the Sargasso Sea
catggtcaccaacattgatgaaaaccaggacgcgggcggcagttgcgggtcgtgctgggcatggtcgatcaccacggccgtggaggcgcgcgtggcgcagcaaaagggccatcttgtgtctctgtcgcctcagcagcttgtggattgtacgcgcaacgtggcatttggcggcaacatgggcgccatgtc

SEQ ID NO: 264459 - DNA, 712 bp, Unknown
  Bacterial polypeptide expressing nucleotide sequence isolated from the Sargasso Sea
tatgaacgaaataggtttaataggaaaaaaaattggaatgtctagagagttttataaaacaggacaatcagttccagtaacagttttaaaaatggaaaaagctagaattattcaattgattgataaagaaaaaagaggatatatagctgtccaagtaggatatggcaaaattaaaagttctaaaataaaaaaacctatgaaaggtttttttgcaaaaaaaaacactgaaccaaagaaaacacttaaagaatttagggtaagcaagttagagaactttaaagaaggtaatgaatttggcatagaaatttttaaagacattaagtttgtagatgtaaggtctaagactataggaaaaggctttgcaggtgctatgaaaagacataatttttcaggtttaagagctactcatggagtgtctgtatctcatagatcacatggatcaacaggtcaaagacaagatcctggtaaagtatttaaaaataaaaaaatggcaggtcatatgggagataaattaagaacaattcaaaatattgaaattataagaaccgatcccgaaaacgatcttttatatttaaaaggatcaataccaggttcaaaaaattctgaagtgttaattaaaaaatctgtaaaaaatattaataaacttactatgcttgaaaaaattgaagcattagaaaagttaaaaaaaatacctgaaaaaaagaagaaataa

SEQ ID NO: 264460 - DNA, 274 bp, Unknown
  Bacterial polypeptide expressing nucleotide sequence isolated from the Sargasso Sea
tatggacattcatcctgcgcattttcatcgcaattacaaagggtacaaaaatgttaaaaaaacacgcacctgcaaaacatttcaaagtgagaccactgaactacctgattccgtggattggcgcacaaacaacgccgtgactcctgtgaaaaatcaaggacaatgtggcagttgctggagtttttcggctaccggcgccatggaaggcgcttgggctatccacactggttctctagaatccctctctgaacaacaacttattgactgtagtttg

SEQ ID NO: 264461 - DNA, 651 bp, Unknown
  Bacterial polypeptide expressing nucleotide sequence isolated from the Sargasso Sea
cgacctacaacaagacctacgacaccaccgaggcggagaagtcggccatgaaggcgtggatcctgaacgacgagatcatccgtgagcacaacgccaagaagctctcgtactggctgggccacaaccagttctccgacatgacctgggaggagttcgagcgccaccacatgggcaccctcttcctcaaccgcgcccccaagaactcggagcgccaccacctgaagggcatcggccagccgcttgatgatgcggtcgactgggttgccaagggcgccgtcacgccggtcaagaaccaggcccgctgcggctcgtgctgggtgcgcaccgcccgcccgccccccgccccctccctcccctcccgcccggccgccccgcgcctgatttgcgcacacacgcgctcaccgcgcgccccgatcccccccttttgtcttccgcaggccttctcgacgaccggctcggtcgagggcgcctaccagatcgccaacaaggagctcctctcgctctccgaggaggacctcgtccagtgcgaccacaacggcgaccgtgcgcgccgccccccgccaccccgccccagcccgcgccaaggtccctccaagggggtcatcccaacaaagaggggcgtcgcgccccgccgcccccttcactgctgag

SEQ ID NO: 264462 - DNA, 598 bp, Unknown
  Bacterial polypeptide expressing nucleotide sequence isolated from the Sargasso Sea
cgccgtcgagggcatcaccaagattcgcaccggtcgactcgtctcgctctctgaacaagagatggtgtcgtgctcgaaagaaaacatgggatgcaatggcggtttgatggactatgcgttcaagtggatcgtgaaaaatggtggcattgattccgagtttcaatacccgtacacaggcgaaggtttacgttgtaaccgctttaaactgcagatgcgagtcgcctccatcgatggctttgaagacgtcccaccgggcgatgaaaaggagcttgaaaaggctgtggcgcaacaacccgtgtcgatcgccatcgaggcggacacgaaatcgtttcagctctacgccggcggcgtgtacgactcgaaagagtgcggcgagtcagtggaccacggcgtcctcgtcgtgggctacggctttgacaagactccgaaagagtccgcaacgcaccacaagaagcaccataaacactactggaaggtgaaaaattcttggggctcgcaatggggtgagagtggattcattcgcatggctcgcagaatcagctccgagacgggacagtgcgggatcacgacgtctccgagctttccgaccaaggactaa

SEQ ID NO: 264463 - DNA, 174 bp, Unknown
  Bacterial polypeptide expressing nucleotide sequence isolated from the Sargasso Sea
gtgttctcgttgtgggatggggcaacgaagataatacaccatattggcttgttaaaaatagttggggtagctcatggggagacaatggatatgtaaaactcagacgcacaaacagtacaaataattcgggtatgtgtggtgttgctcttcaaccatcttatattgtagtttaaa

SEQ ID NO: 264464 - DNA, 220 bp, Unknown
  Bacterial polypeptide expressing nucleotide sequence isolated from the Sargasso Sea
tggaatttattctgatctggattgtgggacacaattagatcacggagttttagttgttggttatggatttgatttcgataatgatatggattattggatcataaaaaattcatggggtaaccaatggggggaaaatggatatatacggattcaaagaaatatagaagattcaaggggattatgtggaatagcgatgcaacctagtattccaattgtttag

SEQ ID NO: 264465 - DNA, 516 bp, Unknown
  Bacterial polypeptide expressing nucleotide sequence isolated from the Sargasso Sea
tatctgaacaacaattgatagattgttcagggccacaagggaaccatggatgtgaagggggtattatggaacatggatttcagtatatcattgataatggtgggatttgttcagaagaagattatccttatcaaggagttgataatcaatgtcaagattgtgaaacaattgtggatattaaaaagtatggagatatttatcctaaaaatgaaaaagttttaaagagggctgtagctcagcagcctgtttctgttgctattcaagcaaatatttcatcattccgtttttacaaagaagggatttattctgattataattgtggagatcaattagatcatggtgtattagtcgtaggatatggtacagatgaagtacaaaatatggattattggttggtaaaaaattcttggggaaaattatggggtgaagaaggatacataagaattttaagaaatattgatgataaaaatggattgtgtggaattgctatgcaacctactattccattactttaat

SEQ ID NO: 264466 - DNA, 842 bp, Unknown
  Bacterial polypeptide expressing nucleotide sequence isolated from the Sargasso Sea
gctggccgacgccaaggactgggtgaccgacggcgcggtgacgcccgtcaagaaccaggcgcgctgcggctcgtgctgggccttctccaccaccggcgccgtcgagggcgcctaccagatcgcgtcgggcaagctcgtctcgctctccgagcagcagctcgtctcgtgcgaccacaacggcgaccagggctgcaacggcggcctgatggacaacgcgttcgagtacatcgagcagaacggcatcagcaccgaggatgactacccctacacctcgggcggcggcgtcaccggcacctgcgacacctcgaaggtcaagccggtcgtcaccgtcaccggcttcaccgacgtgccgtccaaggacgagaccgcgctcaagtcggcgatcgcgcagcagcccgtgtcggtggcgatcgaggcggacaagtcggccttccagctgtacaagtcgggcgtcctcgactccaccgcgtgcggcaccaagctcgaccacggcgtcctcgccgtcggctacggcaccgacggcggcaaggactactacaaggtcaagaactcgtggggcgcgacctggggcgagtcgggctacatccgcatggtgcagggcaagaacatgtgcggcatcgcctcgcaggcgtcgtaccccaccggcgccaagtccatgggcccgacgccgccctcgccgcccggaccgtcgccgccgccggcgggcaagacccactacggcgaccccaaggacggctgcctgaccgacgagatcgagatcacgatccagggcgtcacgggcgacttctgcacgtccaagtgctcgctgctcaaggcgtgcccgaccgacctcccccgcggcg

SEQ ID NO: 264467 - DNA, 880 bp, Unknown
  Bacterial polypeptide expressing nucleotide sequence isolated from the Sargasso Sea
gcgtgggaggacttccgcgaggtgtacaccgggtacaaggactcggccaagtacctgcgccgcaccaaaaatgtcaacgaggccctcctcgacgctgatgcccaggcagctgccccagcctcggtcgactggaccaccaagaacgcggtcacgcccgtcaaaaaccagggccagtgcggctcgtgctgggcattctcgacgaccggctccaccgagggcgcctacgccatcgcgtcgggcaagctcgtctccctctcggagcagatgcttgtgtcgtgcgaccacaacggcgaccagggctgcaacggtggcctcatggacaacgcctttggctggatccagcagaacggcggcatctgcaaggagtcggactacccctaccagggcaccacgggcacctgcaccacaggctgctccccggccgtcacggtgtccggccaccacgatgttccccagaaggacgagaaggccctcgcggtcgccgcggccatcggcccggtctccgtcgccatcgaggccgataagcaggcgttccagttctacaagtctggcgtctttgacaacgccggctgcggcaccaacctggaccacggcgtgctcgtcgtcgggtacgggtccatggactccaaggactactggaaggtcaagaactcgtggggcgccacctggggccttaacgggtacatcttgatggcccgcggcaagaacatgtgcggtatctcccagtccgcctcttacccgaccggcgccaccgccgcgaccccgggaccttccccgggcccttcccctggaccgtccccgggccctgcccctggtccctctcctggtccctctcctggacccggccccgcccctggctccacccactacggcgacccct

SEQ ID NO: 264468 - DNA, 964 bp, Unknown
  Bacterial polypeptide expressing nucleotide sequence isolated from the Sargasso Sea
gacagtcttgaactaaatacatttgagttttcacaaaattatttcatgttttgggataagttagagaaagcaaattattttttagagaatattatcaaatcaagagatgaagcatatgagagtagattaattacgcatcttttaaaagcacctgtacaagatggcggtcagtgggatatgtttgtaaacttaatcaacaagtacggtgcggtgcctaaagatgtaatgcctgaaacaaatcatagcagtaaatctggtgctatgaattatatcttgactcacaaattaagagagtttggttctatactaagaaaaaaaccagcaaaaaattcttcagctcttaaaaaagatatgatggaaacaatctataatttactggcaatgtttctcggtcaaccaccagatgttatcaattggtctgctagaaataaagataatagacacattattatttcagacatgacaccaattgatttctgcaaaaaatatgcagatatcaatattaaagataaaatttgcttaattcatgctccaatgagcaataaaaaatttaatacaatgtacacggttgaatatctaggtaacgttgttgaaggacaaattattaaatatttaaatgtagatattaaagaattaaaaaaatctgcaatggactcaataaaaaacaatgaagccgtatggtttggttgtgatgttgggaaacgttttagtcgtgatatgggtgtacttgatatggggatttacgactatgaaaatgtcttccaaacttcatttaagatgaataaacaaactcgtttagagtatggtgatagtgaaatgacgcatgctatgcttttaacgggagtcgatattaaaaaaagaaattcaactaaatggaaaattgaaaatagctggggaacgaaaagtggtaatcaagggtatatgatgatgaccgatgaatggtttgatgaatatacctatgaag

SEQ ID NO: 264469 - DNA, 598 bp, Unknown
  Bacterial polypeptide expressing nucleotide sequence isolated from the Sargasso Sea
tatgaagatcatggttggattaaatatcgatgattatgtctgtttaattaattgcccaatgagtaataaagagtataataaagtttatactgtagaacatttaggaaatgtcattgaaggaagtcctattagatatttaaatgttgaaagtgacgtaatgaaagacgcgagcataaaatcaattaaagatgatcatcctgtttggtttggttgtgatgttggtaaacattttcatagagatttaggcgttatggacactgatttatttgactacaaaatgttttataatactgactttaaaatgaataaagcagaaagattagaatatggtcagagccaaatgacccatgctatgctatttactggtgttgacttagatgataatggaaaatcaatacaatggagagttgaaaatagctggggagataaaggaggtaataaaggataccatattatgtctgatgattggtttgacgagtataattatgaagtagttgttcataaagattatttatctgatgaattaaatgatatttttcaaaatgctgaggctgttccattaaagccttgggaccctatgggtgccctagcaaaataa

SEQ ID NO: 264470 - DNA, 499 bp, Unknown
  Bacterial polypeptide expressing nucleotide sequence isolated from the Sargasso Sea
gaatatctaggtaatgtagttgagggacaaataataaaatatttaaatgttgatataaaagaactcaaaaaatcagctatggactctattaaaaataacgaagccgtttggtttggttgtgatgtaggtaagcgttttaatagagatatgggtgttcttgatatgggtatttatgactatgataacgtttttcaaacatcatttaaaatgaataaaaaaactcgtttagaatacggtgatagtgaaatgacacacgctatgctcctaacaggtgtggatattaaaaaaagaaactcaacgaaatggaaaattgaaaatagttgggggacgaagagtggtaatcaaggatatatgatgatgacagatcaatggtttgatgaatatacttatgaagtcgtcattgataaaaaatacctgaataaaaaactcttaaaatatttaaatatggaaccagttgcgcttgctccttgggatccaatgggtgcattagctaaataaa

SEQ ID NO: 264471 - DNA, 760 bp, Unknown
  Bacterial polypeptide expressing nucleotide sequence isolated from the Sargasso Sea
gcatcaaatgaagaattaaataagctaaaaaattctatgattgaagaaatttttaaaatgctatcgatgcatttgggcactcctccaaaaagttttaattggcaagtaagagataaagacaaaaaatttagtagatacgaaaatttaactcctcaatctttttatgaagatcatgttggattgaatctcgatgattatgtctgtttaattaattgcccaatgagtaataaagagtataataaagtttatactgtagaacatttaggaaatgtcattgaaggaagtcctattagatatttaaatgttgaaagtgacgtaatgaaagacgcgagcataaaatcaattaaagatgatcatcctgtgtggtttggttgtgatgttggtaaacattttcatagagatttaggcgttatggacactgatttatttgactacaaaatgttttataatattgactttaaaatgaataaagcagaaagattagaatatggtcagagccaaatgacccatgctatgctatttactggtgttgacttagataataatggaaaatcaatacaatggagagttgaaaatagctggggagataaaggaggtaataaaggataccatattatgtctgatgattggtttgacgagtataattatgaagtagttgttcataaagattatttatctgatgaattaaatgatatttttcaaaatgctgaggctgttccattaaagccttgggaccctatgggtgccctagcaaaataaa

SEQ ID NO: 264472 - DNA, 853 bp, Unknown
  Bacterial polypeptide expressing nucleotide sequence isolated from the Sargasso Sea
taatcttttcaggatttatcttggaagaaaacataatcttagaaattttgaattttctcaaacatattttatgttttgggacaaattagaaaaatccaattattttttgaatagtgtcattgaaactgtaaatgaaacttgggacagtaggcttatgatgcatttattacatagtccaattcaagatggtgggcaatgggatatgtgggttaatcttattaacaaatatggtgttgttccaaaatcggagatgccagaaacatatcagtcaggtaaatcaatgagaatgaatagcatgatcaccagaaaactcagagaatatgcaaaagaattaagggactcaattaataaacagaaaagagaagaagtctatgcattaaaaaacacaatgctgtcaactatctataaaatgctggttattcatcttggagagccacctgaatcatttaactggcaagtcagagataagaaaaaaggatttcatcgctttaagaaccttactgctctaagtttttttaaggaacatgttgggattaaattgaacgatttagtctgccttattaattgtccaatgtctgataaagaatatgatagagtatataccgtagaatttcttgggaatgtcatcgaagggaaccctataagatatttaaatgttgacatagatgtattaaaaaatgcttcagtagaatccataaaaaataatgacccagtctggtttggatgtgatgttggtaagtatttacatcgaacccatggagtgatggacaccaaattatttgactttaatttgttttatgggacagaattttcactagataaggcaagtagattagaatatggtgaaagtaaa

SEQ ID NO: 264473 - DNA, 739 bp, Unknown
  Bacterial polypeptide expressing nucleotide sequence isolated from the Sargasso Sea
catcagcccttaaaaaagatattgatggagacaatttataatttactagcgatgtttcttggtcaaccaccagatgttataaattggtctactagaaataaagataataaacattttgtcatttcagatatgacaccaattgatttctgcaaaaaatatgctgatatcaatattaaagataaagtttgcttaattcatgcgccaatgagcaataaaaaatttaatacaatgtacacagttgaatatcttggtaatgttgttgaaggacaaattattaaatatcttaatgtagatattaaagaattaaagaagtcagcgatggactcaataaaaaataatgaagcggtatggtttggttgtgatgttggaaaacgttttagtcgtgatatgggtgtacttgatatgggcatttatgactatgaaaatgtttttcaaacttcatttaagatgaataaacagactcgcttagagtacggtgacagtgaaatgactcacgccatgcttttaacaggtgtagatattaaaaaaagaaattcaactaaatggaaaattgaaaatagctggggaacgaaaagtggtaatcaaggatatatgatgatgactgatgaatggtttgatgaatatacctatgaagttgtcattgataaaaaatatcttaacaaaagacttttaaaatatttagatatggaaccaatagcactagtgccttgggatccaatgggtgcgttagctagataaa

SEQ ID NO: 264474 - DNA, 478 bp, Unknown
  Bacterial polypeptide expressing nucleotide sequence isolated from the Sargasso Sea
gaaggtcaaaaaataaaatatctcaacgttgaagtagctgaattaaaaaaatcagcaatgcaatcaattaaaaataatgaagcagtatggtttggttgtgatgttggaaaaagatttagccgagatatgggtgttcttgatatgggcatatttgattatgaaaatgtttttcaaacttcgtttaagatgaataaacaaacaagactagagtatggtgacagtgagatgacacatgcaatgttattaactggtgtagatgtaaaaaacagaaaatcatctaaatggaaaattgaaaatagttgggggactaaaagcggtaataaggggtatatgatgatgacggatgaatggtttgatgaatatacgtatgaagtagttgtggataggaaatatttatctaaaaagttattaaaatatattgatatcgacccaataactcttgcaccttgggacccaatgggtgcgctagcaaaataaa

SEQ ID NO: 264475 - DNA, 805 bp, Unknown
  Bacterial polypeptide expressing nucleotide sequence isolated from the Sargasso Sea
gataagctggagaaatctaattattttcttgaatcaattttatctactgttgaagagaattttgatagcagaattgttatgcatttacttcaaactccaacagaagatggtggacaatgggatatgtggaaaaacttaattaaaaaatatggcgtaattccacaagctcaaatgtctgagtctttttcttcaagccagtcagcagaaatgaataaaatgcttgcaagaaagttaagagaaaatgctcatgaccttcgcaaagagttttcaaaaggcgcttcaaatgaagcattaaaccagctaaaaaattctatgattgaagaaatttttaaaatgctatcaatgcatcttggtactcctccaaaaagttttaattggcaagtaagagataaagataaaaaatttagcaggtacgataatttaactcctcaatctttttatgaagatcatgttggactaaatcttgatgattatgtctgtttaattaattgcccgatgagcaataaagagtataataaagtttatactgtagaacatttagggaatgtcgttgaaggaagtcctatcagatatttaaatgttgaaagtgacgtaatgaaagaagcaagcataaaatcaattaaagatgataatcctgtatggtttggttgcgatgttggaaaacattttcatagagatttaggcgttatggatactgatttatttgattatgaaatgttttatagcactgactttaaaatgaataaagcagaaagattagaatatggccagagccaaatgacccatgctatgctatttactggcg

SEQ ID NO: 264476 - DNA, 612 bp, Unknown
  Bacterial polypeptide expressing nucleotide sequence isolated from the Sargasso Sea
caccaacatcattctataaagagcatgttggcttggcattagatgagtatgtatgtctcattaattgcccaatgtctgataaagaatacaataaggtctatacagtagattatcttggcaatgtcgctgaaggacatccaattagatacctcaatgtagaaagtcacaaaatgaaagaagctactatcagatctttgcaaaacgatgaacctgtctggtttggatgcgatgtgagcaaacattttaatcgtgatcttggtgttatggatatagatctatttgattacgattcattctatgatctggaatttggtatggataaagcagcaaggctggaatatggtgatagtcagatgacgcacgctatgttattcacaggagtagacctcaattcgaagaatgagcctaccaaatggagagtggaaaacagctggggtaataaaggtggcgataagggctatcatataatgacagataaatggtttgatgagtataattatgaggttgttgtacataaaagttgcctaccagatgatcttttagaactattcatgaaagaagaggcagtccgcttggaaccttgggacccaatgggtgctcttgcaaaataga

SEQ ID NO: 264477 - DNA, 810 bp, Unknown
  Bacterial polypeptide expressing nucleotide sequence isolated from the Sargasso Sea
gattttgacagcagaattgtcatgcacttacttcaaactccgacagaagatggtggacaatgggatatgtgggcaaatttaattaaaaaatatggtgtaatccctcaagctgaaatgtccgaatctttttcttctagccaatcagctgaaatgaataaaatgttatcaagaaagctcagagaaaatgctcatgatcttcgaaaagccttttcaaaaggagcttcaaatgaagatttaaatcaattaaaacaaaaaatgattgaagaaattttcagaatgttatcaatgcatcttggcactcctccaaaaagttttaattggcaagttagaaataaagataaaaattttagtaggtatgaaaatcttactccccaatctttttacaatgatcatgttggacttaatcttgatgattatgtttgcttaattaattgtccaatgagtaataaagattataataaagtttatactgtagaacacttaggtaatgtagttgaaggaagtcctatcagatatttgaatgttgaaagcgacattatgaaggaagcgagtatcaaatcaataaaggatgacaatccggtatggttcggttgtgatgttggtaaacattttcatagagatttaggagttatggatactgatttatttgattatgaaatgttttatggtacagattttaaaatgaataaagcagaaagactagaatatggtcaaagtcaaatgacccatgccatgctatttaccggtgttgatttagatgataatggaaaatcagttaaatggagagttgaaaatagttggggagataaa

SEQ ID NO: 264478 - DNA, 802 bp, Unknown
  Bacterial polypeptide expressing nucleotide sequence isolated from the Sargasso Sea
aatggcatcaggtagatgttggggatttgcaggattaaatcttatgcgcttacaagtagttgatagtcttgaactaaatacatttgagttttcacaaaattatttcatgttttgggataagttagaaaaagcaaactattttttagagaatattatcaaatcaagagatgaatcatatgagagcagattaattaatcatcttttaaaagcacctgtacaagatggcggacagtgggatatgtttgtaaacttaattaataagtatggtgcagtacctaaagacgtaatgcctgaaacaaatcatagcagcaaatctggtgctatgaattatattcttacgcataaattaagagagtttgcttctatactaagaaagaaaccagctaaaaattctgcagctcttaaaaaagacatgatggaaacaatttataatttattagcaatgtttcttggtcaaccaccagatgttatcaattggtctactagaaataaagataatagacacattgtcatttctgatatgacaccaattgatttctgcaaaaattatgctgacatcaatattaaagataaagtttgcttaattcatgctccaatgagcaataaaaaatttaatacaatgtacacagttgaatatcttggtaacgttgttgaaggacaaattataaaatatcttaatgtagatattaaagaattaaaaaaatccgctatggactcaataaaaaacaatgaagctgtatggtttggttgtgatgttggtaaacgttttagtcgagatatgggtgtgcttgatatgggcatt

SEQ ID NO: 264479 - DNA, 815 bp, Unknown
  Bacterial polypeptide expressing nucleotide sequence isolated from the Sargasso Sea
aatggcatcaggtagatgttggggatttgcaggattaaatcttatgcgcttacaagttgttgatagccttgaattaaatacatttgagttttcacaaaattatttcatgttttgggataagttagagaaagcaaactattttttagagaatattattaaatcaagacatgaatcatatgatagtagattaattactcatcttttaaaagcacctgtgcaagatggtggacagtgggatatgtttgtaaacttgatcaacaagtacggtgctgttcctaaagatgtaatgcctgaaaccaatcatagcagtaaatctggtgctatgaattatattcttacacacaaattaagagagtttgcttctatactaagaaagaaaccagcaaaaaattcttcagctcttaaaaaagacatgatggaaacaatctataatttactggctatgtttcttggtcaaccgcctgatgttataaattggtctactagaaataaagataatagacacattgttatttcagacatgacaccaattgatttctgcacaaaatatgctgatatcaatattaaagataaagtttgcttaattcatgctccaatgagcaataaaaaatttaatacaatgtataccgttgaatatcttggtaacgttgttgagggacaaattattaaatatttaaatgtagacattaaagaattaaaaaaatctgcgatggactcaattaaaaacaatgaagctgtatggtttggttgtgatgttgggaaacgttttagtcgtgatatgggtgtacttgatatgggaatttacgactatgaaa

SEQ ID NO: 264480 - DNA, 595 bp, Unknown
  Bacterial polypeptide expressing nucleotide sequence isolated from the Sargasso Sea
tttgtaaaaaaatatgctgatatcaacattaaggataaagtttgtctgatacatgctccaatgagcaataaaaagttcaatactacatatactgttgaatacttaggcaatgttattgagggacaagaaataaaatatcttaatgttgagatagcagaactaaaaaaatctgcaatgcaatcaattaaaaataatgaagcagtttggtttggatgtgatgtaggaaagagatttagtagagacatgggggtgcttgatatgggtatttttgactatgaaaatgtttttcaaacatcatttaaaatgaacaaacaaactcgactagaatacggtgacagtgaaatgacccatgcaatgttgttaactggtgttgatgttaaaagtagaaaatcaactaaatggaaaattgaaaatagctggggaacaaagagtggaaataaaggctatatgatgatgaccgatgaatggtttgatgagtatacctatgaggtagttgtcgataaaaaacatctcagtaaaaaattattaaaatatcttgatatggaacctgtgagtttagaaccgtgggatcccatgggagctttagcaaagtaat

SEQ ID NO: 264481 - DNA, 814 bp, Unknown
  Bacterial polypeptide expressing nucleotide sequence isolated from the Sargasso Sea
atgccaactactaatcaaaaatcaagtggtcgttgttggggttttgctggccttaatctctttcgaatatatttaggcagaaaatacaatttaaaagattttcaattttctcaaagttatttcatgttctgggataaattagaaaaatccaattactttttagagtccattataaatacggctgataaacattggaattctaggcttgtgatgtatctccttaatgcacccatccaagatggtgggcaatgggatatgtgggtaaacttagtaaataaatatggtgttgtgcctcagtctgaaatgccagaatctttttcatctagtcgatcaatgcgtatgaatagaatgataacaagaaaattacgtgaaaatgctaaaatattaagaggcttaaaaaataaaaaggcctcttttgatgatattaataatgaaaaaaatcagatgcttgaacaaatatataaaatgttggtgatacacctaggtaatccgccaaattcgtttgactggcagactagagataagaaaaagaattttctacggtttgaaaatttagatccgaattcattttataatgaacacataggtttaaaattagatgattatgtctgtttaattaattgccctatgtctgataaagagtataataaagtatatactgttaattatttagggaatgtgattgaaggtaatagtattaggtatttaaatgtggaaagtgaagatatgaaaagagctactataaattcacttaaagatgatcagccagtatggtttggatgtgatgtcagtaaacatttacatagagatttag

SEQ ID NO: 264482 - DNA, 433 bp, Unknown
  Bacterial polypeptide expressing nucleotide sequence isolated from the Sargasso Sea
aaaaaatctgcaatggattcaataaaaaacaatgaagctgtatggtttggttgtgatgttggtaaacgttttagtcgcgatatgggcgtacttgacatgggtatttacgactatgaaaatgtcttccaaacttcatttaagatgaataaacaaactcgtttagagtatggtgatagtgaaatgactcatgccatgcttttaacaggggtggatattaaaaaaagaaattcaactaaatggaaaattgaaaatagctggggaacgaaaagtggtaatcaaggatatatgatgatgaccgatgaatggtttgatgaatatacctatgaagttgtcatcgataaaaaatatctaaacaaaagacttttaaaatacttagatatggaaccagtagcgcttgcgccttgggatccaatgggtgcgttagctagataaa

SEQ ID NO: 264483 - DNA, 421 bp, Unknown
  Bacterial polypeptide expressing nucleotide sequence isolated from the Sargasso Sea
gatggactcaataaaaaacaatgaagctgtatggtttggttgcgatgttggtaaacgttttagtcgtgatatgggtgtgcttgatatgggtatttacgactatgaaaatgtttttcaaacttcatttaagatgaataaacaaactcgcctagagtatggtgatagtgaaatgactcatgcgatgcttttaacgggtgtcgatataaaaaaaagaaattcaaataaatggaaaattgaaaatagctgggggacgaaaagtgggaatcaaggatatatgatgatgactgatgaatggtttgacgaatatacctatgaagttgtcattgataaaaaatatcttaacaaaagacttctaaaatacttagatatggaaccagtagcactagccccttgggatccaatgggtgctttagctagataa

SEQ ID NO: 264484 - DNA, 943 bp, Unknown
  Bacterial polypeptide expressing nucleotide sequence isolated from the Sargasso Sea
ttttaggatttaccttggtagaaaacataaccttaaagattttcaattttcacaaagttattttatgttttgggataagctagaaaaatctaattatttcttagaatcaattttatcaactgttgaagagaattttaatagtagaattgttatgcatttgcttcaaactccgacggaagatggaggacaatgggatatgtggaaaaacctaattagcaaatatggtgttattccacaggcagaaatgtccgaatctttttcttcaagtcaatcagctgaaatgaataaaatgcttgcaagaaagctaagagaaaatgctcatgatcttcgcaaagaattttcaaaaggtgcatcaaatgaagcattaaatcagctaaaaaattctatgattgaagaaatttttaaaatgctatcaatgcatcttggtactcctccaaaaagttttaattggcaagtaagagataaagataaaaaatttagcaggtacgataatttaactcctcaatctttttatgaagatcatgttggattgaatctcgatgattatgtttgtttaattaattgcccaatgagtaataaagagtataataaagtttatactgtagaacatttagggaatgtcgttgaaggaagtcctatccgatatttaaatgttgaaagtgacgtaatgaaagacgcgagcataaaatcaattaaagatgataatcctgtatggtttggttgtgatgttggtaaacattttcatagagatttaggcgttatggatactgatttatttgattatgaaatgttttatagcactgactttaaaatgaataaagcagaaagattagaatatggccagagccaaatgacccatgctatgctatttactggtgttgacttagatgataatggaaaatcaataaaatggagagttgaaaatagttggggagataaagga

SEQ ID NO: 264485 - DNA, 890 bp, Unknown
  Bacterial polypeptide expressing nucleotide sequence isolated from the Sargasso Sea
gtttgtgaacttaattaaaaagtatggtgccgttcctaaagatgtaatgcctgaaacaaatcatagcagtaaatctggcgcgatgaattatattctgacgcataaattaagagagtttgcttctatactaagaaagaagccagcaaaaaattcttcagctctgaaaaaagatatgatggaaacaatctataatttactagcaatgtttcttggtcaaccaccagatgttatcaattggtctactagaaataaagataatagacacattgtaatttcaaatatgacaccaattgatttctgcaaaaaatatggtgatatcaatattaaagataaagtttgcttaattcatgctcccatgagcaataaaaaatttaatacaatgtacacagttgaatatcttggtaatgttgttgaaggacaacttattaaatatttaaatgtagatattaaagaattaaaaaaatctgcgatggactcaattaaaaacaatgaagctgtatggtttggttgtgatgttgggaaacgttttagtcgtgatatgggcgtacttgatatgggtatttatgattatgaaaatgtctttcaaacatcgtttaaaatgaataaacaaactcgtttagagtatggtgatagtgaaatgactcacgccatgcttttaacgggtgtggatattaaaaaaagaaattcaactaagtggaaaattgaaaatagctggggaacaaaaagtggtaatcaaggatatatgatgatgactgatgaatggtttgatgaatatacctatgaagttgtcattgataaaaaatatcttaataaaaaacttttaaaatatttagatatggaaccagtagcactatctccatgggatcctatgggagctttagcaaaataat

SEQ ID NO: 264486 - DNA, 554 bp, Unknown
  Bacterial polypeptide expressing nucleotide sequence isolated from the Sargasso Sea
gatcaactgcccaatgtcggataaagaatacaataaggtctatactgtggattacttaggcaatgtggctgaaggacatcccatcagatatttaaatgtggaaagtcaggtgatgaaggaggttgctatacgatcactaaagaatgatgaccctgtctggtttggctgtgatgtgagcaaacattttcacagggatctgggtgtcatggatatggatctttttgattatgactctttttataatctcaaatttggtatggataaaggagcacgactggagtatggagacagtcaaatgacacatgcaatgttgtttactggcgtggaccttaattcaaagaataatcctacaaaatggagagtagagaatagttggggtaccaaaggtggtgacaaaggttatcatatcatgaccgataagtggtttgatgagtataactatgaggttgtggtacataaaagttgtctgccagaagaacttttagaattattcttgagagaagaggcaattcgcctggagccttgggatcccatgggtgccctggccagatagt

SEQ ID NO: 264487 - DNA, 583 bp, Unknown
  Bacterial polypeptide expressing nucleotide sequence isolated from the Sargasso Sea
ggtttgaatctcgacgattatgtctgtttaattaattgtccaatgagcaataaagagtataataaagtttatactgtagagcatttaggaaatgttgttgaaggaagtcctataagatatttaaatgttgaaagtgacattatgaaagatgcgagtataaaatcaattgtagatgataatcctgtgtggtttggttgtgatgttggtaaacattttcatagagatttgggtgttatggataccgatttatttgattacgaaatattttataatactgactttaaaatgaataaagcagaaagattggaatatggccaaagccaaatgactcatgctatgctttttactggtgttgatttagataataatggtaaatcaattaaatggagagttgaaaatagttggggagttaaaggtggtaataaaggataccatatcatgtctgatgattggtttgatgaatacaattatgaagttgttgttcataaagattacttaacagatgaattaaatgatatcttccaaaatgctgaatctataccccttaagccttgggatcccatgggtgcgttagcaaaataaa

SEQ ID NO: 264488 - DNA, 922 bp, Unknown
  Bacterial polypeptide expressing nucleotide sequence isolated from the Sargasso Sea
gctcctgttcagatgggtgtcaaatgggacatgtttgtaaatcttatagagaagtatggagcagttccaaaagatattatgccagaaactaaccatagtagcaaatcaatggcaatgaattacattttaacacataaacttagagagtttgcttccattttaagaaagaaatctgcaaagcaatctgcaaaactaaaaaaagaaatgatagaaaacatttataatatactagcaatgtttttgggtcagccacctgcagtgattaattggtcatcgagagacaaagataataaatatatagcaattacagacatatcacctaaggaattttgtaaaaaatacgctgatattaatattaaagataaagtttgcttaattcatgcaccaatgagtaacaaaattttcaatagaacatatacagttgaatatctgggtaatgttattgagggtcaagaaataaaatatctaaacgttaatatagatgagctaaaaaaatctgcaatgcaatcaattaaaaataatgaagcagtatggtttggttgtgatgttggtaaaagatttagtcgagatatgggagttcttgatatgggtatttttgattatgaaaatgtttttcaaacttcatttaaaatgaataaacaaactagactagagtatggtgatagtgaaatgacacatgccatgttattaacaggtgtagatattaaaaaacgtaattctaacaaatggaagattgaaaatagttggggaacaaagagtggcaataaaggttatatgatgatgacagatgaatggtttgatgaatatacttacgaggtagttgtggacaaaaaatatcttagtaaaaaaatatttaaatatcttgatttagaacctattgctcttgctccatgggatcctatgggtgcattagctaaataaa

SEQ ID NO: 264489 - DNA, 955 bp, Unknown
  Bacterial polypeptide expressing nucleotide sequence isolated from the Sargasso Sea
tatgataaaatcatttaataaagattgtcattctgattcttctttaaagatttcacgtaatgcggcaacgcacaatgaggtaactgatcttgcaatggattgggatgaatatagaaaaatagaccatacattttctgaacaaatttcaggagaaatgaaaataacgaaccaaaaatcaagtggccgttgttggggttatgcaggattaaatctttttaggatttaccttggaagaaaacatggccttagaaattttgagttttcacaaacatattttatgttttgggataagctggaaaaatcaaattatttcttaaatagtatcattgatactgcacaaaagtcttgggatagtaggctaatcatgcatttgttgcacaaccctatccaagatggtggacagtgggacatgtgggtcaatcttattaacaaatatggtgtggtccctaagtcagaaatgcctgaaacatatcagtcgggtaaatcaatgagaatgaatcgtatgattacgagaaaattaagagagtatgcaaaaaaattaagagaagcagtaaataacaaaacaagtgctgaagaagtaatcaaattaaagaatacaatgttattaactgtatataaaatgctagttgtacatcttggtgaaccaccagagtcattcaactggcaagtaagagataaaaaaaagaattttcatcgttataatgatttaactccaaaaagcttttttagtgatcatgttgggattgagttaaataatcttgtctgtcttatcgattgtccgatgtctgataaaaaatacaatagagtatacacagtagaatatctgggcaatgtaattgaaggtaatcctatacggtatttaaatgtcgaaattgatattttaaaaaaagcgacaatagaatcaataaaaaataatgaccctgtttggtttggctgcgatgttagtaaatattgc

SEQ ID NO: 264490 - DNA, 1060 bp, Unknown
  Bacterial polypeptide expressing nucleotide sequence isolated from the Sargasso Sea
tatgcctaaaaatatatctcttaatgacgtcaaaaaatatagaaacaagtttctaagaaataataaaaatactgcatccagaaatgcattaattaaaaatgatttaaacacagtttctcttaactgggaaaattttagtcaaattaatcatcatttttcacatctaattgaaaaagaattacccgcaacaaatcaaatggcctcaggtcgatgctggggatttgcaggattaaatttaatgcgattagaagttgtaaaaaaactgaatttaaataacttcgagttctctcaaaactattttatgttttgggataaattagaaaaggcaaattattttttagaaaatataattaaaacaagagatcacgcatatgatagtagattaattatgcatcttgttaaggctccagttcaagatggcggtcagtgggatatgttcgtaaatctcatcgaaaaatatggagcagttccaaaagatgtaatgccagaaaccaatcacagcagtaaatccatggcaatgaattacatcttaacgcataaattaagagaatttgcttctttcttaagaaaaaaatctcctaaacaatcagcttccttgaagaaagatatgatggaaactatttataacttattggcaatgttgctaggtcaacccccagaggtggtgaactggtctgctagagataaagataacaaatacatttctattgctgatttatcacctaaggaatttgtaaaaaaatatgctgatataaatatcaaggataaggtttgtctgatccatgctccaatgagtaataaaaaattcaatactaaatatactgttgaatacttaggtaatgttattgagggacaagaaataaaatatcttaatgttgaggtaactgaactaaaaaaatctgctatgcaatcaattaagaataatgaagcagtttggtttggatgcgatgtaggaaaaagatttagtagagacatgggtgttcttgacatgggtatttttgactatgaaaatgtttttcaaacatcatttaaaatgaacaaacagacgcgactagaatac

SEQ ID NO: 264491 - DNA, 886 bp, Unknown
  Bacterial polypeptide expressing nucleotide sequence isolated from the Sargasso Sea
tgttggggatttgctggattgaatttgatgagattatctctagcggaaaaatataatttaaaaaactttgagttctcccaaaattatttcatgttttgcgacaagattgagaagtcaaattactttcttgagaacatattaaatacatttgatgaagcctatgacagtagattaatgatgtacttgctaagtagtcctattcaggatggtggtcaatgggatatgtttgttaatttaatagaaaaatatggggttttacctcaatctgttatgcctgagagctatcaaagtagccaatctgctctaatgaatcgatttataactcgaaagctaagagaatttgggtggactttgcgagagatgaatactaagggtgctaaattaagtgagcttagaaaaacaaaagaagaaatgctatcaacaatttattcaatgctatgtaggtgtcttgggaatcctccagaaacatttagttggcaagcaaaagacaaaaataaaaaattagtacgattaaatgatttaactcctctcgatttctataaagaagtaggtgttaaattaaaagataaactatgtcttatacatgcaccaatgtctaataaaaaaatgaatgagctatatacagttagctatcttggaaatgttgttggcggacaaatcattaactatgttaatgttgatattgaagatatgaaaagagctgctattaaatcactaaagaataatgaggcagtatggtttgggtgtgatgtaggtaaaatgttccatcgtgatttaggtattatggatgttgatttatatgactatgagtcactatttgatactaaattcttaatggataagggcaagagacttgagtatggtgatagtcttatgacccatgcaa

SEQ ID NO: 264492 - DNA, 943 bp, Unknown
  Bacterial polypeptide expressing nucleotide sequence isolated from the Sargasso Sea
ttaattactcatcttttaaaagcacctgtgcaagatggtggacagtgggatatgtttgttaacttaattaataagtatggtgcagtacctaaagacgtaatgcctgaaaccaatcatagcagtaaatctggtgctatgaattatatcttaactcacaaattaagagagtttgcctctatactaagaaagaaaccagcaaaaaattcttcagctcttaaaaaagacatgatggaaacaatttataatttactggcaatgtttcttggtcaaccaccagatgttatcaattggtctactagaaataaagataatagacacattgttatttcagatatgacaccaattgatttctgcaaaaaatatgctgatatcaatattaaagataaagtttgcttaattcatgctccaatgagcaataaaaaatttaatacaatgtacacggttgaatatcttggtaatgttgttgaaggacaaattattaaatatttaaatgtagatattaaagaattaaaaaaatcggcgatggactcaataaaaaataacgaagctgtatggtttggttgtgatgttgggaaacgttttagtcgtgatatgggtgtacttgatatgggcatttatgactatgaaaatgtttttcaaacttcatttaaaatgaataaacagactcgcttagagtacggtgatagtgaaatgactcatgccatgcttttaacaggtgtcgatattaaaaaaagaaattcaactaaatggaaaattgaaaatagctggggaacaaaaagtggcaatcaaggatatatgatgatgacagatgaatggtttgatgaatatacctatgaagttgtcattgataaaaaatatctaaataaaagacttttaaaatatttagacatggaaccagtagcacttgcaccttgggatccaatgggtgctttagctagataaa

SEQ ID NO: 264493 - DNA, 1321 bp, Unknown
  Bacterial polypeptide expressing nucleotide sequence isolated from the Sargasso Sea
atgatcaaatcatttaacaaagactgtcattctgattcatctctgaaaatgtcacgtaatgcagcaacgcacaatgaaataactgaccttgcaatgaattgggatgagtatagaaaaatagaccacaccttttctgagcaaatatcaggagaaatgaaaattacgaaccaaaaatcaagtggccgttgctggggttatgcaggattaaatctttttagagtttatcttggaagaaaacacggccttagaaattttgagttttcacagacctatttcatgttttgggacaagttagaaaaatcaaattattttttaaatagtatcattgatactgcacaagagtcttgggatagtaggctaattatgcatctattacacaatcctatccaagatggtggacagtgggacatgtgggtcaatcttattaacaaatatggtgtggtcccaaaatcagaaatgcctgaaacatatcagtcgggtaaatcaatgagaatgaatcgtatgattacgagaaaattaagagagtatgcaaaaaaattaagagaagcagtaaataacaaaacaagtgctgaagaagtaatcaaattaaagaataaaatgttatcaactgtatataaaatgttagttgtacatcttggtgcaccaccggaatcattcaattggcaagtaagagataaaaaaaagaattttcatcgttataatgatttaacccccaaaagcttttttagtgatcatgttggtattgatataaataatcttgtttgtctcatcgattgtccgatgtctgataaagaatacaatagagtatacacagtagaatatctgggtaatgtaattgaaggtaatcctatacggtatttaaatgtcgaaattgatattttaaaaagagcgacaatagaatcaataaaaaacaatgacccagtttggtttgggtgtgatgttagtaaatatttacatcgagcccatggagtgatggatactaagttatttgactttgaattattctatggaacctctttccctttagataaagcgagcagacttgaatatggtgaaagtaaaatgacccatgcaatgttatttactggtgttgacctagattcaaatgggaatccaaaaaaatggcgggttgagaatagttggggagaacgaaatggtgagaagggttactacattatgtctgacgattggtttgatcagtatttgtatgaggtggtcattgataaaaagtatttagcctctaatattgtcgagatgtatgaatcgcaaaatgctaaattattacccccttgggatccgatgggtgcactggctagataaa

SEQ ID NO: 264494 - DNA, 1324 bp, Unknown
  Bacterial polypeptide expressing nucleotide sequence isolated from the Sargasso Sea
atgcctaaaaatatatctttaaacgatgttaaaaaatacaaaaataaatttcttagaaataataaaaatactgcatcacgcaatgctttaataaaaaatgatttaaatacagttgctctaaactgggaaaattttagtcaaattaatcatcatttttctcatttaattgaaaaagaattacctgcaactaatcaaatggcatcaggcagatgttggggttttgcaggcttaaatttaatgcggcttgaagtagttaaaaaattaggtttagcaaattttgaattttcccaaaactattttatgttttgggacaaattagaaaaagcaaattattttttagaaaatataattaaaacaagagatcatgcttacgaaagcagattaataatgcatcttgtcaaagatcctgttcaagatggaggtcaatgggatatgtttgttaacctcatagagaaatatggtgcagttccaaaagatattatgccggaaactaaccatagcagtaaatcaatggcaatgaattatattttaacacataaactacgagagtttgcttccattttaagaaagaaatctgcaaaacaatctgcaaaactaaaaaaagaaatgatagaaatcatttataatttactagcaatgtttttgggtcagccaccagaggttgttaattggtcatcaagagacaaagataataaatatatagcaattgcagatatctctcctaaagaattttgtaaaaaatacgctgatattaatattaaagataaagtttgtttaattcatgcaccaatgagtaataaaagattcaatagaacttacacagttgaatacttgggtaatgtgattgaaggtcaagaaataaaatatctcaacgttaacatagatgagctaaaaaaatcagcgatgcaatcaattaaaaataatgaagcagtatggtttggttgtgatgtgggaaaaagatttagtcgcgatatgggagttcttgatatgggtatttttgattatgaaaatgtttttcaaacttcatttaaaatgaataaacaaactagactagagtatggagatagtgaaatgacacatgccatgttgttaactggtgtagatgttaaaaagcgtaattctaccaaatggaaaattgaaaacagttggggaacaaagagtggtaataaagggtatatgatgatgacagatgaatggtttgatgaatatacttacgaagtagttgttgataaaaaatatcttagtaaaaaaatatttaagtatcttgatgcagaacccattactcttgctccttgggatcctatgggtgctttagctaaataat

SEQ ID NO: 264495 - DNA, 1324 bp, Unknown
  Bacterial polypeptide expressing nucleotide sequence isolated from the Sargasso Sea
catggcaaaaaatatatctctatctacaatcaaatcttttaaaaataaattcctaagaaataacaaaaatactgcttcacgaaatgctttaattaaaaatgatttagcaaatgtagctctcaattgggaaaattttagtcaaattaatcataatttttcgaatcttataaaaaaggaattacctgcaacaaatcaaatggcatcaggtagatgttggggctttgcaggcttaaacctgatgcgtttacaagtagtagatagtttagatttaaatacatttgaattttcacaaaactacttcatgttttgggacaaactggaaaaagccaattattttttagaaaatattattaaatctagaaatgagtcgtatgaaagtcgtttaattaatcatcttcttaaggcacctgttcaagacggtgggcagtgggatatgtttgttaatttaattgaaaagtacggtgctgttcctaaagatgtaatgccagaaacaaatcatagtagtaagtcaggtgctatgaattatattcttacacataaattaagagagtttgcttctatattaagaaaaaaacctgctaaagaatctagtacacttaaaaaagatatgatggagacaatctataacttacttgcaatgttcctaggtcaaccacctgatataataaactggtctacaagaaataaagataataaacatattgtaatttcagatatggcgccaaaagatttttgtaaaaaatatgcagatattaatattaaagataaagtgtgtttaattcacgctccgatgaacaataaaaaatttaatactatgtatactgttgagtatctgggcaatgtggttgaaggacagataatcaaatatctaaatgtcgatataaaagaactaaaaaaatcatcaatggaatccattaaaaataatgaagccgtttggtttggttgtgatgtaggtaaacgttttagtcgagatatgggtgttctggatatgggtatttatgattatgaaaatgtttttcaaacatcctttaaaatgaataaacaatctcgtttagaatacggtgatagtgaaatgacacacgctatgctcttaacaggtgtagacattaaaaaaagaaaatcaacaaaatggaaaatagaaaatagttggggaactaagagtggtaatcaaggatatatgatgatgacagatgaatggtttgatgaatatacttatgaagtcgtcattgataaaaaataccttaataaaagactcttaaaatatttaaatatggaaccagtagctcttgctccttgggatcctatgggtgctttagctaaataa

SEQ ID NO: 264496 - DNA, 1024 bp, Unknown
  Bacterial polypeptide expressing nucleotide sequence isolated from the Sargasso Sea
agagtcaactacttcttagaatctattatcgaaacagcagataaaaattggaacagcaggctaattatgcacctgctatccaatccaattcaggatggtggacagtgggatatgtgggtgaaccttgtcgacaaatatggtgttgtgccccaatcagaaatgcccgaatcatattcttctagtaactccagatatatgaaccgccttattacaagaaagctccgcgaagatgctatgcttttaagaaattctgtgaataaaggttcatctgcttcagatgttcaacagcagaagactgacatgcttgaagaggtctataagatgcttacaatacatttgggtactccaccaaattcatttaattggcagacccgtgataagaaaaagaattttttaagatttgaaggacttacacctacatcattctataaagagcatgttggcttggcattagatgagtatgtatgtctgattaattgcccaatgtctgataaagaatacaataaggtctatacagtagattatcttggcaatgtcgctgaaggacatccaattagataccttaatgtagaaagtcacaaaatgaaagaagctactatcagatctttgcaaaacgatgaacctgtctggtttggatgcgatgtgagcaaacattttaatcgagatcttggtgttatggatatagatctctttgattacgattcattctatgatctggaatttggtatggataaagcagcaaggttggaatatggggatagtcagatgacgcacgctatgttattcacaggagtagacctcaattcgaagaatgagcctaccaaatggagagtggaaaacagctggggcaataaaggtggcgataagggctatcatataatgacagataaatggtttgatgagtataattatgaggttgttgtacataaaagttgcctaccagatgatcttttagaattattcatgaaagaagaggcagtccgcttggaaccttgggacccaatgggtgctcttgcaaaataga

SEQ ID NO: 264497 - DNA, 1324 bp, Unknown
  Bacterial polypeptide expressing nucleotide sequence isolated from the Sargasso Sea
atggcaaaaaatatatctctatcaacaatcaaaactttcaaaaataaatttctcagaaataataaaaatacagcgtctcgaaatgcattaattaaaaatgatttatctaatgttgcactcaattgggaaaactttagtcaaatcaatcataatttttctaatctaataaaaaaagaactgcccgcaacaaatcaaatggcatcaggtagatgttggggatttgcaggattaaatcttatgcgcttacaagttgttgaaagtcttgaactaaatacatttgagttttcacaaaattatttcatgttttgggataagttagagaaagccaattattttttagagaatattattaaatctagagatgaatcgtatgagagcagactaataactcatcttttaaaagcaccagtgcaagacggcggacaatgggatatgtttgttaatttaattaataaatatggtgctgtacctaaagatgtgatgcctgaaacaaatcatagcagtaaatctggtgctatgaattatattcttacacacaaattaagagagtttgcttctatactaagaaagaaaccagcaaaaaattcttcagctcttaaaaaagacatgatggaaacaatctataatttactggcaatgtttcttggtcaaccgcctgatgttatcaattggtctaatagaaataaagataatagacacattgtcatttcagatatgacaccgattgatttctgtaaaaaatatgctgatatcaatattaaagataaagtttgcttaattcatgccccaatgagcaataaaaaatttaatacaatgtacacggttgaatatctaggcaatgttgttgaaggacaaattattaaatatcttaatgtggatattaaagaattaaaaaaatctgcaatggattcaataaaaaataatgaagctgtgtggtttggttgtgatgttgggaaacgttttagtcgtgatatgggtgtgcttgatatgggcatttacgactatgaaaatgttttccaaacatcttttaaaatgaataaaaaaactcgtttagagtacggtgacagtgaaatgacccatgcgatgcttttaacgggtgtagatattaaaaaaagaaattcaactaaatggaaaattgaaaatagctgggggacaaaaagtggtaatcaaggatatatgatgatgactgatgaatggtttgatgaatatacctatgaagttgtcattgataaaaaatatcttaacaaaagacttttaaaatacttagatatggaaccagtagcacttgcgccttgggatccaatgggcgctttagctagataag

SEQ ID NO: 264498 - DNA, 1345 bp, Unknown
  Bacterial polypeptide expressing nucleotide sequence isolated from the Sargasso Sea
aatgacaaaaaaaatatcacaagatcaaattcaacaattaagagaaaaattttcttctgatgatcatgtaaaagtagttagaaatgctatgattaaaactaattctaatgaactttcaatgaattgggaaaaatatcgtaaaatagatcattcattttctcatgtaatttcaggagaaatgccagcaactaatcaaaaatccagtggaagatgttggggttttgctggacttaatctttttagagtctatttaggtagaaagcataatttgaaagatttccagttttcacaaagttattttatgttttgggataaacttgaaaaagctaattattttttggaatcaattttatctaccctggaagaagactttgacagcagaattgtcatgcatttacttcaaactccaacagaagatggtggtcaatgggatatgtgggcaaatttaattaaaaaatatggtgtaattcctcaggctgaaatgtctgaatccttttcatctagccaatcagctgaaatgaataaaatgttatcaagaaagcttagagaaaatgcccatgatcttcgtaaagagtttttaaaaggagtttccagtgaagatttaaataaattaaaacataaaatgattgaagaaattttcagaatgttatcaatgcaccttggtacacctccaaaaagttttaattggcaagttagagataaagataaaaagtttactagatatgaaaatcttactcctcaatctttttacactaatcatgttggactcaatcttgatgattatgtttgtttaattaactgtccaatgagtaataaggattataataaagtttatactgtagaacatttaggtaacgtagtcgaaggaaatcctattagatatttaaatgttgaaagcgacattatgaaagaggcaagcataaaatcaataaaggatgacaatcctgtatggttcggctgcgatgttggcaaacattttcatagagatttaggagttatggatacggatttgtttgattacgaaatgttttatggtacagattttaaaatgaataaagcagaaagattagaatatggtcaaagtcaaatgacacatgctatgctatttacaggtgttgatttagatgaaaatggaaaatcaattaaatggagagttgaaaatagttggggagataaaggcggtaataaaggctatcatattatgtcagatgattggtttgatgaatataattatgaagtagttgtccataaagattatttatcagatgaattaaatgatatctttcaaaattctgatgctatacctttaaagccttgggatcctatgggtgctttagcaaaataa

SEQ ID NO: 264499 - DNA, 988 bp, Unknown
  Bacterial polypeptide expressing nucleotide sequence isolated from the Sargasso Sea
ttagaaaatataattaaaccaagagatcatgcatatgacagtagattgatcatgcatcttgttaaagctccagttcaagatggtggtcagtgggatatgttcgtaaatcttatagaaaaatatggagtagttccaaaagatgtaatgccagaaacaaatcacagcagtaaatccatggcaatgaattacatcttaacacataaattaagagaattcgcttctgtcttaagaaaaaaatctgctaaacaatcagcatctttgaagaaagaaatgatggaaaccatttataacttattgtcgatgtttcttggtcaacccccagaagttgtgaactggactactagagataaagataataaatatatttccattacggatacatcacctaaagaatttgtaaaaaaatatgctgatatcagcattaaggataaggtttgtcttatacatgctccaatgagcaataaaaagttcaatactacatatactgttgaatacttaggcaatgttattgaaggacaagaaataaaatatcttaatgttgagatagctgaactaaaaaaatatgcgatgcaatcaattaaaaataatgaagcagtttggtttggatgcgatgtaggaaagagatttagtagagacatgggcgtgcttgacatgggcatttttgactatgaaaatgtttttcaaacatcatttaaaatgaacaaacaaaatagactagaatacggtgacagtgaaatgacccatgctatgttgttaactggtgttgatgttaaaagtaaaaaatcaactaaatggaaaattgagaatagctgggggacaaaaagtgggaataaagggtatatgatgatgaccgatgaatggtttgatgaatatacctatgaggttgttgttgataaaaaatatctcagtaaaaaattattaaaatatcttgatatgaaacctgtgagtttacaaccatgggatcctatgggagctttagcaaagtaac

SEQ ID NO: 264500 - DNA, 1345 bp, Unknown
  Bacterial polypeptide expressing nucleotide sequence isolated from the Sargasso Sea
atgtcaaaaaaaatatcacgaagtcaaatagatcttttaggaaaaaaatatttttctgataatcatgtgaaagtagttagaaatgcaatggtcaagaccaattctaatgaactttctatggattgggaaaaatatcgtaaaattgatcatacattttctaatgtaatatctggagaaatgccagcaaccaatcaaaaatcttctggaaggtgttggggtttcgctggtcttaatctttttcgagtttatttaggaagaaaacataatcttaaagattttcagttctcgcaaagctatttcatgttttgggataaacttgaaaaatctaattattttttagaatcaattttatcaactgctgaagaagattttgatagtagaatcgttatgcacctacttcaaactcctacagaggatggtggacaatgggatatgtggaaaaacctgattaaaaagtatggtgtcattccacaagctgaaatgtctgaatctttttcttctagtcaatcagcggaaatgaataaaatgcttgcaagaaagttaagagagaacgctcacaaccttcgaaaagagttttctaaaggtgcttctagtgaaacattgaatgagctaaaaaattctatgattgaagaaatttttaaaatgctatctatgcatctaggtactcctccaaaaagcttcaattggcaggttagagataaaaataaaaaatttagtagatatgaaaacctaactcctcaatctttttatgaagaacatgtaggtttgaatctagatgattatgtctgtttaattaattgtccaatgagcaataaagagtataataaagtttacactgttgagcacttaggcaatgttgtagaaggaagtccaataagatatttaaatgttgaaagtgatgtcatgaaagatgcgagcataaaatcgattttagatgataatcctgtatggtttggttgtgatgttggtaaacattttcatagagatttaggagttatggatacagatttatttgattacgaaatgttttataatactgattttaaaatgaataaagcagaaagattggaatatggccaaagccaaatgacccatgccatgcttttcactggtgttgatttagataataatggtaaatcaattaaatggagagttgaaaatagttggggagataaagggggtaataaaggatatcacataatgtctgatgattggtttgatgagtataactatgaagttgttgttcataaagattatttaacagatgaattaaatgatatcttccaaaatgctgaaccgattcccctaaagccctgggatccaatgggcgctttagcaaaataga

SEQ ID NO: 264501 - DNA, 1267 bp, Unknown
  Bacterial polypeptide expressing nucleotide sequence isolated from the Sargasso Sea
aaatataaaaaatacagcatcaagaaatgcattaattaaaaatgatttagccaatgttgcactcaattgggaaaactttagtcaaattaatcataatttttctaatctaataaaaaaagaactacctgcaacaaaccagatggcatcaggtagatgttgggggtttgcaggattaaatctcatgcgtttacaagttgttgatagccttgaactaaatacatttgagttctcacaaaattatttcatgttttgggataagctagaaaaagcaaattattttttagagaatattatcaaatcaagagatgaatcatatgagagcagattaattactcatcttttaaaagcacctgtgcaagatggtggacagtgggatatgtttgtaaacttaattaacaagtacggtgcagttccaaaagatgtaatgcctgaaacaaatcatagcagtaaatctggagccatgaattatattttgactcacaaattaagagagtttgcttctatactaagaaagaaaccagctaaaaattctgcagccctaaaaaaagacatgatggaaacaatttataatttactagcaatgtttcttggtcaaccaccagatgttatcaattggtctactagaaataaagataatagacatattgtcatttcagacatgacaccaattgatttctgcaaaaaatatgctgatatcaatattaaagataaagtttgcttaattcatgctccaatgagcaataaaaaatttaatacaatgtacacagttgaatatcttggtaacgttgttgaaggacaaattattaaatatttaaatgtagatattaaagaattaaaaaaatctgcaatggactcaataaaaaacaacgaagctgtatggtttggttgtgatgttgggaaacgttttagtcgtgatatgggtgtacttgatatgggcatttacgattatgaaaatgtcttccaaacttcatttaagatgaataaacaaactcgtttagagtatggtgatagtgaaatgactcatgctatgcttttaactggagtcgatattaaaaaaagaaattcaactaaatggaaaattgaaaatagctggggaacaaaaagtggtaaccaaggatatatgatgatgaccgatgaatggtttgatgaatatacctatgaagttgtcattgataaaaaatatctaaacaaaagacttgtaaaatacttagatatggaaccaatatcactagcgccttgggatccaatgggtgcattagctagataa

SEQ ID NO: 264502 - DNA, 751 bp, Unknown
  Bacterial polypeptide expressing nucleotide sequence isolated from the Sargasso Sea
aaaggaatttcagaaaattttaacaaaacagggaattaaatttttactagaaaataaagttacatctgtaaaaaataaaaataaccaagttttggtagattttgttgataataaaacaaataaaaaatcaagtttagaatgtgataaagttttagtttcagttggtagaaaaccctatacagagggtttaaatcttacaaaactaggtattaaaaaagacaaggcaggaagaatagaagtaaataaaaattttcaaacttcattagaaaatatttatgctataggtgatgttatcagaggacctatgctagcacataaggcagaggaagagggaatagcagttgcagaaatattagctggacaatctggtcatgtgaattatgacgttgtcccaggagtaatttatacttctccagaagtcgcagctgtaggaaaaaccgaagaagatcttaaaaatttaaaaattaattataaagttggtaagttcccttttcttgctaattcaagagccaaggttaacaatgaatcggagggatttgtaaaaattttggctgatgcaaaaacagataaagttttaggtgtccatataattggacctcattgtggtgatatgatagctgaaatggctttagcaatggaatttggtgcaagttcagaagatatagctcgaacttgtcatgctcatccaactcacactgaagcaatcaaagaagcggctttagcagtagataagagacctattcacttttaa

SEQ ID NO: 264503 - DNA, 1006 bp, Unknown
  Bacterial polypeptide expressing nucleotide sequence isolated from the Sargasso Sea
atgtcaaaacatatatttgaatgtatagatgctcatacctgtggaaacccaatccgtttggtggtttcgggtggtccaaaattaaagggtgaaacaattaaagaaaaacgccagcattttatggcagaatatgattggatattaagaggtctgatgtttgagccgaggggacatgatattatgtctggtagttttttatatccaccaagtaacgatgattatgatattgctatattatttattgagacaagtggatgtctacctatgtgtggccatggaacaattggaacagttactatgatgattgaggaagggttggtcaaaccaaaaaatgatggcgttgttgttctagaaactccagcagggagggtagatgcttattatgaaatggttaataataaagttacttcagttaaaatagttaatgttccttctttcctttacgcatctaatctaattattgattcttcacatttggggtctataaaaattgatgtatcatatggtggtaatttttatgcaattatagataaacaagaaaattttaatactatggatgatttcactgcaagtgaattaggtgatatgagtagggagattcgaataaaaataaatgaaaattacacttttttgcatcctgaagatgaacgaataaataaatgcattcatgttttgtggactggtgagccatcaaaagaaaattctaccgcaagaaatggagtattttatggtgaaaaagcaattgatcgatctccatgtgggactgggacatctgctcgtatggcacaatggtattccaatggtaaattatctattggtgatgaatttattcatgaaagtattataggaagtcaatttattgggagaatagaaaaggaaacaaaagttggtgactacaatgcaataatacctagcattgaaggatgggcaaagatttatggattcaataaaattattattgacccggaagatgatccatatgctcatggatttcaggtaatttaac

SEQ ID NO: 264504 - DNA, 451 bp, Unknown
  Bacterial polypeptide expressing nucleotide sequence isolated from the Sargasso Sea
gctgggccttgcctcggggaagctgatcaaggtgccgctgaagcggatggagcgctggacggacatcatgaaggtggcccaggcgtccccggagatgaaggctgaggacgagacggctgtgaagcttgaggacgggcccgcgcacagcgtggtgatcaacgactaccagaatgcccagttctacggggaggtcacgatcggcggccagacgttcaacgtggtctacgacaccggctcctcgaacctctgggtgccctcgcacaattgcgggttcttgaagtgctggctccactcaggaagtgcgtcgaacggtcgggcggcgctcatcggaacgtgcgccactacggtctgcgggtatttttctggggggtggggttcccggaccgacccgcgggttgacctgcggatctggtttccgaaggcgggggtccgtaaccggcccgcgggttga

SEQ ID NO: 264505 - DNA, 910 bp, Unknown
  Bacterial polypeptide expressing nucleotide sequence isolated from the Sargasso Sea
ttgagatctttaggttataacgtgacagaccgaactattcagagagatcttcttaaattagagaagtattttccgctcatatgtgatgatagaaatcctccttatggatggtcctggcaagagaatgcgaaagaaattaatctagcagcgatggataaagttgaggcactatctttatctttagcagaaaagtacttagagcctttaatgccaatagaaaattatgaaaggataagggatctatttgatagagcaaataatacccttgaatgctctgaaaaaaatcaattaagaagatggagagatagagttagggtattgcctcaatctcagaaactagagcctccgtcagtaaatcaggaagttcaatctaatatctacgattcgcttttgcataaggagcagttggatgttcaatacttaaaagcaaatagtaggctcccagaaaaaagaacagtaaaccctttgggtattgtcctaatgggaattgtacacagattgatatgcaccatggaccctgactttaaaatcataagacaccttccattgcatagatttaaaacggcaaatgctaatggtgaacctagtatcgaacccgaaaattttgatattgatgattatttagacaaagagagtctaagctttcttagaactgaaaagcaattaaaaatagaactcttatttgaagacactacaggattccatttgtcagagactccggtgagtaaggatcagaagtataaagaagaaaagaatggcaaaattagaatttctgggactgttgcagatgcagagcagttgcgttggtggattcttggctttggagaaaatgtagaagtaataaaaccagaaactttgagaagtgagattagaaaacgtgctaaattactttactctatctacgagtaag

SEQ ID NO: 264506 - DNA, 1297 bp, Unknown
  Bacterial polypeptide expressing nucleotide sequence isolated from the Sargasso Sea
ttgagcggtgtgcctcgcgccgccgaacgcgcgctcacgcgcagcgactacaagacccttggcctcgccgcactcggcggcgccctggagttctacgacttcatcatcttcgtgttcttcgcgccggcgattgggcaactgttcttcccgcacgacattcccgactggctgcgccagttgcagacgttcggcatcttcgcggccggctatctcgcgcgcccgctcggcggcgtgatcatggcgcacttcggcgacctgttcggccgcaagcggatgttcacgctgagcgtgctgatgatgtccgtgccgacgctgctgatgggcctgctgcccacctacgacacgatcggcatcctcgcgccggtgttgctgctgctgttccgcgtgctgcagggcgcggccgtcggcggtgaagtgccgggcgcatgggtgttcgtgtccgagcacgtgccgtcgcgccacatcggctatgcgtgcggcacgctgaccgcgggcctgacggccggcatcctgctcggctcgctcgtcgcggccggcatcaacagccgttactcgagcgccgaagtcggtgcgttcgcgtggcgcatcccgttcctgctcggcggcgtgttcggcctgttctccgtgtacctgcgccgctggctgcatgaaacgccggtgttcgccgagatgaaggcgaagaaggcactcgcggccgagattccgctgaaggccgtgctgcgcgaccacggccgcgcggtgatcgtgtcgatgctgctcacgtggatgctgtcggccgcgatcgtcgtcgtgatcctgatgacgcccgcgctgctgcagaagcagttccacctcgcgcccgcgaccacgctgttcgcgaacagcatcgcgaccctgtgcctgacggccggctgcatcaccgcgggttcgctcgcgggccggatcggcgcgaagcgcgtgctcggcatcggcggcatcgggctggccgcgtgctactacctgctgttcgtgcaggtcgcggccgacgcgtcgacgctgccgctctactacgggatcgcgggcttcatggtcggcacgatcggcgcggtgccgttcgtgatggtcaagagcttcccggccgtcgtgcggttctcgggcatctcgttctcgtacaacgtcgcgtacgcgatcttcggcggcctcacgccggtgatcgtgtcgctgatgatgaagtcgaatccgctcgcaccggtggtgtacgtcgcggcgatctgcgtgctcggcgcgatcgccgtgcagttctcgaaggatgcgaaggacgtgaaggctacgcactgag

SEQ ID NO: 264507 - DNA, 478 bp, Unknown
  Bacterial polypeptide expressing nucleotide sequence isolated from the Sargasso Sea
ctgaataaatgtcgtcctgcaattgatatccaggactaccagaataccgagtaccatgcagaaatctatgttggcaatcccggacaaaaggagattgttatctttgacactggttcctcaaacctttgggtgcccaatacggtgccctgggtgtggccctgggaaacaggcaagaacaagtatgaccacagcaaatcctccacctaccaggagaatggtgaggtcttcgagattgagtacggctccggctccgtatcaggtgtcttctctgtagatgatgtcaccattggcgatgtcacgctcgaagactacacttttgctgaggttgacaacacagaaggaattcaggatgtttatagcaagggcaagttcgatggcattctcggtcttggctgggatcgtatttctgtgggtggggtcccaacagtcatggacaagcttatcgcatcaggccagctcccaaagcccaccaccgacc

SEQ ID NO: 264508 - DNA, 553 bp, Unknown
  Bacterial polypeptide expressing nucleotide sequence isolated from the Sargasso Sea
gatgaagaagaatctcgcggggcgaaacgcgaaggcgtggcgcgcgcgcgccgaggcgagcgtcgagcgtttgcgaagacgatacgacgccgagaggggcgagatgacgaccgagaatcgaggcgagacgagcgtggaggtgcacaattacatggacgcgcagtattacggtgagattgagattgggaaccctcgacaaaagtttcaagtcgtcttcgacacggggagctcgaatctgtgggtgccgagctccaagtgcggatttttacaaattccgtgcgatttacacgccaagtttcacgccgaggcgtcggaaacgtacgtcgaggacggtgaaccgttcgcgattcagtacggaagcgggtctctgagtggattcttgtcgcaagacgaggtcaaggtgggcgacttggtcgtcgcggggcagtactttgccgaggccaccaaggaaccggggatggcgtttttgtttgcgaaattcgacggtattctcggtcttgggttcgataacatctccgtcgataaggtgacgcccgtgttttacaacatgatg

SEQ ID NO: 264509 - DNA, 282 bp, Unknown
  Bacterial polypeptide expressing nucleotide sequence isolated from the Sargasso Sea
gatgagtttgttaagcattagatcttcattatttaagtggtttttgcttgctgggctaatatttttattagatcaatgggtaaaattaataataatcgagaatattagcttgtatgaaagagttaagataaatgacttcataaatattactcatcaacgaaatcccggcgcagcatttagttttctggcggatgctggtggatggcaacggtggttcttatccacaatagcaattgcagtttgtttgtatattgtttattggcttaatgaattaaagaaaga

SEQ ID NO: 264510 - DNA, 460 bp, Unknown
  Bacterial polypeptide expressing nucleotide sequence isolated from the Sargasso Sea
catgctatcgtttactgtaatcataattgatcaaattacaaaatattttgctgtagaaaaattagcgctacatgaagtgaaaagtatctatgaaggctttaatttaatattgatttacaatgaaggagccgcttttagttttctaagtgatgcaggaggttggcaacgttggtttctaataggtgtttcatgcgttgtttgtgtatttatagtagtttggatgtatcaatcgatatcaaaaagtaaatgcttgttggccggtctgtcattaattcttggtggtgcattaggaaatttatgggatagattatctcttggatatgtcgtagattttattgaggtttattataaggatctgtattggcctgcatttaatatcgctgattcagcgattacaattggtgcaattttgctaattctcgatatttttctaaaagaaccgtcaaagacaccatcatag

SEQ ID NO: 264511 - DNA, 543 bp, Unknown
  Bacterial polypeptide expressing nucleotide sequence isolated from the Sargasso Sea
tatgcttaagctttttcgcgaaacaggcttgcgttttttgtggataagcgcaattgcgtttatcctcgaccaatggagtaagtacacggttatcgacagtatgtccttgtatcagtcgatacaggtattgccgttttttaactttacttacgtacacaattacggcgccgcatttagctttttagaaaatgcaggtggctggcagcgctggttcttcactgccattgctgtcgtagtaagtgtagtgattttgtggtggctgaagcagtcaccccggtcgcaaaaaatgctgcccgttgcgtttgcctttattctaggtggtgcactaggtaacgtttacgaccgtttagtccatggttatgtcatcgacttcttagatttttacgtaaacaattaccactggccagcgtttaacattgctgacagcgcaatatttataggcgcggctttacttattatcgacatgtttaaaaatggcgacaaaaaaagtgaagggaacggtgcagacgcgcgagccagtgccgcggacaatagcgaaaccat

SEQ ID NO: 264512 - DNA, 679 bp, Unknown
  Bacterial polypeptide expressing nucleotide sequence isolated from the Sargasso Sea
atggcgtgtatggttgtcggcgttttgatgctggcatcggcggacgccgttaccaagcttctgatcgttgattttcacgctggcgaaattattttttatcggggagtttttgcgtttcttccgctggtgcccttgatcgtatggaatggaggcttacgatcgttgaggcttcagcagccgaggggtgtttggtggcggggcgtgatcgccctggtgaccagtgtattcgtggccttgtcatttattaacttgcccttggctgaagcctctgcgctgatcttcaccagccctattttcctcactgcactatcaccgtggctattgggtgagaaagtgggatggcagcgctggtcagcggtattgttcggtttcgcaggtgtagtggttatgattgagccagggtccagcaccttcaccatatgggcctttgtacccttgattgctgcgctttgttccgcctctcgggacatcgtcacccgccgcctaggcatcgttgacagcgcgactacggtcatgttctacaccagcattgtggccttgattggcggcgccataagcatgtcttggtcgggcccagcaccaaatgcagaacagtgggcgttgtttgtgttatctggtattttcgtgagcctggcgcacttgttgatcgtgatggcactgcaactcgcggaagggccaa

SEQ ID NO: 264513 - DNA, 433 bp, Unknown
  Bacterial polypeptide expressing nucleotide sequence isolated from the Sargasso Sea
ttgattaatcttagagaaataaaaaaaaaaattattaccaaaaataatatttattggttgtttgttatttcgataatattttttttagatagatacacaaaaatatttatcttaaataattttactgagaacacatattatttaaacgattacattaatttagatttggtttggaatattggaataggttttggttttttaagcacagagtccaatattatttacaatcttatcactctaataattgcttcagtgatcatatttttgctttatatttttattaaatcagaaagaatggacaaatttatttacgccttaattatagggggtgcgcttggcaatatttacgataggctaatatataaagcagtgccagattttgttgatatacattataataactttcactggttcacttttaatgttgcagata

SEQ ID NO: 264514 - DNA, 294 bp, Unknown
  Bacterial polypeptide expressing nucleotide sequence isolated from the Sargasso Sea
tatgccattaacttggaaagacagtggcttacgttggtattgggtagttgtattggtgtttttggccgatcaactatccaaacaatgggtcttagccaattttgatttgttcgaatcggtgaagttattacctttttttaatttcacctatgtgcgtaactatggtgccgcatttagctttttaagtgaagcgggcggttggcaacgttggttatttaccctagtggccgttggtttcagtaccttgttgactgtgtggttgcgcaagcaatcggcatccctgtggaagttaaa

SEQ ID NO: 264515 - DNA, 514 bp, Unknown
  Bacterial polypeptide expressing nucleotide sequence isolated from the Sargasso Sea
atgccattaacttggaaagacagtggcttacgttggtattgggtagttgtattggtgtttttggccgatcaactatccaaacaatgggtcttagccaattttgatttgttcgaatcggtgcagttattacctttttttaatttcacctatgtacgtaactatggcgccgcatttagctttttaagtgaagcgggcggttggcaacgttggttatttaccttagtggccgttggttttagtaccttgttgactgtgtggctgcgcaagcaagcggcatccctctggaagttaaatttggcttacaccttagtgattggtggcgccctaggtaacttaatcgatcgattgatgcatggttttgtggtggattttatcgatttttattggggtaagagccattatcccgcctttaatatcgccgattccgcgatttttatcggcgcagtgctgatcatttgggattcgttttttaacagcaaatccgaacaagataaaaccgaagaggtgaagtagt

SEQ ID NO: 264516 - DNA, 307 bp, Unknown
  Bacterial polypeptide expressing nucleotide sequence isolated from the Sargasso Sea
tttttaagtgatgccggcggatggcagcgttggtttttaatagcatttagttttatagttattattattattagttatatgatgatttacgatgataactcaccttatatagcttttagctttgttataggcggagcattagggaatctaaatgacagaattatttacggctatgtaattgattttattgaagtttactataatactttttattggccgatattcaatattgcagatgttgcaatttcaataggagttatattattgttacataatataatttttaataaaaaaaagataagatgaa

SEQ ID NO: 264517 - DNA, 514 bp, Unknown
  Bacterial polypeptide expressing nucleotide sequence isolated from the Sargasso Sea
tatgccattaacttggaaagacagtggcttacgttggtattgggtagttgtattggtgtttttggccgatcaactatccaaacaatgggtcttagccaattttgatttgttcgaatcggtgaagttattacctttttttaatttcacctatgtgcgtaactatggtgccgcatttagctttttaagtgaagcgggcggttggcaacgttggttatttaccctagtggccgttggtttcagtaccttgttgactgtgtggttgcgcaagcaatcggcatccctgtggaagttaaatttggcttacaccttagtgattggtggcgccctaggtaacttaatcgatcgattgatgcatggttttgtggtggattttatcgatttttattggggtaagagccattatcctgcctttaatatcgctgattccgcgatctttatcggcgcagtgctgatcatttgggattcgttttttaacagcaaatccgaacaagataaaaccgaagaggtgaagtag

SEQ ID NO: 264518 - DNA, 496 bp, Unknown
  Bacterial polypeptide expressing nucleotide sequence isolated from the Sargasso Sea
aatgataaagggaattaaagaatatctttttgttgcagtatcagctggtagcgtccttttaattgatttcttaagtaaaaacaaaattatatcaatattcaaagacggtattgttgaaaaaatatttgttaatgaatatttggattttattctagtttttaatacaggtatttcctatggtctattttctggaggaggggattttcagaaatggattctaatttcactttccattttaattataatttttcttttaagtttaattcgaaatgaatctacaattctttcaaagctaagtatatccttcataatcggaggtgccttaggaaatgtattagatagatttacatatggtgcagtagtagactttatttctcttcatgcaaaaggtttttcttggtatatatttaatattgcagatatgtttattgttctaggagtaattctttttattcttagtcagtttattttatctaaaaagaatgtaggaaattaa

SEQ ID NO: 264519 - DNA, 523 bp, Unknown
  Bacterial polypeptide expressing nucleotide sequence isolated from the Sargasso Sea
atgcatttatttaaaggccgtttatttacggagacaggctggcgctggtggtggctggtgttattggtgttggtcgctgaccaattaagcaaagtctgggtcattcagaacttcagcttaggcgaatcagtgtctttgctgccggtgtttaatttcacttatgcccgcaactatggcgctgcgttttcctttttaggtgacgcaggtggctggcagcgttggttcttcaccctgatcgctgtggtggtcagtatcgtattagctgtctggttaagccgtttagcgaaaacccagctgaaattatctttagccttgagtctgattatcagtggcgctattggtaatttaattgaccgcagcctgtatggttatgtggtggattttctgcatgtgttttatcagaattggcattaccctatttttaatatcgccgattgtgccatcagcattggtgccgttttattaatctgggatagcttcagcagcgaaaaccagaacgccacttcaggagacaagcagtgat

SEQ ID NO: 264520 - DNA, 307 bp, Unknown
  Bacterial polypeptide expressing nucleotide sequence isolated from the Sargasso Sea
atgagtaaatctgtctgttcaacggggctacgctggctttgggtcgttgtagccgtgctgattattgacctgggcagtaaattcctgatcctccagaactttgctctgggggatacggtatcgctgttcccgtcgcttaatctgcattatgcgcgtaactatggcgcggcttttagtttccttgccgatagcggcggctggcagcgctggttctttgccggcattgccatcggtatctgcgtgattctggcggtattgatgtatcgctcaaaagccacgcaaaagctgaacaacattgcctacgcgc

SEQ ID NO: 264521 - DNA, 463 bp, Unknown
  Bacterial polypeptide expressing nucleotide sequence isolated from the Sargasso Sea
agtcgttttcttagaccagtggactaaaaacattgtggtagatgccatgtcgctaggtgatcgaatctcagtgtttacctatttttcttgggtgaggtggcacaatgaaggcgcagctttttcttttctcgcggatgctggtggctggcagcgatggttttttatagtgttggcgttcttttttgtggcgttcttagcaaacgagttaagaaatttaaaggagagagtctcaattctgcacctggtttacactttgatcattggcggtgcattaggtaacacgattgaccgtttggtaaatggatatgtggtggattttatcttggtccactacgaccaatattacttcccagcctttaatttggccgattcagctttgactctgggagcagtgatgtgggctataattctaattagagaggtgattcaggagaaacgagtcgattcacgaggaaacgaataa

SEQ ID NO: 264522 - DNA, 508 bp, Unknown
  Bacterial polypeptide expressing nucleotide sequence isolated from the Sargasso Sea
atggcaagaaccgtgtcgaaagcgtcgtccggaaacagttctctggcgccctggcttggcgtggcgctgatcgtgattctgttcgatcagctcaccaagatcgcgatccagaaggtgttcgcctacggtgttccgcatgaggtcacgccgtttttcaacctgatccttgtgtacaaccgtggcgccgccttcagcttcctcgcgatggcgggcggctggcagcgctgggccttcaccgcgctcggcgtggttgcggcgctcgtgatctgctatctgctcaagcgtcatggcggacagaaaatgttctgcacggcgctctcgctgattctcggcggtgcgctcggcaacgtgatcgaccggctcgcgtacggccacgtgatcgactttctcgatttccacgtgcgcgcatggcactggccggcgttcaatctcgccgacagcgcgatcacgatcggcgcgatcctgctcgtgctcgacgagttgcggcgcgtacgcggctcgcgctaac

SEQ ID NO: 264523 - DNA, 514 bp, Unknown
  Bacterial polypeptide expressing nucleotide sequence isolated from the Sargasso Sea
gatgagtaagcctctttgttcaacagggctacgctggctgtggctggtggtagtcgtgctgattatcgatttgggcagcaagtacctgatcctccagaattttgctctgggggatacggtgccgctgttcccgtcgcttaatctgcattatgcgcgtaactatggtgcggcgtttagcttcctcgccgatagcggcggctggcagcgctggttctttgccggtattgcgatcggtatctgtgtcattctggcggtgatgatgtatcgctccagagcgacgcaaaagctgaataacatcgcgtatgcgctaatcattggcggcgcgctggggaacctgttcgaccgcctgtggcatggcttcgtggtcgatatgatcgatttctacgtcggggactggcattttgctacgtttaacctcgccgatagcgcgatctgtatcggtgccgcaatgattgtcctggaagggtttcctgccgaaaaagcaggcgtaatacagtgccggatggcggcgtaa

SEQ ID NO: 264524 - DNA, 682 bp, Unknown
  Bacterial polypeptide expressing nucleotide sequence isolated from the Sargasso Sea
actatatgttggtgccataattgttgcaataagtggatttgtattatttttgatggcttacacatgtataagattcagggcttcaagaaatcctaatccatctaaaagaactcacaatgttgcagttgaaatactttggacactcattccatgtttaattttaattgtaatggcagttccatcttttaaaattctttattcacaagacacaattcctaaagccgatgttacgattaaagccgtaggttatcaatggtattggggttatgaatatcctgacgagaatataatattcgactcttacatggtagaggaaaaagatttaaaaccaggtcaacctagacttttagcagttgacaatgaagttgtagtaccagtaaacaaagttgttaaagttttaataacagctaatgatgttttgcatgcttgggcgctaccgtcatttggagtaaaaagagatgctatgcctggaagagtaaacgaaacttggtttaaggcagatagagttggaacatattacggacaatgttcagaattgtgtggtattaaacatgcattcatgccaatcacagttagagttgtaacagatgaagagtataacaattggttggaggaggctaaaataaagtttgcgaaagaggagatagaaactaataagaataaattattagcaaaaaattaa

SEQ ID NO: 264525 - DNA, 373 bp, Unknown
  Bacterial polypeptide expressing nucleotide sequence isolated from the Sargasso Sea
gatgtcagaaattaatacaagtttacttttagaaaatgaaaacttaacgacttttgaaattactaaaaattttacttgtatcagatttcttgatcaaaataaagaaagatttgagcttgaatttaatcttgaaaaaggaacatctttcaacacttttctaattagaagtaatagagaactttttattattcaccctcctgaaaaagaatattcagactcaattaataaattaatctataccttttttgatcaatttaaattaaacaaaattaacatcattaccggtcatataaatcccaaaattattgaaactataaaaactatcagtacaaaattcagcaacttaactatcatatgctcgaatcctggaatt

SEQ ID NO: 264526 - DNA, 931 bp, Unknown
  Bacterial polypeptide expressing nucleotide sequence isolated from the Sargasso Sea
cgaggttgcgaactattttccggtacaagcaactttggacggcatgttcgacgtatatcaacagctcactggagtcattttcacggaaatagcagaacccaacgcatggcattctgatgttcggttgtactccgtcacggacacagaaaccggcgaacatattgctcatttctacatggatctacatcctcgacaagggaaatatggacatgctgccgctttcaccctgaaaccgagcagacatcgtccagatggaagtcggcagcctgctatttctgcaatagtcgcgaatttcactaagcccactaccgaatcacctagcttgctccgccatagtgaggttgaaacccttttccacgaattcggccacatcctgcatcagactttgactcaggcaccattcagtcgattttcaggcaccgctgttgagcgggattttgttgaggctccgagtcagatgcttgagcattggacctgggacgaatctattctgaaacagttcacgagtcacaaggacaacggttcacccattccttccgatctcatagaaaaaatgaagcaagcaaaaaacgtgggcagtggcatccactatctgaggcaaatctacttcgctcgacttgatctcgcataccatgatgccatcctgccgatagatactgatgcgccggccaaagaactgcaccctataactgggttcgccttccctgaggggacacatttccagggtggatttggacacctgttcggatatgacgccggatattatggctatctctggtcgcaagtcttcggcgatgatatgttcacgcgctttacagacggcgacgcactagctgtggggcgtgaatatcgtacgaatatattagaaccgggcggttcagtagatgcgcaagtccaacttgaacgatttcttggacgggaaccagataaa

SEQ ID NO: 264527 - DNA, 1090 bp, Unknown
  Bacterial polypeptide expressing nucleotide sequence isolated from the Sargasso Sea
atgagcattgaatattttcaaaaaagacaacatatattaattgataagcttgcaaaagaaaatcttgatggaatgattgtaactaatttaacgcacattaggtatttatgtggttttactggatcaagtgcaacattattaattacagcagatcaagtacattttattactgatggaagatatgtcgtacaatcagaaaaagaagtaaagggagcaaaagttatcattgatagcatctcccactatgaggttattaaaaaacaaaatctattaactagcagtcaaagcataggatttgatggaaataatgtaagtcaccaaggttatcagcaattatcaaaagttttgtctgatataaacctgaaaaatattacaggaattatagaaaaaatggccatgtcaaaggatgaaaaagagttagaagcaattagaacagctgttgagattacagataaggcgtttgccgaagtattgccaatggtaaaaattggagttgaagaaaaggtcatagcaaatcaattatcatttttatatagaaagtatggagactccgattctgatgcatttgctgctatagttggtacagggccaaattcagctaaacctcaccataagccgacagacagaaaaattggaccaggtgaattgatagttattgattcaggtgcaaaatttgcaggatatcacgctgatatgactagatcattcgcaacaaaaggatattcagatgagcaaaaatcaatttatgatattgttttaaatgcccaagttaaaagtattgaaggaataaaatctggaatgtcttgtaagtctattgattcgattgcaagagatcacatagcaaatgcaggttatagtaaattttttgatcatggcctaggacattctttagggttggaaattcatgaagacccaaggtttagcaaagtaagtgaagatgttcttgaagaaaactacgtaatgactgttgaaccgggaatttatgtaccagatattggtggtgtaagaattgaagatgacatcatcgttacaaaaaatggagctgaaatcctcaataaaacttctaaagaatttcaagtaatctcataat

SEQ ID NO: 264528 - DNA, 1090 bp, Unknown
  Bacterial polypeptide expressing nucleotide sequence isolated from the Sargasso Sea
atgagcattaaatattttcaaagaagacaaaatatattaattgataagcttgcaaaagaaaatcttgatggaatgattgtaactaatttaacacacattaggtatttatgtggttttactggatcaagtgcaacattattaattacagcagatcaagtgcattttattactgatggaagatacgtcgtacaatcagaaaaagaagtaaagggagcaaaagttatcattgatagcatctcccactatgaggttattaaaaaacaaaatctattaactagcagtcaaagcataggatttgatggaaataatgtaagtcaccaaggttatcagcaattatcaaaagttttgtctgatataaacctgaaaaatattacaggaattatagaaaaaatggccatgttaaaggatgaaaaagagttagaagcaattagaacagctgttgagattacagataaggcgtttgccgaagtattgccaatggtaaaaattggagttgaagaaaaggtcatagcaaatcaattatcatttttatatagaaagtatggagactccgattctgatgcatttgctgctatagttggtacagggccaaattcagctaaacctcaccataagccgacagacagaaaaattggaccaggtgaattgctagttattgattcaggtgcaaaatttgcaggatatcacactgatatgactagatcattcgcaacaaaaggatattcagatgagcaaaaatcaatttatgatattgttttaaatgctcaagttaaaagtattgaaggaataaaatctggaatgtcttgtaagtctattgattcgattgcaagagatcacatagcaaatgcaggttatagtaaattttttgatcatggcctaggacattcattagggttggaaattcatgaagacccaaggtttagcaaagtaagtgaagatgttcttgaagaaaactacgtaatgactgttgaaccgggaatttatgtaccagatattggtggtgtaagaattgaagatgacatcatcgttacaaaaaatggagctgaaatcctcaataaaacttctaaagaatttcaagtaatttcataat

SEQ ID NO: 264529 - DNA, 814 bp, Unknown
  Bacterial polypeptide expressing nucleotide sequence isolated from the Sargasso Sea
ctgaaaaaattattatacacttttgttttattaatatcttctacctcatatgctaacgagccaaaagattggcagttaggattccagcaaccagcttctcaatctatgtacgaaattgtaaaatttcatgattatatgttagtgccaataattgttgcgataagtgggtttgtattatttttgatggcttatacatgtatcagatttagagcctcaagaaatcctaatccatctaaaagaacgcacaatgttgctgttgaaatactttggacactcattccatgtttaatcctcattgtaatggcagttccatcttttaaaattctatattcacaagacacaatacctaaagctgatgttacaattaaagctgtaggttaccagtggtattggggctatgaatatcctgacgaaaatataatattcgattcttacatggtagaagaagaggatttaaaaccaggtcaacctagacttttggcagttgataatgaaatagtagtaccagtaaacaaagtagttaaagttttaataacagctaacgatgttttgcatgcttgggctctaccatcatttggagtaaaaagagatgcgatgcctggaagagtaaatgaaacttggtttaaagcagatagggttggaacgtattacggacaatgttcagagttgtgtggtattaaacatgcattcatgccaatcacggttagagttgtaacagatgaagagtataacgcttggttggaagaagctaaaataaagtttgcaaaagaggagatagaaactgataaaaataaattattagcaaaaaattaat

SEQ ID NO: 264530 - DNA, 300 bp, Unknown
  Bacterial polypeptide expressing nucleotide sequence isolated from the Sargasso Sea
aatctggaatgtcttgtaagtctattgattcgattgcaagagatcacatagcaaatgcaggttatagtaaattttttgatcatggcctaggacattcattagggttggaaattcatgaagacccaaggtttagcaaagtaagtgaagatgttcttgaagaaaactacgtaatgactgttgaaccgggaatttatgtaccagatattggtggtgtaagaattgaagatgacatcatcgttacaaaaaatggagctgaaatcctcaataaaacttctaaagaatttcaagtaatctcataat

SEQ ID NO: 264531 - DNA, 295 bp, Unknown
  Bacterial polypeptide expressing nucleotide sequence isolated from the Sargasso Sea
gacaaagaggcgttattcaatgaatgttatggacacggaattgggcactctttgggtttagatgtgcatgatcccagtccaggtaagagcgatttcatcttagaaaaagatatggtgatcacaatagagccaggtatatatttaagagacagcacattattaaaagacaaacgattccaagggtttggcgttaggatagaggacaatatccggttaagagaaggggggaatgacaatttaacggctgctgcagaagttgatccagaggcaattgaaagtatggccggcgggtaat

SEQ ID NO: 264532 - DNA, 1090 bp, Unknown
  Bacterial polypeptide expressing nucleotide sequence isolated from the Sargasso Sea
atgagcacagaatattttcaaagaaggcaaaataaattaagaagtaaactagcaaaagagaacttagatggtatgctggttacaaacttgacacacattagatatttatgtggttttactggctcaagtgcaacattgctaatttcaggagataaagtacattttattacagatggaagatatgtcgtacaatctgagaaagaggttaaaggagctgatataattattgatagtattccacatattgaagtaattaaaaatcaaaacctattaacccctagatccaaaattgcctttgatggaaatagtgtaagtcatcaagcatatcaacaactatcaaaagtgctatcaaatcagcaattagaaaatattactggcgtaattgaaaaaatggcaatgtcaaaagatagcaaagaaatagaggctataagaactgcagtggagattaccgatcaagcttttgcagaagtattaccaatggttaaaattggtgttgaagaaaaagttatagcaaatcaattatcatttctttacagaaaatatggagattcagattctgacgcatttgcagctattgttggtacaggaccaaactctgcaaaaccgcaccatacaccgactgatagaaaaattggacaaggcgaattgttagtaatcgactctggagcaaaatttgctggttatcatgcagatatgaccagatcatttgcaactaaaggattttcagaagaacaaaaatcaatctatgacattgttcttaatgcacaaataaatagcatcaatggcattaaagccggagcatcttgtaagtcaattgattctatcgcaagggatcatataactcaagctggctatggtaagttttttgatcatggacttggtcattcacttggacttgagattcatgaagagccaagattcagcaaggtaagcaaagatatccttgaagaaaattatgttatgacagttgaacctggtatatatgtaaaagatataggtggagttagaattgaggatgacataattgttactaaagatggttcagaaattctcaataaaacatctaaagaattccaagtaatttcataat

SEQ ID NO: 264533 - DNA, 1290 bp, Unknown
  Bacterial polypeptide expressing nucleotide sequence isolated from the Sargasso Sea
cttgatttgcttttgcccactttttttaaaaaataacaagtattacaatgtgaaacatacaaaaaatatattccttatttctagtcttattctaacaatccttcatgcgcatgtcggaagccctagtcctattaaagtttttcaacctaatggaaatgaattaaatatttatattaaaggtgaccatctccataactggcatgattataatggatggactgttgttaaggataatgattggtgggtttatgcgttgggtaacaatggaaaagaactgataccttctaatattaaagttgactatacagataatccaaatgaaataaacccaaatattgcaaggggtataaaaccggatccatatcagcttcttgataattcccctgcccccaaccttcaactaactagatcagatacttttcgcgtccctcttattttagtagaatttccagatgcgggcgctctttacgaaagttcgcaacttgattcaatgatgaatcaacaaggctactctcatctaaattacgataacacaggaagttttcgagacttttaccaagagatttcgtacggtcaattcttgcccgtagctgatatatcaagatggtttaccgcctcaaataaccatgattattatggatacaataatggataccagagagtaaggcaattagttcgagatatggttgattcattagaggcttctggttttaactggtcaatttatgataatgatggggatggatacgtagatgcactaactttgatccatcaaggtcctggagccgaggagggcgatcaaacaaatatttggtctcacaaatggaatttaggaaatctagcagtttcttatgacggggtcataattgatagctacaatatgaatccagaaatccaaaatgggaatatagttgctattggtgtactagctcatgaatttggccattcactagggcttccagatttatatgatactgattactcctcaactggagcaggaaagctatcactaatggccagtggctcttggggaacaagtggtaacaccccatggtatccttcttcaatggtaggttggataaaaaatgaacttggatgggtagatattgttgaaattaatgaagatcagacaaatgttactgttgagcaatcttactcaagtaatataatctataaagtaaatcattcacaagttgaggaagaatattggctgattgaaaaccgccaaaaaattggatccgacacattaatcactactcctggactaaccatatggcatatcaatgaaaa

SEQ ID NO: 264534 - DNA, 2149 bp, Unknown
  Bacterial polypeptide expressing nucleotide sequence isolated from the Sargasso Sea
atgcgttatctgccgatcgtcgccgcgctcgcgctagccgggtgcggcggcgacgacggcggcgcgggctcggcgtccgcgctcagctccgccggcgcgccgcactcgggctcgtcgcccaccgtcaccgcgccgccgagcgcatccaatgtcgacaagagcgtctcgcctgtcgagttgccggacaccgtggtacccgtgaactaccggctgtggttccgcccgaacgacgcgctgaacgcgttcgacggccgcgccgacgtcgagatcaaggtgctgaagccggtcaacaacatcgtgatcgccggccaccggatcaagttcacgaacggccgcatcacgctgcagccgggcaacatccagttgatcgcgacaccgcaggacaagggcgacttctaccagctgcgccccgtgagcggcactatctcgccgggcaactactcgctgcacatggagtggtcgggcatcatcaacttcaagtcgtacgacgatccggtcgcgaagaccggcggcagctgcggcgacgatccgtatccgggctgctcggccgcggaaggcatcttccgcgtcgacctgaagggcaccgacggcaagacgagcggcgcgatcctcacgcaaggcgaaaccaacctgtcgcgccagtggttccccggctgggacgagccggcattccgcccgacctatgaagtgacggccgaagtgccgcaaagctggcgggtcgtgtcgaacgcggccgagaaaccgtcgaccaacgtcggcggcggctacaagctcgtgcagttcgagaagaccccgccgatgccgtcgtacctgctgttcttcggcggcggcctgttcgacacctacgaggacgacttcacgagcccgcttccgggcggcaagggcggcctgcacctgcgcgtgttcacgcctccgggcatgagcgactgggcgaagccggcgatggaccgcaccaagcaggcgctcgacttctactaccgctacacgggcatcgcgctgccgctcacgaaattcgacacggtggccgcgaacgacgcgttcaaggagcagaaggacctgaacttcggcgggatggagaactggggatcgatcctcgagttcgccgacgacatcctgccgcagccgggccagccgatgtcgcactacggcaacgaagtgctgacgcacgaagtcgcgcaccagtggttcggcgatctggtcacgaccgactggtgggacaacgtatggctcaacgaatcgttcgcaacgttcttcgagaccaagacgacgatccagttcttccccaacgagttcagctggctcgaccaggtgaagaacaagtaccgcgtgatcaatcgtgacatcggcccgaacgcgttcccggtcgcaccgaacttcaacggctgggcgtcgaacgacttcgtgctgagcgccagcgcgttcacgtacgacaagggcggccacgtgctgaagacgctcgagaactacctcggcgagcagacgttgcgcaagggtctgcagcagtacctggtcgactactcgttcggcaacggtacgccgaagcgtctgtgggatgcgttgtcgaaggagagcggccaggcgatcggcgcgatcggcgacagctacgtccgccagaccggcgtgccgctgatctcgctcgacacgcagtgcgacctgacgaagaaccagacggtcatcacgctgaaacagcagccgttcccgaacaagaacgcgtatccgggcctgcaatggacggtgccgatcacgctcgcgtacggccagggtctcgcgaaacgcacgacgctcgcgctgaaggatacgcagacgcaaacgcgcatcgacggctgcacgggcgtggtcgccgacccgagcgggctcgactactacgtcgtgaactacagcgacgcggcctggagcgggctgctcacgcaggtcaacggctcgaccgatccggtcctgctcgcgaacctgaagagcgaggccgcactgctcgtcgcgaacaacctcgcgccggcatcgcgctcgacgtcgatcggctcggtcgcttcgccggccgcgatgaagctgcgccagacgccgaccttcggcggcctcgagccggtgacgaaggaacgcccggcactgcaataccagggcatcttcaagccgcgcaaggtagtgacgcagtaac

SEQ ID NO: 264535 - DNA, 3094 bp, Unknown
  Bacterial polypeptide expressing nucleotide sequence isolated from the Sargasso Sea
catgaaacagaccctacttttcgcggctattagcttagccatcgctacaccctcgctcgcccataaccatttagtatcagaccaacacgctgcaatccccagtacgttagcaccaatagcttcgccgtcagcgccactcaattttgatgtcaaccatcggccgttattacccagcaacagcttgatagcctcccctaacgagccgacacactctgagtatctcgatgcacattcttcacaacagcaagcgttgctcgagaactctccgagatcaaaagccagcagctttgccgccaatgccaactgtagtaattttgttggtaaatcgggccaagccctattagacgagctaacgcagtcctcgccgcagtgtgtcggtaagctatttaatctcaagggaagtgacgcaagcagcgtatttagtgaggcgaatgtatccacagttgctaatgcgattgcggccaaggcgcccgaatacactggcgtggataaccaaggcattgagtcacatatttactttgtgcgcgccgcgctttatgtgcagttttacaatcccagcgacgtacccgcctacagcagtgcggtgaaaaataatttaaaatcagcgcttaatgctctctttactaataacgccatttggacactctccgatgccaatgccagcgtgctcaaagaagcactgatcctgattgattcggctgaactgggggctgattttaactttgtcaccctcaaagtgctcaatgactacaacagcacatggcaagccagctttgcaatgaatgcggccgccaataccgtatttaccaccttattccgcgcccagtggaatactgacatgcaggcgctgtttgcccgagatcatgccattttggatgcgctcaaccagttccaacttaaccatagggacttactcggcaccaatgctgaatatgttttagtcaatgctgtcagagagttatctagactgtactacattgatgccatgcgccccaaagtgacccaattggtcaaaaatatcttaaatagcaccagcaaaaatgatcccagtaaagtgctgtggtttgcagctgccgagatggcagattactacgatcgcagcaactgcaatgcttatcagatctgtggtttcaaggcgcaattggccgccgatagcttaccgtttaattggaaatgctccgacagcctcaagatccgcgcccaagatctttatcaagatcaagcaaaatgggcatgcggagtattaagtcagcaagaaagccatttccacacaatactcgaaacgggaatgcaggcggtcgcacaggataacaatgatgatttagagctggtgatttttggcagctcgtcagaatatcaatcccttgccaacagcatttttgggatcaataccaacaatggcggcatgtatttagaaggctctcccgcaggacttaaaaaccaagcgcgctttattgcatatgaggcagaatggcgtcgcccagattttcatgtgtggaacttacagcatgaatacgtgcattaccttgatggtcgctacaacctgtttggcgacttcagccgcagcgtatccgccaacacaatttggtggattgaaggattagcggaatatatttcataccgagatgccaaccccgctgccatcgcaatgggggaaacgggcgagtatatgctctcaaccatctttaaaaacacctatgactctggccaagaccgcatctaccgttggggttacctcgccgtacgctttatgtttgaaaaccaccgcgatgatgttcgccagatcctaaccttcctgcgtaataaccaatatcctgaatatcaagcatttatggattccattggcacccgctatgacaacgaatggcgcggctggctcaccagcggtttaagcaccactaacaatggtattgtcgataaaggcccaagtgatgaacaggctaatgccagtggtcgcgaaggtaactgggcaggccctgcgggcaccatcagcaaagattactcgccctgccaagtcagtaacgaagcataccgctatagcgagtcagccagcctcagtcttgaggtacctatggagtgtattgacgccaaacaaggccgagccagctttagctttgccaacactgaccgctcggctcaggatatttggatcaaaattggcggtggttggggtgatgccgatatttattacgattcaaggggatgggcaagtgctgaaaaaaatcagggctatggcatcggcaacggtaattaccaagtgatcaaagtgagcctaaaccccaatgaactttggcactatatcaccctagaaggcgattttggtggtgttgatatgctagtgagtaccactgagttagttgccgataccgatcccgatttaggtgatggcggcgatactggtggtgaagtacccagcaattgcggcgccgcaaccatcaattacggcaagctaaccctcggaaaagatgaatgccttagcggtggccgtaatagcttttatttctgggtcgatgctgacaacagccaatttagtgtcagcacaaccgggggaacaggcgatgccaatatttactttaatgccaatacttgggcaagtgcgagcaatgcccaagccagcagtgtaaatcaaggcaacaaagagtcctttagctttacggcaaaccgtggctggcgatatatcactgttgataccacgagtgaatttagtggcgtgagcttcaaccttaaagccggtggtggcagtagcgttcctaatcaaattgccaatgcctgtgcgactaaatccccagtgagctatacccaactcacgccgggtgatgccgtctgcagcgccaatggccgtaatgactattacctttggattcctgaagggacaagccaactagaagtacgctcggcccacggaactggagatgtcagcctttactcgggtcgcagctgggccaatgcccagcaatatgaagccgcttcaacaaatgctggcagcactacggagcaaatcaaggtcaataatcccagtgctggctggtattacattacgctccaaagtgaaggccaaagtacaggtgtggcccttcaagtagatttacgttaa

SEQ ID NO: 264536 - DNA, 899 bp, Unknown
  Bacterial polypeptide expressing nucleotide sequence isolated from the Sargasso Sea
agcgataaagcctacccgcatccgcagctgatcgttgatgagccgacgctgcgggtggtctatgcgcccagtcagttcttcgccagcgagccaaaggctgacgtttctctggtgctgcgtaatccgcaggccatggacagcgctcgtagccaggtcatgttcgcgctgaatgactatctggcaggcatcgctctcgatcagctcagcaaccaggcagcggtgggcggcatctccttctcaaccggcgccaataacggattaatggtcaatgccaacggctacacccagcggctgccgcagctgtttaccgcgttgctggacggctatttcagctatacgccgaccgaagagcagctggagcaggccaaatcctggtatgcgcagatgatggactcggcggacaaaggtaaagcctacgaccaggcgatcatgccggttcagatgttgtcccaggtgccctatttccagcgcgaggagcgccgggcgctgctgccgtcaattagcctgcaagaggtactggcctatcgcgacaacctgaaagcgaaagggcgcccggagctgctggtgatcggcaacctcaccgctgaacagtccaccgccatggcgcgtcagatccagcagcagctgggatctgatggcaatgagtggtgtcgcaacaaagacgtcctgatcaacagtcagcagctggcgatttttgaaaaaaccggtaacagcaccgattcggcgctggccgccgtcttcgccccgccgaacgtggatgaatacagcagctccgccgccagctccctgctcgggcagattattcagccgtggttctataaccagctgcgcaccgaagagcagcttggctacgcggtctttgcttttccgatgaacgtcgggcgccagtgggggatggg

SEQ ID NO: 264537 - DNA, 838 bp, Unknown
  Bacterial polypeptide expressing nucleotide sequence isolated from the Sargasso Sea
aacggctacacccaacgtttgccgcagctttttcaggcgctgctgagcggctatttcagctatacctcaacggatgaacaactggaacaggcgaaatcctggtatgcccagatgatggattccgcagaaaagggtaaagcctacgatcaggctattatgccggtgcagatgctttctcaggtgccttatttttcacgtgatgagcgccgtcagttgctgccttccatcaccctgaaagaggtgatgacctaccgcgacaccttaaaaaccggtgcgcgacctgaattcctggtcattggtaatatgagcgaagctcagacaacgagcatggcgcgggatatccaaaaacagcttggtgcgaacgggtcacagtggtgtcgcaacaaagatgtggtggtggacaagaagcagtccgtcatctttgaaaaagcaggcagcagcacggattcagcactggcggcggtatttgtgccaaccggatacgatgaatacgccagttcagcctacagcgccatgttggggcagattgttcagccgtggttctacaatcagctgcgtactgaagagcagttaggttacgccgtatttgctttcccgatgagcgttggccgtcagtggggaatggggttcctgctgcaaagcagtgataagcagccgtcttacctctgggagcgttataaagcgttcttcccgacggcggaagcgaagctgcgggcgatgaaacctgaagagttcgcgcaaattcagcaggcgattattgcgcaaatgctgcaggcgccgcaaacgctgggggcagaagcctcacagttaagcaaagattttgatcgcggcaatatgc

SEQ ID NO: 264538 - DNA, 832 bp, Unknown
  Bacterial polypeptide expressing nucleotide sequence isolated from the Sargasso Sea
gtacaggcgttacaaaaatttcatgaaaagtactactccgcgaacctgatgaaggcggtgatttatagcaataaaccgctgccagagctggcgcggatagcggctgacacctttgggcgcgtgccgaacagaaatatcgaaaagcctgaaattaccgtaccggtcgtcactgatgcgcaaaagggcatcatcatccactatgttccggcaatgccgcgtaaagtattgcgcgtcgagtttcgtatcgataacaacagcgcgcagttccgcagtaaaaccgatgagctggtgacctacctgattggcaatcgtagtccgggcacattgtctgactggctgcaaaagcagggcctggttgaaggtattcgcgcagactccgatccggtggtcaacgggaacagcggcgtgttagccatttccgcgacgttaaccgacaaggggctggcgaatcgcaatgaagttgtcgcggcaatctttagctacctcaatttgttacgcgagaaaggcgtcgataaacgctattttgacgagctggcgcatgtgctggatctcgatttccgttatccctccatcacccgtgatatggactacgtggaatggctggctgataccatgatccgcgttcccgtcgagcatacgctggatgcggtgaatattgctgaccagtacgatgcgaaagctgttgagcaacgtctggcaatgatgacgccgcagaatgcgcgtatctggtatatcagcgcgaaagagccgcataataaaaccgcttattttgtcgatgcgccttaccaggtggataaaatcagtgacaaaacctttgccgactggcagcaaa

SEQ ID NO: 264539 - DNA, 786 bp, Unknown
  Bacterial polypeptide expressing nucleotide sequence isolated from the Sargasso Sea
atgaaaaatatgatggtactgttacaattaatgaacttagctggttaaaaaaaccacctcatccatcaaagctattcaatgttggtgataatatagatgtaaaaataacagagatagatgaagaaaaaagaaaattaatatgcagcatcaaacaaacaaaagaaaacccttggtctaaattaacagatcaatttaaagttaatgatagttttgagactgaggtagtaaatattgttgactttggaatttttgtaaaagttcacgaggaaatagatggaatggttcacgtatctgatttaaattgggatgaaaaagaatgtgaaaaaattttagcaggttataaaaaaggtgataaagttaaggtaaaaatattagaaattaatattgataaagaaagaataagtttaggtattaagcagttatctaatgatccaattcaaaactatattgaaacacatccaatcaaatctaaagttactggtaaaattaatgaattaaatgaaaagtttttaaaagttgagttagatgatcaaatttatggattcattaaaaagattaatctatcaagagataaaaatgaacaaaaaactgatagatttgctttaggagagcaagttgattcaattatactttcagttgatcaaaaaaataggtctctaaacttatccataaaagaaattgaaattattgatgaaaaagaagctatgtctaaatatggttcgagtgactctggagcctctcttggtgacattcttgggtctgtgcttaagaaaaaaaataaataaa

SEQ ID NO: 264540 - DNA, 986 bp, Unknown
  Bacterial polypeptide expressing nucleotide sequence isolated from the Sargasso Sea
ccgaacagcaagttattcctcaggaactggcacgacgaccctcaacttcacctacacggtgcaggacggggacaattccagcgatctcgacttcacgggaacttcagcactcgcactcaacggcggcaccatcaaagccagtaccggggcagcgaataacgcaaatctcactttggcttcgccgggggctgcaaattcactcggaaataacaaagcactcgtcatcgacggctccgctccaaccgttcaatcagtcagcagttccaccgccgatggcacctacaaagccggcgacgtcatcaccatcaacgtcgtcttctctgaggccgtcaccgtcaacaccaccggcggtacgcctcaactcaccctcgaaaccggaaccaccgatcaagtcgtcaactactcctctggatcggggaccaccacactcgccttctcctacaccgtccaggccgacgattcctcctccgacctcaactacaaagccacctcctccctcgcactcaacggcggcaccatccaagacgccgcaggcaacaacgccaccctcaccctccccgccctcgccggcagcgactccctcgccggcaacagcgcactcgtcatcgacggctccgctccaaccgttcaatcagtcagcagttccaccgccgatggcacctacaaagccggcgacgtcatcaccatcaacgtcgtcttctctgaggccgtcaccgtcaacaccaccggcggtacgcctcaactcaccctcgaaaccggaaccaccgatcaagtcgtcaactactcctctggatcggggaccaccacactcgccttctcctacaccgtccaggccgacgattcctcctccgacctcaactacaaagccacctcctccctcgcactcaacggcggcaccatccaagacgccgcaggcaacaacgccaccctcaccctccccgccctcgccggcagcgactccctcgccgggcacagcgcactcgtca

SEQ ID NO: 264541 - DNA, 502 bp, Unknown
  Bacterial polypeptide expressing nucleotide sequence isolated from the Sargasso Sea
atgaagaaaatctacaagatccacgaccacctgtacgtcggcctaagcggcctcgccacggaccagaccacgctggcgcagcgcttcaagttccgccataacctgtacaagcttcgagaaaaccgcgacatgcgccccgagacgttcgccaacgtcgtgtcgaacatgctgtacgagaagcgattcggtccctactacgccgagcccgtcgtcgccggcttggacgcggacggcacacccttcatcacgggcatggatctcatcggcgcgatggcccccaccgataacttcgtggtgtgtggtaacaacgaggagtccctgttcggcgtgtgcgagtcgatgtacaagccgaatctcgagcccgaggagctcttcgaggtgatctcgcagtgcctgctcgcgggggttaaccgggactgcctgtccgggtggggcggcgtggtgcacgtcatctccaaggataagctcatcacgcgaaccctcaagggccgcatggattgag

SEQ ID NO: 264542 - DNA, 636 bp, Unknown
  Bacterial polypeptide expressing nucleotide sequence isolated from the Sargasso Sea
aacgaggtacacttgcaattggcataatgacaaaagatggaataattttagccgttgaagaaaaaacaagaccgttacaagtagatggaattacacagaaaatatttcaagttgatgatcatataggagtagcagcagcaggatacattcctgatgcaagagttgaagttgacaatgcaagatacttttctcaaagtaacaaactaacttatgacgaaccagtagatattgagactgttgcaaaacacttagcagatcaaaatcaccagtttacacaatattcaggcgtaaggccatttggcgttgcattgattattgcaggaattgatagaaaaggagttaacgtatacgtaattgatcctagcggaacatacaactcttattctgcaatagcaattggaacaggttcagatgaagtaaatgaattccttgagaaaaattacaaagaaggactaactgtagatgaggccgcatcattggcaattgctgcaataaatctcaaaagtgaagagaaatccggtgtagaacatatcaagatgtcaaaaatactagtagaaggaaaaatgatagagaaaatttctcctgaggatttaaagaaatttgacgaggctgcaaaaggcaaatttgtcaaataag

SEQ ID NO: 264543 - DNA, 564 bp, Unknown
  Bacterial polypeptide expressing nucleotide sequence isolated from the Sargasso Sea
agaagaagctgccgacgtgcctcatcgacgagtcgacggtgcagaagatcgtgctgctcacagagtcgatcggcgtcgtctactcggggatggggcccgacttccgcgtgctgatcgccaaggggcgcaaggcggcgcaggcgtactaccgggtgtaccgcgagaccatcccggtgacgcagctggtgcgcgagctggcgtcggtgatgcaggagtacacgcagcagggcggcgtgcggccgttcggcatctcgctgctgctcgcgggcgtcgaccacaacgggccgcagctgtaccagatcgacccgtcggggtcgtacttcgcgtggaaggcgtcggcgatcgggaagcacatggtcaacgccaagaccttcctcgagaagcggtatacgaacgagctcgagctcgaggacgccgtgcacaccgcgctgctcacgctcaaggagggcttcgagggcgcgatggaccacaccaacatcgaggtcggcatcgtcggcgccgacggcgccttcaaggtgctcacccccgccgagatcaaggactacctcggggaggtcgagtaga

SEQ ID NO: 264544 - DNA, 712 bp, Unknown
  Bacterial polypeptide expressing nucleotide sequence isolated from the Sargasso Sea
atgcagccaagcggacgaggttatgaccacggcgtctctactttctctccagatggaaggttataccaggtcgagtatgctcgggaatcagtcaagagaggtactactacagtaggattggtgtacaaagacggtgtggtcttgatagtagataagagggtacagagtaaattggtaatcacagactcaatcgagaagatgtaccaaatcgacaatcatgtgggaattaccacttcaggactagtagccgatgctcgccaacttgtagacagggcaagagttcaatgccaaataaatcgaatgacatacggcgacaatatcccggtatccactctagtcaagaagatgtgcgactacaagcagtctttcacgcagtatggcggagcaaggccattcgggacagccctactaatagccggattcgatgacgaaggtgcacatcttttcgaaaccgatccttctggtgcttaccagtcctacaatgcaggagcaataggtagaggaaaggcgacagcaatagacttcttcgaggataagtggaagaagggaatgacccagaatgccgccatcaagatgggtctagaggcactaagagactctctagaggaggatttgaatccagatactgtagaaatcggttgcgtcgacaagagcggctatgagaaattagatagggagactaccctcaagcatctgggcaagctctcctgat

SEQ ID NO: 264545 - DNA, 449 bp, Unknown
  Bacterial polypeptide expressing nucleotide sequence isolated from the Sargasso Sea
ttctcaaagcaacaaattgacttatgacgaaccagtagacattgagacagttgcaaaacatttagcagatcaaaatcatcaatttacacaatattcaggcgttagaccgtttggcgttgcattaatcattgcaggaatagacagaaagggagtcaatgtttacgttattgatcctagcggaacctacaactcttattctgcaatagcaatcggaactggttcagacgaggtaaacgaattcctagagaagaactacaaagatggattaacaattgatgaggctgcatcattagcaattgctgcaatcaatctcaagagcgaggaaaaatccggcatagagcacataaagatgtcaaagatactatcagaaggaaaaatgatagagaagatttctactgaagacctaaagaagtttgatgaggctgcaaaaggcaaatttgtcaaataga

SEQ ID NO: 264546 - DNA, 475 bp, Unknown
  Bacterial polypeptide expressing nucleotide sequence isolated from the Sargasso Sea
atgccaaatcgcggttacgacatgactccaaccatgtattcaccagatggaagaatttaccaagttgaatatgcattagagactgtcaaacgcggaacacttgccataggaataatgacaaaagacggcattgttttagctgttgaagaaaaaacaagagcattacaagttgaaggaataacacaaaagattttccaagttgatgatcatatcggagttgcagccgcaggttacattccagatgcaagagtccaagtcgacaatgcaagatatttttctcaaagtaataaattaacttatgacgaaccagtagatattgaaacagttgcaaaacacttagcagatcaaaatcaccaatttacacaatattctggtgttagaccatttggtgttgcattaattattgcaggaatagatagaaaaggagttaatgtttacgtgattgatcctagtggaacctacaattcttactctg

SEQ ID NO: 264547 - DNA, 883 bp, Unknown
  Bacterial polypeptide expressing nucleotide sequence isolated from the Sargasso Sea
ttggaactggttggagggaatgatttcctcaacacgttgataccttacactagcggtttttactatgacagtaggccacatatcgcgtttaagccggaagacgttctcccaatcaacgatgaattgggattcaataagaatgcaaccacccttcaagagttttataaaaagggtaagatgggtatagtgcagggcgttggttatccggattctagccgttcgcatttcagaagcagagatatttggcatacttgcgaaccagacaaagttgctactgaaggttggttagggaaagtgataagggatttagatccgaacaaggaaaacgtcttaaccgccataagtatcagcagaggtttgcccagagcagtggtagctcaagacgttcctgtgacttccattggagacctagacacctatggacttctgactggcattaaacatgaagacaaacgggcccaagccatgtctatttttgaaaaaatgtatagcccttacacgggtgctgggatggtaagagattatttgaagcaaaccggtagagatgttcaagctggagcagagatattaaaaactgtgccaggaatgtactctagctctatagaatatgcagatagccctatctctcaaaacctcagagatgtggcgaggattcatctcgcggacctaggcgtgaaagtgttctacacccaacatggaggctacgatactcacgcgaatgaatactctggccacgaaaaattgatgattgatgtcaaccgagccgtaaaagatttctttatggatttagaagagcatgatgctgcggataacgtaatcatgatgatatggtctgaattcggaagaagagttgtagacaacggtagcggtacggaccacggag

SEQ ID NO: 264548 - DNA, 336 bp, Unknown
  Bacterial polypeptide expressing nucleotide sequence isolated from the Sargasso Sea
gatgccatctcaacaaggttatgaccgggctattaccgttttttctcctgatggtagattatatcaagtagaatatgctattgagacagtaaaaagaggggctttagcaataggaattaaatcaaaagatggtgtaataattgcagttgaggaaaaaccaaggagattacaaatttctactacaccacaaaaaatatttcaagtagattatcatgttggagctgctgctgcgggttatattccagatgcacgtgcacaagtagataatgcaagatttttttctcaaagtaataaattagtttatgatgaaccagtagaagttgagacagttgctaa

SEQ ID NO: 264549 - DNA, 415 bp, Unknown
  Bacterial polypeptide expressing nucleotide sequence isolated from the Sargasso Sea
ctttacgtataacgaaccgatgccggtgttgagctgtacgacgtcgctgtgtgaactggcgatgtcgttcgctggggatggggagaagaggatgtcgagaccgttcggggtggcgctgttggtggcgggaaaagacgaggacgggtatcatctcgtgcacacggatccgagcgggacggcggtgtcgtataaagcgaaggcgatcgggagtgggagcgagggggcgcagacggcgctgcaggaggagtatagggatgatttgacgctcaaggaggcggagacgttggcgttgaagacgttaaaggcggtgatggaggagaaaatcaacgtgaagaacgtggacatggcgagcgtggcgccgacgtacgccaagtaccaggacgcggcgattcaggagatcatcgacaggttgtga

SEQ ID NO: 264550 - DNA, 490 bp, Unknown
  Bacterial polypeptide expressing nucleotide sequence isolated from the Sargasso Sea
atgagtcggtacgaccgcgcgatcacgcagttctcgcccgacgggcacctgctccaggtggagtacgcgatgcaggcggtggcgaagggcgccgtcgtggtgggcgtgcgtggggacgactgcgtcgtgctcggcgtggagcgcaaggccgtggccaagctgcaggacccgcgcaccgtgcgcaagatcgtgcggatcgacgaggacacgacggccgccttcgccgggctcaccgccgacgcgcgcgtgctgattcgcaaggcgcgcgtggaggcgcagtcgtaccggctcacggtggaggacgcgcccaccatcgagtacatggcgcgctacgtggcgcgccagcagcagaagcacacggtgcgcggcggcgtgcggccgtatggcatcacgtgcgtcatggcgggcaagggctcggacggcacgccggagctgtggcagtcggacccgagcggcaactactcgcagtggcgcggcgtcacgacgggcc

SEQ ID NO: 264551 - DNA, 268 bp, Unknown
  Bacterial polypeptide expressing nucleotide sequence isolated from the Sargasso Sea
catgtttcagacgcgaagcgagtacgatcgcggggtgaacacgttttcacccgaggggcgattgtttcaggtggagtacgcgatcgaagccatcaaactcggatccacggcgatcgcgattcgaacgagcgagggggtggtgctggcggtggaaaaacgggcgacgtcaccgctcatggacgcgtcgagtctggagaagattgccgaggtggacgcgcacgtgggatgcgcggtgagcggattgacggcggacgcgtggaccatggtg

SEQ ID NO: 264552 - DNA, 646 bp, Unknown
  Bacterial polypeptide expressing nucleotide sequence isolated from the Sargasso Sea
tcgccgctctctctctctgacctctcgtccccttctccgtcgcacccaaaacttgcaggtatgatcgcatccgcgctggagctccaccggctggccaccaagcgcaaatcccgcgtcgtcaccgcgctcaccatgctcaagtcgcacctgttcaagtaccagggtcacgtgggcgccgcgctggtgctcggcggcgtggacatcaacggcccgcacctcttcagcgttcacccgcacggcagcagcgattccctgcccttcgccaccatgggttccggttctctcgcggcgatggcggtcttcgaggcggactttaaggaggacatgaccgaggaggaggcgaaggagatcgtggctcgttcgatccgggcgggcatcttcaacgacctcggatccggcagcaacgtcgacctgtgcgtcatcaccgcggataaggtggactacctccgaaactacgagtgccccaacgagcgcacgtacgtcaggagcaaggggtacgaattcccgcccgggacgacggtgctgaacaggcggaacttcatgacggcgacggcggcgacgctgccggtgaataaggtcgtggacatcatcgacggggcacccgaggacgtagccgccgcgggggacgcgatgcagaccgattgaa

SEQ ID NO: 264553 - DNA, 700 bp, Unknown
  Bacterial polypeptide expressing nucleotide sequence isolated from the Sargasso Sea
atgaattacgtgaaaccgaaccacggaacgacgacgttggggttcatctttgaacacggcatcgtcatcgccgtcgactcgcgcgcgtcgcagggaccgtacgtgtcctcgcagacggtgaaaaaggtgattgaaatcaatccgtttttgctcggtaccatggctggcggcgccgcagattgtcagttttggcagcgcaatctcggaattcagtgtcggttgcacgaactggagaatggaaagagaatcaccgtgcgcgcggcgtcgaagctattggccaacacgttgtacagttacaaagggcgaggactctccatgggtaccatggtcgcggggtgggatctgaacggtccgggtctgtattacgtcgacagcgagggcacgcgattgaaggggcagcgattcagcgtcggctccgggtcgttgttcgcgtacggggtgttggatcaagggtacaagtgggatttgagcgtgaaggaggcgtgcgaactcggacgacgcgcgatttaccacgcgacgtatcgcgacgcgttttcgggaggtacggtgagcgtatatcacgtcggggagaacgggtggacgaaggtgaccggtgatgacgtcggagaacttcattttcattactatccctcgacgccgatcgacgacatcgactcgctcggcggactcgggaagaaggaggcggaggaacgcgaagccg

SEQ ID NO: 264554 - DNA, 622 bp, Unknown
  Bacterial polypeptide expressing nucleotide sequence isolated from the Sargasso Sea
gatggcagactcgaggtcgaactactcgctcaccaccttcaactccagcggcgagcttgtgcagattaagcacgcgctcgccgcggtgcagagcggcgcgacgtctttgggcatccgcgcggttaacggcgtggttcttgccaccgaaaagaagcttccctcgacgctggtggacgagaccaccgtggagaagatcgcgcagctgacgcccgagattggcatgacctacagcgggatgggaccggacttcagggtgctgacgaaaaagacccgcaaggagacgcaggtgtactaccgcacctaccacgagctcgtgccctgctcgcaaatcgtgagggagacggcgtcggtgatgcaggagttcacccagcggggaggcgtcaggcccttcggggtctccctcctcatggccggattcgactccaacgggccgcagctgtaccaggtggatccctccggaacgtacttcgcgtggaaggcgagcgcgatcggcaagaacatggtcaacgccaagacgttcctggagaagaggtactcggaggacatggagctggaggatgccatccacaccgccatcctcacgctcaaggaggggttcgacggtcagatcagcgcggagaac

SEQ ID NO: 264555 - DNA, 327 bp, Unknown
  Bacterial polypeptide expressing nucleotide sequence isolated from the Sargasso Sea
gatgccatcacaacaaggatatgaccgtgcaatcacagtattttctcctgacggaagattataccaagtggaatatgcaatagaaacagttcgtagaggagcaattgctgtgggaattaaaacaaaagatggcgtaatcatagccgttgaagaaaaagctcgtaaattacagattatcacaacaccacaaaaaatattccaaattgattatcatattggagcagctgcggcaggttacatcccagatgcacgttcacaaatagacaatgcacgaacattttctcaaagtaacaaactagtgtatgatgaggcagtagaagttgaaac

SEQ ID NO: 264556 - DNA, 539 bp, Unknown
  Bacterial polypeptide expressing nucleotide sequence isolated from the Sargasso Sea
accgagcagcatggataagatcatggagatcgacgcgcacatcgggtgcgccgtctcgggcctcaccgcggacgcccagagcatggtcgagcacggccgggtgcaggcgcagaatcactacttcacgtacaacgagcccatgcccgcgcgcgcgctgacgcagtctctgtgcgccctctcggccaacttcgggacggacgacgaggactcgatgagccgacccttcggggtggcgctgctcgtggcgggccacgacgcggacgagggttatcagctgtaccacaccgacccgtcgggaacgttcgtgagctacagcgccaaggcgatcgggtccgggagcgagggcgcgcagacgacgctgcaggaggagtacaggccggacatgaccatggaggaggcggagacactggcgctctccacgctcaaggcggtgatggaggaaaaggtaagcacgatcaacgttgacatggccagcgtcgccccgaagtacaaggtgtacgacaaggaagcgatcaaggccatcatcgagcggctgtgag

SEQ ID NO: 264557 - DNA, 724 bp, Unknown
  Bacterial polypeptide expressing nucleotide sequence isolated from the Sargasso Sea
atgccaaatcgcggttatgatatgactccaaccatgtattcacctgatggaagaatttaccaagttgaatatgcacttgagactgtcaaacgtggaacacttgccataggaataatgacaaaagagggcattgttttagctgttgaagaaaaaacaagagcattgcaagttgaaggaattacacaaaagattttccaagttgatgatcatattggagttgcagccgcaggttacattcctgatgcaagagttcaggttgacaatgcaagatatttttctcaaagcaacaaattgacttatgacgaaccagtagacattgagacagttgcaaaacatttagcagatcaaaatcatcaatttacacaatattcaggcgttagaccgtttggcgttgcattaatcattgcaggaatagacagaaagggagtcaatgtttacgttattgatcctagcggaacctacaactcttattctgcaatagcaatcggaactggttcagacgaggtaaacgaattcctagagaagaactacaaagatggattaacaattgatgaggctgcatcattagcaattgctgcaatcaatctcaagagcgaggaaaaatccggcatagagcacataaagatgtcaaagatactatcagaaggaaaaatgatagagaagatttctactgaagacctaaagaagtttgatgaggctgcaaaaggcaaatttgtcaaataga

SEQ ID NO: 264558 - DNA, 736 bp, Unknown
  Bacterial polypeptide expressing nucleotide sequence isolated from the Sargasso Sea
atgccatcacaacaaggttacgaccgtgccatcacagtattttcaccagatggaagattataccaagtagaatatgcaatcgagacggtcagaagaggagcacttgcagtaggagtcagaacaaaaaatggagtagttatagcagtagaagaaaaatcaagaaaattacaaatcatcaataccccacaaaagatatttcaaattgattatcatataggagctgcagcagcaggatacattccagatgcacgttcacagattgatacagcaagaacattttctcaaagtaacaaactagtgtatgatgaaccggtagaagttgaaacagttgcaaaacatttagctgatcaatgtcaacaatatacacagtatggtggcgcaagaccaatcggagtttcattaatcataggaggaattgatcctgcaggaaccaatttgtatatgacagacccaagtggctcatacatttcatacaacgcaatatcaatcggtgcaaattcagatgtagttaatgaattcttagaaaagaattacaaagaagacatgtcattagatgatgcagcatcattggcaattgcagcaatctacatttcaagtgaaacaaaagaaggaattgaacatatcaaaatgtcaaaaatatctggagagaaaggaacttttgaattcattgaaaatgaagagataaccaagtttgctgcaagtgcaaaatcaaaatatccagctgatggaaaataag

SEQ ID NO: 264559 - DNA, 345 bp, Unknown
  Bacterial polypeptide expressing nucleotide sequence isolated from the Sargasso Sea
gatgccatcacaacaaggttatgaccgtgcaattacagtattttcacctgatggaagattataccaagtggaatatgcaattgaaacggttcgtagaggagcaatagcagtaggaattaaaacaaaagatggcgtaatcatagcagttgaagaaaaagctcgaaaattacagataattaacacaccacaaaaaatattccaaattgattaccatattggagcagccgcagcaggatacatcccagatgctcgttcacagatagacaacgcaagaacattttctcaaagtaacaaactagtgtatgatgaagcagtagaagttgaaactgttgcaaaacatttagc

SEQ ID NO: 264560 - DNA, 677 bp, Unknown
  Bacterial polypeptide expressing nucleotide sequence isolated from the Sargasso Sea
tggaagaatctatcaagtagagtatgcattagagacagtcaaacgaggtacacttgcaattggcataatgacaaaagatggaataattttagccgttgaagaaaaaacaagaccgttacaagtagatggaattacacagaaaatatttcaagttgatgatcatataggagtagcagcagcaggatacattcctgatgcaagagttgaagttgataatgcaagatacttttctcaaagtaataaactaacttatgacgaaccagtagatattgagactgttgcaaaacacttagcagatcaaaatcaccagtttacacagtattctggagtaagaccatttggtgttgcattgattattgcaggaattgatagaaaaggagttaacgtatacgtaattgatcctagcggaacatacaattcatactctgcaatagcaattggaacaggttcagatgaagtaaatgaattccttgagaaaaattacaaagaaggactaactgtagatgaggctgcatcattggcaattgctgcaataaatctcaaaagtgaagagaaatcaggtgtagagcatatcaagatgtcaaagatactagcagaaggaaaaatgatagagaaaatttctcctgaggatttaaagaaatttgatgaggctgcaaaaggcaaatttgtcaaataag

SEQ ID NO: 264561 - DNA, 604 bp, Unknown
  Bacterial polypeptide expressing nucleotide sequence isolated from the Sargasso Sea
atgacacgcagcgagtatgaccgcggggtgaccacgttctcccccgagggtcgcctgtttcaggtggagtacgccatcgaggcgatcaagctgggcagcaccgcgatcgcgatcctgacgaaggagggcatcgtgctggcggtggagaggcgcacgcagtctccgctcatggtgccgtcgagcttggacaagatcatggagatcgactctcacgtggcgtgtgcggtgagcggtctgaccgccgacgcgcagagcatggtcgagcacggacgggtgcaggcgcagaaccactacttcacctacaacgaatcgatgcctgtccggtcgctgacgcagtcgctctgcgctctcagcgccaacttcgggacggacgacgaggacagcatgtcccgacccttcggcgtcgcgctcctcgtcgcaggccacgacgtcgacaacggctaccagctgtaccacaccgacccatccggtacctggaccgcgtacaaggcgaaggcgattggcagcggcagcgagggagcgcaaaccacgctgcaggaggagtacaaggacgacatgaccctgaaggaggctgagaacctggcgctttccacgctgaaggctg

SEQ ID NO: 264562 - DNA, 700 bp, Unknown
  Bacterial polypeptide expressing nucleotide sequence isolated from the Sargasso Sea
catggcttatgaccgagctataacagtattttcaccggatgggagactattccaggtagaatatgctagagaagcagtaaagagaggaacaaccacagtaggggtaaagttcaaagacggtgttgtattaatcgtcgacaaaagactaagttcgaaattaatcgaacctgaaagtattgaaaaaatctttcagattgatgggcacattggatgtgcaacttcaggtttagtagcagatgcaagagcactagttgaccgtgctagagttgaatgtcaggttaattctttcaattacagtgaagacttagcagtggaatcactagtgaagaaactatgtgattttaaacaaagctatactcaatatggtggagttagaccatttggtactgcaatgttaattggaggaatagacaattcaggccctcatctctatgaaacagatccttccggagcactaatggcatacaaagctggtggtattggagctgggagaaatgaagttatggaagtttttgaaaaagattacaaagaaaatatgagtcagaatcaagcaatcagcctaggattgaagggactttcagctgcaaatgaaaataatctaaaagcagacgttattgaaattgcggtagtaaattctagtaaaggtttccacacacttgattctaagagcgtaggcgaggctgtaaagaaaattaagtaa

SEQ ID NO: 264563 - DNA, 431 bp, Unknown
  Bacterial polypeptide expressing nucleotide sequence isolated from the Sargasso Sea
cggtaaaatcgactaccagcgtacgcctgcgcgtaagcacaccacgtctactccgttcgatgtttctaagctgaccgagctgccgaaagttgggattgtttacaactatgctaacgcctccgatctgccggcaaaagcgctggtagatgcgggttacgcagggatcgttagtgcgggtgtaggtaacggtaacttgtataaaaccattttcgatacgctggcaaccgccgcgcataaaggtaccgttgtggtgcgttcatctcgtgtaccaacgggtgccaccacgcaggatgcagaagttgatgatgcaaaatacggatttgtggcttcaggttccctgaacccgcaaaaagcacgtgttctgctgcagcttgcgctgactcaaaccaaggatcctaagcagatccaggaaatgtttaatcagtattaat

SEQ ID NO: 264564 - DNA, 352 bp, Unknown
  Bacterial polypeptide expressing nucleotide sequence isolated from the Sargasso Sea
aactccacatatatatcttgcgtttgagggagccgaaacatttgctagggaacagggggttgaaactgtaaactccagtcattttatcactccgcaaaatattgagagattgaaacaagcaaaagcagctaacactgttcaggtagattatacacagcctatgccaatagttgatgaaccaccagttcccaatggggatagccaaattgggacggtgggatgtgtagctgttgacagtgctggaaatttaccggctgctacgtctactggaggactagtaaacaagatggttggtagaataggagatactccccttgttggtgcacggacatatgcaaataaattctgtgca

SEQ ID NO: 264565 - DNA, 1060 bp, Unknown
  Bacterial polypeptide expressing nucleotide sequence isolated from the Sargasso Sea
catgactctcccgatccgcaagaccctgctcgccgccgtcctcggcctgaccctctccccgatggccatggccctgcccaacgtccatatcctggccaccggcggtaccattgccggagcgggacagtccgccacccagtccaactacgaggccggcaaggtggccatcgagacgctgatcgccgccgtgcccgagatgaagaacgtggccgacgtgcagggtgagcaggtggtcaaaataggctcccaggacatgaacgacgaggtgtggctcaagctggccaagcgggtcaacgagctgctggccaaggatgacgtggacggcatcgtcatcacccacggcaccgacaccatggaagagaccgcctacttcctcaacctcaccgtcaagagcgacaagccggtggtgctggtcggcgccatgcgcccctccaccgccatgagcgccgacggcccgatgaacctctacaacgccgtggtgaccgcctctgaccccgcctccaagggacgtggcgtcatggtggcgatgaacgacacagtgctcgatgcccgcgacgtcaccaagaccaacacgaccggcgtgcagaccttcgcctcccccaacttcggcccgctcggctacatccacaacggcaagatcgactatcagcgcagcccggcccgcctgcacaccagcaagaccccgtttgacgtgagcaagctcgacaagctgccgcaggtcggcatcgtctacagctacgccaacgccaccgatctgccggccaaggcgatggtggatgccaagttcgacggcatcgtcagcgccggggtgggtaacggcaacctctaccacaccctgtttgataccctggccaaggcgagcaaggacggtatccgggtagtgcgctccgcccgcgtgccgaccggttccaccactctggatgccgagatcgatgatgccaagtacggcttcgtcgccgccgagaccctcaacccgcagaaggcgcggatcctgttgatgctctcgctcacccagagcaaggatccggcccagatccagcgctggttccagcagttctga

SEQ ID NO: 264566 - DNA, 307 bp, Unknown
  Bacterial polypeptide expressing nucleotide sequence isolated from the Sargasso Sea
aatggatggccagtgcattaatattcatcactcctttttacctggatttaaaggtgcgaaaccttatcaccaagcacatgaacgaggtgttaaaataattggggctacagcgcattatgttaccgatgatctagatgaaggtcctattatcgagcaggatattcttagggtagatcatggcgcgtccccggaaagcatgcaggaaagtggatatgatattgaatctgctgttttactaagagctgtaagattatatgctgaaagaagaattttattaaacggcttaaagacagtagtatttaattaa

SEQ ID NO: 264567 - DNA, 689 bp, Unknown
  Bacterial polypeptide expressing nucleotide sequence isolated from the Sargasso Sea
tcagctggaaggcatttttaacgacaaaactctgatgctggatttagacagagccttgccacaaggcagcagtcggcagttggtcgctgccgggcggaaaaaagtagtgatactggtgaccaaagaagcacattgcctgggtgatatcttaatgaaggtctatgacggttcgttaaaactggatattgctgcagtcgtgggcaatcatccggatttacaaagtctggccgaaaagtttgatattccctaccattttgtcagtcatatcgacttaagccgcgagcaacatgaagccgcactgcaacaggtgatagacccttatcaggcggattatttagtgctggcaaagtttatgcgggtgttaagtccggcttttgttgcgcactacaaagagcgaatcatcaatatccaccatagttttttaccggcctttattggggccaatccttatcatcaggcgcataaaagaggcgtgaaaattattggcgccacagcgcattttgttacagacgatctggatgaaggccctattattaaacagttggtgactccggttgatcatacgtacagcgctatggatatggtgaaagccggccgggatgttgaaaaaaatgtgctgagtaaagccttgcaactggtgctggaagaccgggtttttgtgcatggcaataaaacagtgatcctgtaaa

SEQ ID NO: 264568 - DNA, 760 bp, Unknown
  Bacterial polypeptide expressing nucleotide sequence isolated from the Sargasso Sea
ctggtttgtaggaagagctttgggaatttaattatggaagctaaaaaaataatattacaatttatatgtcctgataaggcaggtgttttatctgctgcaactcagttcttatttaaaagaaatgcttttatgacagaggtttcttcattcagcgataatgatactaaaaagtttttcagtaggattgcttttgagaatgaagatggttcaagctttaatattcatgatttggaaaaagaattttctatagaattaaaagaatttaatattgatggaaggttttttgatgctgaacagccatgtaaagcaattattgctgtaagtaaggtcggtcattgcttaaatgatcttcttcatagatggaaaattggatctcttcctatagatattaaaggtgtaatatctaatcatgaaacttctaaagatattgttgaatggaacaatattccctttcattatttaccaatttcaccggataccaaatcagaacaagagcagttatttaaagaaatatatcaaaatagtggatcagaactattagttttggcgcgttacatgcaaatcttatcctcagatttcctaaatgaattggatggccagtgcattaatattcatcattcctttttacctggatttaaaggtgcgaaaccttatcaccaagcacatgaacgaggtgttaaaataattggggctacagcgcattatgttaccgatgatctagatgaaggtcctattatcgagccaggatattctgagggta

SEQ ID NO: 264569 - DNA, 817 bp, Unknown
  Bacterial polypeptide expressing nucleotide sequence isolated from the Sargasso Sea
tatggcgaatgcagttttattaattgaatgtgaagatcagcaaggaattgttagttctattacggagtttatatacagtaatcaaggtaatataattgacttagatcagtataccgaccacgataatactcattttttcatgcgattggaatggtcattggactctttcactatccaacgaggaaaaattggtgaatattttgaaacactgattggacagcgtttttcaatacgattcaatttatattttacggatgaacatcctagaatgggactgtttgttacaaaattatcacattgcttatttgatatattaggtcgttggcaaagtggagaattagaaattgaaatacctgtagtgattagtaatcatgaaaatttacgaagtactgttgagcggtttgacattccgtttgaatatattccgattactaacgaaaataaagcagaacaagaacaaaagcaacttaaagttttatcggactacgatgttgattttgtcgttttggctcgctatatgcaaattatttctccaaactttatcaaacggtattctaataaaatcataaatattcatcattcatttctcccagcttttgtcggtgctaaaccatatcacgctgcttttgagagaggtgttaaaattattggcgctacagcgcattatgttacggataatttggatgcagggccaataatagagcaagatgtagcgcatgttacacatcgaaactctgttcaagatttagttaaaatgggacaagatgttgaaaaattagttttagcgaaagctattaaattacacgtaagaagaaaa

SEQ ID NO: 264570 - DNA, 688 bp, Unknown
  Bacterial polypeptide expressing nucleotide sequence isolated from the Sargasso Sea
tatggaagctaaaaaaataattttacaatttatatgtcctgataaggcaggtgttttatctgccgcaactcagttcttatttaaaagaaatgcttttatgacagaggtttcttcattcagtgataatgatactaaaaagtttttcagtaggattgcttttgagaatgaagatggttcaagttttaatattaatgatttggaaaaagaattttctacagaattaaaagaatttaatattgatggaagattttttgatgctgaacagccatgtaaagcaattattgctgtaagtaaggttggtcattgcttgaatgatcttcttcatagatggaaaattgggtctcttcctatagatattaaaggtgtaatatctaatcatgaaacttctaaagatattgttgaatggaacaatattccctttcattatttaccaatttcaccagatacaaaatcagaacaagagcagttatttaaagaaatatatcaaaatagtggttcagaactattagttttagcgcgttacatgcaaatcttatcctcagacttcctaaatgaattggatggccagtgcattaatattcatcattcctttttacctggatttaaaggtgcgaaaccttatcaccaagcacatgaacgaggtgttaaaataattggggctacagctcattatgttaccgatgatcta

SEQ ID NO: 264571 - DNA, 364 bp, Unknown
  Bacterial polypeptide expressing nucleotide sequence isolated from the Sargasso Sea
caagagcagttatttaaagaaatatatcaaaatagtggttcagaactattagttttagcgcgttacatgcaaatcttatcctcagacttcctaaatgaattggatggccagtgcattaatattcatcattcctttttacctggatttaaaggtgcgaaaccttatcaccaagcacatgaacgaggtgttaaaataattggggctacagctcattatgttaccgatgatctagatgaaggtcctattatcgagcaggatattcttagggtagatcatggcgcgtccccggaaagcatgcaggaaagtggatatgatattgaatctgctgttttattaagagctgtaagattatatgctgaaagaa

SEQ ID NO: 264572 - DNA, 595 bp, Unknown
  Bacterial polypeptide expressing nucleotide sequence isolated from the Sargasso Sea
acgaaagtggtattgcttgctaccaaagaagcacactgtttaggtggtgtattactaaagcaattcgaaaaagccttaaacatcgaagtattggctgtgattgccaactacgccgacttagcgccactggcggcaggctttggtgtaccatttcatgtggtatcgcacgaaggcttaaaccgtgccgagcatgatcaacaagtcggtgatttaattgccagctatcagcctgatattatcggccttgctaaatatatgcgtattttaagccctgaatttgtggcgcgctttgaaggtaagattattaatattcaccattcatttttgcctgcctttattggtgcaaagccttaccatcaggcgtttgagcgcggtgtaaaaattattggtgcgaccgctcactttgttaataatgagcttgatgaagggccgattattttacaagatgtgacgcatgtcagtcatgcggataccgcagaaatgatggcaaaaatgggtaaagatgtagagaaaacagtgttctgcaaagcgttgcagctcgcatctgaacataaactgtttatcaatggaaatcgaaccgtggtgttcgcttaag

SEQ ID NO: 264573 - DNA, 444 bp, Unknown
  Bacterial polypeptide expressing nucleotide sequence isolated from the Sargasso Sea
ttcattatttacctataaacaaagattcaaaaaaagaacaagaagataaaataattaaaatttataaagagacaggatcagagttaattattttagctagatatatgcaaatactttccgatgatatttgtaatcttgttgaggggaatgcaattaatatacatcattcttttttacccggattcaagggcgcaaaaccttaccatcaagctattagtagaggtgtaaagataattggtgcaactgcacattatgttactaaagacttagatgaagggcctataattgaacaagagactataagagtgaatcattcaatgagtgtcaataaacttatcgaaatgggtaaagatattgagtctactgtattgtcaaaagccattaagcttcattgtgaaaaaagaatatttttaaacgacaataaaactgtaatatttgaataat

SEQ ID NO: 264574 - DNA, 724 bp, Unknown
  Bacterial polypeptide expressing nucleotide sequence isolated from the Sargasso Sea
atggaagctaaaaaaataattttacaatttatatgtcctgataaggcaggtgttttatctgctgcaactcagttcttatttaaaagaaatgcttttatgacagaggtttcttcattcagtgataatgatactaaaaagtttttcagcaggattgcttttgagaatgaagatggttcaagttttaatattaatgatttggaaaaagaattttctacagaattaaaagaatttaatattgatggaagattttttgatgccgaacaaccttgcaaagcaattattgctgtaagtaaggttggtcattgtttaaatgatcttcttcatagatggaaaattggttctcttcctatagatattaaaggtgttatatctaatcatgaaacttctaaagatattgttgaatggaacaatattccctttcattatttaccaatttcaccagatactaaatcagaacaagagcagttatttaaagaaatttatcaaaatagtgattcagagctattagttttagcgcgttacatgcaaatcttatcctcagacttcctaaatgaattggatggccagtgcattaatattcatcattcctttttacctggatttaaaggtgcgaaaccttatcaccaagcacatgaacgaggtgttaaaataattggggctacagctcattatgttactgatgatttagatgaaggtcctattatcgagccaggatattcttagg

SEQ ID NO: 264575 - DNA, 852 bp, Unknown
  Bacterial polypeptide expressing nucleotide sequence isolated from the Sargasso Sea
aaaaaataatattacaatttatatgtcttgataaggcaggtgttttatctgctgcaactcagttcttatttaaaagaaatgcttttatgacagaggtttcttcattcagcgataatgatactaaaaagtttttcagtaggattgcttttgagaatgaagatggttcaagttttaatattcatgatttggaaaaagaattttctacagaattaaaagaatttaatattgatggaagattttttgatgctgaacagccatgtaaggcaattattgctgtaagtaaggttggtcattgcttaaatgatcttcttcatagatggaaaattgggtctcttcctatagatattaaaggtgtaatatctaatcatgaaacttctaaagatattgttgaatggaacaatattccctttcattatttaccaatttcaccggataccaaatcagaacaagagcagttatttaaagaaatatatcaaaatagtggatcagaactattagttttggcgcgttacatgcaaatcttatcctcagacttcctaaatgaattggatggccagtgcattaatattcatcattcctttttacctggatttaaaggtgcgaaaccttatcaccaagcacatgaacgaggtgttaaaataattggggctacagcgcattatgttaccgatgatctagatgaaggtcctattatcgagcaggatattctgagggtagatcatggcgcgtccccggaaagcatgcaggaaagtggatatgatattgaatctgctgttttattaagagctgtaagattatatgctgaaagaagaattttattaaacggcttaaagacagtagtatttaattaat

SEQ ID NO: 264576 - DNA, 544 bp, Unknown
  Bacterial polypeptide expressing nucleotide sequence isolated from the Sargasso Sea
attttaatgaaggtctatgacggctcattaaaactggatatagctgcagtagtggcaaatcatccggatttacaaagtctggccgaaaaatttgatattccttaccattttgtcagtcatatcaacttaagtcgtgaacagcatgaggcggcactgcagcacgtgatagacccttatcagccggattatttagtgctggctaagtttatgcgggtgttaagcccggcttttgtcgcgcattacaaagaacgtattatcaatatccaccatagctttttgcctgcctttatcggtgctaatccttatcatcaggcgcataaaagaggtgtcaaaattattggtgccacagcacattttgtcactgacgatctggatgagggccctattattaaacagctagtgactcctgtggatcatacctacagcgctatggatatggtcaaagccggtcgggatgttgaaaaaaatgtgctgagtaaagccttgcaactggtgctggaagaccgggtttttgtgcatggcaataaaacagtgatcctgtaaa

SEQ ID NO: 264577 - DNA, 862 bp, Unknown
  Bacterial polypeptide expressing nucleotide sequence isolated from the Sargasso Sea
tatggaagctaaaaaaataattttacaatttatatgtcctgataaggcaggtgttttatctgccgcaactcagttcttatttaaaagaaatgcttttatgacagaggtttcttcattcagtgataatgatactaaaaagtttttcagtaggattgcttttgagaatgaagatggttcaagttttaatattaatgatttggaaaaagaattttctacagaattaaaagaatttaatattgatggaagattttttgatgctgaacagccatgtaaagcaattattgctgtaagtaaggttggtcattgcttgaatgatcttcttcatagatggaaaattgggtctcttcctatagatattaaaggtgtaatatctaatcatgaaacttctaaagatattgttgaatggaacaatattccctttcattatttaccaatttcaccagatacaaaatcagaacaagagcagttatttaaagaaatatatcaaaatagtggttcagaactattagttttagcgcgttacatgcaaatcttatcctcagacttcctaaatgaattggatggccagtgcattaatattcatcactcctttttacctggatttaaaggtgcgaaaccttatcaccaagcacatgaacgaggtgttaaaataattggggctacagctcattatgttaccgatgatctagatgaaggtcctattatcgagcaggatattcttagggtagatcatggcgcgtccccggaaagcatgcaggaaagtggatatgatattgaatctgctgttttattaagagctgtaagattatatgctgaaagaagaattttattaaacggcttaaagacagtagtatttaattaa

SEQ ID NO: 264578 - DNA, 314 bp, Unknown
  Bacterial polypeptide expressing nucleotide sequence isolated from the Sargasso Sea
aaatgaattggatggccagtgcattaatattcaccattcttttttaccaggatttaaaggtgcgaaaccttatcaccaagcacatgaacgaggtgttaaaataattggtgctacagcacattatgtaactgatgatttagatgaaggccctattatcgagcaggatattcttagggtagatcatggagcgtccccggaaagcatgcaggaaagcggatatgatattgaatctgctgttttattaagagctgtaagattatacgctgaaagaagaattttattaaacggcttaaagacagtaatatttaattgat

SEQ ID NO: 264579 - DNA, 856 bp, Unknown
  Bacterial polypeptide expressing nucleotide sequence isolated from the Sargasso Sea
agcaaaaaaaataattttacaatttatatgtcctgataaggcaggtgttttatctgccgctacacagtttttatttaaaagaaatgcttttatgactgaggtttcttcatttagtgataatgatactaaaaagtttttcagtagaattgcttttgagaacgaagatggctcaggttttaatattaatgatttggaaaaagaattttctatagaattaaaagaatttaatattgaaggaagatttttcgatgctgaacagccatgtaaaacaattattgcagtgagtaaggttggtcattgtttaaatgatcttcttcatagatggaaaattgggtctcttcctatagatattaaaggtgtaatatctaatcatgaaacttctaaagatattgttgaatggaacaatatcccttttcattatttaccaatttcaccggataccaaatcagaacaagagcagttatttaaagaaatatatcaaaatagtggttcagaactattagttttggctcgttacatgcaaatattatcttcagacttcctaaatgaattggatggtcaatgcattaatattcaccattcttttttaccaggatttaaaggtgcaaaaccctatcatcaagcacatgaaaggggcgtcaaaataattggtgctacagcacattatgtaactgatgacctagatgaaggtcctattatcgagcaggacattctgagggtagatcatggagcatcccctgaaagtatgcaagagagtggatatgatattgaatctgctgttttgttaagagctgtaagactatatgctgaaagaagaattcttcttaatggattaaagacagtggtatttagctaa

SEQ ID NO: 264580 - DNA, 895 bp, Unknown
  Bacterial polypeptide expressing nucleotide sequence isolated from the Sargasso Sea
actggtttgtaggaagagctttgggaatttaattatggaagctaaaaaaataatattacaatttatatgtcctgataaggcaggtgttttatctgctgcaactcagttcttatttaaaagaaatgcttttatgacagaggtttcttcattcagcgataatgatactaaaaagtttttcagtaggattgcttttgagaatgaagatggttcaagttttaatattaatgatttggaaaaagaattttctacagaattaaaagaatttaatattgatggaaggttttttgatgctgaacagccatgtaaggcaattattgctgtaagtaaggttggtcattgtttaaatgatcttcttcatagatggaaaattggttctcttcctatagatattaaaggtgtaatatctaatcatgaaatttctaaagatattgttgaatggaataatattccttttcattatttaccaatttcaccagatactaaatcagaacaagagcagttatttaaagaaatttatcaaaatagtgattcagagctattagttttggctcgttatatgcaaatcttatcttcagacttcctaaatgaattggatggtcagtgcattaatattcatcattcctttttacctggatttaaaggtgcaaagccttatcatcaagcacatgaacgaggtgttaaaataattggggctacagctcattatgttaccgatgatttagatgaaggtcctattatcgagcaggatattcttagggtagatcatggtgcgtccccggaaagcatgcaggaaagtggatatgatattgaatctgctgttttattgagagctgtaagattatatgctgaaagaagaattttattaaacggcttaaagactgtaatatttaattga

SEQ ID NO: 264581 - DNA, 616 bp, Unknown
  Bacterial polypeptide expressing nucleotide sequence isolated from the Sargasso Sea
atggaaaagaaaatactgctgacggactgtccggacgccaagggcctcatcgccaagatcaccaacatctgctacaagcaccagctcaacatcaacaagaacgacgagttcgtggatcacgaaaacggccgcttcttcatgcgcaccgagctggagggacgcttcaacgacgagaccctgctggccgacctcgatgatgccctgcccgccggtgcccagcgccgcctggtcaaggccggcaagaagcgcatcgtcatcctggtaaccaaggagacccactgcctcggcgacatcctgatgaagaactacgccggtgcgctggacatggacatagtcgcggtgatcggcaactacgacaccctcgccgagctgaccggcaagttcgacattccgttccacaccgtcagccatgaggatctgagccgtaccgagcatgaagagcaggtgcgcgccatcatcgacggctaccagcccgactacgtggtgctggccaagtacatgcgggtgctgaccccgagtttcgtcgaagcctatccgcgcaagatcatcaacatccaccactccttcctgcccgccttcatcggtgcccgcccttatcgccaggccttcgatcgcg

SEQ ID NO: 264582 - DNA, 817 bp, Unknown
  Bacterial polypeptide expressing nucleotide sequence isolated from the Sargasso Sea
atgacagattgcgccgatgcccaagggcttatcgccaaaatcaccagtgtttgcttcaatcatcagcttaacatcattaaaaacagtgagtttgtggataatgctcaggggcgattttttatgcgtactgagctcgaagggcactttaatagcgagcaattactgcaggacctgcgggaggtgttacctgcgcaaaatcatatgaccttggtcagcgcgggcaagaagcgcatcgtcgtattagtcaccaaagaggcccattgtttgggcgatttgctgatgaaggcctactatggcggcttgaatgttgagatagcagccgtggtgggcaaccatgatgtgttaagggaattggttgaaaaatttgatattccttttcacctcgtgagtcacgaagggctcgacagaattcagcatgagcaggcgttattggccgctgtgtcgcaatatgcgcccgattatctggtgctcgctaaatatatgcgggtgctgacgccggattttgtcgccgaatatccaaaccgtatcatcaatatccatcattcgttcttaccagcatttatcggtgccgcaccttaccgccaagcctgggagcgaggggtgaaaatcatcggcgcgacggcgcattttgtgaataattgcctcgatgaagggccgatcattaagcaggatgtgatccccgtcgatcacagttacagcgcgctcgaaatggccaaagcggggcgtgatgtcgaaaaaagcgttctcagtaaagcgttacagctagtgctaaatgagcaagtagtggtttacggcaataaaaccatagtgttttaac

SEQ ID NO: 264583 - DNA, 817 bp, Unknown
  Bacterial polypeptide expressing nucleotide sequence isolated from the Sargasso Sea
gatgacagattgcgccgatgcccaagggcttatcgccaaaatcaccagtgtttgctttaaccatcagcttaacatcatcaaaaacagtgaatttgtggataatgcgcagggacgattttttatgcgcactgagcttgaggggcactttaacagcgagcaattattgcaggatctgcgtcaagtattacccgttccaaatcatatgaccttagtgagtgcgggtaagaaacgcattgttatattagtcactaaagaagcgcattgtctcggcgacctcttgatgaaagcgtattatggcggtttaaatgttgagattgcagccgtagtgggcaaccacgatgtacttagagaacttgttgaaaagtttgatattccttttcatctcgtcagccacgaaggactcgacagaattcaacatgagcaggcgttattggccgcggtgtcgcaatacgcgccagactatctggtgcttgccaaatatatgcgggtgctgacgccggattttgttgccgaatatccaaaccgtatcatcaatatccatcactctttcttaccagcctttattggtgcagctccttaccgccaagcctgggaacgtggggttaaaattatcggtgcgacggcgcattttgtgaacaactgcctcgatgaagggccgattatcaaacaggatgtgatccccgttgatcatagttacagcgcactcgaaatggccaaagcggggcgagacgttgaaaaaagtgttctcagcaaggcgctgcaattagtgttaaatgagcaagtggtggtttacggcaataaaaccatagtgttttag

SEQ ID NO: 264584 - DNA, 770 bp, Unknown
  Bacterial polypeptide expressing nucleotide sequence isolated from the Sargasso Sea
atacatttcaaagctaaatatttatgatcttgatcaatattttaatactagacttccaagagatcacgtgaagaaagacagcgattattttgcatctcaatctttatggaatttaataaatcacaaaagaatcttggatgtggttgaaaaattattagggccagagatactttcaaatccagttcaaaatacaagaattaaacaacctgaaaataaattacctaaacattctgttcacgatggtctctcaggccgaacgccatggcatcaggatgcagcagtattatcatctttgggacaaagattaacagatatggttactgtttggatcccatttactaaaactacaaaaaaaaatggatgtatgattacagtcaaagaaattaataaattgggactattgaatcatgtatcgggatatagaggtcaggtcgaaataaaagatagtaaactacttgataattacaaaccagtttttctagaagctaatgtcggtgatattattattttgcacaaacattccattcattgttcattgcctaatagatctaatgattttagaattagcgctgatttaagatacaatagagctggaaccccatctggtaggaaacctttgcccaatttttatgtaagaagtaaaaataaaaaaaatattacaatccacaactataagcaatggattgctttgtgggaaaaagcaaagaataaatgtattccaagaaagtatgcatttaaatacccactcccaacatttagaaatagtaaaa

SEQ ID NO: 264585 - DNA, 463 bp, Unknown
  Bacterial polypeptide expressing nucleotide sequence isolated from the Sargasso Sea
catgccgttgccgacgctgaaagaccagtttgccgccttgatcgccgcgccttcggtcagttgcacccagcccgcgctggaccagtccaaccgccaggtcatcgacctgttggccggctggctgggcgacctgggtttcaagtgcgacatccagcaggtcagccccggcaagttcaacctgctggccagccgtggcagcggcccgggcggcctggtgctggccgggcacagcgacaccgtaccttacgacgaacaactgtggaccagcgacccgctgaagctgaccgaggtcgatggccgctgggtcggcctgggcagctgcgacatgaagggcttctttgccctggtcatcgaagccgtcatcccgttgctggagcacgacttcaagcagccattgctgattctggccacttgcgacgaagaaagctccatgtccggcgcccgcgccctggccgaagccggc

SEQ ID NO: 264586 - DNA, 838 bp, Unknown
  Bacterial polypeptide expressing nucleotide sequence isolated from the Sargasso Sea
tatgagagaaaaggtttttaaatataactttaaaaaaaaatatacctatatttcaaaattaaatattaatgatcttgaccaatattttaataccaggctacctagagatcatgttaaaaaagatagtgattactttgcatcgcaatctttatggaacttaataaatcataagaaaattttggatgtagttgaaaaattactaggatctgaaatcctctccaatcctgttcaaaacacaagaataaaacaaccagaaagtaaattacctaaacactctgttcatgatggtctttcagggagaactccttggcaccaagatgcagcagtcttatcatctattggacaaagattgacagatatggtgaccgtttggataccatttacaaaaactaccaaaaataatggatgtatgattactattaaagaaattaacaaattaggtttattaaatcatgtatctggatatagaggtcaagtcgaaataaaagatagtaaattgcttgataaatttaagccagttttccttgaagcgaatgtgggtgatataataattttacacaaacattccattcattgttcattacctaatagatctaatgattttagaattagtgctgacttaagatataacagagctgggactccatcaggtagaaagcctctaccaaatttttacgtgagaagtagaaataaaaaaaatattactattcataattataagcaatggatctctttatgggagaaagctaaaaataaatgtataccaagaaagtatgcatttaaatatccacttccaacatttaaaaatagtaaaagagatcttgctagattaatataa

SEQ ID NO: 264587 - DNA, 553 bp, Unknown
  Bacterial polypeptide expressing nucleotide sequence isolated from the Sargasso Sea
actgacgccaacaagccgggaggcgaggatggtgcacacagacagtaaagccagcgtgccgggcatccgggagatgctggcccgattgatttcccagccatcgatcagcagtgcgtcgccggactgggaccacagcaacgaggcggtggttcgcaccctggcggaatggctggaagcgctgggctttgccgtcgagatcctggatgtgccgggtatgcccgggaaatacaacctggtggctagcctgggcagcggccccggcggcctggtgctgtccggccacacggataccgtgccctttgacgacaaacgctggcacagcgaccccttcaccctgaccgaaaaagacgatcgctggtatggcctgggtacctgcgatatgaaagggtttttcccgctcgccatcgaggcggcgaaagcctttatcgaccagcccctgaagcagcccctgattatccttgccaccgccgacgaagaaagctccatgaacggggcccgggcgctggccgaggcgggcaagcccagggcccgctatgccgtgattggcgaaccc

SEQ ID NO: 264588 - DNA, 747 bp, Unknown
  Bacterial polypeptide expressing nucleotide sequence isolated from the Sargasso Sea
caactaacacagccaattttaatacttgccactgcagatgaagaaaccaccatggcaggcgcacagcaaatttgcaaacatcctaacttaaagccggcacgctgtattattggcgaacccactgatatgacaccagtatttacacacaaagggcatatgagtactgcaataagagttgtcggtcgttctggccatagctccgatcccgaacgtggtcttaatgccattgaagttatgcataaagtgacttcaaaattactgatcttaaaagagcaactaaagaataagtattcactaagccactttgaaataccttatcctactttaaatttgggtaatattcatggtggtgacaacgcaaatagaatatgtgggtgttgtgaaatgcatattgatatgcgcccattgccagggttgagcgtacaagagctacaagcactgctgctagatgcaacaaaagacataaacgagcaatacccaaactcagtaagtgttattgacctacatgacccaatacccgcatttactggcagaaccgacagcgcgctagttcaactagctgaaaaggtagcgggccaaaaagccattgctgttaattactgcacagaagcaccttttattcagcaactgggttgtgaaaccatagttatgggaccaggttctattaatcaggcgcatcaacctgacgaatttttagcaatggaaaaaataaagccttcacagcacatcattagcaatattataaaa

SEQ ID NO: 264589 - DNA, 856 bp, Unknown
  Bacterial polypeptide expressing nucleotide sequence isolated from the Sargasso Sea
gcccgtcatcgagctgctcgccgcctggctgggtgatctgggttttgcctgcgaaacccagcagatcgctccgggcaaattcaacctgctcgccagctatggctccggtcccggcggtctggtgctggccgggcacagcgataccgtgcccttcgatgccgcgctgtggcagaccgacccactcaagttgaccgaggtcggcgaccgctgggtgggcctcggcagttgcgacatgaagggcttcttcgctctggccatcgaagccgtgcggccgctgctcgatcagcagttccagcaaccgctgctgatccttgctacttgtgatgaagagagctccatggccggcgcccgcgccctggccgaggccggccggccgcttggccgggcggcggtgattggcgagccgaccggcctcaagcccatccgcctgcacaagggcgtgatgatggagcgcatcgatattctcggccagagcggccattcctccgacccggcgcttggccgcagtgcgctggaggccatgcaggacgtgatgggcgagttgcgcggcctgcgcgcgcagtggcagcgcgaattcaacaacccgcagttcggcgtgccgcaaccgacgctgaaccttggctgcatccatggcggcgataatcccaaccgcatctgtggccagtgcgcgctggagttcgacctgcgcccgttgccgggcatggaccccgagcaactgcgtgaggcgattcgcggcaagttgcagccgttggcgctcaaacaccaggtgcgcatcgactacggcccgctgttcccggccgtgccgcccttcgagcaatctgccgatgccgagctggtgcgcctggccgagcgtctg

SEQ ID NO: 264590 - DNA, 794 bp, Unknown
  Bacterial polypeptide expressing nucleotide sequence isolated from the Sargasso Sea
catgaaaggtttttttgcattagtgcttgaagcgttaaaagagatgccactggatcaatttaaacgtccactgaccatttttgccagtgcagacgaagaaaccaccatgagtggagccaaagcctttgccgactcaaaaacagtagcaccagattatgccattataggtgagcccaccagtttaaaacctgtttatatgcacaagggccatttagctcaagggatccgtgttatcggtcgcagtggccactcgtctgaccctgcccgcggcttaaatgccattgaagtgatgcataaagtcattagccaattaatgaaacttaaacagcatttaagcgaaaactatcgtgaagatgcgtttacagtaccctatccaaccatgaactttggtcatatacatggtggcgatgcggccaaccgtatttgtggttgctgtgatttacacttagatattcgcccattaccaggcatggaactggctgagctcgaactcatggtactgaactacttatctgacatcagtaaagaataccctggcagtattagtgtcagtactttatacccaggcgctgaatcatttgctggcaaagcggacaatccttggaccaaactggtcgcagaactgtctggtaatgaggctgaagtggttaactactctactgaagcaccgtacattaacaaactaggctgtcaaacgttagtgctagggccagggagcattaaccaagcccaccagccagatgagtttattggcctagaatacctaacgccaactgtagaattaatcaaaaaaa

SEQ ID NO: 264591 - DNA, 769 bp, Unknown
  Bacterial polypeptide expressing nucleotide sequence isolated from the Sargasso Sea
atgaatattgatactatcatgacccgaggtgtgtcaacaatgaaaaacaatttaccgccatttatcgagatttaccgcgctctgattgccacgccatcgatcagtgccaccgaagaagcgctcgatcaaagcaatgcaggtttaatcactctgctggcgggctggtttaaagatttaggcttcaatgtggaggtccaaccggttcccgatacgcgaaataaattcaatatgctggcgagcattggacagggcgctggcggcctgttgttggcgggccataccgataccgtaccctttgacgacggacgctggacccgcgatccattcactctaaccgagcatgacaataagctgtatggtttgggtacggcggatatgaaaggcttcttcgcctttatcctcgacgcgttgcgtgatgtcgacgtcacgaaactgaaaaaacccctgtacattctggccactgctgacgaagagaccagcatggcgggagctcgctacttctctgaaactaccgctctgcgcccggactgcgcgatcattggcgaacccacatccctgcaaccggtgcgcgcgcacaaaggccatatctctaatgcgatacgcattctgggacagtcgggtcattcaagcgatccggcgcgtggcgttaatgcgattgaactgatgcatgatgccatcggccatatcatgcatctgcgcgatgacctgaaagcgcgctatcaccatgatgcctttaccgtcccgtatccaacgttaaatttgggccaca

SEQ ID NO: 264592 - DNA, 1136 bp, Unknown
  Bacterial polypeptide expressing nucleotide sequence isolated from the Sargasso Sea
ggattttttttcactctacaagaatattattgcgattccgtccatcagcagcacggatccccgctgggatcagagcaatgaggcggtgatccggctgctggccgactggttcggtcagctcggttttcagtgcgaggtgaccgccctgcccgatctgccgggcaagttcaatctggtggcgacgataggtcagggcgaaggcggtctgttgctggcgggccacaccgatacggtaccgttcgacgagggcgcctggcgcaaggatcccttcaaggtgaccgaagagggcaaccgcctctatggcctcggtaccatcgatatgaagggcttcttcgcctttatcgtcgaggcgctcaaggagatcgacctcaagacgctcaacaaaccgctgcgcattctggccaccgccgatgaagagaccaccatggcgggggcccgcgccatcgccgccgcagctgagctgaaacccgactacgcggtgattggcgagccgaccgggctggtaccggtggtggcccacaaggggcacatgtcggaagccatccgcattaccggcaagagcggtcacagctcggatcccgccaacggcgtcaacgcgctggagatcatgcaccaggccatgggccaggtgctcaagctgcagcacagcctgaaggagaagtacgccgaccacagattcgccgtgccgcagccgaccctgaacctcggctacatccaggggggtgacagcccgaaccgcatctgcggttgctgcgaactgcacatcgacatgcgccccaccccgcaggtgggccccgacgagctgatgggcatgctcaaagaggcgctctcccccatcgagatccaccagccaggctgcctgcacctgcagcacctgcacgagccgatccccgcctacgcctgcgccgatgactccgagctggtgcgcgaggccgagcgggcaagcgggcgggccgccgaatccgtgaactattgcaccgaggcccccttcatccagcagctcggttgtgaaaccatagtgctgggccccggccacatcgcccaggcccaccagccggacgaatatctggatctgtcgttcgtcaaaccgaccacccgcgtattgcagcacctgatccgccgtttctgtctctgaa

SEQ ID NO: 264593 - DNA, 775 bp, Unknown
  Bacterial polypeptide expressing nucleotide sequence isolated from the Sargasso Sea
tatgaaaaaggacacttataaaaacaaggccacttttctagaaaaattaaaaaccaagtctaaacgagaagcaaatttgtttttttctttgtgtgaagacgatagtgaaatagtaaacacaaaaaaattcaaggaagttttattaaactcaggtttaaaagccaatgataaaagattatataacctttttcagaatttagacgctcatggtgataaaattgtttttgaagactttattgatattatccgaagttcagaattaattgttgaaaaatctttaagaggtgaattatcaataccagattttagctattttgcaaaaaatttggatagtatgtttgatgaagtaaaaaaaattaaaacaggggaattagcatcatacatcccaccactagctgaagttgatccagatcaatttggtgttgcaattgtaacagcagatggtcaaatatatcaaaagggtgatagtaatgttgatttttcaattcaatctatgtgcaaaccttttaactattgttttgcaatggaaagattgggtttagaaaaagttcatcaacatgttggtcaagaaccatctggtagacaattcgatgatctaactttattagcaaaaacagctataggtgacctgcaaggagagcatgctaaagataatcgaaacggaaaatctagtcgcgttccttttaacccaatggtcaacgctggtgcgataatgacagctggtctaataggtcctgaagagtctcacagtcaaagattaagatacataagacaa

SEQ ID NO: 264594 - DNA, 703 bp, Unknown
  Bacterial polypeptide expressing nucleotide sequence isolated from the Sargasso Sea
tgacggcgacctgcctgctaaaagtggtgttggttcaagctcagcgtttgtagtaggtctactaaatgcaatttggaaattaaaaaatatacactcaacaaaacataatctagccaaaaaaagtatttttcttgagactaaagttttaaaagaggttgtggggtcgcaagatcaaatagcatgtgcgtatggaggtttcaataatattatttttaaaaaggatggatcattcaaggttaataaaattaaaattaataagaaaagaaagaatcaattggaaaataatttatttttagttttctccagaattcaaagaacagctgaaattgttgctaaaagttttgttcaaaacctaacgaaaaataaaatttatgaaatggaaaaaattaattcgttagtaaaagatgcaaaaaatatattaaaaaatcaggatttagataactttggaaatttattgaatgaaagctgggaatttaaaaaaaggttaagcaatatggtttctaacaataaaattgaccaaatatacaaatatgcaattgaatctggagctacaggaggtaagttgcttggtgcaggcggtgggggattttttgttttttatgtaaaacaaaatgcccataaaaaatttattactaaaatgaaaaaaagcttaattataccttttaaatttgaaactcaaggtagtcaaacaaagataatttaa

SEQ ID NO: 264595 - DNA, 407 bp, Unknown
  Bacterial polypeptide expressing nucleotide sequence isolated from the Sargasso Sea
tatgtttgatgaggccaaaaaagttgcatcaggtgaattagcttcgtatattcctcctctagcaaatgttgatccagaccaatttggcgtcgcaattgttacaacagatggtcaaatataccaaaagggtgacagtgaggttgatttttcaattcaatctatgtgtaaaccttttaattattgctttgcaatggaaaaattaggattagaaaaagttcaccaacatgttggtcaagaaccctctgggcgacaatttgacgatcttaccctattagctaaaactgctgtcggtcaacttaaccgaataccttttaatccaatggtcaacgctggcgctataatgacagcaggtcttataggtccagaggagtcacacagtcaaagattgagatatataagacaacaat

SEQ ID NO: 264596 - DNA, 475 bp, Unknown
  Bacterial polypeptide expressing nucleotide sequence isolated from the Sargasso Sea
ttgcgaggtgaactatcaataccagactttagctactttgcaaaaaatttagacaatatgtttgatgaggtaaaaaaaattaaatcaggagaattggcctcatatatcccaccactagccaatgttgatccagaccaattcggtgttgctattgttacaacagatggtcaaatatatcaaaggggcgatagtgaagctgatttttcaattcaatcgatgtgcaagccctttaattactgctttgcaatggaaaaattaggactggataaagttcatcaacatgttggtcaagaaccttcaggaagacaatttgatgatcttactctattagctagatctgctatcggtcaacttaatcgtataccttttaatccaatggtcaacgccggcgctataatgacagcaggtctcataagcccagaggactcccacagtcaaagattgagatatataagacaacaattggaagattaat

SEQ ID NO: 264597 - DNA, 735 bp, Unknown
  Bacterial polypeptide expressing nucleotide sequence isolated from the Sargasso Sea
ggtttcatttctacatttacaattgatagtgatggtaacatcactgcagtaaggacgcaatctgaaggaaacaatttagagcatgatactaatgccggatcgttcaattcactagtgcaggtagattctgatacgtatgctttggcgtatgcaggtacaggtgataatggtttcatctccacgtttacaattgacagtgatggggtcattactccaataagaatacaagatcatacaaaccatgcttcagcttctgctaacttattgcatgataacagccgaggaaagtggaactctctagtgcaggtagattcagacacgtatgctttggcgtatgaaggtcaggatagagacggtttcatctccacgtttacaatttcatctgatggtactagtattgttagagagaatactttagagcatgatactaatgccgcatcgttcaattcactagtgcaggtagattcagacacgtatgctttggcttatacaagttgggatgaagacggtttcatctccacgtttacaattgacagtgatggggtcattacagctgttaaaacacaatctgaaaataataatctagagtatgatgaagaaagaggaatatacaattcactagtgcaggtagattcagacacgtatgctttggcttatacaagaaatgatgcggatggttatatcaccacgtttacaatttcatctgatggcagctccattacggaagtacccgga

SEQ ID NO: 264598 - DNA, 634 bp, Unknown
  Bacterial polypeptide expressing nucleotide sequence isolated from the Sargasso Sea
attgcttgcagaaaaagctcttcgtggagaactagcgataccagactttagagacttttcaagaaacttagataaaatatatgatgaagttcttccaaatagatctggtgacttagctcgatatataccaccacttgctgaagtagatccagaacaatttggaattgctgtggttactactgatggacaaatttatcaacgtggtgatacaaatgtagacttttcaattcaatcaatgtgtaagcctttcaactattcgtttgctattgaaaatcttggattggaaaaagttaatcgacatgttggggtagagccttcaggtcgccagtttgatgatctgacactcatggtaaagggtatgggtggaagtagtttatctcctaataataaagttccttttaatccaatggtaaatgcaggcgcaataatgacgacaggtttaattaatcctaaagactcaacaaatgatcggctccagtatattagagaacaatttggtcgaataattggttggaacgaagatgaaacttcgggtgttaatttacctagatttaataagacaatggctcgccaggaaaatttcaaaggctacaataatatagctacaggtttcttgctaatggccaccaggtaa

SEQ ID NO: 264599 - DNA, 277 bp, Unknown
  Bacterial polypeptide expressing nucleotide sequence isolated from the Sargasso Sea
aatgctgtcgttacttcaagatatatacgttgaagttgaacctatgttgggtatgggcaaggttgcagattacatacccgccctggctacggtaaacccgaggcagtttggcatttcaatttgtgatacccaaggtcatataacctctattggcgatgccagcgtgcctttctcaattcagagtatttcaaaggtgtttaatttggtgttatccattaaccactatggggaaactatgtgggatagggtagggtgcgagccatccggtttgcctttt

SEQ ID NO: 264600 - DNA, 328 bp, Unknown
  Bacterial polypeptide expressing nucleotide sequence isolated from the Sargasso Sea
aatgaactacgcatccatcctcgaacagattcatcgcgatcttcagccgtatctgggcaccggcaaggtcgccgattacattcccgaactcgcgaacgtccctgccgggagtttcggcatggcgatcgtcacggcatcgggtgacgtattccgcaccggcgctgccgacacgcgcttttccattcagagtatttccaaactattcgcctgcacgctcgcgttccggctgcttggcgacgaactttggcaacgcgtcgggcgcgagccctccggcaacgccttcaattcgctggtccaactcgaggccgaacacggcaagccacgcaat

SEQ ID NO: 264601 - DNA, 794 bp, Unknown
  Bacterial polypeptide expressing nucleotide sequence isolated from the Sargasso Sea
cgggttgcctgcaaagagcggagttggaggcggtataacagcggtacttccctctcagttcggccttggcgtattttcgccacctcttgataaattaggaaacagtgttcggggtataaaagtttgccaattattatccgaatactttcatttgcatgttttggaaacagaggatgatgtaaatcagaatataccgattacctatgatttaagtgaaataagatcatctcgaatgcgaggtcaatccgataataaaactttagaagaatttggagcacgcgtgagtgtatttgaactaagcggcgtaattaatttcataggaagtaattttattacgcgttcggtagctgaagcagatttccaagactttattgtattatcatttatcagagttaatcgtctcacgagggcttcgattgaagtatttcgattattttttgatcagattttgtctaaaagtcagcgagtaatcgtagttgataaaaaagttgttaaagatcttcccaaaggtctatttggagaaatagctgatttaataaaacaaaattgccaatgttttgaaaacctagatcaagctatcgaatggatagagagccaattaatcgctgaatacggagaatgccaaaacaattctgaagatttttcaccattatctgatcaaccacttcttaaagggctctcaaacttagatttggaaacacttcaaaaaaatgtgactttaactgaatatgagagtggctccaaaattattcagctgaaggaaaaggcagacggcatatattttctacagtctg

SEQ ID NO: 264602 - DNA, 760 bp, Unknown
  Bacterial polypeptide expressing nucleotide sequence isolated from the Sargasso Sea
aatccgatggttaacgctggtgccataatgactgcaggtcttataggtacagaagagtcacacagtcaaagattaagatacataagacaacagtttggaagattgataggttggtcaccaaaagatgaatttagcgcagaattaccaagatttaataaggacatggcacggcaagaaaactttacaggatataacaacattgcaatgggttatcttttaatggctacaggaaatttacctcacactcaaactaagctacataatgacatacatcctgatgaagatgaatttgatttttatacagaacctgctgttactgaagcacttaaactttattttagcatatgttcattagagatgacttctgtagaattcgcaactgctgctgcaacacttgcaaatagtggagtgtgtcctattacacaagatcgagtgcttagccagaaaactgtcagaaactgtttgcccgtgctgcaaactagtggaatgtataatgctagcggtaccttctttcagcaagtgggattaccagcaaaaagcggagtaggcggaggagttttgttgatagttccacgactaatgggaatatgtattttttctcctcgtctagataaacaaggcaatagcgttcgtggattagaaatggcaaaaagacttacttcaaaatatttagttcatatttttgatggtacaatgactgatactagtcgattagatccaaaattacctattgcacgatggcttgcaaatagttgtggag

SEQ ID NO: 264603 - DNA, 835 bp, Unknown
  Bacterial polypeptide expressing nucleotide sequence isolated from the Sargasso Sea
atgtccgtaatggtaagctctggtatgtatgactattctggcgagtggacatacagggttggtttacctgcaaagagtggcgttgggggtgggataacagcggtacttccgtctcaattcggccttggtgtattttcgccgccccttgataaattgggtaatagtgttcggggtatcaaagtttgccaactattatccgagcactttcatttacatattctggagacggaggatgacgtaactcaaaatattcccattacatatgatctgaaagaaattaggtcatcgcgaacgcgatgtagatccgataacgaaactttagaagatttcggatcacgcgttagtgtattggaattaagtggtgtaattaatttcataggaggtaattttatcacccgttcggttgctgaagaagataataaagattttgttgtattatcatttatacgagtgagtcgtcttactagggcttcgattgaagtgtttagattattttttgagaagcttctatctaaaagtcagcgaatggtcgttgttgagaaagaagatttaaaagatgactctaaaggactatttggcgacattactgaattaatccatcagcattgtccatgtttcaaaaatctcgataaagcgcttgaatgggtcgaagatcaattgattgctcaatacggaacatgctcaaatcatcctggagatttgttaccaatagcggaacaaccactacttaaagatcttccaaactcagatttagaactacttcaacagaatctggtttcaactgaacatgagagtggctccaaaatcattcaactgcatgacaaggcagatggta

SEQ ID NO: 264604 - DNA, 820 bp, Unknown
  Bacterial polypeptide expressing nucleotide sequence isolated from the Sargasso Sea
aatgcggtttacttatcagagagggcgactgccgacagaaactttgctctaggttatttcatgagggaaaataattcttttccaacgaatactaagcttattgagacgttggagttttattttcagtgctgctcaattgagttaacagcagaatcgatggcgactgtttctgcaactcttgccaatagtgggatctgtcccattactcaagacaaactttttaaccctgataccgttaagaactgcctctcccttatgtcctcatgtggtatgtatgacttttcaggggagtttgcttttactatcggactgcccgcaaaaagtggcgtaggaggcggtttattgattgttattccaaaccttatgggaatttgtgtttggtctcctccacttgatgagatgggtaactcagttcgaggaatcgacttttgtgaaaggcttgtagagaatttcaactttcacaactttgacagtcttattgctgggcactcaaagaaaatggatccaagagttaatctaaatcagatgtctagtgatgatattcagtctctattgtgggctgcttcaaaaggttctattagagaaattcaggcttttcttgcaagaggctttgatataaatcaagcagactatgatggaagaacagcacttcatctagcttcttctgaaggcaaaaaagacatggttgagtatttattgggtcactcagctgatcctcaagcaaaggaccgttggggaggtactcccttatctgatgcagagagggaaggtcacaaggaggttgaagccttgttaaaaaagtttaagttaccaaaaaagt

SEQ ID NO: 264605 - DNA, 850 bp, Unknown
  Bacterial polypeptide expressing nucleotide sequence isolated from the Sargasso Sea
ttggatacttgtggcaaagaaatttattatgatgattttatcgaaattattagttcagcaggactactagttgagaaagctttacgtggagaattagctttacctgactttagtgatttttctaaaaacgttgatgaaatgtttaaagaagttgctaaaaataaatcaggtgaacttgcatcttatatcccaccacttgcaaaagttgacccagatcagtttggtatttctattgttactgtagatggacaagtttatcaacgaggtgattttaatgaggatttttctattcagtcaatctgcaaaccctttaattattgttttgctttagaggaattaggtttagatgaagttcattcgcatgttggtcaggaaccatcaggccgaaagtttaatgatctaactttactagttcgttctacagaaagttttcaaaataattcaattaatataccttttaatccaatgatcaatgcaggggctataatgacagcaggtcttataaattcagataagacttacgagaagagatttaattttataaaaaatgaatttgctaagttaataggatggactgctaaaggcaagtttgactcaaaattccctagatttaataaagatgttgcacgtgaagaaaattttacaggttttaataacatggcaattggatatttgttaatggctacaggtaatcttcctaataaagaaaaaaaacataaaaagaaagtaaatcaaaagcatgataattttgatttttataatgatccgtcagtaacagaggctttgaaactatattttagtgtatgctctttagaaatgacagcaactgaagttgctatagcagcagcaa

SEQ ID NO: 264606 - DNA, 952 bp, Unknown
  Bacterial polypeptide expressing nucleotide sequence isolated from the Sargasso Sea
tatgtgtaaaccttttaattattgctttgcaatggaaaaattaggattagaaaaagttcaccaacatgtcggtcaagaaccctctggtagacaatttgatgatctaactctattagccagaactgcaatgggcaacatgcaaggagaatatgctaaagatgatcttgaaggaaagtttagtcgtgtgcctttcaacccaatggttaatgctggcgctataatgacagcaggtcttataggtccagaggagtcacacagtcaaagattgagatatataagacaacaatttggaagactaatagggtggtctccaaaaaatgaatttagtgctgagttacccagatttaataaaaatatggcacgacaggaaaattttacaggatataataatattgccatggggtatcttttgatggccacaggtaatttacctcacactaaaactgagcttcataatgatatccatcctgatgaagttgaatttgatttttattctgaacctgcagtaacagaagctcttaaactttattttagcatatgttcattagagatgtcctcagtaaattttgcaactgctgctgcaacacttgccaatagtggagtttgtcctgttacccaagaacgtgtgcttaatcaaaagacagtaaaaaactgtttacccgttttacaaactagcggaatgtataatgctagcggtacattttttcaacaagtaggattaccagcaaaaagtggagtaggaggaggagttattttgataattccaagattaatgggaatatgtattttttctcctcgtttagacaagcaaggcaatagtgttcgagggattgagatggcaaaacgaattacatcaaaatatttagttcatacttttgatggtacaatgacagatacagatcgtcttgatccaaaaataccgatttcaaagtggcgggctaatagttgtgga

SEQ ID NO: 264607 - DNA, 846 bp, Unknown
  Bacterial polypeptide expressing nucleotide sequence isolated from the Sargasso Sea
taccagcaaaaagtggagtaggaggaggagttatattgatagtacctagattaatgggaatatgtattttttctccacgcttagacaaacaaggcaatagtgttcgaggaattgaaatggcgaagcgaataacgtcaaaatatttagttcatacttttgatggtacgatgacagacacagatcgtcttgatccaaaaataccaatttcaaaatggcgtgcaaatagttgtggagaagctatttgggctgcgagtaatggaaatattagaacattagaacgtcttgttagtgaacaaagagatcttcaaattggagactatgatatgagaactccattgcatctggcctcagctgaaggaaaactagaagcagttcaatttttacttaaacaaggtgtgaaaccaatacctgatcgttggggaggatatggttactttgatgcaaaaaataataaccataaagatattgtaaaagaatatgaaaaactagatattaactatactcaagcatcgcatttagttgaagatccaaatggaaagacggataagatggcaatttacgatgacgaactggcagtaattgaactattattcgcagcttttgaaaataacgttgagggtattcgaagcttgatcgctaaaggagtgcctgtacacgcaggcgactatgattctagaactgctttacatcttgcagcagcagagggttgcttggaggtagtcgaatatttagtttcgcatgggcatccagtatttgtccgtgataggtggggagctacacctttagatgaggctaaaagagaaaaaagaaaatctgtaataaattatcttaaagattttaaataag

SEQ ID NO: 264608 - DNA, 922 bp, Unknown
  Bacterial polypeptide expressing nucleotide sequence isolated from the Sargasso Sea
catgatattatcgtatctaatatcacacttatcgagaaagctctaaaaggagatctgattatcccagatttcaaatcttttaccagtaaagtggagcaggtttttgagtctataagatcgaataagtctggaaacgtagctgattatattcctcaacttgcaagggtgaatccagattactatgcaatttctatttgtactgttgatggacagcagtttcacttaggggaccatactgtaccttattcaatacaatcaacttctaagcctataaactatgcgattgcgttagaagattttggtgaggaagaagttcatagacatattggtagagaaccaagtggaagggggtttaatgagctaacactcaataatgatggcctgccgcataatccgatgattaatgcaggagcaattatggcttgttcacttattaggccagatttagatgtgtcagatcgatttgattatcttctagatatatggaaaaagctttcgggtggatctaacattggatttagtaattcaatttacttatctgaaaaacaaacggctgatagaaattttgccttatcatatttcatgagagaaaataaggcatttcctgataagacaaacatgttagaggttttagatttttatttccaaggctgttcaattgagcttaatagctctagccattcaattgtagcaggcacattagcaaatgctggaatatgccctataacaagagaacgtgtctttagccctactacatctaaaaatgtgctttctctaatgtattcttgcggaatgtatgacttctcgggagagtttgcatttacaataggaattccagctaaatctggggtttcaggctctttaattgtagttgtgccaggtgtttgcggaataactatttggtctccagccttagatcgtt

SEQ ID NO: 264609 - DNA, 649 bp, Unknown
  Bacterial polypeptide expressing nucleotide sequence isolated from the Sargasso Sea
gaaccgacaggaaccgcttttgatgcaatcggaatcctggaaacagacgaaggccgcccgcgcaatccgttcatcaatgccggtgcaatcgtcacgacagatgcccttctttccggcagggaacccaggcaggcgattgccgaaaccctgggcctgatccgggcgatggcagaatcggacgatattttcatcaatgcccgggtcgcgaagtccgaaggggaaaccggcgcccgaaacaaggctttggcgcattacctgttgtcgcacggtaatctggagaacgatccggaaaagcttttgggaacctatttccatcaatgcgcaattgaaatgacgacagaacaattggcgatggccgggcgtagcctcgcggacctgccgcaggccccgaaagtgatttcgagggcgcatgcaaggcggataaacgccctcatgatgagttgcggacattatgatgcctcgggcgaattcgcgtatcaggtggggctgcccggcaagagcggcgttggcggtggcatcctgatgatcgccccgcgcaaggcatccattgccctatggtctccggggcttgacggatacgggaattcaaaagcgggcacgcgtgccgccgccatgctgagccgcaaagcgggctggtcggttttctgag

SEQ ID NO: 264610 - DNA, 396 bp, Unknown
  Bacterial polypeptide expressing nucleotide sequence isolated from the Sargasso Sea
tcgcattcaagattggtatgccagccaaatccggtgtcggtggtggtatcatcgttgtcgttccgggtatcatgggcttctgcacgtactcaccaccacttgattcttatggtaacagtgcaagaggtgttcaattctgcaaactgatgagtgttcgattcaaaacgcatcagttcgtacttgagcatgacccattggtctcaccgtacgtgaaggatcacctgtatgacttgctcagcttctcatcgaaaggcaacctgcttaaggtcaaacagaccgtcgaaacaatgatgcaagacaaggtaaagggatacgaaaacgtgtgcaaaggtgactacgatgcaagaacggcactccacttggcatgctcagaagggcattacccaatcgtgtagt

SEQ ID NO: 264611 - DNA, 922 bp, Unknown
  Bacterial polypeptide expressing nucleotide sequence isolated from the Sargasso Sea
catgtccgttatggtaagctctggtatgtacgactattctggagagtggacctacaaggtcgggttgcctgcaaagagcggagttggaggcgggataacagcggtacttccctctcagttcggccttggcgtattttcgccacctcttgataaattaggaaatagtgttcggggtataaaagtttgccaattattatccgaatactttcatttgcatgttttggaaacggaggatgatgtaaatcagaatataccgattacctatgacttaagtgaaataagatcatctcgaatgcgcggtcaatccgataatgaaactttagaagaatttggatcacgcgtgagtgtatttgaactaagcggcgtaattaatttcataggaagtaattttattacgcgttcggtagctgaagaagattttcaagactttattgtattatcatttatcagagttaatcgtctcacgagggcttcgattgaagtatttcgattattttttgatcagattttgtctaaaagtcagcgagtaatcgttgttgataaagaagttgttaaagatcatcccaaaggactatttggagaaatggctgatttaataaaacagaattgccaatgttttgaaaacctagataaagctatcgaatggatagagagccaattgatcgctgaatacggagaaggccaaaacaattctgaagatttttcaccattagctgatcaaccacttcttaaaggcctcccaaactcagatttggaaacacttcaaaaaaatgtgacttcaactgaatatgagagtggttccaaaattattcagctgaacgaaaaggcggacggcatatattttctgcggtctggaaaagtaagtgtgatggtgggcgacggtatttacgtttctggtctagacgcaggaacatgttttggg

SEQ ID NO: 264612 - DNA, 847 bp, Unknown
  Bacterial polypeptide expressing nucleotide sequence isolated from the Sargasso Sea
gcccgcaaagagcggtgtaggagggggaatatttttagttgttcctcaattaatgggtatttgtattttctcacctagattagatcttgttggaaatagcataagaggacttgaggttgcaaaagaaataacagaaaaatatcttgtccatctttttgatggaacaatgactgatactaaacggattgatcctagattaccaatcgcaagatggagagcaaataattgtgctgaagcaatttgggcagctagcaacggaagtataagaaccttagaaaggttggtaagtagtcaaagaaacctagaagttggtgattatgatagaagaacaccattacatcttgcatctgctgagggtcatattgaggttgtaaattttctattaaatgagggtgttaaaccaattcctgatagatggggtggttatcctatatctgatgcaaaaaataatgatcataaagagattgttgatatatttaataaacttgatattgagtatactgaacctctccactatatagaagatccaaatgggaatagtgatgaatttgctgtttatgaaaacgaatcattagttattgaattactttttgcagctgccgagaacgatgttaacggaattcgacagttggtggcacaaggtgttcctgttcatgcaggcgactatgattcgagaactgctcttcatcttgcagctgctgagggaagcttagatgcagtaaaatatttagtttcacatggtcatcctctatatgttagagatcgatggggtgcaactccattagatgaagctaaaagagaaaaaagagattctgttaatgtatttttaactgaattgatgaaataa

SEQ ID NO: 264613 - DNA, 277 bp, Unknown
  Bacterial polypeptide expressing nucleotide sequence isolated from the Sargasso Sea
gcaaactgtggatggcactgagctgatttctcaagttcaaactcggcaacttaacgctctgttggccacctcgggcttatatgatggcgcgggtgaatttgcttatcgtgttggtatgcctggtaaaagtggcgtcggtggcggtattattgcggttatccctggcgagttgtcgatttgtgtttggtcaccggagcttgatgagaatggcaactcacttgcgggtactgctatgcttgagcatctaagtcagcgtcttgggcgctctattttctag

SEQ ID NO: 264614 - DNA, 1870 bp, Unknown
  Bacterial polypeptide expressing nucleotide sequence isolated from the Sargasso Sea
atgaatattaagaaaaaaaatggtcacttcttcaaggaaaaaaatgacgtacctgccctaaaatcattccttagtcaggcatatcaaaatatatttgacgacaagtccggtgctccagcaggctatataccggagctagctatagttaaccccgagcaattcggcattgcgataacgacctccgatgggttcacaaatgaagtgggcgactcgtcaacagaattcactatccaatcaatctctaaggcctttgtttacagtcttgctttagaatcattaggcacagaaaaagtactaaaaacaattggcattgagccttcgggtgaagcatttaattcaatccgtcttaaagatgacaataggccgttcaatccaatggtaaattctggtgcgattgcttgcacggctctaatttgtcaaaacaatggtaaggaagcatttgaaacaattctaaacatgctaagtgagtttgcaggtcgaatattgaacgtagatgataaagtcttttcctcagaaagtgctactggcgatcgtaatcgagctatcggttggctattgagaaacagtgataactttagttgtgacgtggaagaagtcttagaggtatattttagacagtgttcgatattggttagtgccagggacttgtctataatgggagcgacgttatcaaataatggaacaaatccggtaaccaaaaaaagagttgtcagcaaaacaacagccgtccagaccatgtccgtaatggtaagctctggtatgtatgactattctggcgagtggacatacagggttggtttacctgcaaagagtggtgttgggggtgggataacagcggtacttccgtctcaattcggccttggtgtattttcgccgccccttgataaattgggtaatagtgttcggggtatcaaagtttgccaactattatccgagcactttcatttacatgttctggaggcggaagatgacgtaactcaaaatattcccattacatatgatctaagagaaattaggtcatcgcgaacgcgatgtacatccgataacgaaactttagaagatttcggatcacgcgttagtgtattggaattaagtggtgtaattaatttcataggaagtaattttatcacccgttcggttgctgaagaagataataaagattttgttgtattatcatttacgcgagtgagtcgtcttactagggcttcgattgaagtgtttagattattttttgagaagcttctatctaaaagccagcgaatggtcgttgttgataaagcagatttaaaagatgactctaaaggactatttggcgacatcactgaattaatccatcagcattgtccatgtttcaaaaatctcgataaagcgcttgaatgggtcgaagatcaattgattgctcaatacggaacatgctcaaatcatcctgcagatttgttaccaatagcggagcaaccactacttaaagatcttccaaactcagatttggaactacttcaacagaatctggtttcaattgaacatgagagtggctccaaaatcattcaactgcatgacaaggcagatggcatctattttctccgggctggaaaagtaagtgtaatgttgggcgaagatatttacgttgctgggctcgatgcaggaacatgttttggagaacttgcattaatcgaaccagatgcggcgcgaaccgctaatattattgctgagactaaagtggtttgttccttcctctcaatagaggcttttaataaaatctcattgatcaatccaaaattaaatgaactgttacttcgcaacttgggtttaattctttttgaacgattaaaacaaagtaattcgaaaatagtagctttatcagcaaattaat

SEQ ID NO: 264615 - DNA, 1093 bp, Unknown
  Bacterial polypeptide expressing nucleotide sequence isolated from the Sargasso Sea
tcaagatgaatttgacttttattctgaacctgcagtcacagaagctctaaaactttattttagcatttgttcattagagatgacctcagtaaattatgcaacagctgcagctacgcttgcaaatagtggcgtttgtcctatctctcaagaccgtgtgttaagccaaaaaacagtgagaaactgtttacctgttttacaaactagtgggatgtataatgccagcggtacattttttcaacaggtgggattaccagcaaaaagtggagttggaggaggagttatattagtagttccaagattgatgggaatatgtatcttttctcctcgtttagacaaacagggcaatagtgtcagaggaattgaaatggcaaaaaaaattacgtcgaaatatttagttcatacttttgatggaacaatgacagatacagaccgtcttgatccaaaaataccgatttcaaagtggcgcgctaatagttgcggagaagctatttgggcagcaagtaacggcaatattagaacattggaacgactagtgagcgaacaaagagaccttcaaattggagattacgatatgagaacacctttgcatttagcatcagcagaaggtcagcttgaagcagttaaatttttactcaaacaaggtgttaaaccaattcctgatcgttggggaggctatggttatttcgatgccaaaaataataaccataaagatatcgtaaaagaatacgaaaaacttgatattaattacactcaagcatcacatttagtagaagacccaaatggaaagacagataaaatggcaatttatgatgatgaattggcagttatcgaattattatttgctgcttttgaaaataacgttgagggtattcgaaccttaattgcaaaaggagtacctgtacacgcaggagactatgactctagaacagctttacatcttgcagcagcagagggctctttggaggtagtcgagtatttagtctcgcatggacatccgttattcgttcgtgatagatggggtgccacacctttagatgaagctaaaagagaaaagagaaaatcagtaatcaattatcttaaagattttaaataa

SEQ ID NO: 264616 - DNA, 1027 bp, Unknown
  Bacterial polypeptide expressing nucleotide sequence isolated from the Sargasso Sea
tatgttcattagagatgacttctgtaaatttgcaacggccgcagccacgcttgctaatagtggcgttaatcccctaactcaagatcgtgtactaagtcagaaaactgtaagaaattgtttaccagttctacaaactagtgggatgtataatgctagtggtacattctttcaacaagtgggattaccagcaaaaagcggagtaggtggtggagttatattaatagttccaagactgatgggaatatgtattttttcacctcgcttagacaaacaaggaaatagtgttagaggaattgaaatggcgagacgaattacatcaaaatatttagttcatacttttgatggtacaatgacagatacagatcgtcttgatccaaaaataccaatttcgaagtggcgtgcgaatagctgtggagaggcaatttgggctgcaagcaatggaaatattagaacattggagcgtttagttagtgaacaaagagatcttcaaaacggagactatgatatgagaactccattgcatttagcgtcagctgaaggtcaactagaagcagttcaatttttacttaaacagggtgttaaaccgataccagatcgttggggcggttacggatactttgatgcaaaaaataataatcataaagaaattgtaaaggaatttgaaaaacttgatattgattacactcaagcatcacacttaattgaagatcctaatggaaaaaccgacaagatggcaatttatgatgatgaattagcagtcattgaactattgttcgcagcttccgaaaacaacgttgaaggtatacgaaatttggttgcaaagggaatacctgtgcatgccggagattatgactctagaacagctttacaccttgcagctgctgaaggctgcttagacgtagttgagtacttggttacacatggacaccctttattcgttagagatagatggggtgctacacctttagatgaggctaaaagagaaaaaagaaagtctgttattaattatcttaaagatttaaattaa

SEQ ID NO: 264617 - DNA, 748 bp, Unknown
  Bacterial polypeptide expressing nucleotide sequence isolated from the Sargasso Sea
ctgtactgcgccggcgatgcgcacacgccgttctcggtgcagagcatttccaaggtgttcagcctagtgcaggccatcgagcattccggtgaggatatctggcagcgcctgggccatgagccgtccgggcagccgttcaattcgctggtgcagctggagttcgagcggggcaagccgcgtaacccgtttatcaatgccggtgccctggtgatctgcgacatcaatcagtcgcgctttgccgcgccggtgctgtcgatgcgcgactttgtgcgccgcctggccggcaatcccgaagtggtggtggaccggcacgtggctgagtcggaataccagcaccgcgcgcgtaatgcggccgcagcttacctgatgcagtccttcggcaatttccataacgacgtggaggcggtgctgcgcagctacttcagctactgcgcgctgcgtatgagctgcgtcgacctggcgcgggccttctgttttctggccaacgatggcttctgcaagcacagcggccagcagattctcagtgcgcggcagagcaagcaggttaacgcgatcatggccaccagcggcctgtatgacgaggcgggcaacttcgcctaccgcgtcggcctgccgggcaagagcggcgtcggtggcggcatcgtcgccgtggtgccggggcgtttcagcgtgtgcgtgtggtcgccggagttgaacgccgctggcaactccctggccgggatcaaggccctggagctgcttagcgagc

SEQ ID NO: 264618 - DNA, 880 bp, Unknown
  Bacterial polypeptide expressing nucleotide sequence isolated from the Sargasso Sea
aatgctggaattgttagaagccatttttgatgaagtaaaacctatgctaggggagggtaaagtcgcagactatattcctgcgcttgccagtgtcgatcctcatcaatttggcatcgctatctgtgatattgaagggcacattacgtcaattggtgatgctgatgtgcctttttctattcaaagtatatctaaagtcttcaacttagtgcttgccatgaatcactatggcgagggcatgtgggaacgggtaggttgcgaaccgtcgggtctgccatttaactcgctagtacagttggaatacgaagacggtataccacggaacccgtttattaatgcgggggcattagtggtgagtgacatgacacagtctcgtttcgcctcgcctcatattggtatgcgagactttgttaggcgcttgtcctgcaacgataatattttcgccaataaagtggttgctgactctgaatttgagcatcgtgctagaaatgctgcaatggcgtatttaatgaaagcctataacaactttgaaaatgaagttgaggatgtattgcatagctattttaacaactgtgccttggaaatgagttgtgttgatttagcgcgagccacgaacttcttagcaaatagaggttattctaaatgtgccgacgaacaggtactaagcccagaccaaaatcgtcaagtgaatgcgttgttagccactagtggtatgtacgacgaagcggggagttttgcttttaaggttggcttaccagggaaaagcggggttggcgggggagtaatagccgtagtacctggtcgcttttctatttgtgtgttttcacctgcgctaaacgcggtggggaactctcatttaggtgtagctgcgcttacgtcattg

SEQ ID NO: 264619 - DNA, 171 bp, Unknown
  Bacterial polypeptide expressing nucleotide sequence isolated from the Sargasso Sea
tgagccattttcaattcaaagtatttctaaagttttcagcttaaccttagcgctaactttatatgaagaaaccgaaatttggagccgcgtcggcaaagaaccctcgggacactccttcaattcattagtccaagtcgaactcgagcggggtaaacctcgcaatccctttat

SEQ ID NO: 264620 - DNA, 552 bp, Unknown
  Bacterial polypeptide expressing nucleotide sequence isolated from the Sargasso Sea
tgttgcaagggcgtctaagcgcaccgcgtcaacggatgctggaagtggtacgggcgttaagcggtgtttcggatatcgcttatgatgcggcggtcgcgcgatcagagtttgagcactcggcgcgtaatgccgctattgcctggctgatgaaatccttcggcaattttcaccatgacgtgaccaccgttttgcaaaattactttcactactgcgcgctgaaaatgagctgtgtggagttggcgcgaacctttgtctttttggcaaatcaagggcatgcctttcatcttgcggaacccgtggtgacgccgatgcaggccaggcagatcaatgcgctaatggcgaccagcggcatgtatcagaacgcaggggagtttgcctggcgggtcgggcttccggcgaaatctggtgtgggtggcggcatcgtggcgatcgtgcctcacgagatggcgattgctgtctggagtccggaactggacccggcgggaaattcactggccggtatcgccgtgctggagcaattaacacaacagctggggcgttcggtttactgat

SEQ ID NO: 264621 - DNA, 922 bp, Unknown
  Bacterial polypeptide expressing nucleotide sequence isolated from the Sargasso Sea
tatggtgttgtcatccgaattactggccagcatcctggatgaggtgcgcccgctgctcggacagggcaaggtggccgactacattccggcgctggcccaggtaccggccgaccggctcgggatcgccgtctgtaccgtggaaggggagctgttcaccgccggtgatgccagcgagcccttctcgatccagagtatctccaaggccctgagcctgaccctggcgctcaccctctatcaggaggaggagatctgggcccgggtcggcaaggagccctccggccagcccttcaactccctggtgcagctggaattcgagcagggtattccccgcaaccccttcatcaatgccggtgccctggtggtgagcgatctgctggagacccgcctcaccgcgccgcgccagcgtaccctggagctggtgcgccgcctctcgggcaacccggccatcatggcggatcaagtggtggcccgctccgaatatcagcactctgcccgcaacgcggccatcgcctatctgatgaaggcgtatggcaatttcgagaacgaagtggacaaggtgctgcagagctacttcaatgcctgtgcgatccgcatgagttgcgtcgatctggcgcgggcattcatctatctggccaatcgcggggtgccgctgggcgcgacgactcccttgctgccggcccgcaccaccaaacaggtcaacgccctgctcgccacctgcggtctctatgacgaggcgggggattttgcctatcgggtcggcatgccgggcaaatccggggtcggtggcggcatcatcgccctgatcccgggggaattgtgcgtctgtgtctggtcgcccgagctcaacaaggcgggcaactcgctggcgggcacggcggcgctggaactgctggccgagcgtctgggccgctccattttttaa

SEQ ID NO: 264622 - DNA, 910 bp, Unknown
  Bacterial polypeptide expressing nucleotide sequence isolated from the Sargasso Sea
aatgctggcactacttcaagatatctatgatgaagttgagcccatgttgggcatgggaaaagttgccgactacatccctgcgttggccacggttaatccacggcaatttggcatttcaatttgcgatacaaacggtcaaataacgtcgataggcgatgcgagcgttcctttttctattcaaagtatctcaaaagtctttaatcttgttttagctatcaatcactacggtgaaaccatgtgggagcgagttggatgcgagccatccggcctgccgtttaattctcttgtacagttggaatatgaaaacggtattccccgcaaccccttcattaatgccggtgcgctggtggttagtgacatggttcagtctcggttcgcttccccctatattgccatgcgagatttcgtaagacgcttaagctgtaacggcgatatcgtggtaaacaaggtggtggcggagtctgaatacgagcatcgttctcgcaatgcagcaatggcatatttgatgaaagcctacggaaattttgaaaacgaagtggaagatgtgcttcgtaattattttcacaactgtgcgctagaaatgagttgtgaggacttggcgcgctcaacgagctttcttgctaacgcaggtttttctacttgcgcaaatgaaaaggtgctaacgccttatcaaaccaaacaagtgaacgcgcttctggcgactagcggtatgtatgacgaagctgggagctttgcttttaaagtaggcttgccgggtaaaagtggcgtaggtggaggcatagtggctgttgtaccaggacgcttttcaatatgcgtattttcgccagcgcttaatagcgtgggtaattctcagctaggtgtggcggctttgacatcgctaagtgaacgcattaattggtctatttattag

SEQ ID NO: 264623 - DNA, 916 bp, Unknown
  Bacterial polypeptide expressing nucleotide sequence isolated from the Sargasso Sea
atgaattaccagacgatcctcgaacgcatccacgccgacctcgccccctggattggccagggccgggttgccgattacattcccgagctcgcgaaagtgcccgccgacaagttcgggatggccgtcgtcacgctggacggaaacgtttgcacggttggcgatgcgtacgagcgcttctcgatccagagcatctcgaagctgttcgcgtgcacgctggcgttccagctgctgggcgacgaactgtgggaacgggtcggccgcgagccgtccggcaacgcgttcaactcgctggtgcagctcgagagcgagcgcggcaagccgcgcaatccgttcatcaacgccggtgcgctggtcgtcaccgacgtgctgtgccgccgcttcgtgaaggccgagacggcgctcgtcgaattcgtgcggcggctgatcggcgcgaacgacatcgactacgattcgcgcgtcgcgcaatcggagctgcagcacgcggagcgcaaccgtgcgatggcgcacttcatggcgagcttcggcaacatgcagatgccgcccgacatcgtgatcgatgcgtattgccgccagtgcgcgatcacgatgaactgcgtcgagcttgcgcgcgcggcgctgttcctggctaacggcggtgtcgcgccggtcaccggcgagcggatcgtcgattcgagttccgcgaagcggctgtcggcgctgatgctgacctgcggcacctacgatgcggcgggggatttcgtatatcgcgtcgggctgcccgcgaaaagcggggtcggcggcgggatcgtcgcggtgctgccgggcgagatggccgtgtgcgtgtgggcgccggggctcgatgcgaacgggaactcgttggcggggacgctggcgctggagtggttgacgacttattcgggaaggtcgattttttgag

SEQ ID NO: 264624 - DNA, 916 bp, Unknown
  Bacterial polypeptide expressing nucleotide sequence isolated from the Sargasso Sea
atgccagaacaggcgttattagaggaagtggtcgacaaagttcgacccttgctcggccaaggaaaggttgctaattatattcctgcgctcgctaatgttgatgctggcaaattgggcatagccgtgacaactattgacggtgaaaccataggcgcaggcgattaccttgagccattttcaattcaaagtatttctaaagttttcagcttaaccttagcgctaactttatatgaagaaaccgaaatttggagccgcgtcggcaaagaaccctcgggacactccttcaattcattagtccaagtcgaactcgagcggggtaaacctcgcaatccctttattaatgctggcgcgttagtcatcgctgacttattacagagccgtttaggggcacctaagcatcggatgttggaattggtcagggcgttgagtcaaaacgataaagtttgtttcgataagcaagtggcggattctgaatatcagcatagtgctcgcaatgcggccatcgcctatctgatgaaatccttcggcaattttcaaggtgatgtcgatacagtgctgcgcacttattttcattactgcgccttaaaaatgaactgcgccgatctatcgcgggcgatgctgtatttagctaatcgcggtaaaactttagacggtaccgagcttatttcgcaagtgcagactcgacagttaaatgccctgttagcaacctcgggcttgtacgatggcgctggtgagtttgcctatcgtgtcggaatgcctggcaaaagtggtgtcggtggcggcattattgcggtgatccctggggagctctcggtctgcgtttggtcacccgaattagataaccaaggtaactccctcgcggggacggcgatgcttgagcatctcagccagcgtctcggacgttcaatcttctgat

SEQ ID NO: 264625 - DNA, 916 bp, Unknown
  Bacterial polypeptide expressing nucleotide sequence isolated from the Sargasso Sea
aatgccagaacaggcgttattagaggaagtggtcgacaaagttcgacccttgctcggccaaggaaaggttgctaattacatccctgcgctcgccaatgttgatgctggtaaattgggtattgccgtgaccacaattgacggtgaaaccataggcgcaggcgattaccttgagccattttcaattcaaagtatttctaaagttttcagcttaaccttagcgctaactttatatgaagaaaccgaaatttggagccgcgtcggcaaagaaccctcgggacactccttcaattcattagtccaagttgaactcgaacggggtaaacctcgcaatccctttattaatgctggcgcgttagtcatcgctgacttattgcagagccgtttaggggcgcctaagcatcggatgttggaattggtcagggcgctgagtcaaaacgataaagtctgtttcgataagcaagtggcggattctgaatatcagcacagtgcacgtaatgcggccatcgcttatctgatgaaatccttcggtaattttcaaggcgatgtcgatacagtgctgcgcacttattttcattattgcgccttaaaaatgaattgcgccgacctctcacgggcgatgttgtatttagccaaccgcggtaaaaccttagacggcactgagcttatttcgcaggtacagacgcggcagttaaatgccctgttagcaacttctggcttgtacgacggcgccggtgagtttgcctatcgtgttggtatgccgggtaaaagcggtgtcggtggtggcattattgcggtgatccccggggaactctcggtctgcgtttggtctcccgaattagacaatcaaggtaactccctcgcggggacggcgatgcttgagcatcttagccagcgcctcggacgttcaatcttctga

SEQ ID NO: 264626 - DNA, 620 bp, Unknown
  Bacterial polypeptide expressing nucleotide sequence isolated from the Sargasso Sea
actcgaggccgaacacggcaagccacgcaatccgttcatcaacgcaggagcgttggtcgtcaccgatgtgttgtgccgccgtttcgtgcaggccgaaaccgcgctggtcgaattcatgcgacggctgacgggcgaaaccagcatcgactacgattcgcgcgtcgcgctatcggagttgcagcacgcgcaccgcaatcgcgcgatggcgcatttcatggcgagcttcggcaacatggagatgccgcccgaggtagtggtcgatgcttattgccggcaatgcgcgatttcgatgagctgcgtggaactggcgaaggcggcgctgttcctgaccaatcatggggtggtgcccgccaccggcgagcggattctcgacaccagttccgcgaaacggctctccgcgctgatgctcacctgcggcacctatgatgcggcgggcgatttcgtctaccgggtcggcttgccggcgaaaagcggcgtaggtggcggaattgtcgcggtgctgccgggtgagatggccgtatgtgtgtggtcgcccgggctcgacagcaatgggaactcgctcgcgggcgtgctggcgctggaatggttgacgacttatacggggcggtcgattttctgat

SEQ ID NO: 264627 - DNA, 1638 bp, Unknown
  Bacterial polypeptide expressing nucleotide sequence isolated from the Sargasso Sea
taacaaccgatggacaagtttatgagagaggcgactcaaacaaagacttttcaattcagtcgatgtgcaaaccatttaattactgtttcgcaatggaacaattaggccttgagggagtacataaacacgttggtcaggaaccatcaggaagacaatttgatgatttaactttgcttgcaagaacagtaacaggtaactatacaggagattttgcaaaagataatttagagggcagatttgcaagagtaccttttaatccgatggtcaatgctggtgctataatgactgctggtttaataaatccaaacgactcccatagtcaaagattaagacatattcgtcaacaatttggtagactgataggttggacatcaaaaaacaataatgtttctaaattgccaagatttaataaaaatatggcacgccaagaaaattttaaaggttacaataatatagcaatgggctatttgttaatggcaactggtagcttgcctcatactaaatcagatcttcataaagatattcatccagatgaagacgaatttgacttttatatagagcctgcagtaactgaggcactaaaattatactttagtatctgttctctagagatgacagcaacagatgttgcaatggctgcggctacacttgcaaatagtggtgtttgtccgatttctcaagatcgtgtattaagtcaaaaaactgttaggaactgtctgccagttttacaaactagcgggatgtataatgctagtggagttttttttcaggaagttggcttaccagcaaaaagcggagtaggtggtggtgtattattagttgttccacaattaatgggtatttgcatattttctccaagattagacgaacaaggtaatagcgttagaggcttggaaatggcaaaaaaacttacttcaaagtatcttgttcatacatttgatggcaccatgacagacacaagtagagaagatccaaaattgccaatagcaagatggttagcaaatagttgtggagaggctatttgggcagcaagtaatggaaatataagaactttagaaagtttagttagccaacaaagagatctacaacagggagattatgatattagaactccacttcatcttgcatctgctgaaggtcaattagaagtagtaaaatttttactgaaccaaggtgtaaaaccaatacctgataggtggggaggttatcctatatcagatgcaagaaataataagcatcaaaaaattgtagatttatttaatgagttaaaaattaattacacagagccttttcatttagttgaaaacccaaaaggaaaaacagataaaatggcaaactttgaagacgagttaatggtgattgaacttctttttgcagctgctgaaaacaatgtagataatattcgccatttagttgcacaaggagtccctgtccatgctggtgattatgatttaagaacagcattacatcttgctgcagcagagggaagtttagatgctgtcgaatatctcgtgtcacatggacatcctctaaatgtgagagaccgttggggagctacaccacttgacgaagccaaaagagaaaaaagaaaaaaagcggttaattttttacaaaattataaagccaatattaattaat

SEQ ID NO: 264628 - DNA, 829 bp, Unknown
  Bacterial polypeptide expressing nucleotide sequence isolated from the Sargasso Sea
gccgccgccaaggtgccggtggacaaattgctggcaggcctgcccgagctggccaacgtggccaaggtgtcgggtgagcaggtgttccagatcgcctcggagagcttcaccaacgagcacctgctgcgcctcggccagcgcgtgtcggccctggccaagcaggccgatgtggacggcatcgtgatcacccacggcacggacacgctggaagaaaccgcgtacttcctgaacctcaccgtgcgcaccaacaagcccatcgtggtggtgggctccatgcgccccggcacggccctgtcggccgacggcgcactcaacctgtacgacgccgtgaccgtggccgccagcaaggacgctgccggcaagggcgtgctggtcacgatgaacgacgagatccagagcggtcgcgacgtgagcaagaccatcaatatcaagaccgaggctttcaagagccagtggggcccgctgggcatggtggtggaaggcaagaactactggttccgcgcccccgtcaagcgccacacgaccaactccgagttcaacatcgacgacatcaaggccctgcctgccgtggacatcgtgtacggctacggcaacatgaacaccacaggtatcgacgcctacggcaaggccggcgtcaaggcgctgatccacgccggcacaggcaatggctctgtggccgcccaggcggtcgattcgctcaaggccctgcgcgcctcgggtgtgcagatcatccgctcggcccgcgtgcccgatggttttgtgctgcgcaatgccgagcagcctgacgacaagtacgactgggtcgtggcccatgacctgcgcccccaaa

SEQ ID NO: 264629 - DNA, 682 bp, Unknown
  Bacterial polypeptide expressing nucleotide sequence isolated from the Sargasso Sea
attttgatgaatgataaaggtgaaatagtacaaaaatatagaaaaataatgccttgggttccaattgaaggatggtatccaggaaattgtacatatgtttctgatggaccaaaaggtatgaaagtttctttaataatttgtgatgatggtaattatccagagatttggagagattgtgctatgagaggtgctgagctgattgttagatgtcagggttatatgtatcctgcaaaagaacaacaagttattatggcaaaagcaatggcatgggctaataacagttatgtagcagttgctaatgcagcaggttttgacggagtatattcatatttcggtcattctgcacttgttggatttgatggcagaacattaggtgagtgtgctgaagaagaaaatggtattcagtatgcagaactgtcagtatcagctattagagatgctagagcaactggtcagtcgaacaaccacttgttcaaacttctacatagaggatacacaggaatgataaattctggtgacggagacaaaggaacagcagaaatgccttatgagttttacagaaaatgggtcaatgatccagagggaactcgtaagatggttgaagagatgaccagaccaacaattggaacagatgaatgcccaattgatggtattccaaataaaaaaacttcacacagataaa

SEQ ID NO: 264630 - DNA, 1042 bp, Unknown
  Bacterial polypeptide expressing nucleotide sequence isolated from the Sargasso Sea
aatgtatcatggagacataggtagtagtaatgacaccgtaggtgtggcagtcgttaattataaaatgccgagattgcatactaaagcagaggtgcttgagaatgcaaaaaacattgcaaatatgttgaaaggaatgaagcgtggcttaccggggatggaccttgtaatctttcctgaatattccacccaaggtataatgtatgatgaagcagagatgtacgaaacagcctctgcaataccaggagatgaaacggaaatctttgccgcagcatgtcgcgaagctaacgtttggggtgtgttttcattaaccggcgaaagacacgagcaacatccaaataaggcaccatataacaccttgatattaatgaataatgaaggtgaaatcgtgcaaaaatatagaaagattatgccatgggtcccgattgaaggatggtatccaggtaactgcacatacgtttctgatggcccaaaaggtttaaaaataagtctcatcatatgtgacgatggtaactatccagagatttggcgcgattgtgcaatgaaaggggccgaattaattgttcgatgtcagggatatatgtatccggctaaggaacaacaaattgtcatggctaaggctatggcttgggccaataacagctatgtcgctgtagcgaatgcagcaggttttgatggagtgtactcatactttggccattctgctattgtaggttttgatggacgtacattaggagaatgcgcagaagaggagaatggaattcagtatgcacaactttccgtttccggaatacgtgatgcacgaagaaacgcacagagtaacaatcacttatttaaattggtgcatagaggctatactggtatgataaattctggtgacggtgataagggtctcgcagaatgtccatacgagttctacaaaaaatgggcggaagatcccgaaggaacccgagagatggttgaggctatgacgcgacccaccgttggtgttgatgaatgcccaattgacggggtacccaatcaagaagatataaaacatagctaa

SEQ ID NO: 264631 - DNA, 124 bp, Unknown
  Bacterial polypeptide expressing nucleotide sequence isolated from the Sargasso Sea
atgaaactaactcctagagaaaaagataaacttttaataagccttgcagcgattgtcgctaaaaatagattatcaaaaggtataaaattaaattatccagaggttattgctttaataacagaat

SEQ ID NO: 264632 - DNA, 172 bp, Unknown
  Bacterial polypeptide expressing nucleotide sequence isolated from the Sargasso Sea
atgcaaagaaaacctgtcgacatacctaaaagagactttataagtttaaatattgatttaaaacaaatgggtgtaggtggtgacaatagttggggtgctcgaacgctgtctaagtacacgattaatccaggaaattatagttatagttttacaataattccttttaattaat

SEQ ID NO: 264633 - DNA, 370 bp, Unknown
  Bacterial polypeptide expressing nucleotide sequence isolated from the Sargasso Sea
gatgatattaataggaggaagtatagcttgtgctcaaatgggagatccaaatgcatcaattccaactccacaaccggtatacactagaccaatgttttcatcatttggaacttctttagaaaaatcttcagtaattttcacaagcaaactagctctcgaaaagaattctttaaaagatgcaagtattagaaaagacttattacctgtagaaaacacaagagccatttctaaaaaagatatgattttaaataacaagtgtccaaagattgaagttaatcctgagacatacgaggtaaaagctgatggcgagataattacctgtgaaccagctaaagaactccctttggcacaaagatattttatgttttag

SEQ ID NO: 264634 - DNA, 725 bp, Unknown
  Bacterial polypeptide expressing nucleotide sequence isolated from the Sargasso Sea
ggaagatattgcattcgcagaatcaaggataagaagagagactattgcggcagaggacatcctacatgacatgggcgccttctcaattatcgctagtgactctcaagctatgggaagagttggtgaagtaataacaagaacttttcaaactgcccacaaaatgaaagtacaaagagggcctctctcaaaggattctgataggaacgataattacagagttaagcgatatatctctaaagttacaattaatcctgcaatagctcatggtattaataaatatgttgggtctatagaaaaggggaaaatggcagacttagtattgtggaaaccttcattttttgcggtaaagcctgaattagttgttaaagggggatcaatagtttggtcccaaatgggtgatgcaaatgcttcaattcctactccaggtcctgtacatggtcgacctatgtttgcaagtttcggccaatctctaattaagagttcttttacctttttaagtaaaaattcaattgatcaaaatattccaaataaattaggcttacaaaagaaatgtattgccgtagaaaataccagaaatatcaataaatctcacttaaaacttaataataaactaccaaatatttcagttgatcctcaaacttatgaagttttttctgatggggaacttcttacttgtgaacctcttgatgaagtcccaatggctcaaaggtattttttactttaga

SEQ ID NO: 264635 - DNA, 379 bp, Unknown
  Bacterial polypeptide expressing nucleotide sequence isolated from the Sargasso Sea
aaagccagaaatgattttaatagggggaagtatatcttgtgcgcaaatgggagacccaaatgcatcaattccaaccccacaaccagtatacactagaccaatgttttcatcatttgggacttctttagaaaaatcttcagtaatttttacgagtaaattagctcttgaaaaaaattcattaaaagatgcaagcattagaaaagatttattacccgtagaaaatacaagagctatttctaaaaaagatatgattttaaataataagtgtccaaagattgaagttaatcctgagacatacgaggtaaaagctgatggtgaaataattacctgtgaaccagccaaagaacttcctttggcacaaagatattttatgttttag

SEQ ID NO: 264636 - DNA, 142 bp, Unknown
  Bacterial polypeptide expressing nucleotide sequence isolated from the Sargasso Sea
atgaagcctggtgaaataataactaaaaaagaagaaattgatttaaataaagagtctaaaattactaagctcaaaatttctaattcaggtgataggcctgtacaagtcggaagccattatcatttttttgagacaaaatgag

SEQ ID NO: 264637 - DNA, 322 bp, Unknown
  Bacterial polypeptide expressing nucleotide sequence isolated from the Sargasso Sea
atgagtaatttaattcctggcgaaataattcctgaacaaggtgaaatcgaactaaatcttagtaagcaaattaaatcattaacggtttctaattctggagatagacctgtgcaagttggatctcattatcatttttatgaagcaaacaaggcattaatttttgatcgagaaataacacatggtatgcgtctcgacattcctgcaggaacagcaattagatttgaaccgggtgatacaacagatgtcaaattagtgccattctcaggtttaagaaatgcatatggttttaattcaatagttaatggttctttagatagttaaa

SEQ ID NO: 264638 - DNA, 778 bp, Unknown
  Bacterial polypeptide expressing nucleotide sequence isolated from the Sargasso Sea
attattatggactggagtcaaaattcgaaaacaaaaaatcttaaaccttcaattagtattacagactcattaaatgaagagatcaatagtgaaacaggattaaaactaaattatcctatgtcaattgatactctaataagtgttgaagatggttcagaagtaaaagcaggtcaagtaatagctagaatacctaaagaatcatctaaaacaaaagacataacaggtggtcttcctagagttgctgagttgtttgaagcaagaaaaccaaaagatcctgcaattatgagtgaaatagatgggaaaatttcttttggaaaagattataaaaataaaagaagattagtgattactagtgtagatgagaaagatacttttgaaattttaataccaaggtcaaaatacttaacagtgcaagagggcgattttgttaaaagaggagacatccttgttgatggaactccggtgccacatgatatattgagaatattaggtgttgaggaattggctagatatttggttagagaagtccaatcagtatataaattacaaggtgtttttattaatgacaaacatatagaagttatttctagacaaatgttgcaaaaagttatgattaaagaacctggagactctaatttgcttcaaggggaacaaattcacaaaaatgaattgttgaaaataaataaaaaactagaagatgaagggaaaaaagcaattgtatatgaacctgttttattaggcattacaaaagcaagtcttcaaacaaattcttttattt

SEQ ID NO: 264639 - DNA, 232 bp, Unknown
  Bacterial polypeptide expressing nucleotide sequence isolated from the Sargasso Sea
acatattgcaagtatcgaaaaaaataaacgtgctgatattgttatttgggatactgctttttttggtgttaaacctgaaatggtattacaaggtggaagtattgcttgcgcacaaatgggcgatcctaatgcatctattccaacaccacagccagtttactcaagaccaatgttttcctcttatggaaaatcattagaaaaatctactgccacctttgtaagtaaagtatct

SEQ ID NO: 264640 - DNA, 340 bp, Unknown
  Bacterial polypeptide expressing nucleotide sequence isolated from the Sargasso Sea
gcgcaatggggagacccaaatgcatctatcccaactccacaaccagtatacactagaccaatgttttcatcatttgggacgtcgttagagaaatcttcagtaattttcacaagcaaacttgctcttgaaaacaattcattaaaagatgcaagtataagaaaagacttattacctgtagaaaatactagggctatatctaaaaaagatatgatttttaataataagtgtccaaagattgaggttaaccccgagacatatgaagtaaaagctgatggtgaaataattacatgtgaaccagctaaagaacttcctttggcacaaagatattttatgttttagc

SEQ ID NO: 264641 - DNA, 428 bp, Unknown
  Bacterial polypeptide expressing nucleotide sequence isolated from the Sargasso Sea
aaataaacgagcagatattgtcatttgggatacagctttttttggtgttaagcctgaaatggttttgcaagggggaagtatttcttgttcacaaatgggtgatccgaatgcctctattccaactcctcaaccagtgtattcacgaccaatgttttcttcttttggaaaatcattagagcaatctactgcaacttttgtaagtaaagcctctttagataaaaattcattcaaaaactctggaattagtaaatctttattaccagtaaaaaatattagaaaaatttctaaaaaagatatgttgttaaatgattattgtccaaaaatagaagtaaatccagaaacttatgaagttttggcagatggagaattaattacatgtgaaccagcaaaaacactacctttagctcaacgatactttatgtactaaa

SEQ ID NO: 264642 - DNA, 240 bp, Unknown
  Bacterial polypeptide expressing nucleotide sequence isolated from the Sargasso Sea
aagtgagcaaccgtggagatcgcccgattcaggtaggaagccacattcattttttcgaggtcaaccgggccttggatttcgaccgggccaaggcgaggggtttccggctcaacgtcccggcaggcacggcggcccgtttcgaaccgggagattcccgtgaggtcgagctggtcgccttggccggcaagcgcgaggtatacggcctcaacaacctgatcaacggagccctcgacgaatgac

SEQ ID NO: 264643 - DNA, 199 bp, Unknown
  Bacterial polypeptide expressing nucleotide sequence isolated from the Sargasso Sea
tggaagccactatcatttttttgagacaaatgattatttagtttttgatcgaaaattagcatatggaaagagattaaatataccttctggaaccgctgtaagatttgagccaggtcaatctaaagatgttgagcttatagaaataaatggattaaaaaaaatatacgggttcaataagaaagttatggggaaattataa

SEQ ID NO: 264644 - DNA, 362 bp, Unknown
  Bacterial polypeptide expressing nucleotide sequence isolated from the Sargasso Sea
aaagggaggattcattgcatatgcattgatgggtgaccctaacgcatcaattccaactacagagccagtttactatagaccaatgtttggtgctttaggcaaggcaaagacttctacatcattcacattcacttcacagattgcacttgataatggattagaagaaaaattgaaaattgaaaaaaaactactggctgtaaagaattgtcgtaatattggaaaaaaagatatgatatacaatgatgctacaccaaaaattgaaattgacccagaaacatacgaagtgaaagttgatggtgaagttgcaacagtagatcctgctaaagaagtctcattagcaagattatacagtttatactaaa

SEQ ID NO: 264645 - DNA, 271 bp, Unknown
  Bacterial polypeptide expressing nucleotide sequence isolated from the Sargasso Sea
attaacttaaataaagactccaaaattactaaaattaaaatttctaattctggagatagacctgtgcaaattggaagccactatcatttttttgaaacaaatgagtatttagtttttgatcgagaattagcatatggaaagagattaaatataccttcaggaactgctgtgagatttgagccaggtcaatctaaagatgttgagcttatagaaataaatggatcaaaaaaaatatacgggttcaataagaaagttatggggaaattataat

SEQ ID NO: 264646 - DNA, 301 bp, Unknown
  Bacterial polypeptide expressing nucleotide sequence isolated from the Sargasso Sea
atgagtaatttaattcctggcgaaataattcctgaacaaggagaaatcgaattaaatcatggtaagcaatttaaaacagtaacagtttctaattctggagatagacctgtgcaagttggatctcattatcatttttttgaagcaaacaaggctttaatttttgatcgagaaataacacatggtatgcgtcttgatattcctgcaggaacagcaattaggtttgaaccgggtgacacaacagatgtcaaattagtgccattttcaggtttaagaaatgcatatggttttaattcaatagtta

SEQ ID NO: 264647 - DNA, 262 bp, Unknown
  Bacterial polypeptide expressing nucleotide sequence isolated from the Sargasso Sea
aatggcttccacgatatcaagatatgattattcggcaatgtacggcccaacaactggcgacaaaataaggcttgctgataccgaacttattatagaggtggagcgggatttcacaacctatggtgaagaagttaagttcggtggtggaaaggtcatccgggatggcatggggcaatcacaagccacacgctcgcaaggcgccgtagatacggtgctcaccaacgcgctggttgtagattacagcggtatatacaaggcagat

SEQ ID NO: 264648 - DNA, 202 bp, Unknown
  Bacterial polypeptide expressing nucleotide sequence isolated from the Sargasso Sea
atgcctttccgcatctcccgccaggcctacgccgaaacctatggacccaccaccggggatcggcttcgactcgccgacaccgagttgatcctcgaagtggaaaaggacttcaccgtctacggcgatgaagtgaaattcggcggcggcaaggtgatccgtgacggcatgggccaggcccagacctcacgagctgacggtgccg

SEQ ID NO: 264649 - DNA, 307 bp, Unknown
  Bacterial polypeptide expressing nucleotide sequence isolated from the Sargasso Sea
atgatacccggtgaactgttgcccgcctctggcgagatcatgttgaatgacggcgcaaaggccatcacattgatggtcgtcaataccggggaccgccccgtgcaaatcggaagccattaccattttgccgaggccaatggcgcgcttgattttgaccgcgatgcggcccgtggtatgcggctcgatatcgcagccggcaccgccgtgcggtttgaaccggggcagcgccgcgaggtgcaattgatccccgttggcggcgcgcgccggatcttcggtttcaaccaaaccgtgatgggggcgctgtgat

SEQ ID NO: 264650 - DNA, 934 bp, Unknown
  Bacterial polypeptide expressing nucleotide sequence isolated from the Sargasso Sea
attaaactggaagagatgtgtaattgctgcaatgatgggagcagaagaatatggagtagctacaacagctttagtggcaatgggatgtataatggtaagacagtgtcactcaaatacttgtccagtaggagtttgcacacaagatgaaaaattgagagaaaaattcactggtacaccggataaagttgtaaatttatttacttttattgcttcagaagtgagagaaattttagctgaattaggctttaaatcattgaatgatattattggaaggactgacttattaatgcaagtaaataaagcgtcaccaaatttagatgacttagatttaaacccattatttgttcaggcagatcctggaaataataaaagatattgtgagtctttagagattaacgaagtaccagaaactttagatcaagaaatttggccagaaatagaaaaatcattagataattctgaaaaaattgaaaaagaatttactattaaaaatacaaacagagcagttggtacaagaatttcacaccatctttacaaaaagtttggttatgaaaaattagacgaaaatttcctaacactaaatttcaaaggttctgcaggtcagtcttttggagctttttcatcgagaggtttgaaattaaatcttaaaggcgatgcaaatgattatgttggtaaaggattgtcaggtgccacaatctcgataaaactttcggatgaaagtaatttaatctctaatgaaaatacgatcatcggaaatacagttctgtatggagctacttcaggcaaactttttgctgcaggtcaagcaggtgatagatttgctgtaagaaattctggtgcaactacagttgttgagggttgtgactcaaatggttgtgagtatatgactggaggaacagtggtcattttaggaaatgtcggtgacaactttgca

SEQ ID NO: 264651 - DNA, 167 bp, Unknown
  Bacterial polypeptide expressing nucleotide sequence isolated from the Sargasso Sea
aatgaaaaaaatcaatagaaatgcgtatgcagatatgtatggtccgacaacaggtgataaaattcgattagctgatacagaattatttattgaagtagaaaaagatttcacaacttatggagaagaagtaaaatttggaggtggtaaagttataagagatggtatgg

SEQ ID NO: 264652 - DNA, 247 bp, Unknown
  Bacterial polypeptide expressing nucleotide sequence isolated from the Sargasso Sea
atgaaaaaaataaatagaaatgcttatgctgatatgtatggtccgacaactggtgataaaattagattagcagacacagaactttttatagaagttgaaaaagatcttacaacttacggtgaagaagttaaatttggaggaggtaaggtcataagagacgggatgggtcagtctcaagtttcacgaaaagatggagcagttgatacagttataacaaatgctctagtagttgatgtaaacggaattt

SEQ ID NO: 264653 - DNA, 94 bp, Unknown
  Bacterial polypeptide expressing nucleotide sequence isolated from the Sargasso Sea
atgaaactaactcctagagaaaaagataaacttttaataagccttgcagcgattgtcgctaaaaatagattatcaaaaggtataaaattaaatt

SEQ ID NO: 264654 - DNA, 322 bp, Unknown
  Bacterial polypeptide expressing nucleotide sequence isolated from the Sargasso Sea
tatgagtaatttaattcctggagaaataatacctgaacaaggtgtaatcgaattgaaccttggtaaggaagtaagaacagtaacagtctctaattctggagatagacctgtgcaagttggatctcattatcatttttttgaagctaataaggccttaatttttgatagagacttgacatatggtatgcgtctcgatattcctgcaggaacagcaattagatttgaacctggagatacaacagatgtcaaattggttccatataaaggtttaagaattgtatatggttttaattcattagttaatggttcattagaaaattaa

SEQ ID NO: 264655 - DNA, 133 bp, Unknown
  Bacterial polypeptide expressing nucleotide sequence isolated from the Sargasso Sea
ccgagggaactaccttggctttcaaaaaaccaagtaatggagggcattcctgaaatgattgatgaagttcaaatagaagcagttttccctgatgggactaaattagttactattcacaatccgattaattagt

SEQ ID NO: 264656 - DNA, 741 bp, Unknown
  Bacterial polypeptide expressing nucleotide sequence isolated from the Sargasso Sea
attggaagctgataaatttgctgggtttgtattagctaaactcggagctactctttctcaagcttccttacctcttgataaactaaatcatccagaagaagataatctaaaatctagatacccgtctaagttaaaaagattagatgctgttaagcaaggatttaataatgcaattggcataccaactttttataaaaaaacattatttaattctgcagaggaatatttttacagtgcatacgaaaaaggtgtttacaaagattattatggtgcaatttctgattatacaaaagctatagagcttaatccaaattatgctatggcatattacaataggggaggaattaaaaatgaattaaaagactatgaaagatctattcaagattatgattcagctatacggcttaatcctaattattctatggcttattataaccggggccttataaaagataacctaggggatcagtctggagcttttgatgactatacaaaagctattgagatttatcctgaagatccaatcgctttttataatagaggaattatttataaaaataaagagcaatattataaagctattgctgactatacagatgcaatacaacttaatccaaattatgctgaagcctatcttaatagaggtgtcataaaaaatatattaaaaaattataaaggcgcaattgaagattatagtaaatctattaaccttaaccccaatataattgcatttaataatag

SEQ ID NO: 264657 - DNA, 322 bp, Unknown
  Bacterial polypeptide expressing nucleotide sequence isolated from the Sargasso Sea
atgagtaatttaattcctggcgaaataatttctgagcaaggtgaaatcgaactaaatcttggtaaggaagttaaaacagtaacagtttctaattctggagatagacctgtgcaagttggatctcattatcatttttttgaagctaataaggcgttaatttttgatcgagaagtgacaattggtatgcgtcttgacatacctgcaggaacagcaattagatttgaaccgggagatatgacagatgtcaaattagttccattttcaggtctaagaaatgtatatggttttaattcactagttaacggatctttagatacttaaa

SEQ ID NO: 264658 - DNA, 94 bp, Unknown
  Bacterial polypeptide expressing nucleotide sequence isolated from the Sargasso Sea
atgcatctttcacctcaagaaaaggataaattattgattttttctgctgcgcttttagccgaaagaaggcttaatcgaggtctaaagcttaatt

SEQ ID NO: 264659 - DNA, 288 bp, Unknown
  Bacterial polypeptide expressing nucleotide sequence isolated from the Sargasso Sea
tatgagtaaattaattcctggcgaaataattcctgaacaaggtgaaatcgaactaaatcttggtaagcaagttaaaacagtaacggtttctaattctggagatagacctgtgcaagttggatctcattatcatttttatgaagcaaacaaggctttaatttttgaccgagaaataacacacggtatgcgtcttgacattcctgcaggaacagcgattagatttgaaccgggtgatacaacagatgtcaaattagtcccattttcatgcttaagaaatgcatatggttt

SEQ ID NO: 264660 - DNA, 232 bp, Unknown
  Bacterial polypeptide expressing nucleotide sequence isolated from the Sargasso Sea
atgaagccaggtgaagtaattacaaaaaacgagaaaatagacttaaataaagactctaaagttactaagataaaaatttctaattctggagatagacctgtgcaagttggaagccattatcatttttttgaatctaacgagcatttagtttttgatcgaaaattagcatatggaaagagattaaatatcccctcaggaaccgctgtgagatttgagcacaggtcaatctaaa

SEQ ID NO: 264661 - DNA, 508 bp, Unknown
  Bacterial polypeptide expressing nucleotide sequence isolated from the Sargasso Sea
gttgcccatctcgcatctccaccacgcatctccaccacgcatctccaccacgcatctccaccacgcatctccatcacgcatctccatcacgcatctccatcacgcatctccaccacgcatctccaccacgcatctccatcacgcatcccacgaactcactcgcagcatccccgaggacgtcgcctttgccgagtcgcgcatccgaggtgagaccatcgcagccgaggacatcctccacgacatgggtgccatttccatcatggcatcggactcgcaggcaatgggccgcgtgggcgaggtggtgacacggacgtggcagaccgcgaacaagatgaaggagcagcgaggtgaactcccggaggacgctggcagcggcgccgacaacatgcgcatcaagaggtgggaagccaggcggcttttatgcactctacggcgccacccgcaccgcgcgcctttttcaactcatgtgaccttttgcacctcgtgtgaccttttgcaactcatgtga

SEQ ID NO: 264662 - DNA, 377 bp, Unknown
  Bacterial polypeptide expressing nucleotide sequence isolated from the Sargasso Sea
aatgataccaggcgagtattttccaacaaaagatgcaatcatagcaaatagagataaaaaaattctaaaaatttcagtggcaaatacaggtgacagaccaattcaggttggctcacatacccattttgcagaggcaaacaaagcattggaatttgatagagaaaaaagtctaggatttcatctaaacgtatcatcaggaacgtctatcagatttgaaccaggagaatcaaagcatgtggaattggtagagtttggtggaacaaagacaatctatgggtttagtggagtggttagcggtaaacttgatgaaaaaagagatgatgcggtaagaaaacttcacgaaaatggattcaaaaattcattagaagatatcacag

SEQ ID NO: 264663 - DNA, 422 bp, Unknown
  Bacterial polypeptide expressing nucleotide sequence isolated from the Sargasso Sea
acgagcagatttagttttatgggacccagcattttttggtgctaaaccagagatgatattgataggaggaagtatagcttgtgctcaaatgggagacccaaacgcgtcaattccaactccccagccagtatattctagaccaatgttttcatcatttggaacttcgttagaaaaatcttcagtaattttcacaagcaaattagcccttgaaaagaactcattaaaagatgcaagtataagaaaagatttattgcctgttgaaaatacaagatctatttcaaaaaaagatatgattctaaataataaatgtccaaaaattgaggtaaatccagagacatatgaggtaaaagctgatggtgaaataattacttgtgaaccagcaaaagagttacctttggcacaaagatattttatgttttaaa

SEQ ID NO: 264664 - DNA, 404 bp, Unknown
  Bacterial polypeptide expressing nucleotide sequence isolated from the Sargasso Sea
atggatgccacaattttttggaattaaaccaaagatgattgtaaaaggaggattcattgcatatgcattgatgggagatcctaacgcatctattccaaccacagaacctgtctattacagaccaatgtttggagcacttggaaaaacaaaacaatcaacatcagtcacatttacatcacaacttgcattagatgacggattacaagataagttgaatatcaataaaaaattggtggcagtaaagaattgtagaaatgttggaaagaaagacatgatacacaatgatgccacaccaaaaatagagattgatcctgagacatatgaggtcaaagttgatggagaaattgcaacagttgatcctgcgacaaatgtttcattaggacgtttgtatagtttgttctaga

SEQ ID NO: 264665 - DNA, 456 bp, Unknown
  Bacterial polypeptide expressing nucleotide sequence isolated from the Sargasso Sea
tttccgatcatattggcagtattgaaaagaataaacgtgcagatattgtcatttgggatacagctttttttggtgttaaacctgaaatggttttgcagggtggaagtatttcttgttcgcaaatgggcgatcctaatgcttctattcctacaccacaacctgtgtattcacgaccaatgttttcttcttttggaaaatcattagaaaaatctactgcaacatttgtaagtaaagcttctttagataaaaattcattcaaaaattctggaattagcaaatctttattgccagttaaaaatattagaaaaatttctaaaaaagatatggtattaaatgattattgtccaaatatagaagttaatccagaaacttatgaagttttggcagatggagaattaattacctgtgagcctgctaaaatactacctttagctcaacgttatttcatgtattaaa

SEQ ID NO: 264666 - DNA, 322 bp, Unknown
  Bacterial polypeptide expressing nucleotide sequence isolated from the Sargasso Sea
tatgagtaatttaattcctggcgaaataattcctgaacaaggtgaaatcgaactaaatcttagtaagcaagttaaaacagtaacggtttctaattctggagatagacctgtgcaagttggatctcattatcatttttatgaagcaaacaaggctttaatttttgatcgagaaataacacatggtatgcgtctcgacattcctgcaggaacagcaattagatttgaaccgggtgatacaacagatgtcaaattagtgccattttcaggtttaagaaatgcatatggttttaattcattagttaatggttctttagatagttaa

SEQ ID NO: 264667 - DNA, 322 bp, Unknown
  Bacterial polypeptide expressing nucleotide sequence isolated from the Sargasso Sea
tatgagtaatttaattcctggcgaaataattcctgaagaaggtgaaatcgaactaaatcttagtaagcaagttaaaacagtaacggtatctaattctggagatagacctgtgcaagttggatctcattatcatttttttgaagctaatagggccttaatttttgatcgagaaataacaaaaggtatgcgtcttgatattcctgctggaacagcaattagatttgaaccgggtgatacaacagatgtcaaattagtgccattttcaggtttaagaaatgtatatggttttaattcattaattaatggttctttaaatagttaa

SEQ ID NO: 264668 - DNA, 97 bp, Unknown
  Bacterial polypeptide expressing nucleotide sequence isolated from the Sargasso Sea
gatgaatcttacacctagagaaaaagataaattgttagtggcaatggcagctgaagttgctcgtaagagactagctcgcggagtaaaactcaattat

SEQ ID NO: 264669 - DNA, 112 bp, Unknown
  Bacterial polypeptide expressing nucleotide sequence isolated from the Sargasso Sea
ttcaaaattacaagttatggagggaatccctgaaatgattgatgaagttcaaatagaagcggttttccccgatgggactaaattagttactattcacaatccgattaattag

SEQ ID NO: 264670 - DNA, 136 bp, Unknown
  Bacterial polypeptide expressing nucleotide sequence isolated from the Sargasso Sea
atgaaaccaggtgaaataattactaaaaaaggggaaatagatttaaacaaagattctaacataactaaattaaaagtttcaaattctggagatagaccagtgcaagttggaagccattatcatttttttgaaacaa

SEQ ID NO: 264671 - DNA, 229 bp, Unknown
  Bacterial polypeptide expressing nucleotide sequence isolated from the Sargasso Sea
atgattcccggcgaactcctcatcgacgacggcgaacacgaactcaacgcgggccgcgcgaccgtcacggtggtcgtgtcgaataccggcgaccggccggtgcagatcggctcgcactatcacttctacgaagtgaacgaagcgctctccttcgatcgcgaaacggcacgcggcttccgcctgaacatcgcggcaggcaccgccgtgcgcttcgagcccggccaggagc

SEQ ID NO: 264672 - DNA, 398 bp, Unknown
  Bacterial polypeptide expressing nucleotide sequence isolated from the Sargasso Sea
ccagcatttttttggcgctaaaccagagatgatattaataggtggaagtatagcttgcgctcaaatgggagatccaaatgcatcaattccaactccacagcctgtatacacaagaccaatgttttcgtcatttggaacttctttagagaaatcttcagtagttttcacaagcaaattagctcttgagaagaattcattaaaagatgcaagtattagaaaagatttattacctgtagaaaatacgagagctatttctaaaaaaaatatgattttaaataataggtgtccaaagattgaagttaatcccgagacatatgaggtaaaagctgatggagaaataattacttgtgaaccagctaaagaacttcctttagcacaaagatattttatgttttaac

SEQ ID NO: 264673 - DNA, 307 bp, Unknown
  Bacterial polypeptide expressing nucleotide sequence isolated from the Sargasso Sea
atgatccctggtgaatatataattaaagaaggtcaaatagaattaaactctaacctaaaatcattaagggttttggtttctaatactggtgacaggcctattcaagttggaagtcattaccatttttttgaaagcaactcatttttagaatttgatagaaaaaaaacaaaaggtatgcgtcttaatattccttcaggtactgctattcgttttgaacctggtcaagaaaaagagatatttttaattccatatcaaggctttaaaaaagtttttgggtttaataaaaagattatgggtaaactttaat

SEQ ID NO: 264674 - DNA, 307 bp, Unknown
  Bacterial polypeptide expressing nucleotide sequence isolated from the Sargasso Sea
tatgaagccaggtgaagtaattacaaaaaacgaggaaatagacttaaataaagactccaatgttactaagataaaaatttctaattctggagacagacctgtgcaagtcgggagtcattatcatttttttgaaacaaatgagcatttagtttttgatagagaattatcatatggaaaaagattaaatataccatcaggtaccgctgtgcggtttgaaccaggtcagtctaaagatgttgagcttatagaaataaatggtttaaaaaaaatatatggattcaacaagaaagttatgggtagtttataa

SEQ ID NO: 264675 - DNA, 418 bp, Unknown
  Bacterial polypeptide expressing nucleotide sequence isolated from the Sargasso Sea
aatgaaaaaaataagtagagatgcttacgctgatatgtatgggccgacaactggtgacaaaattagattagctgacacagaactttttatagaagttgaaaaagaccttacaacttacggagaagaagttaaatttggaggaggtaaggttataagagatggtatgggtcaatcacaagtctctagaaaagatggagcagttgatacagttataacaaacgctttagtagttgatgtaaacggaatttataaagcagacatcggtctaaaagatggtttaataaatgagataggaaaagcaggtaatcctgacacacaaccaaatgtaaatattattataggtcctggtactgaaataattgctggagaaggaaaaataattacagctggtggttttgatagtcatattcattttatt

SEQ ID NO: 264676 - DNA, 295 bp, Unknown
  Bacterial polypeptide expressing nucleotide sequence isolated from the Sargasso Sea
tgaagtaattacaaaagacgagcatatagaattaaataaagacaccaaatttactaagataaaaatttctaattctggagatagacctgtacaagttggaagccattatcatttttttgaaacaaatgagtatttagtttttgacagggaattatcatatggaaaaagattaaatataccttcaggaactgctgtaagatttgaaccaggtcaatctaaagatgttgagcttatagaaattaatggatcaaaaaaaatatacgggttcaataagaaagttatgggtaatttataa

SEQ ID NO: 264677 - DNA, 793 bp, Unknown
  Bacterial polypeptide expressing nucleotide sequence isolated from the Sargasso Sea
tacaaggaacacattagaagaacatctggacatgttaatggtttgtcatcatttagattctaaaatcccagaagacattgcttttgctgaatcaaggatcagaagagagactattgcagctgaggatatcttgcatgatgtaggtgccttttcaattattgctagtgattctcaggctatgggaagagttggtgaagtgattacaagaacttttcaaaccgcacataaaatgaaagtccaaaggggcccgctaacgcaggattcagatagaaacgataattatcgagtaaagagatatatttctaaagtcacaattaatcctgcaatagctcatggtattgataaacatgttgggtctatagaaaagggtaaaattgcggatttggtgttgtggaaaccttccttttttgcagttaagcctgaattagttgttaaaggaggatctatagtttggtcccaaatgggtgatgcaaatgcttcaattcctactccaggtcctgtacatggtagacctatgtttgcaagtttcggccaatctctaattaagagttcttttacttttttaagtaaaaattcaattgaacaaaatattccgaataaattaggcttacaaaagaaatgtattgccgtagaaaataccagaaatatcaataaatcaaacttaaaacttaatagtaaactaccaaatatttcggttgatcctcaaacttatgaagttttttctgatggagaacttcttacttgtgaaccacttgatgaagtcccaatggctcagaggtattttttgctttag

SEQ ID NO: 264678 - DNA, 163 bp, Unknown
  Bacterial polypeptide expressing nucleotide sequence isolated from the Sargasso Sea
aatgaaattgactcctagagaaaaagataaacttttaataagtcttgcagcaattgttgctaaaaatagattatcaaaaggtataaaattaaattatccagaagctatagctttaataacagattttgtagtcgagggagctagagaaggcaaaagtgttgca

SEQ ID NO: 264679 - DNA, 307 bp, Unknown
  Bacterial polypeptide expressing nucleotide sequence isolated from the Sargasso Sea
atgattccaggcgaagtaataacggcagacggtaatatcgttctgaacgaagggcgttcagaactagagatcaacgtttcaaattctggtgaccggcctatccaagttggtagccactaccatttttttgaaacgaacgaagcattattattcaacagaaacgagaccaagggcatgcgattaaatatagctgcaggcactgccattcgttttgaaccaggtcagacgcgtcaagtgcgattagttccattttccggtgagagaaaaatttttgggttccagaaaaaaattatgggtgagttatgat

SEQ ID NO: 264680 - DNA, 190 bp, Unknown
  Bacterial polypeptide expressing nucleotide sequence isolated from the Sargasso Sea
atggcaaacagtatttcgagaagatcttatgccgacatgtatgggccaaccgttggcgataaggtgaggttggcagataccgaactttttatagaagtagaaaaagatctaacgtcttacggggatgaagttaagtttggcggaggaaaagttattagagatgggatgggacaatcccaaatatctcgct

SEQ ID NO: 264681 - DNA, 589 bp, Unknown
  Bacterial polypeptide expressing nucleotide sequence isolated from the Sargasso Sea
gacttggcagctagcttctaaaatgaaagatcaactcgggcggctttcaactgaaaagacgaagaaaggtgataacgagaggataaagcgctacatagccaaatacactatcaatgcagcaaaaagttttggcatcgaaaagcatgtgggctctctcgaaaaaggaaaaatggctgacgtagttttatggaagccaggtttttttgggatcaaacctgagatcgtagttaagggaggctttattgcctacggtgcgatgggagactctgcagcgtcgctgatgacctgtgagccagttcaaatgcgcccgcaatggggagggtttggcgaggctaagaaagcaatctcagcgtgtttcgttcatccctctgcgattgaagataatctgtcggacaagcttaatatttctaaatctctactacccgcaagtggcacgcgacaacttaaaaagagtgatatgttacacaatgatctttgcccagatatccgtgtagacgctcagactttcgatgtatttgttgatggtgatcttgcttggtgtgaaccagccaaaaaactgccattaacacagttgtatatgtttcgatga

SEQ ID NO: 264682 - DNA, 307 bp, Unknown
  Bacterial polypeptide expressing nucleotide sequence isolated from the Sargasso Sea
atgaagccaggtgaaataattacaaaaaacgaggaaatagacttaaataaaaactccaaaattactaaaattaaaatttctaattctggagatagacctgtgcaagttggaagccactatcacttttttgaaacaaacgagcatttagtgtttgatcgagaattatcatacggaaagagattaaatataccttcaggaactgctgtaagatttgagccaggtcaagctaaagatgttgagcttatagaaataaatggatcaaaaaaaatatacgggttcaataagaaagttatggggaaattataat

SEQ ID NO: 264683 - DNA, 201 bp, Unknown
  Bacterial polypeptide expressing nucleotide sequence isolated from the Sargasso Sea
aatgaaacttactcctagagaaaaagataaacttttaataagccttgcagcaattgttgcgaaaaatagattatctaaaggtataaaattaaattatccagaagctatagctttaataacagatttcgtagttgagggagctagagagggcaaaagtgttgcagaactgatggaggcaggagctcatgttattaaaaaaaa

SEQ ID NO: 264684 - DNA, 211 bp, Unknown
  Bacterial polypeptide expressing nucleotide sequence isolated from the Sargasso Sea
tatgaaattaacaccaagagagaaagataaaatgtttgtaagtcttgcagcaattgttgcaagaaatagattaaaaagaggagtaaagttgaattatcctgaggctatagcgatcataactgacttcgtaattgaaggcgctagagatggtaaatcagttgcatatcttatggaggaaggggctcaagtaataagtaaatcagactgtatg

SEQ ID NO: 264685 - DNA, 284 bp, Unknown
  Bacterial polypeptide expressing nucleotide sequence isolated from the Sargasso Sea
aagaaacgaggaaatagagttaataaaagactctaaagttactaaaattaaaatttctaatgccggagatagacctgtgcaagtaggaagccattatcatttttttgaaactaatgaccatttagtgtttgatcgaaaattagcatatggaaaaagattaaatatcccctcaggaactgctgttagatttgaaccaggtcaatctaaagatgttgagcttatagaaataaatggatcaaaaaaaatatacgggttcaataagaaagttatggggaaattataat

SEQ ID NO: 264686 - DNA, 304 bp, Unknown
  Bacterial polypeptide expressing nucleotide sequence isolated from the Sargasso Sea
aatgaaaaaaataaatagagatgcttatgctgatatgtatgggccaacaactggggataaaattaggcttgctgatacagaactttttattgaagtagaaaaagattttacaacctatggagaggaagttaaatttggtggaggtaaagttattcgagatggaatgggtcagtctcaagtatcacgtaaagatggtgctgttgatacagttattacaaatgctttaattgttgatgtaaacgggatttataaagctgatattggacttaaagatggattgattaacgaaattggcaaaaagcct

SEQ ID NO: 264687 - DNA, 310 bp, Unknown
  Bacterial polypeptide expressing nucleotide sequence isolated from the Sargasso Sea
atgaaacctggagaaataattacaaaacaaaacaatgatattattcttaatgcagatagaaattcaattacttttaaagtttcaaacactggagatcgccctatacaagtaggaagtcattatcattttgcagaaacaaacaaatatttagaatttgatagagaaaaatcaaaaggtatgcgtttagatataccttctggaacagctattcgatttgaacctggccaatcaaaagatgtggaattaattcctataacaggaaatagaaaaatatttggttttaataagaaagtcatgggacaagtataat

SEQ ID NO: 264688 - DNA, 307 bp, Unknown
  Bacterial polypeptide expressing nucleotide sequence isolated from the Sargasso Sea
tatgaagccaggtgaaataatttcaaaaaaaggtgaaatagatttaaataaagattctagcataatcaaattaaaggtttcaaactcaggagacagaccagtacaagttggaagccattatcacttttttgaaacaaatgattatttagtttttgatagagatttatcttatggaaaaagattaaacataccatctggaactgcggttcgatttgaaccaggtcaatctaaagatgttgaactaatagaaataaaaggactaaaaaagatatttggtttcaacaaaaaagtaatgggtaatttataa

SEQ ID NO: 264689 - DNA, 144 bp, Unknown
  Bacterial polypeptide expressing nucleotide sequence isolated from the Sargasso Sea
gatgaagcctggagaaataataacgcttgatgaaaaaataaccttaaatgaagcatctaaaattaaaaaaatcaaagtttctaatactggagatagaccaattcaagtgggaagtcattaccatttttttgaaagtaataaatt

SEQ ID NO: 264690 - DNA, 424 bp, Unknown
  Bacterial polypeptide expressing nucleotide sequence isolated from the Sargasso Sea
tatgtcttataaaattgatagaaaaacttatgctcaaacttacggacccactaccggagatagagttaggctcgctgataccgaactttttatagaagttgaaaaggatttaaccatatacggagatgaagttaaatttggtggaggtaaagttattcgagatgggatgggacagtctcaaataagaagaactgatggagctgtagataccgtaataactaatgctttaatcctagattggtggggaataattaaggctgatgtgggtataaaagatggaatgatttttgaaattggcaaggctggtaatcctgatatccaggataatgttgatattgttattggtgcatcaacagaagtaatagctggagaggggcatattcttactgcaggttcaatagatacccatattcactttatctgt

SEQ ID NO: 264691 - DNA, 234 bp, Unknown
  Bacterial polypeptide expressing nucleotide sequence isolated from the Sargasso Sea
ccgtggccaacacgggcgaccggccggtgcaagtcggaagtcactatcatttcgctgagacaaatccggcactggatttcgaccgggcgatggcacgcggcatgcggctcgacattgccgcaggcaccgccgtgcggtttgagcccgggcagcggcgcgaggtcatgctcgtcccgctgtcggggaaccgacatgtctacggcttcaaccagcagattatgggagagctctgat

SEQ ID NO: 264692 - DNA, 307 bp, Unknown
  Bacterial polypeptide expressing nucleotide sequence isolated from the Sargasso Sea
atgaagccaggtgaagtaattacaaaaaacgataaaatagacttaaataaagactccaaagttactaagattaaaatttctaattctggagatagacccgtacaagttggaagccattatcatttttttgaaacaaacgagtatttagtttttgataggaaattatcatatggaaaaagattaaatataccatcaggaactgctgttagatttgaaccaggtcaatctaaagatgttgagcttatagaaataaatggattaaaaaaaatatacgggttcaataagaaagttatgggtaatttatagt

SEQ ID NO: 264693 - DNA, 220 bp, Unknown
  Bacterial polypeptide expressing nucleotide sequence isolated from the Sargasso Sea
aatgaaactaactcctagagaaaaagataaacttttaataagccttgcagcgattgtcgctaaaaatagattatcaaaaggtattaaattgaattatccagaggctatcgctttaataacagattttgttgtcgagggagctagagagggcaaaagtgttgcagaactgatggaggcaggcgctcatgttattaaaaaaaaggattgtatggaaggcatt

SEQ ID NO: 264694 - DNA, 307 bp, Unknown
  Bacterial polypeptide expressing nucleotide sequence isolated from the Sargasso Sea
atgaagccaggtgaaataattacaaaaaaaggtgaaatagatttaaacaaggactctaataaaattaaattaaaagtttccaactcaggagatagacccgtacaagttggaagtcattatcatttttttgaaacaaatgattatttagtttttgatagggatttatcttatggaaaaaggttaaatataccttctggaactgctgttcgatttgaaccaggacaatctaaagatgttgaacttattgaaataaatggactaaaaaaaatatttggtttcaacaaaaaaattatgggcaatttataat

SEQ ID NO: 264695 - DNA, 310 bp, Unknown
  Bacterial polypeptide expressing nucleotide sequence isolated from the Sargasso Sea
atgattcccggagaaataaaaacagactcaggcgatcgcgagctgaatgtgggtagacctcgtattaagattaaagtggctaacgcgggcgatcgtccaatacaagtaggttctcattatcatttttatgaagtgaacaatgcgcttaagttcgatcgggaagccaccaaaggctaccgtttagacattacctcaagtactgctatccgatttgagccggggcaagagcgcgaggtaactttgatcccttatcaaggcagccgtacggtcattggatttcaaggtaaagtacaaggggtattgagctaat

SEQ ID NO: 264696 - DNA, 257 bp, Unknown
  Bacterial polypeptide expressing nucleotide sequence isolated from the Sargasso Sea
aatgaaacttactcctagagaaaaagataaacttttaataagccttgcagcgattgtcgctaaaaatagattatcaaaaggtataaaattgaattatccagaggctatcgctttaataacagattttgttgtcgagggagctagagagggcaaaagtgttgcagaactgatggaggcaggagctcatgtcataaaaaaaaaggattgtatggaaggtattccagatatgattaaggaagttcaagtagaagctactt

SEQ ID NO: 264697 - DNA, 204 bp, Unknown
  Bacterial polypeptide expressing nucleotide sequence isolated from the Sargasso Sea
aatgaaaaaaattccaagacaatcttatgcagctatgtatggccccacaacaggggataaagtaaggttagctgatactgaacttttcatagaggttgaaaaagacctcacagtctatggtgaggaagtcaagtttggtggtggcaaagttattcgcgatggcatgggacaatctcaggtttcaagaagtgatggcgcagtaga

SEQ ID NO: 264698 - DNA, 307 bp, Unknown
  Bacterial polypeptide expressing nucleotide sequence isolated from the Sargasso Sea
atgaagccaggcgaggtaattacaaaaaaagaggaaattaaccttaataaagactccaaagttactaaaattaaaatctctaattctggagatagacctgtgcaagttggaagccactatcatttttttgaaacaaatgagtatttagtttttgatcgaaaattagcatatggaaagagattaaatataccttcaggaaccgctgtaagatttgagccaggtcaatctaaagatgttgagcttatagaaattaacggattaaaaaaaatatacgggttcaataagaaagtaatggggaaattataat

SEQ ID NO: 264699 - DNA, 344 bp, Unknown
  Bacterial polypeptide expressing nucleotide sequence isolated from the Sargasso Sea
aatggctaaaatttccagagcagcttatgcagatatgtatgggcctactaccggagataaagtaaggctcgcagatactgacttagttgttgaggttgaaaacgatctaaccacttatggtgaagaagtaaagtttggtggtggaaaggtaataagagacgggatgggtcaatctcaaatcagcagagaaaaaggagctgctgataccgttattaccaactctttaatagttgatgtaaatggaatttataaagctgatgtaggtttaaaggatggaaaaatatttggaattggtaaagctggtaatccagatactcaatctaaagtaaatattattatttggt

SEQ ID NO: 264700 - DNA, 307 bp, Unknown
  Bacterial polypeptide expressing nucleotide sequence isolated from the Sargasso Sea
tatgaagccaggcgaagtaattacaaaaaaagaggaaattaacataaataaagactccaaaattactaaaattaaaatttctaattctggagatagacctgtgcaagttggaagccactatcatttttttgagacaaatgagtatttagtttttgatagaaaattagcatatggaaagagattaaatataccttctggcaccgctgtaagatttgagccaggtcaatctaaagatgttgagcttatagaaataaatggattaaaaaaaatatacgggttcaataagaaagttatgggtaatttataa

SEQ ID NO: 264701 - DNA, 163 bp, Unknown
  Bacterial polypeptide expressing nucleotide sequence isolated from the Sargasso Sea
atgaaacctggtgaaataattacaaaaaaaaatagctctatacttctaaacgaagatagaaattcagtaaccataaaagtttcaaatactggagaccgaccaatacaagttgggagtcattatcattttgctgaaacaaatgaattcttaaaattcgatagag

SEQ ID NO: 264702 - DNA, 307 bp, Unknown
  Bacterial polypeptide expressing nucleotide sequence isolated from the Sargasso Sea
atgaagccaggtgaagtaataacaaaaaaagaggaaatagacttaaataaagactccaaaattactaaaattaaaatttctaattctggagatagacctgtgcaagttggaagtcattatcatttttttgaaacaaacaagcatttactgtttgatcgagatttagcatatggaaaaagattaaatatcccctcaggaactgctgtgagatttgaaccaggtcaatccaaagatgttgagttaatagaaataaaaggattaaaaaaaatatatggttttaataagaaagttatgggtaatttataat

SEQ ID NO: 264703 - DNA, 307 bp, Unknown
  Bacterial polypeptide expressing nucleotide sequence isolated from the Sargasso Sea
tatgaagccaggtgaaataatttcaaataaagaggaaatagatttaaataaagactctaaggttactaagcttaaaatttctaattctggagacaggccagtgcaagtcggaagccattatcatttttttgaaacaaatgaatatttgatttttgatagagaattatcgtatggaaaaagattaaatataccatcaggaactgctgtgagatttgaaccaggtcaatccaaagatgttgagcttatagaaataaatggactaaaaaaaatatatggcttcaataagaaagttatgggtaatttataa

SEQ ID NO: 264704 - DNA, 307 bp, Unknown
  Bacterial polypeptide expressing nucleotide sequence isolated from the Sargasso Sea
atgaagccaggtgaagtaattacaaaaaacgaggatatagacttaaataaagactccaaagttactaagataaaaatttctaattctggagatagacctgtgcaagtaggaagccattatcatttttttgaaactaacgagcatttagtgtttgatcgagaattagcatatggaaaaagattaaatattccctcagggactgctgtgagatttgaaccaggacaatccaaagatgttgagcttatagaaataaatggatcaaaaaaaatatacggttttaataataaagttatgggtaatttataat

SEQ ID NO: 264705 - DNA, 406 bp, Unknown
  Bacterial polypeptide expressing nucleotide sequence isolated from the Sargasso Sea
ctttggaacccagcattttttggagtaaaaccagagatggttttattgggcggtacaatcgctgttgctcaaatgggtgatccaaatgcttccattccaacccctcaaccggtttacacccggtcaatgtttggggcttttgggagggctttgtcggagtcttctgtgacgtttgtttcggaagccgctcacgctgatggtataagttcaaaactaggtttagctaagaaagcggtacccgttaaaaacaccagaaatattggaaaacttgatttaaaattgaatgtagctctaccaaaaattgatgttgatccagaaacctatgaagttcgtgcggatggagagcttttaacttgtcagccagccgacgaagtgtccatggcgcagcgctattttatgttttagg

SEQ ID NO: 264706 - DNA, 352 bp, Unknown
  Bacterial polypeptide expressing nucleotide sequence isolated from the Sargasso Sea
aatgatagtggcagccccaatgggagatccaaatgcgtcgatacctactccacagccagttcactatcgatatatgtttggcgcttttggtgctgcgcgcacttcaacaaaaattacttttctgtcgcacgctgcaattagtagaggtgttccggaacagctcgctcttcgttctattattggggaagttaagcgatgtcgaggtgtaaaaaaagatgatatgaagctgaacgactataaacccaatattgaggttgatccgcagacgtatcaagtgcgggctgatggaaagctgttgacgtgtgaacctgcaagcgttctgccgctaactcaaagatatttcttgttttga

SEQ ID NO: 264707 - DNA, 256 bp, Unknown
  Bacterial polypeptide expressing nucleotide sequence isolated from the Sargasso Sea
atcagatagtcaggctatgggtagagttggagaagttatcattagaacttggcaaactgcacataaaatgaaagttcaaagaggaagtttaccagaggaaaaaggggacaatgataattttagagttaaaaggtatttagcaaaatatacaattaatccagcaattgctcatggaatttcaaaatatattggtagtgttgaaaaaaataaacgtgcagatttagttttatgggatccagccattctttggtgccaa

SEQ ID NO: 264708 - DNA, 297 bp, Unknown
  Bacterial polypeptide expressing nucleotide sequence isolated from the Sargasso Sea
aatgaaacctggtgaaataattacaaaaaaaaataagtctatccatctaaatgaagatagaaattcaataaccataaaagtatcaaatactggagaccgaccaatacaagttgggagtcattatcattttgctgaaacaaatgaattcttaaaatttgatagagaaaaatctagaggtatgcggttggatataccttctggcacagcaataagatttgaaccagggcaatcaagagacgtagaattaattcctataactggaaatagaaaaatatttggttttaataaaaaagtaat

SEQ ID NO: 264709 - DNA, 304 bp, Unknown
  Bacterial polypeptide expressing nucleotide sequence isolated from the Sargasso Sea
atgcatctttcacctcaagaaaaggataaattattgatattttctgctgcgctcttagctgaaagaaggcttagtcgaggtattaagcttaattatcctgaaacaattgcttttttaagttttcaagttcttgaaggagcaagagatggtaaaagtgtgagtcaattaatgtcagagggaactacttggctttcaaaatcacaagttatggaaggtattcctgaaatggttgatgaagttcaaatagaagcggttttccccgatgggactaaattagttactattcaccatccgattaattagt

SEQ ID NO: 264710 - DNA, 307 bp, Unknown
  Bacterial polypeptide expressing nucleotide sequence isolated from the Sargasso Sea
aatgatacctggcgaagtaattccactagcaggcgaaatagcactgaatgaagatagaaaaagtactaccttaatggttgctaatactggtgatcgccccatccaggttggctcacactaccattttggtgaagcgaatagtgctcttgaatttgaccgtgagattgcactgggcatgcgccttgatatagccgcaggtactgcaattcgttttgagccaggacagcaaagggaggtcgaacttattgaaatctcaggtggtcgaagaatttttggatttaatcagaaagttatgggagaaatataa

SEQ ID NO: 264711 - DNA, 182 bp, Unknown
  Bacterial polypeptide expressing nucleotide sequence isolated from the Sargasso Sea
aatgaagctaacaccaagagaaaaagacaaactaatggttagtatggcagcaaatgttgcaagaaaacgtcttgaaagaggtgttaaacttaattatccggaggcaatagctttgattaccgattttgtaattgaaggtgcaagagatgggaaaatggtttcagaattaatggaaactgctg

SEQ ID NO: 264712 - DNA, 135 bp, Unknown
  Bacterial polypeptide expressing nucleotide sequence isolated from the Sargasso Sea
tatgcatctttcacctcaagaaaaggataaattattgattttttctgccgcgcttttagctgaaagaaggcttaatcgaggtcttaagcttaattatcctgaaacaattgcttttttgagttttcaagttcttga

SEQ ID NO: 264713 - DNA, 736 bp, Unknown
  Bacterial polypeptide expressing nucleotide sequence isolated from the Sargasso Sea
ccgaagatccccgaggacgtggccttcgccgaatcaagaatccggcgcgagaccatcgccgccgaagacatccttcacgatctgggcgccttctcgatcatcgccagcgactcccaggccatgggccgcgtgggcgaggtgatcacccgcaccttccagaccgcccacaagatgaaggtgcagcgcggtgccctgccggaagactccgctcgcaacgacaaccaccggctcaagcgttacatcgccaaggtgacgatcaacccggcgttggcccacggcatcagcaacgacgtggggtcgatcgaaaccggcaagctcgccgatttggtgctgtggaagcctggcttcttcggcattcgcccggaactggtggtgaagggcggttcgatcgtctgggcccagatgggcgatgccaacgcctcgattcccaccccaggcccggtgcacggccggccgatgttcggcgccttcggcaaggccctcgcgcccagttgtctcaccttcgtgagcgaagcggcgatggatgccgacatccaacgccagctggggctggagcgcacctgcatggcggtgaaggacacccgcagcgtgggcaagagcgccctcaagctgaattcagcgctgcccaaggtgagcgtggacccacagacctatgaggtgttcgccgacggtgagctgctcacctgtgagcccgccgaagtgctgcccctcgcccagcgctacctgctgctttgag

SEQ ID NO: 264714 - DNA, 307 bp, Unknown
  Bacterial polypeptide expressing nucleotide sequence isolated from the Sargasso Sea
tatgaagccaggtgaggtaattacaaaaaacgaggaaatagacttaaataaagacaccaaagttactagtataaaaatttctaattctggagatagacctgtacaagttggaagccattatcatttttttgaaactaacgagtatttactgtttgatcgaaaattagcatatggaaaaagattaaatatcccctcaggaactgctgtgagatttgaaccaggtcaatctaaagatgttgagctaatagaaataaatggattaaaaaaaatatatggtttcaataagaaagttatgggtaatttataa

SEQ ID NO: 264715 - DNA, 217 bp, Unknown
  Bacterial polypeptide expressing nucleotide sequence isolated from the Sargasso Sea
tatggtaccaggtgagatactgactaaagacgaagatattctcttgaatgccggcgttgaggcaatcagcttgacagtcgctaatacaggtgacagacccattcaagtcggtagccattatcatttttacgaaaccaatgaagctcttaagtttgaccgggctagtgccaagggtatgcgtcttgacattgctgcaggcacggccgtgcgttttgaa

SEQ ID NO: 264716 - DNA, 310 bp, Unknown
  Bacterial polypeptide expressing nucleotide sequence isolated from the Sargasso Sea
atgaaaccaggagaaattattactaaagaaaatagtgagttaaaacttaatgaaaatcgaacatctatactaatacaagtatccaatacaggtgatcgccctatacagattggtagtcattatcattttgcagaagcaaatgaatttttagaatttgatagaaatacatcaagaggaatgcggttaaatataccatctggtactgctgttcgctttgaaccaggtcaaacaaaagatgttgagctaattgaaattggtggtgaaagaaaaatttttggttttaataaaaaaataatgggcaatttataat

SEQ ID NO: 264717 - DNA, 237 bp, Unknown
  Bacterial polypeptide expressing nucleotide sequence isolated from the Sargasso Sea
aatgaaacttactcctagagaaaaagataaacttttaattagtcttgcagcaattgttgctaaaaatagattgtcgaagggtataaaattaaattatccagaagctatagctttaataacagattttgtagtagagggagctagagaaggaaaaagtgttgcagaactaatggaggcaggagctcatgtaattaaaaaaaaagattgtatggacggcattccagatatggtgaagga

SEQ ID NO: 264718 - DNA, 329 bp, Unknown
  Bacterial polypeptide expressing nucleotide sequence isolated from the Sargasso Sea
aatggcacaaaaagtttctagagaaaaatacgcggggatatttggtcctactactggagatcaggttaggttggcagatactgaactctttgcagaggtagaaaatgatcacacaatttatggggaggaagtaaaatttggtggaggaaaggtaataagagatggaatgggtcaaagtcaaatacccagaagtgagggagctgttgatttggttattacaaacgccttaataattgattataccggcatatacaaggcagatgtcggagtaaaggatgccaagattcattcaattggcaaggcaggaaacccagatattcaggatggaa

SEQ ID NO: 264719 - DNA, 307 bp, Unknown
  Bacterial polypeptide expressing nucleotide sequence isolated from the Sargasso Sea
aatgataccaggtgagattaaaatagcagaagaggaactgattataaattcggataaggaagccatcctagtagaagtttcgaacactggcgataggccaatacaagttggaagccactaccatttttttgaaacaaatgaaaacctaaagttcgatagaaaaagcaccagagggatgagattggatataatctcaggtactgcaataagatttgaaccaggtcagtcgaaaacagttagtcttattccttattcaggaaaaaggaaagtttatgggtttaataaaaaaattatgggtgatttgtaa

SEQ ID NO: 264720 - DNA, 217 bp, Unknown
  Bacterial polypeptide expressing nucleotide sequence isolated from the Sargasso Sea
gatagacctgtgcaagttggaagtcattatcatttttttgaaactaacgagcatttagtgtttgatcgaaaattagcatatggaaaaagattaaatatcccctcaggaactgctgtcagatttgaaccaggtcaatctaaagatgttgagctaatagaaataaatggattaaaaaaaatatatggtttcaataagaaagttatgggtgatttataat

SEQ ID NO: 264721 - DNA, 351 bp, Unknown
  Bacterial polypeptide expressing nucleotide sequence isolated from the Sargasso Sea
tatgtcttataaaattgacagaaatacttacgctcaaacatacggacccactactggggatagagtaagacttgctgataccgaactatttattgaagtagaaaaggatttaactacttatggagatgaagttaaatttggaggaggtaaagtcattcgagatggaatgggacagtctcaagtaacaagaggtgatggagctgtagatacagtaataactaatgctttgatccttgattggtggggaataattaaggctgatgtggggataaaagatggaaagatttttggaattggtaaagcgggtaatcctgatattcaggataaaatagatattgttattggcgcatc

SEQ ID NO: 264722 - DNA, 169 bp, Unknown
  Bacterial polypeptide expressing nucleotide sequence isolated from the Sargasso Sea
aatgaaattaacaccaagagaaaaagataagttaatgctcagcatggcagccaatgttgccaggaaacgtttagaaagaggagttaaacttaattatccagaagctatagctttaataacagattttgtcatagaaggtgcaagggatggaaaaatggtatcagaatta

SEQ ID NO: 264723 - DNA, 316 bp, Unknown
  Bacterial polypeptide expressing nucleotide sequence isolated from the Sargasso Sea
aatgacggacagcaataaaacgatttcgcgtcaggcctatgccgatatgttcgggcccacaaagggcgataaagtgcgccttgcggatactgaactctggattgaagttgagaacgactatacgacgtacggcgatgaagtaaaattcggcggtggtaaagtaattcgtgacggcatggggcaatcacaaagcacctcagaaaaagtcatggattgtgtcatgacgaatgctctggtcatcgattacaccggaatttataaagcggatatcggtattaagggcgggcgtattgccgccattggtaaggcgggtaac

SEQ ID NO: 264724 - DNA, 235 bp, Unknown
  Bacterial polypeptide expressing nucleotide sequence isolated from the Sargasso Sea
atgaaattaacacctagagaaaaagataagctaatgattagcatggcagcaactgttgcaagaaaacgtcttaaaagaggcgttaagctaaattatcctgaagctattgcattgataactgattttgtcattgaaggcgcaagagatggaaaaatggtatcagaattaatggaagcaggagctcacgttgtaaaaaaagaagattgtatggatggaattccagatatgataacag

SEQ ID NO: 264725 - DNA, 307 bp, Unknown
  Bacterial polypeptide expressing nucleotide sequence isolated from the Sargasso Sea
aatgatacctggagaaattattacaaaatctgaagaaatagttttaaatatagattctgatgctttaaagataaaagtttcaaatacaggcgatagaccagttcaagttggtagccactatcacttttacgaaacaaacgactttttatctttcgatagggataaaacaaaaggaatgagactagatattgcagctggaactgcagttcgctttgaaccaggtcaaacaagagaggtaaatttaatcaatatcaaaggtgatagaaatatttttgggtttaatcagaaaattatgggagccttgtaa

SEQ ID NO: 264726 - DNA, 240 bp, Unknown
  Bacterial polypeptide expressing nucleotide sequence isolated from the Sargasso Sea
catgccctaccgcatctcccgccaggcctacgccgagacctacggacccaccacaggagacagggttcgcctggccgacaccgatctgatcctggaagtcgagaaggactacaccgtctacggcgatgaggtgaagttcggcggcggcaaggtgattcgcgacggcatgggccagtcccagacccctcgagccgagggagccgtcgacacggtgatcaccaatgccctgatcctcgactg

SEQ ID NO: 264727 - DNA, 496 bp, Unknown
  Bacterial polypeptide expressing nucleotide sequence isolated from the Sargasso Sea
tgtagctaaatatacaattaatccagctataactcacggtctatctaaacatataggttcaataactgaaggtaaaagagctgatattgtgatatgggatccagctttttttggagtaaagccagagattgtgatgcttggtggaagcattgcttgtgctcaaatgggtgatcctaacgcatcaattccaactccacaacctgtatatacaagaccaatgttttcttcttatggaagatctctagagacatcttcaattacttttgtaagtaaagattctattaaatctggaagtttagactcattaaaacttgctaaaaatactgttgcggtgggaaaaactagagatatctccaaaaaagatatggtttataataattattgcccagatatttctgttgatcctgaaacatatgaagttacagctgatggggaaattcttacctgcgagccagctacagaattacctatggctcagagatattttttattttag

SEQ ID NO: 264728 - DNA, 307 bp, Unknown
  Bacterial polypeptide expressing nucleotide sequence isolated from the Sargasso Sea
catgttgctgaccccgacagaactcgaacggctgacgctctacagcgccgccgaactatcgcgcaaacgccgcgccaagggcctgcgcctgaattttccggaagccagcgcgctgatcgccgacgagatactcgaaggcgcgcgcgaaggtcgtagcgtcgccgagctgatcggcttcggctcgaccatcctcagcaccgacgacgtgctgcccggtgtcgccgacctgctgccggtgctgcaggtggaaggcacctttcccgacggcaccaagctggtcaccgtgcaccagccgatccgccccggc

SEQ ID NO: 264729 - DNA, 151 bp, Unknown
  Bacterial polypeptide expressing nucleotide sequence isolated from the Sargasso Sea
catgaaactgaccccccgcgaaaaggacaagctgcttgtcagcctcgccgccatggtggcacgcggacggctgcaacgaggtgtgaaactgaatcatccggaggccatcgccctgattaccgattttgtcgtcgagggcgcgcgtgacggc

SEQ ID NO: 264730 - DNA, 307 bp, Unknown
  Bacterial polypeptide expressing nucleotide sequence isolated from the Sargasso Sea
atgaggccaggtgaagtaattacaaaaaacgaggaaatagacttaaataaagactccaaagttactaagattaaaatttctaattctggagatagacctgtgcaagtaggaagccattatcatttttttgaaacaaatgaacatttagtttttgatagggaattatcatatggaaaaagattaaatataccatcaggaactgctgttagatttgaaccaggtcaatccaaagatgttgagcttatagaaataaatggattaaaaaaaatatatggcttcaacaagaaagttatgggcagtttataat

SEQ ID NO: 264731 - DNA, 562 bp, Unknown
  Bacterial polypeptide expressing nucleotide sequence isolated from the Sargasso Sea
aaaatccaacgtggtagactaaaagaagaacaaggtaaaaatgataacttaagggtcaaaagatatatagcaaagtatacaattaatccagcaattgctcatggtgtatctaaccatattggaacattagaaaaaaataagcgagctgatatagtcatttgggacccagctttttttggagcaaaaccagaaatgattttagttggtggtagtattgcatgtgctcaaatgggagatcctaacgcttcaataccaacgccgcaaccaatccattcacgcccaatgttttcttcgtatggccgttcgttagaaagttcatccgttacttttgttagtaataattcaattcaagaggacgcatttaatgatcttgaaattaaaaaagaactgttgcctgttgctaatacccgtaaaatttcaaaaaaagatatggtattaaataatatatgtcctgaaatagaagtgaaccctgaaacatacgaagttaaagcagatggtgagttattaacttgtgaacctgcctcggaactccctttagcacaaagatatttcctatactaaa

SEQ ID NO: 264732 - DNA, 520 bp, Unknown
  Bacterial polypeptide expressing nucleotide sequence isolated from the Sargasso Sea
gataactttagagtaaaaagatatttagcaaaatatacaattaatcctgcaatcgctcatgggatttcaaaacatattggtagtattgaaaaaaataaacgtgcagatttagttttgtgggatccagcattctttggtgcaaagccagaaatgatactaattggaggaagtatagcttgtgctcaaatgggagacccgaatgcatcaattccaactccacagccagtatacactagaccaatgttttcatcatttgggacgtcgttagaaaaatcctcggtaattttcacaagtaaactagctcttgaaaagaattcattaaaagatgcaagtattagaaaagacttattacctgtagaaaacacaaggtctatttctaaaaaagatatgattttaaataataagtgtccaaagattgaagttaatcctgagacatatgaagtaaaagctgatggagaaataattacttgtgaaccagctaaagaacttcctttagcacaaagatattttatgttttaac

SEQ ID NO: 264733 - DNA, 265 bp, Unknown
  Bacterial polypeptide expressing nucleotide sequence isolated from the Sargasso Sea
atgtcctacaaaattgaaagaaatacttatgctcaaacttatggacccactaccggggatagagtaaggcttgctgataccgaactttttattgaagtagaaaaggatttaactacttacggagatgaagttaaattcggagggggtaaagttattcgagatgggatgggacagtctcaagtaagaagagaagatggagctgtagacactgtaataactaatgctttgatcgtagattggtggggaatattaaggcggatgtagg

SEQ ID NO: 264734 - DNA, 307 bp, Unknown
  Bacterial polypeptide expressing nucleotide sequence isolated from the Sargasso Sea
tatgaagccaggtgaaataataactaaaaaagaggaaattgatttaaataaagagtctaaaattactaagctcaaaatttctaattctggagacaggcctgtacaagtcggaagccattatcacttttttgagactaatgagtatttagtttttgatagagaattatcatatggaaaaagattaaatataccttcgggaactgctgtaagatttgaaccagggcaatctaaagatgttgagctcatagaaataaatggattaaaaaaaatatacggcttcaataagaaagttatgggtaatttataa

SEQ ID NO: 264735 - DNA, 165 bp, Unknown
  Bacterial polypeptide expressing nucleotide sequence isolated from the Sargasso Sea
aatggtaaaaatttctagagcagcttatgcagatatgtatgggccaactacgggagataaagtaagacttgcagatacagagttatttattgaagttgagaacgaccttaccaattatggtgaagaggtaaagtttggaggtggaaaagtaattagagatggtat

SEQ ID NO: 264736 - DNA, 307 bp, Unknown
  Bacterial polypeptide expressing nucleotide sequence isolated from the Sargasso Sea
atgatccccggcgaaatcctcaccgacgacggcgaacacgaactgaacgcgggccgcgcgacgctgacgctcgtcgtcgcgaacaccggcgaccgcccggtgcaggtcggctcgcactaccacttcttcgaagtcaacgacgcgctgtcgttcgatcgcgcggccgcacgcggctttcgcctgaacatcgcggccggcaccgcggtgcgcttcgagccgggccagacgcgcaccatcgagctggtcgcgctcgcgggcgatcgggccgtctatggttttcagggcaaggtgatggggccgctgtaag

SEQ ID NO: 264737 - DNA, 310 bp, Unknown
  Bacterial polypeptide expressing nucleotide sequence isolated from the Sargasso Sea
aatgaaacctggagaaataataacaaaacaaaataataatattattcttaatgaagatagaaattcaatcattttgaaagtatcaaatactggagatcgccctatacaagttggaagtcattatcatttttcagaaacaaaccaatatttaaaatttgatagagaaaaatctataggtatgcgtttagatataccgtctggaacagctattcgatttgaacctggtcaatcaaaagatgtagaattaattcctgtaacgggaaatagaaaaatatttggttttaataagaaagttatggggcaattataa

SEQ ID NO: 264738 - DNA, 307 bp, Unknown
  Bacterial polypeptide expressing nucleotide sequence isolated from the Sargasso Sea
tatgaagccaggtgaagtaattacaaaaaacgaggaaatagatctaaataaagacttcaaagttactaagataaaaatttctaattctggagatagacctgtacaagttggaagccactatcatttttttgaaacaaatgagcatttagtttttgatagacagttagcttatggaaaaagattaaacatcccttcaggaactgctgtaagatttgagccaggtcaatctaaagatgttgagcttatagaaataaatggatcaaaaaaaatatacgggttcaataagaaagttatgggtagtctataa

SEQ ID NO: 264739 - DNA, 688 bp, Unknown
  Bacterial polypeptide expressing nucleotide sequence isolated from the Sargasso Sea
gatgattccaggagaatatttcccaacaggaaatgcgataatagcaaataaagataaaaaaattctaaaaattaccgttgcaaatacaggggatagacctattcaagttggttctcatacacatttttcagaagcaaataaggcattagaatttgacagagaaaaaagtctaggatttcatctaaacatatctgcaggaacatcaattagatttgaacccggcgaatcaaagcatgttcaattagtagaatttggagggacaaaaacaatttacggattcagcggtatggtaagtggaaatcttgatgaaaaacgtaatgacgcaattaaaaaacttcatgaaaatggattcaaaaattcattagaagatacaactgaagaacaaggaagtttagaaattccaagaaacagatacgttgaattgtttgggccatcaaagggagacaaggtccgattagcagacacggatttgatattagaagtcgaagaagatttaatcaaacatggagatgaattggtttttggtggcggaaaaagtgcaagagatggattgggacaagcaagcggagttctgcgagatcaatctgcagatttagttattacaaatgcagtcattgttgatgcaaagttaggaatcatcaaagcagatattggaattaaagatggaaaaattttaggtgtagggaat

SEQ ID NO: 264740 - DNA, 307 bp, Unknown
  Bacterial polypeptide expressing nucleotide sequence isolated from the Sargasso Sea
tatgaagccaggcgaagtaattacaaaaaacaaggatatagacttaaataaagattccaaagttactaagataaaaatttctaattctggagatagacctgtgcaagtaggaagtcattatcatttttttgaaacaaatgagtatttagtttttgatcgagaattagcatatggaaagagattaaatattccttcaggaactgctgtaagatttgagccaggtcaatctaaagatgttgagcttatagaaataaatgggttaaaaaaaatatttgggtttaataagaaagttatgggtagtctataa

SEQ ID NO: 264741 - DNA, 313 bp, Unknown
  Bacterial polypeptide expressing nucleotide sequence isolated from the Sargasso Sea
tatgatcccaggagaaattattacaaaaaacggaactataacttttaatgaaggtaaaaaaactattacaataaaagtagccaatactggagatagagcaatccaggttggttcacattatcatttttatgaaacaaatgaatttttaagttttgatagaaataaaacaataggatttagattaaacattccgtcaggatcttcagtgagatttgaaccaggtcaaattcgagatgtgattttagtatcttattctggtgaaaaagttgtaaaaggatttaacgcaaaaattcaaggaagtttggaaggttaa

SEQ ID NO: 264742 - DNA, 307 bp, Unknown
  Bacterial polypeptide expressing nucleotide sequence isolated from the Sargasso Sea
tatgaagccaggtgaagtaattacaaaaaacgaaaaaatagacttaaataaagactctaaagttactaagataaaaatttctaattctggagatagacccgtacaagttggaagccattatcatttttttgaaacaaacgagtatttagtttttgataggaaattatcatatggaaaaagattaaatataccatcaggaactgcggtgagatttgaaccaggtcaatctaaagatgttgagcttatagaaataaatggattaaaaaaaatatacgggttcaataagaaagttatgggtaatttatag

SEQ ID NO: 264743 - DNA, 307 bp, Unknown
  Bacterial polypeptide expressing nucleotide sequence isolated from the Sargasso Sea
tatgaagccgggtgaagtaattacaaaaaacgaggaaatagacttaaataaagactccaaagttactagtataaaaatttctaattctggagatagacctgtacaagttggaagccattatcatttttttgaatctaacgagcatttagtgtttgatcgaaaattagcatatggaaaaagattaaatatcccctcaggaactgctgtgagatttgaaccaggtcaatctaaagatgttgagcttatagaaataaaaggattaaaaaaaatatatggcttcaataagaaagtgatgggtaatttataa

SEQ ID NO: 264744 - DNA, 307 bp, Unknown
  Bacterial polypeptide expressing nucleotide sequence isolated from the Sargasso Sea
tatgaagccaggtgaagtaattacaaaaaacgaggatatagacttaaataaagactccaaagttactaagataaaaatttctaattctggagatagacctgtgcaagtaggaagccattatcatttttttgaaacaaatgagtatttagtttttgatcgaaaattagcatatggaaaaagattaaatattccctcaggaactgctgtgagatttgagccaggtcaatctaaagatgttgagcttatagagattaatggattaaaaaaaatatacgggttcaataagaaagttatgggtaatttataa

SEQ ID NO: 264745 - DNA, 307 bp, Unknown
  Bacterial polypeptide expressing nucleotide sequence isolated from the Sargasso Sea
atgaaaccaggtgaaataataactaaaaaaggtgaaatagatttaaacaaagaatccaaaaaaactaaattaaaagtttcaaactcaggagataggccagtacaagttggaagtcattatcacttttttgaaacaaataattatttagtttttgatagagatttatcttatggaaaaagattaaatataccttctggaactgcagttcgatttgagccaggtcaatccaaggatgttgagctaatagaaatcaacgggctaaaaaagatatttggttttaacaaaaaaataatgggtaatttataat

SEQ ID NO: 264746 - DNA, 304 bp, Unknown
  Bacterial polypeptide expressing nucleotide sequence isolated from the Sargasso Sea
atgaaactttctcctagagaaaaagataaattattaatttcaatggcagcagaggttgcaaggaaaagattgaatagaggagttaaattaaattatcctgaggcgattgcactgataagcgactttgtggttgagggagctagagatggaaggtctgtagctgatttgatgcaagatggagcaaaagtgttatcaagtgaaatggttatgaaaggaattccggaaatgattagagaggttcaagtagaagcaacatttcccgacggagtgaaattagtaactgttcatgaaccaataagatgaa

SEQ ID NO: 264747 - DNA, 441 bp, Unknown
  Bacterial polypeptide expressing nucleotide sequence isolated from the Sargasso Sea
aatggtaaaaatttctagagcagcttatgcagatatgtatgggcctaccacaggagataaggttaggcttgcagatactgaattatttattgaagttgagaacgacctaactacttacggtgaagaagtaaagtttggtggcggaaaagtcataagagatgggatgggccaatcacaaattagtagaaaaaaaggagctgctgatacagttatcactaatgctttaatagttgatgtaaatggaatttataaagctgatgtaggtttaaaagatggaaaaatatttgaaattggtaaagctggaaatccagacactcaatctaaagtaaatattattattggtccaggaactgagataattgcaggtgaaggaaaaattttaacagcagggggttttgatagtcatattcattatatatgtccccaacaaattgatgatgc

SEQ ID NO: 264748 - DNA, 154 bp, Unknown
  Bacterial polypeptide expressing nucleotide sequence isolated from the Sargasso Sea
taaaagtgttgcagaattaatggaggcaggagctcatgttattaaaaaaaaagattgcatggaaggcattccagatatggtgaaagaagttcaggtagaagctacttttcctgatggaactaaattagtaacagtgcacaaacctattaggtga

SEQ ID NO: 264749 - DNA, 902 bp, Unknown
  Bacterial polypeptide expressing nucleotide sequence isolated from the Sargasso Sea
gattcaatctgctgatggtttctcaatgaatttagcttttgctggaaaaggaaattcttcattaccggaaggtcttgaagaacaaattcttgcaggagcttcagctctaaagttacacgaagattggggtactactcctggagcaattgataactgtttaaatattgctgataaaaatgatgttcaagtaatgatacacacagacactttgaacgaaagtggatttgtagaaaatactattaaagcaataaataaaagaaccattcatgcttttcatacagaaggtgctggtggcggacatgcaccagatataattaaagtttgtggagaagagtatgttataccttcttctacaaatcctaccagaccatacaccgttaatactatagaggaacatttagatatgcttatggtttgtcaccatcttgataaatctataccagaggatgtagcgtttgctgaaagtagaataagacgagaaacaattgcagcagaagatattcttcatgacatgggtgctttttcaattattgcatctgatagtcaggccatgggcagagttggagaagttataattagaacttggcagacagcacacaaaatgaaagttcaaagaggaagtctcccagaagaaaaaggagataatgataattttagagttaaaagatatttagcaaaatacacaattaatcctgcaattgctcatggaatttcgaaacatattggaagcattgaaaaaaataaacgtgctgatttagttttgtgggacccagcattttttggtgctaaaccagagataatattaataggtggcagtatagcttgtgctcaaatgggtgatccaaatgcatcaattccactcccacaacagtgtatacaaaaccgatgttttcttcattttg

SEQ ID NO: 264750 - DNA, 873 bp, Unknown
  Bacterial polypeptide expressing nucleotide sequence isolated from the Sargasso Sea
gtggacacgcgcctgatataattaaagtttgtggagaagagtatgttattccttcttcaacaaatccgaccagaccatatacagtcaatacaatagaggaacatttagatatgctgatggtttgtcaccatctagataaatctattccagaggatgtagcatttgctgaaagtagaatcagacgagaaacaattgcagcagaagatattcttcatgacatgggagccttttcaattattgcatcagatagtcaggctatgggtagagtgggagaagttatcattagaacttggcaaactgcacataaaatgaaggttcaaagaggaagtttaccagaggaaaaaggggacaatgataattttagagttaaaaggtatttagcaaaatatacaattaatccagcaattgctcatggaatttcaaaacatattggtagtgttgaaaaaaataaacgtgcagatttagttttatgggatccagcattctttggtgccaaaccagagatgatattaataggtggaagtatagcttgtgcgcaaatgggagatccaaatgcatcaattccaactccacagcctgtatacactagaccaatgttttcatcttttggaacttctttagagaaatcttcagtaattttcacaagcaaactagctcttgaaaagaattctttaaaagatgcaagtattagaaaagacttattacctgtagaaaacacaagagccatttctaaaaaagatatgattttaaacaacaagtgtccaaaaattgaggtaaatccggagacttatgaagtaaaagctgatggtgaaataattacttgtgaaccagctaaagaacttcctttggcacaaagatattttatgttttagc

SEQ ID NO: 264751 - DNA, 951 bp, Unknown
  Bacterial polypeptide expressing nucleotide sequence isolated from the Sargasso Sea
tggtgcatgtggattgaagcttcatgaggattggggtacgactccatctactataaattcttgtttaaatgttgcagataactttgatgttcaagtttgtattcatactgatactttaaatgaggcaggctttgtggaagataccatcaatgctattgcaggaagaacaattcatacttttcataccgaaggagcaggtggaggccatgctccagatattattaaaatttgcggagaaaaaaatattcttccaagtagtactaatccaacaagaccttatacgcgaaacacactggaagaacatcttgacatgctaatggtttgtcatcatttagattctaaaattccagaagatattgcgttcgcggaatctaggataagaagagagactattgcggcagaggatatcctacatgatatgggcgccttctcaattatcgcaagtgactctcaggcaatgggaagagttggtgaagtaataataagaacttttcaaactgcccataaaatgaaattacaaagaggaccttatcacaggattctgataagaaacgataattatagagtaaagagatatatctcaaaagttacaattaatcctgcaatagctcatggtatcaataaatatgttggatctatagaaaaaggaaaaattgcagacctagtattgtggaaaccttcattttttgcagtaaagcctgaattagttattaaaggaggatctatagtttggtcccaaatgggtgatgcaaatgcttcaattcctactccaggccctgttcatggtagacctatgtttgcaaattttggcaattccttaactaagagttcttttacctttttaagtaaaaattcaattgatcaaaatattccaaaaaaattaggattacaaaaggaatgtattgccgtagaaaatacgagaaatatcaataaatcacatttaaaacttaa

SEQ ID NO: 264752 - DNA, 310 bp, Unknown
  Bacterial polypeptide expressing nucleotide sequence isolated from the Sargasso Sea
aatgaaacctggagaaattattactaaaggaaataatgagttaaaacttaatgaagatcgagtatctatagtaatgaaggtatctaataaaggtgatcgtcctatacaagttggtagtcattatcattttgcagaaacaaatgaatttttagaatttgatagagatacatcaagaggaatgcgtttagatataccatctggtactgcagttcgctttgaaccaggtcaaaaaaaagatgttgaattaattgaaattagtggaggaagaaaaatctttggatttaataaaaaaataatgggtaagttataa

SEQ ID NO: 264753 - DNA, 220 bp, Unknown
  Bacterial polypeptide expressing nucleotide sequence isolated from the Sargasso Sea
aaagttaaattatccagaagctatagctttgataactgattttgtaattgagggggctagagatggaaaaatggtatctgaattaatggagtctggggcaaatgttgttaaaaaagaaaattgtatggatggagttgctgatatgatttcagaagtacaagtagaggcaacatttcctgatggaacaaaattagtaactgtacataagccaatacgataa

SEQ ID NO: 264754 - DNA, 649 bp, Unknown
  Bacterial polypeptide expressing nucleotide sequence isolated from the Sargasso Sea
aatggctaaaatttctagagcagcttatgcggatatgtatgggcctacaacaggagacaaagtaaggctcgcagatactgaattaattattgaggttgaaaacgatcttacaacttatggtgaagaggtaaagtttggtggtggaaaagtaattagagatgggatgggtcaatctcaaattagtagaaaaaaaggagctgcagatacagttataactaatgctttaattgttgatgtgaatggaatttataaagctgatgttggtttaaaggatggaaaaatatttgaaattggtaaagctggaaatccagacactcaatctgaagtaaatattattattggtccaggaacagagataattgcaggtgaaggaaaaattttaacagcagggggttttgatagtcatattcattatatatgcccccaacaaattgatgatgctttacactcaggtattacaactatgttaggaggaggaactggaccggctcatggaacacttgcaacaacttgtacacctggaccatggcacatacaaagaatgattcaatctgctgatggtttttctatgaatttagcttttgctggtaaaggaaattcttctttaccagaaggtcttgaggaacaaattctagcaggagcttcagct

SEQ ID NO: 264755 - DNA, 300 bp, Unknown
  Bacterial polypeptide expressing nucleotide sequence isolated from the Sargasso Sea
gacaaaaacgatgtgcaagtaatgattcacacagacactttaaatgaaagtgggtttgtagaaaatactatcaaagcaattaacaaaagaactattcatgcttttcacacagaaggtgctggcggtggacatgcaccagatataattaaagtttgtggagaaaagtatgttattccttcctcaacaaatccaaccagaccatatacagttaatacaatagaagaacatttagatatgctaatggtgtgtcaccatctcaataaatctattccagaggatgttgcatttgctgaaagtaga

SEQ ID NO: 264756 - DNA, 850 bp, Unknown
  Bacterial polypeptide expressing nucleotide sequence isolated from the Sargasso Sea
taaagtttgtggtgaaaaatatgtaattccttcatcaactaaccctactaggccttatacaattaatactgttgaagaacatttagacatgctcatggtatgtcatcaccttgacaaatctattcctgaagatgttgcctttgctgaaagtcgtattcgaagagaaacgattgctgcagaagatattcttcatgacatgggtgcattttcaattattgcatcagatagtcaagctatgggtcgtgtgggagaggttataattagaacatggcaaacagcccataaaatgaaagtacaaagaggacaattaaaagaagaaaatggagataatgataatgtgcgagtaaaaagatatatagctaaatataccatcaatcctgctatagctcacggaatatctgaaaatattggaacaattgaaaaaaataaaagagctgatattgtaatttgggatccagcattttttggagtaaagcctgaagttatcttgatgggtggaagtattgcatgtgctcaaatgggtgatcctaatgcatcaatacctaccccccagccagtatattcaagacctatgttttcttcttttggcaaatctctagaaaaatcttccgtaacatttgtaagtcaaatatctcttgatagagatatgcataagaattcaggcgtcaataaatcattattaccagtaaagaatattagaaatatttcaaaaaaagatatggtattaaataattattgtccacaaatagaagtaaaccctgaaacatatgaagttaaagctgatggagaacttataacatgcgaacctgctaataccctacctttagcacaacgttactttatgtattga

SEQ ID NO: 264757 - DNA, 475 bp, Unknown
  Bacterial polypeptide expressing nucleotide sequence isolated from the Sargasso Sea
aatgaaaaaaataaaaagagaagcttatgccgatatgtatggaccgacaactggtgataaagtaagacttgctgacactgaactttttattgaagtggaaaaagatttaacaacatatggagaagaagttaaatttggtggaggaaaagtaattagagatggaatggggcaatctcaagtatctcgtaaagacggagcagttgatacagttataaccaacgctttaattgttgatataaatggtatttataaagctgatattggtctcaaagatggtttaattaatgaaattggtaaagctggtaacccagatacacaaccaaatgtaaatattattattggacctggaactgagataattgctggtgaaggtaaaaatataacagctggtggatttgacagtcatatacattttatttgtcctcaacaaatagatgatgcacttcattcaggtatatacactatgtttgggagt

SEQ ID NO: 264758 - DNA, 310 bp, Unknown
  Bacterial polypeptide expressing nucleotide sequence isolated from the Sargasso Sea
atgaaagttggagaaataatcacaaaaaaaaatagtgatattattttaaatgaagacagaaattcaatcactataaaagtttcaaatagtggagatcgaccaatacaagttgggagtcattatcatttttcagaaacaaatgaatatttaaaatttgatagagaaaaatcaaatgggatgcgtttagatataccatctggtactgccgttcggtttgaaccaggtcaatcaaaagatgtaaaattaattccaataacaggaaacagaaagatatttggttttaataagaaagttatgggtcagttgtaat

SEQ ID NO: 264759 - DNA, 184 bp, Unknown
  Bacterial polypeptide expressing nucleotide sequence isolated from the Sargasso Sea
gattttgtaatagaaggcgcaagagatggaaaaatggtatcggaattaatggaaaaaggtgctcatgtattaaaaaaagaagattgtatggatggaattccagatatgattagagaagtacaggttgaagcaacatttcctgatggaacaaaattagtaacagtacataaacccataagataat

SEQ ID NO: 264760 - DNA, 304 bp, Unknown
  Bacterial polypeptide expressing nucleotide sequence isolated from the Sargasso Sea
catgaaattatcacctagagaaaaagataaactcttaattagcttagctgcaatagttgcaagaaatagaaaaagtagaggaattaaacttaactaccctgaggcgatagctttaatttcagattttgttgtagaaggagctagagaaggacgcaccgtagcagacttaatggaagctggtgctcatgttgtaaaaaaggatgaatgtatgagtgggattcctgaaatgatacatgaagttcaagttgaagccacatttcccgatggcacaaaattagtcacagttcatcatcctataagataa

SEQ ID NO: 264761 - DNA, 334 bp, Unknown
  Bacterial polypeptide expressing nucleotide sequence isolated from the Sargasso Sea
aatgagttcaaaaataacgagatcatcatatgcagaaatgtttggacctacaactggtgacaaagtaagattggctgacacagacttgtttatagaagttgaaaatgatttaactgtctatggcgaggaagtgaaatttggtggtggtaaagtaattagagacggtatgggccaatcacaagttacaagaaaagatggcgccgttgatactgttattacaaacgcactgatagttgatgtaaatggaatatttaaagccgatattgggattaaagatggtattattcaaaaaattggaaaatctggaaaccctgatacccagccaaaaaattga

SEQ ID NO: 264762 - DNA, 307 bp, Unknown
  Bacterial polypeptide expressing nucleotide sequence isolated from the Sargasso Sea
aatgatacctggagaaattattacaaaatctgatgaaatagttttaaataaagattctgatgctttaagtataaaagtttcaaatacaggtgatagaccaatccaagttggtagccactatcacttttacgaaacaaacgaatttttatcttttgacagggataaaacaaaaggaatgagactagatattgcagctggaactgcagttcgttttgaaccaggtcaaacaagagaggtaaatttaatcaatatcaagggtgataaaaacatttttgggtttaatcagaaaattatgggagccttgtaa

SEQ ID NO: 264763 - DNA, 718 bp, Unknown
  Bacterial polypeptide expressing nucleotide sequence isolated from the Sargasso Sea
aatgaaaaaaataagtagagatgcttacgctgatatgtatggaccaacaactggtgacaaaattagattagctgacacagaactttttatagaagttgaaaaagaccttacaacttatggggaagaagttaaatttggaggaggtaaagttataagagatggtatgggtcaatctcaagtctctagaaaagatggggcagttgatacagttataacaaacgctttagtagttgatgtaaatggaatttataaagcagatattggtctaaaagatggtttaataaatgagataggcaaagcaggtaatccggatacacaaccaaatgtaaatattattataggacctggtactgagataattgccggagaaggaaaaattattacagctggcggttttgatagtcatatacattttatttgccctcagcaaattgatgattctttgcattctggtatcacaactatgttaggaggtggaacaggaccagctcatggaactttagcaacaactgttactcctggtccatggcatttagaaagaatgattcaatcagcagatgccttttcaatgaatttagcttttgctggcaaaggtaatagttctctgcctttagcacttgaagagcaggtaattgcaggagcaagttcccttaaattacacgaagattggggtacaactcctgctgcaatcgacaatttgttaaatgttgctgacaaa

SEQ ID NO: 264764 - DNA, 277 bp, Unknown
  Bacterial polypeptide expressing nucleotide sequence isolated from the Sargasso Sea
aatggagttaaaacttaatgaagatcgagcatctatagtaatgaaagtatctaataaaggtgatcgtcctatacaagttggtagtcattatcattttgcagaaacaaatgaatttttagaatttgatagagatacatcaagaggaatgcgtttagatataccatctggtactgcagttcgctttgagccaggtcaaacaaaagatgttgaattaattgcaattagtggagaaagaaaaatttatggttttaataaaaaaataatgggtaagttataa

SEQ ID NO: 264765 - DNA, 304 bp, Unknown
  Bacterial polypeptide expressing nucleotide sequence isolated from the Sargasso Sea
atgaaactcagtccgcgcgaaaaggataaattgcttatttcaatggcagcaatggtagcccgaaatcgtaaagagcgaggtgtgaaattaaactaccctgaagccatagcattaattagtgactttgttgttgagggagccagagatgggagatctgttgcagatttaatggaggctggtgcccatgttgtcacgcggggcgactgcatggaaggtatctctgagataattcatgacgtgcaagtagaagccacctttccggatggcaccaaacttgtaacagttcataacccaatacgataaa

SEQ ID NO: 264766 - DNA, 878 bp, Unknown
  Bacterial polypeptide expressing nucleotide sequence isolated from the Sargasso Sea
gcgctgatcgttgactactggggtattgtcaaggccgacgtcggtgtgaagtcaggaaggattgccgccatcggtaaggcggggaaccccgacattcagccagcagcgacggttgttataggaccaggaaccgagatcattgcgggtgaaggaaagatcttgacggccggcggtattgactcccacatccatttcatctgcccccaacagattgatgaggctctcgcgtccggtataacgaccatgcttggtggaggcacgggtccggcgacgggcacgaatgcgaccacctgtaccccggggcccttcaacatagagatgatgatgcgtgcgatcgaggggcagccgatgaattttgggttcctgggtaagggtaattcgagtaaccgacaagcactggtcgagcagatcgaggctggggcctgtggtttgaaactccacgaggactggggcactacacctcaggccattgatacgtgcctgacagttgccgatgagactgatacccaggtcgcgattcatactgacaccctaaatgagtcagggttcgttgaagaaaccatcagggcgattgctggacggactattcatacctatcacactgagggcgcgggcggagggcatgctcccgacattataaaggcggctgggttaccaaatattctcccgtcctctacgaatccgacccgaccctacacgatcaacaccgttgacgagcacctcgatatgctgatggtctgtcatcacctatcaccgaatatccctgaggacgtcgcgttcgcggatagtcgaattcggaaggaaaccattgcggccgaggacattcttcatgacaagggcgcattcagtatgatcgcttccgactcacaggcgatggg

SEQ ID NO: 264767 - DNA, 832 bp, Unknown
  Bacterial polypeptide expressing nucleotide sequence isolated from the Sargasso Sea
gggccaaccacaggagacaaagtaaggcttgcagatactgaattatttatcgaagttgaaaacgatctaaccacatatggtgaagaagtaaagtttggtggtggaaaagtaataagagacgggatgggtcaatctcaaattagcagagaaaaaggagctgctgatacagttataactaatgctttaatagttgatgtaaatggaatttataaagctgatgttggtttaaaagatggaaaaatatttgaaattggtaaagctggtaatccggacactcaatctaaagtaaatattattattggcccaggaacagagataattgctggagaaggaaaaattttaacagctggaggatttgatagtcatattcattatatatgtcctcaacaaattgatgacgctttgcactcgggtattacaacaatgttaggaggaggtactgggcctgctcatggaacacttgcaacaacatgtacacctggtccatggcatatacaaagaatgattcaatctgctgatggtttttctatgaatttagcttttgcaggaaaaggaaattcttcattgccagaaggtcttgaggaacaaattttagctggagcttcagctcttaaattacatgaggactggggaacaactccaggtgcaattgataattgtttaaatattgctgataaaaatgatgtgcaagtaatgattcatacagacactttaaatgaaagcgggtttgtagaaaatactatcaaagcaattaataaaagaactatacatgcttttcatacagagggtgctggtggtggacacgcaccagatataattaaagtttgtggag

SEQ ID NO: 264768 - DNA, 517 bp, Unknown
  Bacterial polypeptide expressing nucleotide sequence isolated from the Sargasso Sea
tatgtcctataaaattgacagaactacttatgctcaaacttacggaccaactaccggagatagagtaaggcttgctgatacagaactttttatagaagtagaaaaggatttaactacatacggagatgaagttaaattcggtggaggtaaagttattcgagatggaatgggacagtctcaagtaagaagagctgatggagctgtagataccgtaataactaatgccttgatcgtagattggtggggaatagttaaggctgatgtaggtataaaagatggaatgatttttgaaattggtaaggctggtaatcctgatatccaggataatgttgatattgttattggtgcatcaacagaagtaatagctggagaaggcaatattcttactgccggttcaatagatactcacattcactttatctgtccccaacaaattgagactgcaatagcctcgggaattacaactatgttgggaggaggcactggtcctgccactggaacgaatgcaactacttgc

SEQ ID NO: 264769 - DNA, 968 bp, Unknown
  Bacterial polypeptide expressing nucleotide sequence isolated from the Sargasso Sea
ttgtacagcaggtacaattgatagtcacattcactttatttctcctcaacaagcaatcgatgcaatttgtatgggaacaactacaatgataggaggaggtacaggaccggcagatgggacaaacgctacaacctgcactccaggagaattcaatattcataagatgattcaagcagtagaagagtctccgttaaactttggatttttgtgtaaaggaaatgattcccaagaagagtcacttatggaacagattagagccggagcctgcggtttaaaattgcatgaagattggggcaccactcctgccacgattaattcagcactaaatgttgcagataagacagacacccaggtagcaattcacacagatacattaaacgaatgtgggtatgttgacgacaccattgctgcaattaatggaagagttattcatacatatcataccgaaggtgcaggcggaggccacgcaccagatattatgaaaattgcctcagaaccaaatattttgccgtcatcgactaatcctacaagaccatttaccaccaatactcttgaagagcacttagacatgatgatggtatgccaccatcttaatccatcagttccagaggatatttcatttgccgaatctaggattagagcagagacaattgctgcagaagacatacttcacgacataggagcaattagcatgatgtcatcagatagtcaggcaatgggaagagtgggagagacaactaccaggaattggcagacagcagataaaatgaaaaaaatgaaaggagcattgcctgaagattctcaagaaaatgataattttagaattaaaagatatgttgcaaaaattactgcaaaccctgcaataactcatggtatatcagaacatgttggaacattagaaaatggtaagatggcagacatcatagtatggatgccacaattctttggaattaaacgcaaagcatgat

SEQ ID NO: 264770 - DNA, 304 bp, Unknown
  Bacterial polypeptide expressing nucleotide sequence isolated from the Sargasso Sea
tatgcatctgtcacctcaagaaaaggataaattattgattttttctgctgcgctcttagctgaaagaagactcagtcgaggtcttaagcttaattatcctgaaacaattgcttttttaagttttcaagttcttgaaggagcacgagatggtaaaagtgtaagtcaattaatgtcagagggaactacctggctttcaaaatcacaagttatggagggcattcctgaaatggttgatgaagttcaaatagaagcggttttcaccgatgggactaaattagttactattcacaatccgattaattag

SEQ ID NO: 264771 - DNA, 787 bp, Unknown
  Bacterial polypeptide expressing nucleotide sequence isolated from the Sargasso Sea
atttttgaaatcggtaaggctggtaatcccgatgtacaggataaagtcgatattgttattggtgcatcaacagaagtaatagctggagaaggtcatatccttactgcaggttcaatagatactcacattcactttatctgtccccaacaaattgagacagcactagcttcaggaattacaactatgttagggggaggaactggacctgcaactggcacaaatgccacaacctgtacccctggatcttttcatatttctcgaatgcttcaatctgcagaagcatttcctatgaatttaggtttttttggtaaaggcaattcaacaaacgaaagaaatcttattgatcaagttgaagctggtgcatgtggattgaaacttcatgaggattggggaacgactccttccaccataaattcatgtcttaatgttgcagataaatttgatgttcaagtttgtattcactctgatactttaaatgaggcagggtttgttgaagataccatcaatgctattgctggaagaacaattcatacttttcataccgaaggagcgggtggaggtcatgccccagatattattaagatatgtggagaaaataatgttcttccaagcagtactaatccaacaagaccctatacgaggaataccttagaagagcaccttgacatgttaatggtttgtcatcatttagattctaaaattccagaagatattgcatttgctgaatcacggataagaagagaaactattgctgcggaagatatcctgcatgatatgggcgccttct

SEQ ID NO: 264772 - DNA, 319 bp, Unknown
  Bacterial polypeptide expressing nucleotide sequence isolated from the Sargasso Sea
gatggatttaactccgcgcgagaaagacaagttgctgttattcacagcaggtttggtagctgagcgccgtttggcaagaggactgaccctaaactatccagaggccgtagcgctgatcagtatggaaattttagagggggctcgtgacggacggaccgtcgctgagctgatgcaactcggaaggacgatcattactagagaccaggtgatggagggagtcgcagagatggtagatgaggtgcaagtagaagccacgtttccagatggtacaaaattggtgactgttcacgaacccatacaagagcgtttgaagtcatga

SEQ ID NO: 264773 - DNA, 885 bp, Unknown
  Bacterial polypeptide expressing nucleotide sequence isolated from the Sargasso Sea
aaggagctggtggcggccatgcgcctgatattataaaaatttgtggtgagaaatttgtcttaccttcctcaacaaatccgacaagaccatttaccaaaaatactgtggaagagcatctcgatatgttaatggtttgccaccaccttgataagtctattcctgaagacatagcatttgctgagagtcgtataaggcgagaaacaattgcagctgaagatatattgcacgacatgggggccttttctatcattgcttctgacagccaagctatgggacgagttggggaagttattataagaacctggcaaactgctgataaaatgaaaaagcaaagaggcgctctttcagaagaaactggtaacaatgataatctgcgagctcggcggtacattgcaaaatacacaataaaccccgcaattgctcacggaatttcacatgaggttggctcagtagagctcggtaagcgagcagatcttgttctttggaacccagcattttttggagtaaaaccagagatggttttattgggcggcacaattgctgtcgctcaaatgggtgatccaaatgcttccattccaacccctcaaccggtttacacccgatcaatgtttggggctcttgggagggctttgtctgagacttctgtgacgtttgtttcggaagctgctcacgctgatggtataagttcaaaactaggtttagctaagaaagcggtaccggttaaaaacaccagaaatattggaaaacttgatttaaaattgaatgtagctttaccaaaaatcgatgttgatccagagacctatgaagttcgtgcggatggagagcttttaacttgtcagccagccgacgaagtgtccatggcgcagcgctattttatgttttagg

SEQ ID NO: 264774 - DNA, 694 bp, Unknown
  Bacterial polypeptide expressing nucleotide sequence isolated from the Sargasso Sea
agttacacctgggccatggcatatagaaagaatgatacaatcagcagatgctttttctatgaacttggcttttgctggtaaaggaaatagttcattgcctcaagcacttgaagaacaagtaattgctggtgcaagctcactaaaattacatgaagattggggtacaaccccagcagcaatagataattgtttaaatgtagctgatgatcatgacattcaagtaatgattcatacagatacattaaatgaaagtggatttgtcgaaagtacaattaaagcaatcaatggacgaacaattcacgcttttcatacggaaggtgctggtggtggtcatgcacctgatattataaaagtttgtggtgaacaatatgttattccttcttctactaacccaacaagaccctatacagttaatacagttgaagaacatttagatatgttaatggtttgtcatcacttggataaatcaatacctgaagacgttgcttttgctgaaagtcgaattcgaaaggaaacaattgcagcggaagatatactacatgacatgggtgctttttcaataattgcttctgatagtcaggccatgggtcgtgttggtgaagttattattagaacttggcaaacagcacataaaatgaaagtgcaacgtggacaattaaaagaagagcagggtaataacgacaatgtaagagta

SEQ ID NO: 264775 - DNA, 907 bp, Unknown
  Bacterial polypeptide expressing nucleotide sequence isolated from the Sargasso Sea
gactggtcccgcgcatggaacgctcgcgacaacgtgcaccccaggaccgtggaatattggtaaaatgctacaatcagctgatgcctttccaatgaatttatccttcgcgggtaaaggcaatgctagtcttcctatggctctaaaagaacaagttaaagcaggcgcttcttccctaaagcttcatgaggactggggtactactccaggagctatcgattgttgtttaaatgtagctgacgaattggatgttcaagtaatgattcatacagatacactcaatgaaagcggatttgtggaaaatacgataaaggcaatcggcggacgaacaatacatgctttccacacggagggggctggaggtggacacgcgccggatattataaaacttgctggagaagaaaatgttattccttcctcgactaatccaactagaccatacaccgtcaatactattgaagagcatttggatatgttgatggtatgtcatcacctggataaatctatacctgaggatgtagcttttgccgaaagcaggattagaaaagaaacaattgcggcagaagatatacttcatgatgttggtgctatgtctatcattgcctccgatagccaggctatgggtcgggttggggaagttattataagaacatggcaaacagccgataaaatgaaaaagcagagggggagattatcggaagagaagggtcaaaacgacaatctgcgaataaaaagatacatagctaaatacaccataaatccggcaatagcacacggaatttccaaccatatcggtagcatagaaattggaaaaagagctgacttcgttctatggaataccgctttttttggtgtaaagccggaaatggtattaataggaggtgtaataacgtgtgctcagatgggagat

SEQ ID NO: 264776 - DNA, 901 bp, Unknown
  Bacterial polypeptide expressing nucleotide sequence isolated from the Sargasso Sea
tcctgcacatggtactttagctactacagttacgcctggaccatggcatatagagaaaatgatacaatcagcagatgctttttctatgaacttggcatttgctggtaaaggaaatagttcattgcctcaagcacttgaagaacaagtaattgctggtgcaagctcactaaaattacatgaagattggggtacaaccccagcagcaatagataattgtttaaatgtagctgatgatcatgacattcaagtaatgattcatacagatacattaaatgagagtggatttgtcgaaagtacaattaaagcaattaatggacgaacaattcatgcttttcatactgaaggagctggtgggggtcatgcaccggatataattaaagtatgtggagaacagtatgttattccgtcatccacaaatccaacaagaccatacacagttaatacagttgaagaacatttagatatgttaatggtttgtcatcacttagataaatcaatacctgaagatgtagcttttgctgaaagtcgtattcgaaaagaaacaattgctgcagaagatatacttcatgacatgggtgctttttcaattattgcttctgatagtcaagccatgggtcgtgttggcgaagttattattagaacatggcaaacagcacataaaatgaaagttcaacggggacaattaaaagaagagaagggtaataatgacaatgtacgtgttaaaagatacattgcaaaatatacgattaatcctgcaattgcccatggtatttctgatcatattggaagtattgaaaaaaataaacgtgctgatattgttatatgggatactgctttttttggtgtgaaacctgaaatggtattacaagggtggaagtattgcttgcgcaccaatgggtga

SEQ ID NO: 264777 - DNA, 667 bp, Unknown
  Bacterial polypeptide expressing nucleotide sequence isolated from the Sargasso Sea
tatgtcctataaaattgacagaaatacttatgctcaaacttacggacccactaccggagatagattaaggcttgctgataccgaactttttatagaagtagaaaaggatttaactacatatggagatgaagttaaattcggtggaggtaaagttattagagatgggatggggcagtctcaagtaagaagagctgatggagctgtagataccgtaataacaaacgccttgatcgtagattggtggggaataattaaggctgatgtaggtataaaagatggaatgatttttgaaattggtaaggctggcaatccagatatccaggataatgtcgatattgttattggtgcatcaacagaagttatagcaggagaaggccatattcttactgcgggttcaatagatacccacattcactttatatgtccccaacaaattgagacagcactagcctctggaattacaaccatgctgggaggaggcactggaccagctactggcacaaatgccactacttgcactccaggttcttttcatatttcaagaatgcttcaatctgcagaagcatttcctatgaatttaggtttctttggaaaaggaaactcaacaaacgagagcaatcttattgatcaggttgaagctggtgcatgtggattgaaagcttcatga

SEQ ID NO: 264778 - DNA, 837 bp, Unknown
  Bacterial polypeptide expressing nucleotide sequence isolated from the Sargasso Sea
gatggaaaaatatttgaaattggtaaagcaggtaacccagacactcaatctaaagtaaatattattattggtccaggaacagagataattgctggagaaggaaaaattttaacagctggaggttttgatagccatattcattatatatgtcctcaacaaattgatgatgctttgcactcgggtattacaactatgttaggaggaggtactgggcctgctcatggaacacttgcaacaacgtgtacacctggtccttggcacatacaaagaatgattcaatctgctgatggtttttctatgaatttagcttttgctgggaaaggaaattcttctttaccagaaggtctccaagaacaaattctagcaggagcttcagctttaaaattacatgaggattggggaaccactcctggagcaattgataattgtttaaatattgctgataaaaatgatgtgcaagtaatgattcacacagatactttaaatgaaagtgggtttgtagaaaatactattaaagcaattaacaaaagaactattcatgcttttcatacagaaggtgctggtggtggacacgcaccagatataattaaagtttgtggagaagagtatgttattccttcttcaacaaatcccacaaggccatacacagttaataccatagaagaacatttagatatgctgatggtttgtcatcatctcgataaatctattccagaggatgtagcatttgccgaaagtagaataagaagagaaacaatcgcagcagaagatattcttcatgatatgggtgcattttcaattattgcatcagatagtccaggcaatggaagagtcgga

SEQ ID NO: 264779 - DNA, 729 bp, Unknown
  Bacterial polypeptide expressing nucleotide sequence isolated from the Sargasso Sea
aacgccagccagcccgccgcccttgtggaaatggtcaaggcgggggcctcgtcgctcaagctgcatgaggattggggcaccacccctgcggcgattgattgctgcctctcggtggccgatgacatggatgtgcaggtgatgatccacaccgatacgctcaacgaaagcggctttgtcgaaaacaccgtcgcggccatcaaaggccgcacaatccatgcctttcataccgaaggtgcggggggcggccatgcgccggacattattaaaatatgcggcgatgccaatgtgatcccgtcctcgactaacccgacgcggccctttacggtcaatacggtggatgaacatctcgacatgttgatggtgtgccaccacctcgacaaatccatccccgaagacgtcgccttcgccgaaagccgcatccggcgcgaaaccatcgccgccgaggatatcttgcacgatatgggggccttttcgatcatcgcatcggatagccaagccatgggccgcgtgggcgaggttttgatccgcacatggcagaccgctgacaagatgcgcaaacagcgcgggcgtctgcccgaagaaaccggcgagaacgacaatctgcgtgtgcgccgctatatcgccaaatacaccattaatccggccatcgcccatgggatcagccacgaaataggctcgattgatctgggcaaacgtgccgatctggtgctttggtcaccggcatttttc

SEQ ID NO: 264780 - DNA, 447 bp, Unknown
  Bacterial polypeptide expressing nucleotide sequence isolated from the Sargasso Sea
catgccctaccgcatctcccgccaggcctacgccgagacctacggacccaccaccggcgacagggttcgcctggccgacaccgatctgattctggaagtcgaaaaggattacaccgtctacggcgatgaggtgaagttcggcggcggcaaggtgatccgcgacggcatgggccaatcccagacccctcgagccgagggcgccgtcgacacggtgatcaccaatgccctgatcctcgactggtggggcatcgtcaaagccgatgtcggcctcaaggacggccgcatcgttggcatcggcaaagccggcaaccccgacacccaggaaggggtgacgatcgtggtgggcccaggcaccgaagccatcgctggggagggccacatcctcacggccggtggcatcgacacccacatccacttcatctgcccccagcagatcgaaacggccct

SEQ ID NO: 264781 - DNA, 728 bp, Unknown
  Bacterial polypeptide expressing nucleotide sequence isolated from the Sargasso Sea
gctggtttccggtgtgacaacgatgatcggcggcggcaccggtccggccgcgggcactcacgccaccacctgtacgccgggtccgtggtacatcgcacgcatgctgcaggcggcagacacgttaccggttaacatcggtttgctgggcaaaggcaacggctcaaatcctgacgccctgcgcgagcaaatcagcgcgggggcaattggcctgaaaatccatgaagactggggcgccacgcctgccgccatcgactgcgcactgaccgtggccgacgagatggacatccaggtcgcgctgcacagtgacacgctcaatgagtccggtttcgtggaagatacgctggcggcgattggcgatcgcaccattcatacttttcacaccgaaggcgcgggcggcggtcatgcaccggatatcatcaccgcctgcgcgcatccgaatatcctgccctcctctacaaacccgacgctgccctataccatcaacaccatcgacgagcatctcgacatgctgatggtttgccaccatctcgatccggatatcgccgaagacgtggcctttgccgaatcacgcattcgccgggaaacgatcgctgccgaagatgtgctgcatgacattggcgccttttccctgacctcgtccgattcacaggcaatggggcgcgtgggcgaagtgatcctgcgcacctggcaggtggcgcaccgcatgaaggttcagcgtggcccgttgg

SEQ ID NO: 264782 - DNA, 913 bp, Unknown
  Bacterial polypeptide expressing nucleotide sequence isolated from the Sargasso Sea
ttatgcagatatgtatggtccaaccaaaggcgataaagttaggttagcagacacagaattaattattgaagttgaggaagatttcacaacttatggggaagaaattaaatttggtggtggtaaagtcataagagatggtatggggcaatctcaaactccaagaagtaaaggggcagttgatactattattactaatgctttaatacttgatatctctggaatttataaggctgacttaggaattttggatggaagaatttgtaaaattggtaaaggagggaatcctgatactcagccaaatgtggatattatagttggccctggtactgaagtaattgctggagaaggtaaaattttgacagcaggtggttttgattcacatattcattttatttgcccacaacaaatagaagatgctttacattcaggacttaccacaatgttgggtggagggactggtccagctcatggtacattagctacaacatgtactcctggaaaatggcatattgggagaatgctacaatcagcagatgcctttcctatgaatcttgcttttgcaggtaaaggaaatgcaagtttgcctgaagcattagaagaacaaattttagcaggtgcctgtgctttaaaacttcatgaagattgggggacaactccagcagccattaataattgtttatcagttgcagatagcctagatgtccaagttatgattcatactgatactttaaacgaaagtggatatgtagaaacaactgttaaagctattgataatagaactatacatgcttttcacactgaaggagcggggggtggtcatgctccagatataataaaagtttgcggtgaaaaaaatgtcattccaagttcaacaaatccaacaagaccatatacaataaatactctagaagag

SEQ ID NO: 264783 - DNA, 637 bp, Unknown
  Bacterial polypeptide expressing nucleotide sequence isolated from the Sargasso Sea
atggtaaaaatttctagagcagcttatgcagacatgtatgggcctactacaggagataaagtaaggcttgcagatactgaattatttattgaagttgagaacgacctaactacttacggtgaagaagtaaagtttggtggcggaaaagtcataagagatgggatgggccaatcacaaattagtagaaaaaaaggagctgctgatacagttatcactaatgctttaatagttgatgtgaatggaatttataaagctgatgtaggtttaaaggatggaaaaatatttgaaattggtaaagctggtaatccagatactcaatcaaaagttaatattattattggtcctggaacagagataattgctggtgaaggaaaaattttaacagctggaggttttgacagtcatatccattacatatgtcctcaacaaattgatgacgctttgcactcaggtatcacaaccatgcttggaggaggaactggaccggctcacggaacacttgcaacaacctgcacacctggtccatggcatatacaaagaatgattcaatctgcagatggtttttctatgaatctagcttttgcaggaaaaggaaattcctcattgccagaaggtcttgaggaacaaattctagcag

SEQ ID NO: 264784 - DNA, 808 bp, Unknown
  Bacterial polypeptide expressing nucleotide sequence isolated from the Sargasso Sea
cctacaagaccttacacggttaacacttcttgaagaacatctagatatgctaatggtttgtcaccacttggataaatccatacccgaagatattgcatttgctgaaagtaggataagaaaagagacaatagctgcggaggacatacttcacgacatgggggctttttcgattattgcgtctgatagtcaagccatgggtagagttggagaggttataataaggacttggcaaactgctcataaaatgaaaattcaaagaggtaggcttaaagaagaaaatggtgacaacgataatgtgagggttaagagatacattgcaaagtatactattaaccctgcaattacacatgggatatctaaatatattggatcaataagtgaagggaaaagggctgatatagttatatgggatcctgctttttttggagtaaagactgaaattgtaatgataggtggaagtattgcctgcgcacaaatgggtgacccaaatgcatctattcccactccccaaccagtttataccagaccaatgttttcatcttttggaagatcattagaggcatcctcaataacttttgtaagtaaagattcaattaaaactggtaatttagataagttaaatctagctaaagaaacagttgcagttgaaaaaacaagagatatttcgaaaaaggatatggtatttaataattactgtcctgatatttcggtagatccagaaacatatgaggttacagctgatgggaatatacttacctgtgagccagcaacagagcttcctctagctcaaagatattttttattttag

SEQ ID NO: 264785 - DNA, 304 bp, Unknown
  Bacterial polypeptide expressing nucleotide sequence isolated from the Sargasso Sea
aatggctaaaatttctagagcagcttatgcagatatgtatgggcctacaacaggagacaaagtaaggctcgcagataccgacttgatcattgaggttgaaaacgatctaaccacttatggtgaagaagtaaaatttggtggtggaaaagtaataagagacgggatgggtcaatcacaaattagtaggaaaaaaggagccgcagatacagttataactaatgctttaatagttgatgtgcatggaatttataaagctgacgttggtttaaaagacggaaaaatattgaaatcggtaaagctggta

SEQ ID NO: 264786 - DNA, 288 bp, Unknown
  Bacterial polypeptide expressing nucleotide sequence isolated from the Sargasso Sea
gagaaaaagataaacttttaataagccttgcagcgattgtcgctaaaaatagattgtcaaagggtataaaattgaactatccagaggctatcgctttaataacagattttgttgttgagggagctagagaaggtaaaagtgttgcagaattgatggaagcaggagctcatgttattaaaaaaaaggattgtatggaagggattccagatatggttaaggaagttcaagtagaagctacttttcccgatggaactaaattagtaacagtacacaaacctataaggtaat

SEQ ID NO: 264787 - DNA, 655 bp, Unknown
  Bacterial polypeptide expressing nucleotide sequence isolated from the Sargasso Sea
tatgggtgctttttcaattattgcttcagatagtcaggctatgggtagagttggagaagttataattagaacttggcaaacagcacataaaatgaaagttcaaagaggaagtttaccagaggaaaaaggagacaatgataactttagagttaaaagatatttagcaaaatatacaattaatcctgcaattgctcatgggatttcaaaacatattggaagtattgaaaaaaataaacgtgcagatttagttttatgggacccagcattttttggtgcaaaaccagaaatgatactaataggaggaagtatagcctgtgcacaaatgggagacccaaatgcatcaattccaactccgcaaccagtatacactagaccaatgttttcatcatttggaacttctttagagaaatcctcagtaattttcacaagcaaactagctcttgaaaagaattctttaaaagatgcaagtattagaaaagacttattacccgtagaaaacacaagagccatttctaaaaaagatatgattttaaacaataagtgtccaaagattgaagttaatcctgaaacttatgaagtaaaggctgatggtgagataattacctgtgaaccagctaaagaactccctttggcacaaagatattttatgttttag

SEQ ID NO: 264788 - DNA, 304 bp, Unknown
  Bacterial polypeptide expressing nucleotide sequence isolated from the Sargasso Sea
tatgaacttgagccctagagagaaagagaaattgtttgtttctctggcagctatggtcgctagagatcgaagagagcgtggcattaagttaaatcaccctgaggcaatagcattaataacagacttcgttcttgaaggagcaagagaggggaaatctgtagctgagttaatggcctcgggagccaaggtaattaagaaatcagaatgcatggagggcatcccagaaatgattccagaagttcaagtggaagcaacctttaaagatggaactaagctagtaacagttcatcaaccgataaggtaa

SEQ ID NO: 264789 - DNA, 280 bp, Unknown
  Bacterial polypeptide expressing nucleotide sequence isolated from the Sargasso Sea
atgaaacttactcctagagaaaaagataaacttttaataagccttgcagcgattgtcgctaaaaatagattatcaaaaggtataaaattgaattatccagaggctatcgctttaataacagattttgttgtagagggagctagggagggcaaaagtgttgcagaactgatggaggcaggagctcatgtaattaaaaaaaaggattgtattgaaggcattccagatatggtgaaaaaagttcaagtggaagctacttttcctgatggaactaaattagtaa

SEQ ID NO: 264790 - DNA, 670 bp, Unknown
  Bacterial polypeptide expressing nucleotide sequence isolated from the Sargasso Sea
atggttaaaatttctagagcagcttatgcggatatgtatgggcctacaacaggagacaaagtaaggctcgcagatactgaattaattattcaggtcgaaaacgatctaacaacttatggtgaagaggtaaagtttggtggtggaaaagtaattagagatgggatgggtcaatctcaaattagtagaaaaaaaggagctgcagatacagttataactaatgctttaattgttgatgtgaatggaatttataaagctgatgttggtttaaaggatggaaaaatatttgaaattggtaaagctggaaatccagacactcaatctgaagtaaatattattattggtccaggaacagagataattgcaggtgaaggaaaaattttaacagcagggggttttgatagtcatattcattatatatgcccccaacaaattgatgatgctttacattcaggtatcacgacgatgctcggaggaggtactggacctgctcatggtacacttgcaacaacgtgtacaccgggaccatggcatatacaaagaatgatccaatctgctgatggtttttctatgaatttagcttttgctgggaaaggaaattcttcattaccagaaggtcttgaagaacaaattctagctggagcttcagctttaaaattacatgaggattggg

SEQ ID NO: 264791 - DNA, 240 bp, Unknown
  Bacterial polypeptide expressing nucleotide sequence isolated from the Sargasso Sea
aacgcttagaaagaggtgtaaaacttaattacccagaggttatagctctaataacagattttgttatagaaggtgcaagagacggtaaaatggtatcagaattaatggagtcaggtgctcatgttgtaaaaaaagatgattgtatggatggaatcccagatatgattccagaagtacaagttgaagctacatttcctgatggcacaaaattagtcactgtacataaacctataagataat

SEQ ID NO: 264792 - DNA, 908 bp, Unknown
  Bacterial polypeptide expressing nucleotide sequence isolated from the Sargasso Sea
tgcacaacgtgtaccacctggaccatggcatatacaaaaaatgattcaatctgcagatggtttttcaatgaatttagcttttgctggaaaaggaaattcctctttaccagaaggtcttgaagaacaaattctagcaggagcttcagctttaaaattacatgaggattggggaaccactcctggagcaattgataattgtttaaatattgctgacaaaaacgatgtacaagtaatgattcacacagacactttaaatgaaagtgggtttgtagaaaatactatcaaagcaattaacaaaagaactatacatgcttttcatacagaaggtgctggtggcggacacgcaccagatataattaaagtttgtggagaagaatatgttattccttcttcaactaatccgaccagaccatatactgtcaatacgatagaagaacatttagatatgctgatggtttgtcaccatcttgataaatctattccagaggatgtagcatttgcagaaagcaggataagaagagaaacaattgcagcagaagatattcttcatgatattggtgctttttcaattattgcatcagatagtcaggctatgggtagagttggagaagttatcattagaacttggcaaactgcacataaaatgaaagttcaaagaggaagtttaccagaggaaaaaggggaaaatgataattttagagttaaaaggtatttagcaaaatatacaattaatccagcaattgctcatgggatttcaagacacattggtagtattgaaaaaaataaacgtgcagatttagttttgtgggacccagcattttttggggcaaaaccagagatgatattaataggtggaagtatagcttgtgcacaaatgggagacccaaatgcatcaattccaactccac

SEQ ID NO: 264793 - DNA, 235 bp, Unknown
  Bacterial polypeptide expressing nucleotide sequence isolated from the Sargasso Sea
attggcaaagggtataaagttgaattatccagaagcaatagctttaataactgattttgtgatagagggagcaagagagggtaagagtgtttcggaactcatggaatcaggcgctcatgtaataaaaaaagtagattgtatggaaggtgttccagatatggtgaaagaggttcaagtagaagctacttttccagatggaactaaactagttacagtgcataaacctataaggtaa

SEQ ID NO: 264794 - DNA, 257 bp, Unknown
  Bacterial polypeptide expressing nucleotide sequence isolated from the Sargasso Sea
aatggttaaaatttctagagcatcatatgcagatatgtacggtccaaccataggagacaaagtaagacttgctgacacagagctgattattgaggttgaaaatgatcttactacttatggtgaagaggtaaaatttggtggtggaaaagtaataagagatggcatgggccaatcacaaatcagcagagaaaaaggcgcagtagatacggttattacaaacgctttgatagttgatgttagtggaatttataaagctg

SEQ ID NO: 264795 - DNA, 304 bp, Unknown
  Bacterial polypeptide expressing nucleotide sequence isolated from the Sargasso Sea
atgaagcttactcctagagaaaaagataaacttttaataagtcttgctgcaattgttgctaaaaatagattgtcaaaaggtataaaattaaattatccagaggcgatagctttaataacggattttgttattgagggagcaagagaaggtaaaagtgttgcagaactgatggaggctggagcttatgttattaaaaaaaaggattgtatggaaggcattccagatatggtgaaggaagttcaagtagaagctacatttcctgatggaactaagttggtaacagtgcacaaacctataaggtgat

SEQ ID NO: 264796 - DNA, 304 bp, Unknown
  Bacterial polypeptide expressing nucleotide sequence isolated from the Sargasso Sea
aatgaaattatcaccaagagaaaaagataaacttttagtaagtttagcggcaatagttgcacgaaacagaaaaagtagaggtgttaagcttaattaccctgaagcaatagcacttataactgattttgttatagagggagctagagatggaaaaagcgtagctgaattaatggaagcaggtgctcacgtaattaaaaaagacgattgtatgtctggtataccagatatgattcatgacgttcaagttgaagctacctttcctgacggaacaaaactagtgacagttcaccaccctattagataa

SEQ ID NO: 264797 - DNA, 790 bp, Unknown
  Bacterial polypeptide expressing nucleotide sequence isolated from the Sargasso Sea
cgcaacacgctcgaggaacacctcgacatgctgatggtgtgccaccacctcgatccgaagattcccgaggacgtggccttcgccgaatcacggatccggcgcgaaacgatcgccgccgaagacatccttcacgacctcggcgccttctcgatcatcgccagcgactcccaggccatgggccgcgtgggcgaggtaatcacccgcaccttccagaccgcccacaagatgaaggtgcagcgcggtgcattgcccgaagactccgctcgcaacgacaaccaccggctcaagcgctacatcgccaaggtgacaatcaacccggcgttggcccacggcatcagcagcgaagtggggtcgatcgaaaccggcaagctcgccgatctagtgctttggaagccgggcttcttcggcattcgcccggaactggtggtgaaaggcggttcgatcgtctgggcccagatgggcgatgccaacgcctcgattcccacccctggcccggtgcacggccggccgatgtttggtgccttcggcaaggcgctcgctcccagttgtctcaccttcgtgagtgaagcggcgatggatgccgacatccaacgtcagctggggctggagcgcacctgcatagcggtgaaggagacccgcagcgtgggcaagagcgccctcaagctgaattcagcattgcccaaggtgagcgtggaccctcagacctatgaggtgttcgccgatggtgagctgctcacctgtgagcccgccgaggtgctgcccctcgcccagcgctacctgctgctttgag

SEQ ID NO: 264798 - DNA, 775 bp, Unknown
  Bacterial polypeptide expressing nucleotide sequence isolated from the Sargasso Sea
cggcgaatgcttcaggccgctgaaggcctgccggtgaacctgggcttcttcggcaagggcaacgccagcaccccggaagcgctggaagaacaggtgcgcgccggcgcctgcggcctgaagctgcatgaagactggggcaccacgccggccacgatcgatgcctgcctgtcggtggccgatcggatggatgtgcaggtgtgcatccacaccgacaccctgaacgaagccggcttcgtggaagacacgatcgccgccatcaagggacgcacgattcacaccttccacaccgaaggtgccggtggcggccacgcgccggacatcatcaagatctgcggcgaggccaacgtgctgcccagcagcaccaaccccacccggccctacacccgcaacacgctcgaggaacacctcgacatgctgatggtgtgccaccacctcgacccgaagatccccgaggacgtggccttcgccgaatcgcggatccggcgcgaaacgatcgccgccgaagacatccttcacgacctgggcgccttctcgatcatcgccagcgactcccaggccatgggccgcgtgggggaggtgattacccgcaccttccagaccgcccacaagatgaaggtgcagcgcggtgccctgccggaagactccgcccgcaacgacaaccaccggctgaagcgctacatcgccaaggtgacgatcaacccggcgttggcccacggcatcagcagcgaagtggggtcgatcgaaaccggcaaactcgccgatctggtgctgtgga

SEQ ID NO: 264799 - DNA, 613 bp, Unknown
  Bacterial polypeptide expressing nucleotide sequence isolated from the Sargasso Sea
atttggtggaggaaaagtcattcgagatggaatggggcagtctcaagtatcccgacaagatggtgcggtcgatacagttataacaaacgctttaattgttgatgtaaaaggaatttataaagctgatattgggcttaaagatggcttaattaatgagattggaaaagctggtaatccagatacacaaccaaatgtaaatattgttataggacctggaacagaaattattgcaggtgagggaaaaattattacagcaggaggctttgatagtcatattcattttatttgtcctcaacaaattgatgatgcacttcattcaggcataacaacgatgttgggaggaggaactggccctgctcatggtactttggcaactacagttacacctggaccatggcatatagagagaatgatacaatctgctgatgctttttcaatgaatttagcttttgcaggtaaaggaaatagttcattacccaaggctctcgaagaacaagtaattgctggagcaagttcattaaaattacatgaagattggggtacaactccagcagctatcgataattgtttaaatgttgctgatgaacatgacattcaagttatgattcacact

SEQ ID NO: 264800 - DNA, 688 bp, Unknown
  Bacterial polypeptide expressing nucleotide sequence isolated from the Sargasso Sea
atgcctaaaaagatttcccgcgccgcttatgccgacatgtatggcccgaccacgggcgacagtctgcggctggcagacaccgacctgatcatcgaggtggagaaggatttcaccagctatggcgaggaggtgaaattcggcggcggcaaggtcatccgcgacggaatgggccagtcgcagaccagccgggccggcggcgctgtcgatacggtcatcactaacgcgctggttgtcgacgcgtcgggcatctacaaagcggatatcggactgaaaaacggcgtgatcgccgggatcggcaaggccggcaaccctgacacgcagccgaatgtggatatcatcatcggccccgggacagaggccatcgcaagcgaaggccatgtgctgacagcaggcggtttcgacagccatatccattacatctgcccgcagcagatcgaggatgcgctgcattccggcctgacaacgatgcttggcggcggcaccggtccggcgcatggcacgctggcaacaacctgcacgccgggtccctggcatatcgggcgcatgctgcaatccgcagacgcattcccgatgaaccttgccttcgccggcaagggcaatgccgcgcttccggcggcacttgaagaacaggtgcgcggcggggcctgcgcgctgaagctgcatgaagactggggcaccaccccggcag

SEQ ID NO: 264801 - DNA, 270 bp, Unknown
  Bacterial polypeptide expressing nucleotide sequence isolated from the Sargasso Sea
aatgaaattaacaccaagagaaaaagaaaagttaatgatcagtatggcagcaaatgttgcaagaaaacgtttagaaagaggtgtgaagcttaattacccagaagctatagctctaataacagattttgtcatagaaggtgcaagagatggaaaaatggtatcagaattaatggagtcaggtgctcatgttgtaaaaaaagaagattgtatggatgggatcccagatatgattacagaagtgcaagttgaagctacatttccagatggaac

SEQ ID NO: 264802 - DNA, 763 bp, Unknown
  Bacterial polypeptide expressing nucleotide sequence isolated from the Sargasso Sea
ccgaccagaccatatacagtcaatacaatagaagaacatttggatatgctgatggtttgtcatcatctcgataaatctattccagaggatgtagcatttgctgaaagtagaatcagaagagaaacaattgcagcagaagatattcttcatgacatgggagccttttcaattattgcatcagatagtcaggctatgggtagagttggggaagttatcattagaacttggcaaactgcacataaaatgaaagttcaaagaggaagtttaccagaggaaaaaggggacaatgataattttagagttaaaaggtatttagcaaaatatacaattaatccagcaattgctcatggaatttcaaaacatattggtagcattgaaaaaaataaacgtgcagatttagttttgtgggacccagcattttttggtgccaaaccagagatgatattaataggtggaagtatagcttgtgcgcaaatgggagacccaaatgcatcaattccaactccacagcctgtatacactagaccaatgttttcatcttttggaacttctttagagaaatcttcagtaattttcacaagcaaactagctcttgaaaagaactcattaaaagatgcaagtataagaaaagacttattacctgtagaaaacacgagagccatttctaaaaaagatatgattttaaacaacaagtgcccaaagattgaagttaatcctgaaacatatgaggtaaaagctgatggtgagatgattactttgtgaa

SEQ ID NO: 264803 - DNA, 894 bp, Unknown
  Bacterial polypeptide expressing nucleotide sequence isolated from the Sargasso Sea
ccttggcatatagaacgcatgctgcagtcagctgatcattttgctatgaatctcgcatttgccggaaaggggaacgcgtctctgcctcatcctttagaagaacaaattattggaggtgcatgcgcacttaaactgcatgaagactgggggactacaccaggtgcgatagataactgtttatcagttgccgacgaattagatgttcaagttatgatacataccgatacgcttaatgaaagcggatttgtcgaaaacacattgagggctatagacggccgcactatacacgcctttcatacggagggggcgggtggaggacacgcgcccgacattattaaagtttgtggtgagaacaatattattccctcatcaacaaatccaacccgtccttatactgtgaatacgctagaggaacatctagatatgctgatggtatgccatcatctcgataagtcaattcccgaggatgttgcttttgctgagagtcgaatcagacgagaaaccattgcagccgaagatatacttcatgatatgggggcattttcaattattgcctcagatagtcaggccatgggaagggtcgcggaggtaatcatcaggacttggcaaaccgctcacaagatgaagcaacaacgggggcgtctttctgaggaaccaggagataatgataattttcgggtcaaacgatacattgccaaatacaccataaatcctgctatatgccatggcattgcagcgcacataggttcaattgaggttggtaaacgagccgatctcgtaatttggaatcccgccttctttggtgttaaacctgaaatggttttgctgggagggagtattgcggtatctcagatgggtgatcctaatgcatccattccgacgccccaacctgtt

SEQ ID NO: 264804 - DNA, 853 bp, Unknown
  Bacterial polypeptide expressing nucleotide sequence isolated from the Sargasso Sea
attcaagtaatgatccatactgatacactcaatgaaagtggatttgttgaaagtactataaaagcaattaatggaagaacaattcatgcatttcatactgaaggtgcaggaggagggcatgctccagatattataaaactatgtggtgagccttatgttattccttcctcaactaaccctactaggccttacacagttaatacagttgaggaacatctagatatgctaatggtttgtcatcatttagataagtctattccagaagatgtagcgtttgctgaaagtcgtattagaaaagaaacaatcgcagctgaagatatcttgcatgatatgggagcattttcaattattgcttctgatagtcaagcgatgggtcgtgttggagaggtgataatacgtacttggcaaactgctcataaaatgaaaattcaacgaggtcaacttcaagaagagacaggtaataacgataatataagggtaaaaagatacattgctaaatatacaattaatccagcaattgcacatggtatttcttcttatataggaagtattgaaacaaacaaaagagcagatatagttatttgggaccctgctttttttggtgttaaaccagaaatgattttaataggaggaagtattgcctgtgctcaaatgggtgaccctaatgcatcaattccaaccccccagccaatttattcacgtcctatgttctcatcttttggaaaatctttagaaaaatcgtctgtaacatttgttagtaacatttctcttgaaaaaaattctcataataaatcaggaattaaaaaagatcttcttcccgttgaaaatattagaaatattacaaaaaaagata

SEQ ID NO: 264805 - DNA, 304 bp, Unknown
  Bacterial polypeptide expressing nucleotide sequence isolated from the Sargasso Sea
atgaaacttactcctagagaaaaagataaacttttaataagccttgcagcgattgtcgctaaaaatagattatcaaaaggtataaaattgaattatccagaggctgtcgctttaataacagattttgttgtcgagggagctagagagggcaaaagtgttgcagaactgatggaggcaggagctcatgtcattaaaaaaaaggattgtatggaaggtattccagatatgattaaggaagttcaagtagaagctacttttcctgatggaaccaagttagtaacagtacacaaacctattaggtgat

SEQ ID NO: 264806 - DNA, 262 bp, Unknown
  Bacterial polypeptide expressing nucleotide sequence isolated from the Sargasso Sea
tatggcagctaatgttgctagaaaacgtctagaaagaggtgttaaacttaactacccagaagctatagccttgataacagattttgtcatagagggcgcaagagatggaaaaatggtatcagaattaatggaaacaggagctcacgtagtaaaaaaagaagattgtatggatggtattccagatatgattccagaagtacaagttgaagcaacatttccagatggaacaaaattagtaacagtacataaaccgattagataa

SEQ ID NO: 264807 - DNA, 281 bp, Unknown
  Bacterial polypeptide expressing nucleotide sequence isolated from the Sargasso Sea
aatgaaaaaaataaagagagaagcttatgccgatatgtatgggccaacaactggtgataaagttagacttgctgatactgaattatttattgaagtggaaaaagatttaacaacttatggagaagaagtaaaatttggtggtggaaaagttattcgagatggaatgggacaatctcaagtctctcgtaaagatggtgctgttgatacagttataacaaacgccttaatagtagatgtaaatggaatttataaagctgatattggtcttaaggatggcttaa

SEQ ID NO: 264808 - DNA, 845 bp, Unknown
  Bacterial polypeptide expressing nucleotide sequence isolated from the Sargasso Sea
aatgaaaaaaataaaaagagatgcttatgctgatatgtatgggccaacaactggtgataaagtaagacttgctgacactgaattatttattgaagtggaaaaagatttaacaacttatggagaagaagtaaaatttggtggcggaaaagttattcgagatggaatgggacaatctcaagtatctcgtaaagatggtgctgttgatacagttataacaaacgccttaatagtagatgtaaatggaatttataaagctgatatcggaatcaaagatggcttgattaatgaaattggcaaagcaggaaatccagacacacaaccaaatgtaaatattattattggacctggaacagaaataattgcaggtgagggaaaaattatcacagcaggaggttttgatagtcatattcattttatttgccctcaacaaattgatgatgctctacattcaggcataacaacaatgttgggtggaggaactggtccagctcacggaacattagcgacaactgttactccaggaccatggcacatagagagaatgatacaatctgctgatgctttttctatgaacttagcttttgcaggtaaagggaatagttcattaccaaatgcactcgaagaacaagtaattgctggagcaagttctttaaaattacatgaagattggggtacaaccccagcagctattgataattgtttaagtgttgctgatgaacatgatattcaagttatgattcacactgatacattgaatgaaagtggatttgtagagagtacgattaaagcaattaatggaagaaccattcacgcatttcatacagagggagcaggtggaggtcatg

SEQ ID NO: 264809 - DNA, 784 bp, Unknown
  Bacterial polypeptide expressing nucleotide sequence isolated from the Sargasso Sea
gattcccaagaagagtcacttatggaacagattagagccggagcctgcggtttaaaattgcatgaagattggggcaccactcctgccacgattaattcagcactaaatgttgcagataagacagacacccaggtagcaattcacacagatacattaaacgaatgtgggtatgttgacgacaccattgctgcaattaatggaagagttattcatacatatcataccgaaggtgcaggcggaggccacgcaccagatattatgaaaattgcctcagaaccaaatattttgccgtcatcgactaatcctacaagaccatttaccaccaatactcttgaagagcacttagacatgatgatggtatgccaccatcttaatccatcagttccagaggatatttcatttgcagaatctaggattagagcagagacaattgctgcagaagacatacttcacgacataggagcaattagcatgatgtcatcagatagccaggcaatgggaagagtaggagagacaactaccaggaattggcagacagcagataaaatgaaaaaaatgaaaggagcattgcctgaagattctcaagaaaatgataattttagaattaaaagatatgttgcaaaaattactgcaaaccctgcaataactcatggtatatcagaacatgttggaacattagaaaatggtaagatggcagacatcataatatggatgccacaattttttggaattaaaccaaagatgattgtaaaaggcggatttattgcgtatgcgttgatgggag

SEQ ID NO: 264810 - DNA, 877 bp, Unknown
  Bacterial polypeptide expressing nucleotide sequence isolated from the Sargasso Sea
atgactaaaatttctagagcggcttatgcagacatgtatgggcctacaacaggagataaagtaaggctcgcagatactgaactatttattgaggttgaaaacgatctaaccacttatggtgaagaagtaaagtttggtggcggaaaagtaataagagacgggatgggccaatcacaaatttgcaggaaaaaaggagctgctgatacagttattaccaatgctttaatagttgatgtaaatggaatttataaagccgatgttggcttaaaagatggaaaaatatttgaaattggtaaagctggaaatccagacactcaatctaaagtaaatattattattggtccaggaacagagataattgcaggtgaaggaaaaattttaactgcaggtgggtttgatagtcatattcattatatatgcccccaacaaattgatgatgctttacactcaggtattacaactatgttaggaggaggaactggaccagctcatggaacacttgcaacaacgtgtacgcctggaccatggcacatacaaagaatgattcaatctgctgatggtttttctatgaatttagcttttgctggaaaaggaaattcctccctgccggatggtcttgaggaacaaattctagccggagcttcagcacttaaattacatgaggattggggaacaactccaggtgcaattgataattgtttaaatattgctgacaaaaatgatgtacaggtaatgattcatacagatacacttaatgaaagtggatttgtagaaaatacaataaaggcaattaacaaaagaactatccatgctttccacacagagggtgctggtggtggacatgcaccagatataattaaagtttgtggagaagaat

SEQ ID NO: 264811 - DNA, 889 bp, Unknown
  Bacterial polypeptide expressing nucleotide sequence isolated from the Sargasso Sea
aaactgcatgaagattggggaacaaccccgcaagcaattgattgttgtttgggtgtagcggatgatcttgatattcaagtgatgatccacactgacacattaaacgaaagtggctttgtggagcgaacagttgaatccatgaaaggaagaacaatacatgcttttcatactgaaggagctggaggcggtcatgcgcctgatataataaaaatttgtggtgaacaatttgtattgccttcttcaactaacccaacaagaccattcaccaaaaatacggttgaagaacacttagacatgttaatggtctgtcaccatcttgataaatctattcctgaagacatagcatttgctgagagccgtataaggcgagaaacaattgcagctgaagatatattacacgacatgggggccttttccatcattgcttctgacagccaagctatgggacgagttggggaagttattataagaacctggcaaactgccgacaaaatgaaaaagcaaagaggcgctctttcagaagaaactggtaacaatgataatctgcgagctcgacgatacattgcaaaatacacaataaaccccgcaattgctcacggaatttcacatgaggttggctcagtagagctaggtaagcgagcagatcttgttctttggaacccagcattttttggagtaaaaccagagatggttttattgggtggcacaattgctgttgctcaaatgggtgatccaaatgcttccattccaactcctcaaccggtttacacccgatcaatgtttggggcttttggcagggctttgtcagagtcttctgtgacgtttgtttcggaagctgctcacgctgatggtataagttcaaaactagatttagctaagaaagcggtac

SEQ ID NO: 264812 - DNA, 996 bp, Unknown
  Bacterial polypeptide expressing nucleotide sequence isolated from the Sargasso Sea
attattggaccaggaacagaaataattgcaggtgaaggtaagataataacagctggtggttttgatagtcatatccattttatttgtcctcagcaaatagatgatgcacttcattcaggtattacaactatgctgggaggtggaactggtcctgcacatggcaccttggcaactacagttacacctgggccatggcacatagagagaatgatacaatctgctgatgcttttcctatgaacttagcatttgcaggtaaaggaaatagttctttacctaaagctctcgaagaacaagtaattgctggagcaagttcattaaaattacatgaagattggggtacaactccagcagctatcgataattgtttaaatgttgctgatgactttgacatacaagttatgattcatactgatacattaaatgaaagtggatttgtagagagcacgataaaagcaattaatggaagagctattcacgcatttcatactgagggagcgggaggaggtcatgctcctgatattataaaagtttgtggtgaagaatatgttattccatcatcaacaaacccaacaaggccatatacagttaatacagttgaagaacatttagatatgttaatggtttgtcatcatttagataaatcaatacctgaagacgttgcatttgctgaaagtcgcattcgaaaagaaacaattgcagctgaagatatacttcatgatatgggtgcattttcaataattgcgtctgatagtcaagcaatgggtcgtgttggtgaagttataattagaacatggcaaactgctcataaaatgaaagtacaacgtgggcaattaaaggaagagcaaggtgataatgataatttacgtgttaaacgttatatagctaaatatacaattaatcctgccattgctcatggtatttctgatcatattggcagtatcgaaaagaataaacgcgcagatattgttatttgggatacagctttttttggtgtt

SEQ ID NO: 264813 - DNA, 316 bp, Unknown
  Bacterial polypeptide expressing nucleotide sequence isolated from the Sargasso Sea
ttggaggctatagtgcaattatcacctcgtgagaaagataaacttttaatagcaatggcagcggaggtcgctcggaaaagaaaaagccgtggtgttaaacttaattacccagaagctattgctctaatttgcgatgctgttgtcgagggagctcgtgatggaaaaagtgtagctgaaatgatggaatatggtgcaacaatagttaaatcgactgattgcatggacggtataccagatatgataccagaggttcaggtagaggcaacattcccagacggaacgaagcttgtcacagttcacaacccaataagatagg

SEQ ID NO: 264814 - DNA, 661 bp, Unknown
  Bacterial polypeptide expressing nucleotide sequence isolated from the Sargasso Sea
atggttaagattcctagagcatcatatgcagatatgtacggtcctaccacaggagataaagtaagacttgcagacacagagttgtttattgaagttgaaaatgatcttaccaattatggtgaagaggtaaagtttggtggtggaaaagtaataagagatggcatgggtcaatcacaaatcagtagagaaaaaggtgcagtagatacagttataacaaatgctttgattgttgatattaatggaatttataaagctgatgtaggtttaaaagatggaaaaatttttgaaattggcaaagcaggcaatccagatactcaatcaaaagtaaatattattattggtcctggaacagagattattgcaggtgaaggtaaaattttaactgctggaggttttgatagtcacattcattacatatgtcctcaacaaattgatgatgctttacactcagggattactacgatgttgggaggaggaacgggacctgctcatggaacacttgctacgacttgtacacctggtccatggcacatcaaaagaatgattcaatctgctgatggtttctcaatgaatttagcttttgctggaaaaggaaattcttcattaccagaaggtcttgaagaacaaattcttgcaggagcttcagctctaaagtacacga

SEQ ID NO: 264815 - DNA, 304 bp, Unknown
  Bacterial polypeptide expressing nucleotide sequence isolated from the Sargasso Sea
atggatttattacccagagagcgagataagttattaatctttactgcggctttgttagctgaaaggcgactaaagcggggcgttaaacttaattaccctgaagcaatggcctatatatcgatggaaataattgagggcgcgcgagacggtaaaaccgttgcagaaatgatggactatggccgcactctactcaccaaagagcaagtaatggaaggagtaagtgagcttattccagaagttcaggtagaggccacatttccagatggcacaaagctcgtcactattcacaaccctattatttaaa

SEQ ID NO: 264816 - DNA, 805 bp, Unknown
  Bacterial polypeptide expressing nucleotide sequence isolated from the Sargasso Sea
tatgttaggaggtggcactggtccagctcatggaactcttgcaacaacgtgcactccaggtccatggcatattcaaagaatgatccaatcatcagacgcttttccgatgaatttaggttttgccggaaaaggaaattcgtcattaccagagggtttgaaggaacaaattatggcgggcgcttgtgctttaaaactacatgaagattggggtacaactccaggggcaattgataattgtctttcaatggcagacaaatttgacattcaggtcatgatacataccgatactttaaatgaaagtggttttgttgaaaatactctaaaagcaatcaataaaagaataattcatgctttccatactgagggcgcaggtggcgggcatgctccagatattataaaagtatgtggtgaaaaaaatattataccatcgtctaccaatccaacaagaccatatactattaatacaatagaagagcatttagatatgcttatggtttgtcatcatcttgataaatctatacctgaagatgttgcatttgcagaaagtagaattcgaaaagaaactattgctgcagaagatatccttcatgatatgggtgcattttcaataattgcatcagatagtcaagcaatgggccgagtaggtgaagtaataataagaacatggcaaactgctcataaaatgaaagtgcaaagggggaaattacccgaagaacagggagacaacgataattttagggttaaaagatatattgccaaatatacaattaatccagcaattactcacggaatttcaaaacatatt

SEQ ID NO: 264817 - DNA, 883 bp, Unknown
  Bacterial polypeptide expressing nucleotide sequence isolated from the Sargasso Sea
gatactgaattatttattgaagttgagaacgacctaactacttacggtgaagaagtaaagttcggtggcggaaaagtcataagagatgggatgggccaatcacaaattagtagaaaaaaaggagctgttgatacagttatcactaatgctttaatagttgatgtgaatggaatttataaagctgatgtaggtttaaaggatggaaaaatatttgaaattggtaaagctggtaatccagatactcaatctaaagttaatattattattggtccgggaacagagataattgctggtgaaggaaaaattttaacagctggaggttttgacagtcatattcattatatatgtcctcaacaaattgatgacgctttgcactcaggtattacaactatgctcggaggaggaactggaccggctcatggaacacttgcaaccacctgcacacctggtccatggcatatacaaagaatgattcaatcggcagatggtttttctatgaatctagctttcgcaggaaaaggaaattcctcattgccagaaggtcttgaggaacaaattctagctggagcctcagctttaaaattacatgaggattggggaaccactcctggagcaattgataattgtttaaatattgctgataaaaatgatgtgcaagtaatgattcatacagacactttaaatgaaagtgggtttgtagaaaatactataaaagcaattaacaaaagaactatacatgcctttcatactgagggtgctggtggtggacatgcacctgacataattaaagtttgtggagaagagtatgttattccctcttccacaaatcctacaagaccatatacagttaatacaatagaagaacatttagatatgttaatgg

SEQ ID NO: 264818 - DNA, 688 bp, Unknown
  Bacterial polypeptide expressing nucleotide sequence isolated from the Sargasso Sea
gagaccatagctgcagaggatatccttcatgatttaggtgccttttcaattatagcttctgacagtcaagcaatgggaagggttggagaagttattatcagaacttggcaaacagctcacaaaatgaaagttcaaagaggtcgtctacaggaggaaaagggtgataatgataatgtaagagttaaaagatatgtagctaaatatacaattaatccagctataactcacggtttatctaaacatataggttcaataactgaaggtaaaagagctgatattgtgatatgggatccagctttttttggtgtaaaaccagagattgtgatgcttggtggaagcattgcttgtgctcaaatgggtgatcctaacgcatcaattccaactccacaacctgtatatacaagaccaatgttttcttcttatggaagatctctagagacatcctcaattacttttgtaagtaaagattctattaaatctggaagtttagactcattaaaacttgctaaaagcactgttgcagtggagaaaacaagagatatttcaaaaaaagatatggtttataataattattgcccagatatttctgttgatcctgaaacatatgaggttacagctgatggagaaattcttacttgcgagccagctacagaattacctatggctcagagatattttttattttaga

SEQ ID NO: 264819 - DNA, 775 bp, Unknown
  Bacterial polypeptide expressing nucleotide sequence isolated from the Sargasso Sea
aaagctgatgttggtttaaaagatggaaaaatatttgaaatcggtaaagctggtaatccagacactcaatctaaagtaaatattattattggtcctggaacagagataattgctggtgaaggaaaaattttaacagctggaggttttgacagtcatattcattatatatgccctcaacaaattgatgatgctttgcattcaggtattacaaccatgttaggaggaggtactggacctgctcatggaacactagcaacaacctgcacacctggtccatggcatatacaaagaatgattcaatctgccgatggtttttccatgaatttagcttttgctggaaaaggaaattcctccctgccggaaagtctcgaggaacaaattctagccggagcttcagcacttaaattacatgaggactggggaacaactccaggtgcaattgataattgtttaaatattgctgacaaaaatgatgtacaggttatgattcatacagatacacttaatgaaagtggatttgtagaaaatacaataaaggcaattaacaaaagaactattcatgcttttcacacagagggtgctggtggtggacatgcaccagatataattaaagtttgtggagaagagtatgttattccttcttcaacaaaccctaccaggccttacacagttaatacaatagaggaacatttagatatgcttatggtttgccaccatcttgataaatctattccagaggatgtagcatttgctgaaagtagaataagaagagaaa

SEQ ID NO: 264820 - DNA, 304 bp, Unknown
  Bacterial polypeptide expressing nucleotide sequence isolated from the Sargasso Sea
catgaagctttccccaagagagattgataaaatgatggtcagcatggctgcaatagtcgctcgaaagagattagaccgtggtgttaaattaaattaccctgaagccgtatcaattatttctgattatgttgttgaaggtgcaagggatggcaaatctgtagctgaactaatggaaagtgcagcacatgtactaaaaaaggatgactgtatggacggagttgctgaaatgattgccgaagtgcagacggaagcaacttttccagatggaacaaagttagtcacggtacataaacccataaggtaa

SEQ ID NO: 264821 - DNA, 310 bp, Unknown
  Bacterial polypeptide expressing nucleotide sequence isolated from the Sargasso Sea
tatgattccaggagaaataattacaagtgacagtgatataattttaaataaagatttagtgagtttgacaatgaaagtctccaatactggtgatcggccaattcaagtcggtagccactatcactttagcgaagcaaatgaaagtcttgaattcgatagaaagaaagccttaggtatgagacttaacatttcatctggaactgcagtaaggtttgaaccagggcaaacaagagatgttgaacttattgaaatacagggactaaaaaagttatttggatttaataaaaaagtcatgggaaaaattaaatga

SEQ ID NO: 264822 - DNA, 352 bp, Unknown
  Bacterial polypeptide expressing nucleotide sequence isolated from the Sargasso Sea
atggctaaaatttctagagccgcttatgcagatatgtatgggccaaccacaggagataaagtaaggctcgcagataccaacttatttattgaagttgaaaacgatctaaccacctatggtgaagaagttaagtttggtggtggaaaagtaataagagatgggatgggtcaatctcaaattagcagagaaaaaggagctgctgatactgttattaccaacgctttaatagttgacgtaaatggaatttataaagctgatgtaggtttgaagaatggaaaaatatttgaaattggtaaagctggtaatccagatactcaatctaaagtaaatattattattggccccaggaaca

SEQ ID NO: 264823 - DNA, 219 bp, Unknown
  Bacterial polypeptide expressing nucleotide sequence isolated from the Sargasso Sea
aattgaattatccagaggctatcgctttaataacagattttgttgtcgagggagctagagagggtaaaagtgttgcagaactgatggaggcgggagctcatgttattaaaaaaaaggattgtatggaaggtattccagatatggtgaaggaagttcaagtagaagctacatttccagatggaactaaattagtaacagtgcacaaacctataaggtaat

SEQ ID NO: 264824 - DNA, 223 bp, Unknown
  Bacterial polypeptide expressing nucleotide sequence isolated from the Sargasso Sea
ttaaaattaaattatccagaagctatagctttaataacagattttgttgtcgagggagctagagagggcaaaagtgttgcggaactgatggaggcaggagctcatgtcattaaaaaaaaggattgtatggaaggcattccagatatggtcaaggaagttcaagtagaagctacttttccagatggaactaaattagtaactgtgcacaaacctataaggtaat

SEQ ID NO: 264825 - DNA, 703 bp, Unknown
  Bacterial polypeptide expressing nucleotide sequence isolated from the Sargasso Sea
aactattcatacttttcatactgaaggagcaggtggtggtcatgctccagatattattaaaatttgtggagaaaataatgtcttacctagtagtactaatccaacgaggccttacaccaaaaatactcttgaagaacatcttgacatgttaatggtctgtcatcatttagattcaaaaattccagaagatattgcattcgcagagtcaagaattagaagagagacaatagctgccgaagatattttgcatgatattggagctttttcaattattgcaagtgattcacaggctatgggacgagttggagaagtaataacaagaacttttcaaacagcacataaaatgaaagttcaaagaggtcctttacctgaagattctgatagaaatgataactatagggttaaaagatatatctctaaagtcactattaatccagctattgctcatggaattaatagatttgttggttctatagaaaagggtaaaatagcggatttagttttatggaaaccttccttttttggtgttaaaccagaattagttgtcaaaggaggttctatagtttggtctcagatgggtgatgcaaatgcttcaattccaacgccaggacctgttcatggtagacctatgtttgcgaattatggacaatcacttttaaaaagttcgttcacttttttgagtaaaaatgcaatcgagcttgat

SEQ ID NO: 264826 - DNA, 685 bp, Unknown
  Bacterial polypeptide expressing nucleotide sequence isolated from the Sargasso Sea
aatgactctgaagcttacgagaactcaatacgccgagatgtacgggcctaccgtgggcgaccgcgtcaggcttggagacaccaatcttttcatagaggtggaacgggacttgattgaggaaggcggaggttatgggaacgaaatcaagttcggaggaggcaaggtaatccgcgacggcatgggccaatcccctctcgccctaggggctgattgcctcgatctggtcgtcaccaacgcaaccatactcgatcccatcctgggagtgatcaaggcggacgtgggggtgaaggatggaaggatttcgggagtcgggcatggggggaatcccctcatccaggacggggtatccgaatccatggtggtcggggccggcactgaggtaatcgccggggaggggatgatcctgactgcggggggatacgattcgcacatccactttatctgtcctcagcaaatcgaggaagccatagccagtgggctcaccaccatgacgggcggtggaaccggtcccgctaccgggaccaatgccaccacctgcacgcccggatcctggaacctgggcaagatgcttcaggcggcggactcctttcccatgaacctgggatttctcgggaaagggaactcatcctctccggatgccttgagagaacaggtcgaggccggcgccatcggcctgaagcttcac

SEQ ID NO: 264827 - DNA, 701 bp, Unknown
  Bacterial polypeptide expressing nucleotide sequence isolated from the Sargasso Sea
aatggttaaaatttctagagcagcttatgcagatatgtatgggccaaccacaggtgataaagtaaggctagcagatactgaattatttattgaagttgaaaacgatttaaccacttatggtgaagaagttaagtttggtggtggaaaagtaataagagatgggatgggccaatcacaaactagtagagaaaaaggagctgctgatacagttattacaaatgctttaatagttgatgtaaatggaatttataaagctgatgttggtttaaaagatggaaaaatatttgaaatcggtaaagccggtaatccagacactcaatctaaagtaaatattattattggtccaggaacagaaataattgctggtgaaggaaaaattttaacagctggaggttttgacagtcatattcattatatatgcccccaacaaattgatgatgctttacactctggtattacaactatgttaggaggaggtactggacctgctcatggtacacttgcaacaacgtgtactcctggaccatggcacatacaaagaatgattcaatctgctgatggtttttcaatgaatttagcttttgctggtaaaggaaattcttctttaccagaaggtcttgaagaacaaattcttgcaggagcttcagctttaaaattgcatgaggattgggggaccactcctggagcaattgataattgtt

SEQ ID NO: 264828 - DNA, 898 bp, Unknown
  Bacterial polypeptide expressing nucleotide sequence isolated from the Sargasso Sea
gctcggaggagggacaggcccagcaacaggtactaatgcgacgacatgtacacctggagcatttcacatctcaagaatgctgcaatctgcagagggatttcctgttaatttgggattctttggaaaaggcaatgcaactaacaaagcagcattagaagaacaagtaagagcaggtgcttgtgggttaaaactgcatgaagattggggaacaacaccggcctgtattgattcctgcctaagtgttgcagatcaactagacgtacaagtttgtattcatacagataccctaaatgaagctggttttgttgaagatacaattaaggcaataagagggagaacaattcataccttccatacagaaggagctggaggtggtcacgctcccgacattatcaaaatttgtggagaatcaaatgtgattcccagcagtacaaatccaactaggcctttcactctaaatactcttgaagagcatttagacatgttgatggtttgtcatcatttagatcccaaaattccagaggatgttgcatttgctgagtcaagaatacgtcgtgaaactattgctgctgaggacatactccacgacttaggagccttttctattattgctagtgactcccaggctatgggtagagttggcgaggtgattagccggacttttcaaactgctcataaaatgaaagttcaaagaggagccttacctgaggataatcaaaggaatgataatcatcgcctgaaaagatatatctcaaaggtcactattaatcctgcgatagctcatggaatcagtgctcatgttggttcggtagaagttggaaaactagcagacttagtactttggaagccaggtttttttggaattaaacctgacttagtagtcaaaggaggatgtatc

SEQ ID NO: 264829 - DNA, 260 bp, Unknown
  Bacterial polypeptide expressing nucleotide sequence isolated from the Sargasso Sea
ggcagcaaatgttgctagaaaacgtcttgaaagaggtgttaaacttaattttcctgaggcaatagcgttgattaccgattttgtaattgaaggtgcaagagatgggaaaatggtttcagaattaatggaaactgctgctcatgtaataaaaaaagaagaatgtatggatggaatttcaaatatgattacagaagttcaagttgaggcgacttttcctgatggaacaaaattagtaaccgtacataaaccgattagataat

SEQ ID NO: 264830 - DNA, 540 bp, Unknown
  Bacterial polypeptide expressing nucleotide sequence isolated from the Sargasso Sea
gagaagaaaatggagataatgataatttaagggtaaaaagatacatagcaaaatatacaataaatccagcaattgctcatggcatatcaaaacatattggtagtttagaaataaacaaaagagcagacattgttatttgggacccggctttttttggagcaaaacctgaaatgattttaattggtggaagcatcgcttgcgcgcaaatgggagatccaaatgcttcaataccaactccacaacctgtttattcgagacctatgttttcatcttttgggcgttcccttgaaagatcttctgtaacttttgttagcaatgaagcaataataaaagactctcttgccgatacaggtattcggaaagatttactgcctgttgaaaatacaagaaaaatttctaaaaaagatatggtcttaaacagttcatgcccaagcattgaggtcaatccagagacatatgaagttaaagcaaatggagaattattaacttgtgaacctgctaaagaacttcctttggctcaaagatatttcatgtattagt

SEQ ID NO: 264831 - DNA, 859 bp, Unknown
  Bacterial polypeptide expressing nucleotide sequence isolated from the Sargasso Sea
tgcaacaacgtgtacacctggaccatggcatatacaaagaatgattcaatctgctgatggattttctatgaatttagcttttgctgggaaaggaaattcttcattaccagaaggtcttgaagaacaaattctagcaggagcttcagctttaaaattacatgaggattggggaaccactcctggagcgattgataattgtttgaatattgctgataaaaatgatgtgcaagtaatgattcatacagacactttaaatgaaagtgggtttgtagaaaatactatcaaagcaattaacaaacgaactattcatgcttttcatacagagggtgctggtggtggacatgcaccagatataattaaagtttgtggagaagagtatgttattccttcttccacaaaccctactagaccatacacagttaatacaatagaagaacatttggatatgctgatggtttgtcatcatctcgacaaatctattccagaggatgtagcatttgctgaaagtagaatcagaagagaaacaatcgcagcagaagatattctgcatgacatgggagctttttcaattattgcatcagatagtcaggctatgggtagagttggagaagttataattagaacttggcaaactgcacataaaatgaaagttcaaagaggaagtttgtcagaggaaaaaggagataatgataactttagagttaaaagatatttagcaaaatacacaattaatcctgcaattgctcatggaatttcaaaacatattggtagtattgaaaaaaataaacgtgcagatttagttttatgggacccagcattctttggtgcaaaaccagaaatgatactaatttggaggaag

SEQ ID NO: 264832 - DNA, 307 bp, Unknown
  Bacterial polypeptide expressing nucleotide sequence isolated from the Sargasso Sea
atgaagctcactcctagagaaaaagataaacttttaataagtcttgcagcaattgttgcaaaaaagagattatcaaaaggaattaagttgaattatccagaagctatagccttaataacagattttgtaattgagggagctagagaaggtaaaagtgttgctgaattgatggaggcaggtgctcatgttattaaaaaaaaggattgcatggaaggtattccagatatggtgaaggaagttcaagtagaagctacttttccagatggaactaaattagtaacagtgcataaacctataaggcaataat

SEQ ID NO: 264833 - DNA, 362 bp, Unknown
  Bacterial polypeptide expressing nucleotide sequence isolated from the Sargasso Sea
aatggttaaaatttctagagcagcttatgcagatatgtatggtcctactactggagacaaagtaaggcttgcggatactgacttatttattgaggttgaaaatgatctaaccatttatggtgaagaggtaaagtttggtggtggaaaagtaattagagacgggatgggccaatcacaaactagcagaaaaaagggagctgctgatacagttattactaatgctttaatagttgatgtggatggaatttataaagctgatgtcggtttaaaagatggaaaaatttttgaaattggcaaagctggaaatccagatactcaatctaaagtaaatattgttattggtccaggaacagagataattg

SEQ ID NO: 264834 - DNA, 808 bp, Unknown
  Bacterial polypeptide expressing nucleotide sequence isolated from the Sargasso Sea
tcctaccagaccatatacagttaatactatagaagaacatttagatatgcttatggtctgtcatcatcttgataaatctattccagaggatgtagcttttgctgaaagtagaataagaagagaaacaattgcagcagaagatattctacatgacatgggtgctttttcaattattgcatcggacagtcaagctatgggaagagtaggcgaggtaataattagaacatggcaaactgcacataagatgaaagttcaaagaggaagtttaccagaggaaaaaggagataatgataatttaagagttaaaagatatttggcaaaatatacaattaatccagcagtcgctcatggaatttcaaaatatattggtagtattgaaaaaaataaacgagcagatttagttttatgggatccagcattttttggtgctaaaccagagatgatattaataggtggaagtatagcttgtgctcaaatgggagatccaaacgcgtcaattccaaccccacaaccagtatatactagaccaatgttttcatcatttggaacatcattagagaaatcttcagtaattttcacaagcaaattagcaatagaaaaaaattctttaaaagatgcgagtataagaaaagatttattagccgtggaaaatacaagatcaatttcaaaaaaagatatgattttaaacaatatctgtccgaaaattgaggtaaatcctgaaacgtatgaagtaaaagctgatggcaaaataattacatgtgaaccagcaaaagaactacctttggcacaaagatattttatgttttag

SEQ ID NO: 264835 - DNA, 731 bp, Unknown
  Bacterial polypeptide expressing nucleotide sequence isolated from the Sargasso Sea
aatacctgaagatgttgcatttgctgaaagtcgtattcgtaaagaaacaattgctgcagaagatatactgcatgacatgggtgctttttcaattattgcttctgatagtcaagccatgggtcgtgttggtgaggttattattagaacatggcaaacagcacataaaatgaaagttcaacgtggacaattaaaagaagagcagggtgataacgacaatgtaagagttaaaagatacatcgctaaatatacaattaatccagcaatagctcatggtatttcagatcatattggaagtatcgaaaaaaataaacgtgctgatattgttatttgggacactgctttttttggcgttaaacctgaaatggtattacaaggaggaagtattgcttgtgcacaaatgggtgatcctaatgcatctataccgacaccacaaccagtatactcaagaccaatgttttcttcctttggaaaatcattagaaaaatctaccacaacatttgtaagtaaagcatctcttgataaaaattcattcaaaaattctggaattagtaaatctttattgccagttaaaaatatcagaaaaatttcaaaaaaagatatgatattaaatgattattgtccaaaaatcgaagtgaatccagaaacttacgaagttttagcagatggtgaattaattacttgtgagccagctgaaacactacctttagctcaacgttattttatgtactaaa

SEQ ID NO: 264836 - DNA, 304 bp, Unknown
  Bacterial polypeptide expressing nucleotide sequence isolated from the Sargasso Sea
atgaaacttactcctagagaaaaagataaacttttaataagtcttgcagcaattgttgctaaaaatcgattgtcaaagggtataaaattaaatcatccagaagctatcgctttaataacagattttgtagtggagggagctagagaaggaaaaagtgttgcagaactaatggaggcaggagctcatgtcattaaaaaaaaggattgtatggaaggtattccagaaatggtgaaggaagttcaagtagaggctacttttcctgatggaactaaattagtaacagtgcacaaaccaattagatgac

SEQ ID NO: 264837 - DNA, 877 bp, Unknown
  Bacterial polypeptide expressing nucleotide sequence isolated from the Sargasso Sea
ggacctgcaactggcacaaatgccactacttgtactcctggttcttttcatattgcgagaatgcttcaatctgcagaagcatttcccatgaatttaggtttttttggaaaaggaaactcaacaaacgagagaaatcttattgatcaggttgaagctggtgcatgtggattgaagcttcatgaggattggggaacgactccctctacaataaattcttgtcttaatgtcgcagataagtttgacgtacaagtatgcattcatactgatactttgaatgaggcaggctttgttgaagatactatcaaagctattgcaggacgaactattcatacctttcataccgaaggagcaggtggaggtcatgcgccagacatcataaaaatttgtggagaaaaaaatgtacttccaagtagtactaatccaacaagaccctatacgaggaacacattagaagaacatcttgacatgttaatggtttgccatcatttagattctaaaatcccagaagatattgcatttgccgaatctaggatcagaagagagactattgcagctgaggatatcttgcatgatgtaggtgccttttcaattattgctagtgattctcaagctatgggaagagttggtgaagtaattacaagaacttttcaaaccgcccataaaatgaaagtccaaagggggccactttcgcaggattctgatagaaacgataattacagagtaaagagatatatttctaaagtcacaattaatcctgcaatagctcatggcattgaaaaacatgttgggtctatagaaaagggtaaaattgcggatttggtattgtggaaaccttccttttttgctgtaaagcctgaattagttgttaaaggaggat

SEQ ID NO: 264838 - DNA, 940 bp, Unknown
  Bacterial polypeptide expressing nucleotide sequence isolated from the Sargasso Sea
cctgctctggaaacttgcaacaacctgtacacctggtccatggcatatacaaagaatgattcaatctgctgatggtttttctatgaatttagcttttgctggaaaaggaaattcttcattgccagaaggtcttgaagaacaaattctagcaggagcttcagctttaaaattacatgaggattggggaaccactcctggagcaattgataattgtttgaatattgctgataaaaatgatgttcaagtaatgattcacacagacactttaaatgaaagtggatttgtagaaaatactatcaaagcaattaacaaaagaactattcatgcttttcatacagaaggtgctggcggtggacatgcgccagatataattaaagtttgtggagaagagtatgttattccttcttcaacaaaccctactaggccatacacagttaatacaatagaagaacatttggatatgctaatggtttgtcatcatcttgataaatctattccagaggatgtagcatttgctgaaagtagaataagaagagaaacaattgcagcagaagatattctgcatgatatgggagccttttcaattattgcatcagatagtcaggccatgggtagagttggagaagttatcattagaacttggcaaactgcacataaaatgaaagttcaaagaggaagtttaccagaggaaaaaggagacaatgacaactttagagttaaaagatatttagcaaaatacacaattaatcctgcaattgctcatgggatttcaaaatatattggtagtattgaaaaaaataaacgtgcagatttagttttatgggacccagcattctttggtgcaaagccagagatgattttaataaagtggaagtatagcttgcgctcaaatgggagacccaaatgcatcaattccaactccacagcctgtatacactag

SEQ ID NO: 264839 - DNA, 835 bp, Unknown
  Bacterial polypeptide expressing nucleotide sequence isolated from the Sargasso Sea
gatactttgaatgaggcaggttttgttgaagataccataaacgctattgcaggaagaactattcatacatttcataccgaaggagcaggtggaggtcatgcgccagacatcataaaaatctgtggagaaaaaaatgttcttcctagtagtacaaatccaacaagaccttatacaaggaacacattagaagaacatcttgacatgttaatggtttgtcatcatttagattctaaaatcccagaagacattgcatttgctgaatcaaggatcagaagagagactattgctgcagaggatatcttacatgatataggcgccttctcaattatcgccagtgactctcaagctatgggaagagttggtgaagtaataacaagaacttttcaaaccgcacataaaatgaaagttcaaagggggcctctatcgcaggattctaatagaaacgataattttagagtaaagagatatatttctaaagtcacaattaatcctgccatagcgcatggtattgataaacatgttgggtctatagaaaagggtaaaattgcggattttgccttgtggaaaccttccttttttgcagtaaagcctgaattagttgttaaaggaggatctatagtttggtcccaaatgggtgatgcaaatgcttcaattcccactccaggtcctgtacatggtcgacctatgtttgcaagtttcggccaatcgctaattaagagttcttttacctttttaagtaaaaattcaattgaacaaaatattccaaataaattaggcttacaaaagaaatgtattgccgtagaaaatactagaaatatcaataaatcaaacttaa

SEQ ID NO: 264840 - DNA, 595 bp, Unknown
  Bacterial polypeptide expressing nucleotide sequence isolated from the Sargasso Sea
aatggctaaaatttctagagcagcttatgctgatatgtatgggccaaccacaggagataaagtaaggctagcagatactgaattatttattgaagttgaaaacgatctaaccacttatggtgaagaagtaaagtttggtggtggaaaggtaataagagacgggatgggtcaatctcaaatcagcagagaaaaaggagctgctgatacagttattaccaatgctttaatagttgatgtgaatggaatttataaagctgatgttggtttgaaagatggaaaaatatttgaaatcggtaaagctggtaatccagatactcaatctaaagtaaatattattattggtccaggaacagaaataattgcaggtgagggaaaaattttaacagctggaggttttgatagtcatattcattatatatgtccccaacaaattgatgatgctttgcactcaggtattacgaccatgcttggaggaggaaccggacctgctcatggaacacttgcaacaacgtgtacacctggaccatggcacattcaaagaatgattcaatctgctgatggtttttccatgaatttagcttttgctgaaaaggaa

SEQ ID NO: 264841 - DNA, 928 bp, Unknown
  Bacterial polypeptide expressing nucleotide sequence isolated from the Sargasso Sea
gaggggcatattctcactgcaggttcaatagatacccatattcactttatctgtccccaacaaattgagacagcactagcctctggaattacaaccatgttgggagggggaactgggcctgcaactggcacaaatgctactacttgtactcctggttcttttcatatttcaagaatgcttcaatctgcagaggcatttcccatgaatttaggtttttttgggaaaggaaactcaacaaacgagaacaatcttattgatcaggttgaggctggtgcatgtggactgaagctccatgaggattggggaaccactccttctacaataaattcttgtctaaatgttgcagataagtttgacgtacaagtatgtattcatacggatactttgaatgaggcaggctttgttgaagataccattaaagctattgcaggaagaactattcatacttttcatactgaaggagcaggtggaggacatgctccagacattataaaaatctgtggagaaaagaatgtacttcctagtagtacaaatccaacaagaccttataccaggaatacattagaagaacatcttgacatgttaatggtttgtcatcatttagattcaaaaatcccagaagacattgcatttgctgaatcaaggataagaagagagactattgcagctgaggatatcttgcatgatgtaggtgccttttcaattattgctagtgattctcaagctatgggaagagttggtgaagtaataacaagaacttttcaaaccgcccacaaaatgaaagtacaaagggggccgctatcgcaggattctgatagaaacgataattacagagtaaggcgatatatttctaaagttacaattaatccagcaatagctcatggtattaataaatatgttggatctatagaaaagggaaaaattgctg

SEQ ID NO: 264842 - DNA, 307 bp, Unknown
  Bacterial polypeptide expressing nucleotide sequence isolated from the Sargasso Sea
atgaaaaaaataaaaagagaagcttatgccgatatgtatgggccaacaactggtgataaggttagacttgctgacactgaattatttattgaagtggaaaaagatttaacaacgtatggagaagaagtaaaatttggtggtggtaaagttattcgagatggaatggggcaatctcaagtatctcgtaaagatggtgctgttgatacagttataacaaatgctttaatagtagatgtaaatggaatttataaagctgatattggtcttaaggatggattaatttatgaaattggaaaagccaggtaat

SEQ ID NO: 264843 - DNA, 310 bp, Unknown
  Bacterial polypeptide expressing nucleotide sequence isolated from the Sargasso Sea
atgaaacctggagaaataataacaaagcaaaatagtgatattaatttgaacgatgaaagacaatcaattactttaaaagtttcaaatagtggagatcggccaattcaagttggtagtcattatcattttgcagaaacaaatgaatatttaaaatttgatagagaaaaatcaaatggtatgcgtttagatataccatctggcacagctgttcggtttgaacctggtcaatcaaaagatgtagaattaattcaaatttcaggaaatagaaagatatttggttttaataaaaaagttatgggtcaattgtaat

SEQ ID NO: 264844 - DNA, 239 bp, Unknown
  Bacterial polypeptide expressing nucleotide sequence isolated from the Sargasso Sea
acgtctagaaagaggtgttaaacttaactacccagaagctatagccttgataacagattttgtcatagaaggcgcaagagatggaaaaatggtatcagaattaatggaaacaggagctcacgtagtaaaaaaagaagattgtatggatggtattcaagatatgattccagaagtacaggttgaagctacatttccagatggaacaaaattagtaacagtacataaaccgattagataat

SEQ ID NO: 264845 - DNA, 940 bp, Unknown
  Bacterial polypeptide expressing nucleotide sequence isolated from the Sargasso Sea
aaatgctactacctgtactccaggatcttttcatattcaagaatgcttcaatctgcagaagcatttcccatgaatttaggtttttttggaaaaggaaattcaacaaacgagagaaatcttattgatcaggttgaagctggtgcatgtggattaaagcttcatgaggattggggaacgactccctctacaataaattcttgtcttaatgttgcagataagtttgatgttcaagtatgtattcatactgatactttgaatgaggcaggctttgttgaagatactatcaacgctatttcaggaagaactattcatacttttcataccgaaggagcaggtggaggtcatgctcctgacattataaaaatttgtggtgaaaaaaatgttcttccaagtagtactaatccaacaagaccctatacgaggaacacattagaagaacatcttgacatgttaatggtttgtcatcatttagattctaaaatcccagaagatattgcatttgctgaatcaagaatcagaagagagactattgctgcagaggacattttgcatgatataggtgccttttcaattattgctagtgattcccaagctatgggaagagttggggaagtaattacaagaacttttcaaactgctcataaaatgaaattgcaaagagggccgctatcgcaggattctgatagaaacgataattttagagttaagagatatatttctaaagttacaattaatcctgcaatagcacatggtattgataaacatgttgggtctatagaaaagggtaaaattgctgattttgtattgtggaaaccttctttttttgcggtcaagcctgaattagttgttaaaggaggatctatagtttggtcccaaatgggtgatgcaaacgcttcaattcctactccaggtcctgtacatggtcgtccttatgttgcaa

SEQ ID NO: 264846 - DNA, 304 bp, Unknown
  Bacterial polypeptide expressing nucleotide sequence isolated from the Sargasso Sea
aatgaagctaacaccaagagaaaaagacaaactaatggtcagtatggcagcaaatgttgcaagaaaacgtcttgaaagaggtgttaaacttaattatccggaggcaatagctttgattaccgattttgtaattgaaggtgcaagagatgggaaaatggtttcagaattaatggaaactgctgcttatgtaataaaaaaagaagaatgcatggatggaatttcagatatgataacagaagttcaagttgaagcaacttttcctgatggaacaaaattagtaacagtacataaaccgattagataa

SEQ ID NO: 264847 - DNA, 835 bp, Unknown
  Bacterial polypeptide expressing nucleotide sequence isolated from the Sargasso Sea
ggactaaagaacggaaatattgatcatattggaaaagctggtaaccctgatacacaacctggtgtggatattataattggtccaggtactgaggttattgcaggtgaaggtaaaattgtaacggcgggcggctttgatagtcatatacatttcatatgtcctcagcaaattgatgacgccttacattctggcattacgacgatgttgggtggaggtactggaccagcacatggaacattagcaactacttgcacacctgggccatggcacataggcaggatgcttcaatcatctgatgctttctcgatgaatttagcttatgcaggcaaaggaaattcttcgatgccttctggtttagaggaacaagttcttggtggagcagctgctctcaaacttcacgaggactggggctctactcctggtgcaattgataattgtttaaatgttgctgataaattcgacgttcaggtcatgatacatactgatacactcaatgaaagtggctttgtggaaaatacaatcaatgcaattaataaaagaaccattcatacatttcatactgaaggtgctggtggtggacacgcgcctgatataataaaaatttgtggtgaaccgtatgttttgccatcctcaactaatccaacacgaccatttactgttaacactgttgaagagcacttagatatgctgatggtttgccatcaccttgataaatcaatacctgaagacgtcgcttttgcggaaagtcgaatacgcagagagacaatggctgctgaggacatactgcacgatatgggtgctttctcaatcatcgcatctgatagtcaagctatgg

SEQ ID NO: 264848 - DNA, 826 bp, Unknown
  Bacterial polypeptide expressing nucleotide sequence isolated from the Sargasso Sea
acaggagatagagtaaggctcgctgataccgaactttttattgaagtagaaaaggatttaactacatacggagatgaagttaaatttggtggaggtaaagttattcgagatgggatgggacagtctcaagtaaaaagggctgatggggctgtagataccgtaataacaaatgctttgatcgtagattggtggggaataattaaggctgatgtgggtataaaagatggaatgatttttgaaattggtaaggctggcaatcctgatatccaggataatattgatattgttattggtgcatcaacagaagtaatagctggagaggggcatattcttactgcaggttcaatagatacccatattcactttatctgtccccaacaaattgagacagcactagcctctggaattacaaccatgttgggaggaggaactggacctgcaactggcacaaatgctactacttgtactccgggttcttttcacatttcaagaatgcttcaatctgcagaagcatttcctatgaatttaggtttttttggaaaaggaaactcaacaaacgagagcaatcttattgatcaggttgaagctggtgcatgtggattgaagcttcatgaggattggggaaccacgccttctacaataaattcctgtctaaatgttgcagataagtttgacgtacaagtatgtattcatactgatactttgaatgaggcaggctttgttgaagatactatcaacgctattgcaggaagaactattcatacttttcataccgaaggagcaggtggaggtcatgctccagatattattaaaatctgtggagaaa

SEQ ID NO: 264849 - DNA, 304 bp, Unknown
  Bacterial polypeptide expressing nucleotide sequence isolated from the Sargasso Sea
atgaaattgtcacctagagaaaaagaaaagttattagttagtttggctgccatggtagctaaagacaggcttaagagaggtgtaaaacttaattacccagaggctattgccatcatctcagattttgttattgaaggagcacgagatggcaaatcagtagctgatttaatggaagagggtgctcatgtcgttaagaaaaatcagtgtatggagggaatcaaggatatgatacatgaagttcaggtagaagcaacattccctgatggcactaaattggtaactgttcatcatccaatacgataag

SEQ ID NO: 264850 - DNA, 304 bp, Unknown
  Bacterial polypeptide expressing nucleotide sequence isolated from the Sargasso Sea
aatgaaacttactcctagagaaaaagataagcttttaattagtcttgcagcaattgttgctaaaaatagattgtcaaagggtataaaattaaattatccagaagctatagctttaattacagattttgtagtagagggagctagagagggaaaaagtgttgcagaactaatggaggcaggagctcatgtaattaaaaaaaaggattgtatggaaggtattccagatatgattaaggaagttcaagttgaagctacttttcctgatggaactaaattagtaacagtacacaaacctattagatga

SEQ ID NO: 264851 - DNA, 880 bp, Unknown
  Bacterial polypeptide expressing nucleotide sequence isolated from the Sargasso Sea
tttgcaggaaaaggaaattcctcattgccagaaggtcttgaggaacaaattctagcaggagcctcagctttaaaattacatgaggattggggaaccactcctggagcaattgataattgtttaaatattgctgataaaaatgatgtgcaagtaatgattcatacagacactttaaatgaaagtgggtttgtagaaaatactatcaaagcaattaacaaaagaactatacatgcttttcatacagagggtgctggtggtggacatgcaccagatataattaaagtttgtggagaagagtatgttattccctcttccacaaatcctacaagaccatatacagttaatacaattgaagaacatttagatatgttaatggtttgtcatcatcttgataaatctattccagaggatgtagcatttgctgaaagtagaataagaagagaaacaatcgcagcagaagatattcttcatgatatgggtgccttttcaattattgcatcagatagtcaggccatgggtagagttggagaagttataataagaacttggcaaactgcacataaaatgaaagttcaaagaggaagtttaccggaggaaaaaggagacaatgataattttagagttaaaagatatttagcaaaatatacaattaatccagcaatcgctcatggaatttcaaaacatattggtagtattgaaaaaaacaaacgtgcagacttagttttatgggacccagcattttttggtgcaaagccagaaatgatactaataggaggaagtatagcttgtgctcaaatgggagacccaaatgcatcaattccaactccacagccagtatatactagacccatgttttcatcatttgggacttcgttagaaa

SEQ ID NO: 264852 - DNA, 607 bp, Unknown
  Bacterial polypeptide expressing nucleotide sequence isolated from the Sargasso Sea
atgaagaaaataaaaagagaagcttatgccgatatgtatgggccaacaactggtgataaaatcagacttgctgacactgaactttttattgaagtggaaaaagatttaacaacatatggagaagaagtaaaatttggtggaggaaaagttatcagagatggaatgggacaatctcaagtatctcgcaaagacggcgctgttgatacagttataacaaacgctttaattgtcgatgtaaatggaatttataaagctgatattggtcttaaagatggcttaattaatgaaattggtaaggctggcaacccagacacacaaccaaacgtaaatattattattggacctggaacagaaataattgctggtgaaggtaaaattataacagctggcggatttgatagtcatatacattttatttgtccccagcaaatagatgatgcacttcattcaggtattacaactatgcttggaggaggaactggtcctgctcatggtactttggcaactacagttacacctggaccatggcatatagagaaaatgatacaatcagcagatgctttttctatgaacttggctttttcaggaaaaggaaacagttcattac

SEQ ID NO: 264853 - DNA, 265 bp, Unknown
  Bacterial polypeptide expressing nucleotide sequence isolated from the Sargasso Sea
ttgaatgatgaaagacaatcaatcactttcaaagtttcaaatagtggagatcggccaattcaagttggtagtcattatcattttgctgaaacaaatgaatatttaaaatttgatagagaaaaatcaaatggtatgcgtttagatataccatctggtacagctgttcggtttgaacctggtcaatcaaaagatgtagaattaattccaataactggaaataggaagatatttggttttaataagaaagtaatgggtcaattgtaat

SEQ ID NO: 264854 - DNA, 580 bp, Unknown
  Bacterial polypeptide expressing nucleotide sequence isolated from the Sargasso Sea
atgaaaaaaataaatagagatgcttatgcggatatgtacggtccaacaatcggtgataaaattagacttgctgacacagaactttttattgaagtggaaaaagatttaacaacttacggtgaagaagtaaaatttggtggcggaaaagttattcgagatggaatggggcaatctcaagtatcacgcaaagacggcgctgttgatacagttataacaaacgccttaatagtagatataaacggaatttacaaagctgatattggtcttaaagatggcttaattaacgaaattggaaaagcaggtaatccagatacacaaccaaacgtaaatattattattggacctggaacagaaataattgctggtgaaggcaaaattataacagctggtggttttgatagtcatattcattttatttgtcctcagcaaatagatgatgcgcttcattcaggtattacaactatgttgggtggaggaactggtcctgcacacggcactttagcgactacagttacacctggaccatggcatatagagaaaatgatacaatcagcagatgctttttctatgaacttggctt

SEQ ID NO: 264855 - DNA, 290 bp, Unknown
  Bacterial polypeptide expressing nucleotide sequence isolated from the Sargasso Sea
aaagcaaaatagtgatattaacttgaatgataaaagacaatcaatcactgtaaaagtttcaaatagtggagatcgaccaatacaagttggcagtcattatcattttgctgaaacaaatgaatatttgaaatttgatagagaaaaatcaaacggtatgcgtttagatataccatctggtacagctgttcgttttgaacccggtcaatcaaaagatgtagaattaattccaataacgggaaatagaatgatatttggttttaataagaaagttatgggtcaattaaaatgaa

SEQ ID NO: 264856 - DNA, 97 bp, Unknown
  Bacterial polypeptide expressing nucleotide sequence isolated from the Sargasso Sea
tatggatgggattgctgatatgatagctgaaattcaagttgaggctacatttccagatggaaccaagcttgtaacagttcacaaccctataaggtaa

SEQ ID NO: 264857 - DNA, 781 bp, Unknown
  Bacterial polypeptide expressing nucleotide sequence isolated from the Sargasso Sea
tgaagaagtaaagtttggtggtggaaaagtaattcgagacggaatgggacaatctcaagtaacaaataaagatggtgctgtagatacaattattactaatgccttgattctagatataacgggaatttataaagcagatgttgggttaaaagacggaaaaataaataaaattggtaaaggtggaaacccagatactcaacctaatgttgatataatcgttggtcctggtacagaagttattgcaggtgaaggtaaaattttaactgctggaggatttgatagtcatatacattttatatgcccacaacaaatagatgatgctttgcactcaggattaactactatgttagggggtggaactggtccagctcatggaactcttgcaacaacgtgtactccaggtccatggcatattcaaagaatgatccaagcttcggatgcttttccaatgaatttagggtttgccggtaagggtaactcatccttaccagagggtttgaaggaacaaatcatggcaggtgcttgtgctttaaaacttcatgaagattggggcactactccaggagcaattgataattgtctatcaatggctgataaatttgatatacaagtaatgatacataccgacaccttaaatgagagtggttttgttgaaaacacacttaaagcaatcaataatagaataattcacgcttttcatactgagggtgcaggtggcgggcacgctccagatattattaaagtatgtggtgaagaaaatatcataccatcgtctaccaac

SEQ ID NO: 264858 - DNA, 778 bp, Unknown
  Bacterial polypeptide expressing nucleotide sequence isolated from the Sargasso Sea
agaagaacaccttgatatgttgatggtatgccatcatcttgataaatctattccagaggatgtagcgtttgcagaaagcagaattagaagagaaacaattgctgctgaagatattcttcatgatatgggtgcattttcaattatagcatctgatagtcaggctatgggaagagttggtgaagtgattactagaacatggcaaacagctcataaaatgaaaattcaacgtggtagactaaaagaagaacaaggtaaaaatgataatttgcgtgtcaaaagatatattgcaaagtatacaattaatccagcaattgcacatggcgtatctaaccatattggaacattagaaaaaaataagagagcagatatagtcatttgggacccagctttttttggagcaaaaccagaaatgattttagttggtggaagtattgcatgtgctcaaatgggagatcctaacgcttcaattccaacgccgcaaccaatccattcacggtcaatgttttcttcatatggtcgttcgttagaaagttcatcagttacttttgtaagcaattattcaattcaagagggttcattcaatggtcttgaaattaaaaaagaaatgttgcctgttgctaatactcgtaaaatttcaaaaaaagatatggtattaaataatatatgtcctgaaatagaagtgaaccctgaaacatacgaagttaaagcagatggcgagttattaacttgtgaacctgcttcggaacttcctttagcacaaagatatttcctatactaa

SEQ ID NO: 264859 - DNA, 289 bp, Unknown
  Bacterial polypeptide expressing nucleotide sequence isolated from the Sargasso Sea
caggaaaaggacaagctcctgatcgtgaccgctgcactactggcggaacgccgccttggcaggggcctgaagctcaaccatcccgaagctgtggcctggctcagctttcttgttctcgaaggtgcccgtgatggccgaaccgttgccgaactgatgcaggacagcagcacctggctgagcaagaaccaggtgatggagggggtctccgaactggtgcacgaggtgcagatcgaagcggtcttcccggacggcaccaagctcgtcaccttgcacgatccgattcgctgag

SEQ ID NO: 264860 - DNA, 448 bp, Unknown
  Bacterial polypeptide expressing nucleotide sequence isolated from the Sargasso Sea
atgtcctataaaattgacagaaatacttacgcgcaaacttacggacccactaccggagatagagtaagacttgctgataccgaactttttatagaagtagaaaaggatttaaccacatacggagatgaagttaaattcggtggaggtaaagttattcgagatggaatgggacagtctcaagtaagaagatctgatggagctgtagataccgtaataactaatgccttgatcgtagattggtggggaattattaaggctgatgttggaataaaagatggaatgatttttgaaattgggaaggcgggtaatcctgacatccaggataatgtcgatattgttattggtgcatcaacagaagtaatagctggagaaggccatattctcactgcaggttcaatagatacccacattcactttatctgtccccaacaaatgaaacagcactagc

SEQ ID NO: 264861 - DNA, 304 bp, Unknown
  Bacterial polypeptide expressing nucleotide sequence isolated from the Sargasso Sea
ttgaaactcagtccaagagaaaaggataaattattagtctctgtagctgcccttgttgctcgcaaccgcaaagagagaggtgtaaagctaaattatccagaggccattgcgttaattacggattatgttgtggagggtgctcgtgatgggcgatccgtatccgatctaatggaagctggagcacatgtggttaaacgtcgggattgtatggagggcatcgccgagatgatacatgatgttcaagtcgaagcaactttccctgatggtacaaagttagtcactgtacaccaccctataaggtgaa

SEQ ID NO: 264862 - DNA, 274 bp, Unknown
  Bacterial polypeptide expressing nucleotide sequence isolated from the Sargasso Sea
atgattccaggagagattgtgacaaaaaaaggggacattctgataaatgcgggcagacagcaagtaaagctcactgtagccaattcaggagatcggcctattcaagttggcagccattatcatttttatgaaactaatgaggcgctagtttttagtcgtaattctgcttacggaatgcgccttgacattcccgcaggtacagctgttcggtttgagcccggtcaagaacgagaggtgcagttggttccatatggcggaaaaagaagagtgttgg

SEQ ID NO: 264863 - DNA, 955 bp, Unknown
  Bacterial polypeptide expressing nucleotide sequence isolated from the Sargasso Sea
tatgtcagtaaaaattacaagatatgattacgcaggaatgtacggccccacaaaaggggataagataaggttagccgacacggagcttttcattgaggttgaaaaagacctaaccacttatggtgaagaggttaaatttggtggcggaaaagttattcgtgatggcatgggccagtctcaggcaacaagagctgagggaacgcctgatacagtaattacaaatgcgcttattctggattacactggaatttataaagcagatgttgcccttagggacgggaagattgactcaataggaaaagctggcaatccagacactcaaccaaatgttgatataacaattggcccaggaacagaaataattgctggtgaaggcaaaatagttacggcaggaggatttgatagtcatattcattatatttgtcctcaacaaattgatgatgctcttcactctggtgtgaccacaatgttaggtggtggaactggaccagcgcacggcactttagctacaacttgtacgccaggtccgtggcatattggtagaatgttacagtcagcagatggtttgccaatgaacctcgcatttgcgggtaagggaaatgcctcgctacctggagccttggaagaacaggttttaggcggagcttgtgcgttgaaacttcatgaagattggggaacaacgccacaagcgattgattgttgtttgggcgtagcagatgatcttgatgttcaagtgatgatccacactgacacattaaacgaaagtggttttgttgaacgaactgtcgactccatgaaagaaagaacaatacatgcttttcatactgaaggagctggtggcggccatgcgcctgatattataaaaatttgtggcgagaaatttgtcttaccttcctcaaccaacccgacaagaccatttaccaaaatactgtggaagagcatctcgatatgttaa

SEQ ID NO: 264864 - DNA, 245 bp, Unknown
  Bacterial polypeptide expressing nucleotide sequence isolated from the Sargasso Sea
acgaaaccgccacgcgcgcggagtgaaattgaaccatcccgaagccatggcgatcatcaccgatttcgttgtcgagggtgcgcgcgatggccggtcggtcggcgatttgatgcaggcaggggcgcaggtcatcggcgcggctgattgcatggagggcatccccgaaatgatccatgaagtgcaggtcgaagcaacctttcctgacggaacaaagctggtgactgtgcacaatccgatcaggtgaa

SEQ ID NO: 264865 - DNA, 295 bp, Unknown
  Bacterial polypeptide expressing nucleotide sequence isolated from the Sargasso Sea
catgcatctcagtccccaggaaaaggacaagcttctgatcgtgaccgcggcattgctgtcggagcggcgcttgaaccgtggcctgaagctcaaccaccccgaagcggtggcctggctcagttttctggtgctggaaggcgcccgtgacggcaagagcgtggcggagctgatgcaggagggcaccacctggctgcgtcaggatcaggtgatggagggcgtggccgaactggtccatgaggtgcagatcgaggccgtcttccccgatggcaccaagctcgtcaccctgcacgacccg

SEQ ID NO: 264866 - DNA, 310 bp, Unknown
  Bacterial polypeptide expressing nucleotide sequence isolated from the Sargasso Sea
aatgaaacctggagaaataattaccaaaaataatagtgaaataaaacttaatgaaggtcgaaaagttgttacaattaaagtatctaataaaggcgatcgtcctatacaagtaggaagtcattatcattttgcagaaacaaataaatttttagaatttgatagagatatatcaagagggaagcgtttaaatattttttctggcactgcagttcgttttgaaccaggtcaaacaaaagatgttgaattaattgaattaagtggaaaaagaaaaatttttggttttaataaaaaaataatgggtaaattgtaa

SEQ ID NO: 264867 - DNA, 226 bp, Unknown
  Bacterial polypeptide expressing nucleotide sequence isolated from the Sargasso Sea
aggaataaaactaaattatccagaggctattgctttgataactgatttcgtaattgagggtgctagagatggaaaaatggtatctgaattaatggagtctggatcaaaagttgtaaaaaaagaagattgtatggatggaattgctgatatgattccagaagtacaagtcgaggctacatttccagatggaacaaagctggtaacagtacataaaccaataagataa

SEQ ID NO: 264868 - DNA, 809 bp, Unknown
  Bacterial polypeptide expressing nucleotide sequence isolated from the Sargasso Sea
caatatagctgataatcatgacattcaagtaatgattcatacagatacattaaatgaaagtggatttgtagagagcacaattaaagctattaatggaagaacaattcatgcttttcatacggaaggggctggaggtggtcacgcaccggatataattaaagtatgtggagaacagtatgttattccgtcatctacaaatccaacaagaccatacacagttaatacagttgaagaacatttagatatgttaatggtttgccatcacttagataaatcaatacctgaagacgttgcttttgctgaaagtcgaattcgaaaggaaacaattgcagcggaagatatactgcatgacatgggtgctttttcaataattgcttctgatagtcaggccatgggtcgtgttggagaggttattattagaacatggcaaacagcacataaaatgaaagttcaacggggacaattaaaagaagagcagggtaataacgacaatgtaagagttaaaagatacattgctaaatatacaattaatcctgcaatagcacatggtatttctgatcatattggaagtatcgaaaaaaataaacgtgctgatattgttatttgggacactgctttctttggagttaaacctgaaatggtattacaaggcggaagtattgcttcggcacaaatgggtgatccaaatgcttctattccaacacctcaaccagtatattctagaccaatgttttcttcttttggaaaatcattagaaaaatctactgttacttttgtaagtaaagtttctttagataaagaatcattta

SEQ ID NO: 264869 - DNA, 871 bp, Unknown
  Bacterial polypeptide expressing nucleotide sequence isolated from the Sargasso Sea
aaggatttaactacatacggagatgaagttaaattcggtggaggtaaagttattagagatgggatgggacagtctcaagtaagaagagctgatggagctgtagataccgtaataactaatgctttgatcgtagattggtggggaataattaaggctgatgtgggtataaaagatggaatgatttttgaaatcggtaaagctggtaatcctgatatccaggataatgttgatattgttattggtgcttcaacagaagtaatagctggagaggggcatattcttactgcaggttcaatagatacccatattcactttatctgtccccaacaaattgagacggcactagcctcgggaattacaactatgttgggaggaggaactggacctgcaactggcacaaatgctactacttgtactccgggttcttttcatatttcaagaatgcttcaatctgctgaagcatttcccatgaatttaggtttttttggaaagggaaactcaacaaacgagagtaatcttatcgatcaggttgaggctggtgcatgtggattgaagcttcatgaggattggggaaccactccttctacaataaattcttgtctaaatgttgcggataagtttgatgtacaagtatgtattcatactgatactttgaatgaggcaggttttgttgaagataccataaatgctattgcaggaagaactattcatacatttcataccgaaggagcaggtggaggtcatgcgccagacatcataaaaatctgtggagaaaaaaatgttcttcctagtagtacaaatccaacaagaccttatacaaggaacacattagaagaacatcttgacatgttaatggtttgtcatcatttag

SEQ ID NO: 264870 - DNA, 367 bp, Unknown
  Bacterial polypeptide expressing nucleotide sequence isolated from the Sargasso Sea
aatggctaaaatttctagagcagcttatgctgatatgtatgggcctacaacaggagataaagtaaggctcgcagatactgagctatttattgaggttgaaaacgatctaaccacttatggtgaagaagtaaagtttggtggtggaaaagtaataagagatgggatgggccaatctcaaatcagtagagaaaaaggagctgctgatacagttattaccaatgctttaatagttgatgtaaatggaatttataaagccgatgttggcttaaaagatggaaaaatatttgaaattggtaaagctggtaatcctgacactcaatctaaagtaaatattatcataggcccagtaacagagattattgctggt

SEQ ID NO: 264871 - DNA, 253 bp, Unknown
  Bacterial polypeptide expressing nucleotide sequence isolated from the Sargasso Sea
attggttgctaaaaatagattgtcgaagggtataaaattaaattatccagaagctatagctttaataacagattttgtagtagagggagctagagaaggaaaaagtgttgcagaactaatggaggcaggagctcatgtaattaaaaaaaaggattgtatggacggtattccagatatgattaaggaagttcaagtagaagctacttttcctgatggaactaaattagtaacagtacacaaaccaattagatga

SEQ ID NO: 264872 - DNA, 304 bp, Unknown
  Bacterial polypeptide expressing nucleotide sequence isolated from the Sargasso Sea
catgaaacttagccctagggaaaaagacaagttactggtgtctatggctgccattgttgcccagaaacgaaaaaaaagaggtgttaagctaaactaccctgaagctgtcgctcttatcacagactttgtaattgaaggagcgcgagatggtcgatcggttgcagacctgatggaggctggggcacatgtggttgcccttgatgattgtatggatggcattgctgaaatgatcccagatgttcaagttgaagccacctttcctgatggcacgaaactggtaacagttcatcgaccgatccgttaa

SEQ ID NO: 264873 - DNA, 234 bp, Unknown
  Bacterial polypeptide expressing nucleotide sequence isolated from the Sargasso Sea
tagatcgtggaataaaactaaattatcctgaggctatagctttaataactgattttgtaattgaaggtgctagagatggaaaaaaggtatctgaattaatggagtctggagcaaaagttgttaaaaaagaaaattgtatggatggtgttgctgatatgatttctgaagtacaagttgaagcaacatttcctgatggaacaaaactagtaactgtacataaaccgataagataat

SEQ ID NO: 264874 - DNA, 883 bp, Unknown
  Bacterial polypeptide expressing nucleotide sequence isolated from the Sargasso Sea
gtccttactgcaggttcaatagatacccacattcactttatctgtccccaacaaatggagacagcactagcctcaggaattacaactatgttgggaggaggaactggtcctgcaactggcacaaatgctactacttgtactccaggttcttttcatatttcaagaatgctccaatctgctgaagcattccccatgaatttaggtttttttggaaaaggaaactcaacaaatgagaccaatcttattgatcaggttgaggctggtgcatgtggattgaagctccatgaggattggggaacgactccctctacaataaattcttgtcttaatgttgcagataagtttgacgtacaagtatgtattcatactgatactttgaatgaggcaggctttgttgaagataccatcaacgctattgcaggaagaactattcatacctttcatactgaaggagcaggcggaggtcatgcgccagacattattaaaatttgtggagaaaaaaatgttcttccaagtagtactaatccgacgagaccttataccaggaatacattagaagaacatcttgacatgttaatggtttgtcatcacttagattctaaaatcccagaagatattgcatttgctgaatcaaggattagaagagaaactattgcagctgaggatatcttgcatgatataggtgctttttcaattattgctagtgattctcaagctatgggaagagttggggaagtaattacaagaacttttcaaaccgctcataaaatgaaagttcaaagggggccgctatcgcaggattctgatagaaacgataattacagagtaaagagatatatttctaaagtcacaattaatcctgcaatagctcatggtatagata

SEQ ID NO: 264875 - DNA, 810 bp, Unknown
  Bacterial polypeptide expressing nucleotide sequence isolated from the Sargasso Sea
ttgttgattgaggtcgagaaagacttcacaaactacggtgaagaagtgaaatttggaggaggaaaggtaattcgagacggcatgggccagagtcagctaggcagctcagagacagttgatctggtaattaccaatgctctcattctggatcactggggtattgttaaggcagatattggaattgacgatggaagaatagttggtattggcaaggcaggaaaccctgatattcaagatggagtctctatagtaattggtccaggaactgaagtggttgccggtgagggccaaatcgttactgccggtggaattgatgcgcatattcactttatttgtcctcagcagatcgaggaagctctaatgtctggagtaacgacaatgctgggtggcggaacaggaccagctacaggtacaaacgcgaccacctgtacgccggggccatggaatattgcccgaatgcttgagtccactgataacttgccgatgaatctgggcttcttaggcaaaggtaactcgagcttgccctttgctcttgaggaacagcttttggcaggagcttgtggtttgaaacttcatgaagattggggcacgactcctgcgtccatcgataattgtttagcagtagcagaatcttttgacgttcaggtcgcgattcataccgacactttgaacgagtcgggtttcgttgatgacacgattgcagcattcaaaaatagggcgatacatacctatcacacagagggtgcaggtggaggtcatgcgccggatattataaaggcttgctcacagccgaatgtgctctcctcttca

SEQ ID NO: 264876 - DNA, 307 bp, Unknown
  Bacterial polypeptide expressing nucleotide sequence isolated from the Sargasso Sea
catgatccccggcgaacttctcaccgaacccggtgaacacctgctcaacaccggccgccgcaccctgacgctggtggtgcgcaacaccggcgaccggcccatccaggtcggctcgcactaccactttgccgaaaccaacaacgccctgggctttgaccgtgcggctgcgcgcggcatgcggctgaacattgcgtcgggcaccgccgtgcgctttgagcccggccaggagcgcactgtggagctggtggactacgcgggcgagcgccgcgtgttcggcttccagggcctgacgcagggcgcgctgtag

SEQ ID NO: 264877 - DNA, 109 bp, Unknown
  Bacterial polypeptide expressing nucleotide sequence isolated from the Sargasso Sea
tatggatggtattgcagatatgattaaagatgtccaagtagaagccacctttccagatggaactaagttagttaccgtgcactatcctataagaaaggacaaaaaataa

SEQ ID NO: 264878 - DNA, 289 bp, Unknown
  Bacterial polypeptide expressing nucleotide sequence isolated from the Sargasso Sea
aatgaaattatcaccaagagaaaaagataaacttttagtaagtttagcggcaatagttgcacgaagcagaaaaagtagaggtgttaagcttaattaccctgaagcaatcgcaattataactgattttgttatagaaggagctagagatggaaaaagcgtagctgaattaatggaagcaggtgctcacgtaattaaaaaagacgattgtatgtctggtataccagatatgattcacgatgtgcaagttgaagctacctttcctgacggaacaaaactaggacagtcacca

SEQ ID NO: 264879 - DNA, 958 bp, Unknown
  Bacterial polypeptide expressing nucleotide sequence isolated from the Sargasso Sea
tatgctaggaggaggaactggacctgcaaccggcacaaatgcaactacctgtacgccaggttcttttcatatttcgcgaatgcttcaatctgcagaagcattcccaatgaatttaggattttttggtaaaggaaattcaacgaacgagagaaatcttattgatcaagttgaagctggtgcatgcggattgaagcttcatgaggattggggaacgactccatccactataaattcctgtcttaatgttgcagatgagtttgatgttcaagtttgtattcacactgataccttaaatgaggcaggcttcgttgaggataccatcaatgctattgcaggaagaacaattcatacttttcatactgaaggagcaggtggaggccatgcgccagatattattaaaatctgtggagaaaataatgttcttcctagtagtactaatcctacaagaccctatacgagaaacacattagaggaacatcttgacatgctaatggtttgtcatcatttggattctaaaattccagaagatattgcatttgctgaatcaaggattagaagagaaactattgctgcagaagatatattacatgatataggtgccttctcaattatcgctagtgattctcaagccatgggaagagtgggtgaagtaataacaagaactttccaaactgctcataaaatgaaagtacaaagaggaccattatcgcaggattctgataggaacgataactatagagtaaagagatatatttctaaagttacaattaatcctgcaatagctcatggcattaataaatatgttggttctatagaaaagggtaaaattgcagatttagtattgtggaaaccttccttttttgctgtaaagcctgaattggtcgttaaaggaggatctatagttgggtccaaatgggtgatgcgaatgcttcaattccctactcaggtcctgttcatg

SEQ ID NO: 264880 - DNA, 859 bp, Unknown
  Bacterial polypeptide expressing nucleotide sequence isolated from the Sargasso Sea
tttcatacagaaggtgctggcggtggacatgcaccagatataattaaagtttgtggagaagagtatgttattccttcctcaacaaatccaaccagaccatatacggttaatacaatagaagaacatttggatatgctaatggtttgtcatcatcttgataaatctattccagaggatgtagcatttgctgaaagtagaataagaagagaaacaattgcagcagaagatattctgcatgatatgggagccttttcaattattgcatcagatagtcaggccatgggcagagttggagaagttataattagaacttggcaaactgcacataaaatgaaagttcaaagaggaagtttaccagaggaaaaaggagacaatgataactttagagttaaaagatatttagcaaaatacacaattaatcctgcaattgctcatgggatttcaaaatatattggtagtattgaaaaaaataaacgtgcagatttagttttatgggacccagcattctttggtgcaaagccagaaatgatactaatagggggaagtatagcttgtgctcaaatgggagacccaaatgcatcaattccaactcctcagcctgtatacaccagaccaatgttttcatcatttgggacttctttagaaaaatcttcggtaattttcacaagtaaattagctcttgaaaagaattcattaaaagatgcaagtataagaaaagacttattacctgtagaaaatactagggctatatctaaaaaagatatgattttaaataataagtgtccaaagattgaggttaaccccgagacatatgaagtaaaagctgatggtgaaataattacatgtgaaccagctaaag

SEQ ID NO: 264881 - DNA, 304 bp, Unknown
  Bacterial polypeptide expressing nucleotide sequence isolated from the Sargasso Sea
atgaagctttctccaagagagattgataaaatgatggtcagcatggctgcaatagttgctcgaaagaggttagaccgtggtgttaagttaaattaccctgaagccgtatcaattatttctgattatgttgttgaaggtgcaagggaaggcaaatctgtagctgaactaatggaaagtgcagcacatgttctaaaaaaagatgactgtatggacggagttgctgaaatgattgccgaagtgcagacagaagcaacttttccggatggaacaaagttagtcacggtgcataaacccataaggtaag

SEQ ID NO: 264882 - DNA, 580 bp, Unknown
  Bacterial polypeptide expressing nucleotide sequence isolated from the Sargasso Sea
atggctaaaatttctagagcagcttatgcagatatgtatgggcccacaacaggagataaagtaaggcttgcagatactgaactatttattgaggttgaaaacgatctaaccacttatggtgaagaagtaaaatttggtggtggaaaagtaataagagatgggatgggccaatctcaaatcagtagagaaaaaggagctgctgatacagttattaccaatgctttaatagttgatgtaaatggtatttataaagctgatgtaggtttaaaagatggaaaaatatttgaaattggtaaagctggtaatccagatactcaatctaaagtaaatattattattggtccaggaacagagataattgctggtgaaggaaaaattttaaccgcaggaggttttgacagtcatattcattatatatgccctcaacaaattgacgatgctctacactcaggtgttacaactatgcttggaggaggtactggaccagcccatggaacacttgcaacaacgtgtacacccggaccatggcacatacaaagaatgattcaatctgctgatggtttttctatgaatttagctt

SEQ ID NO: 264883 - DNA, 836 bp, Unknown
  Bacterial polypeptide expressing nucleotide sequence isolated from the Sargasso Sea
tgatgtaaatggtatttataaagctgatgtaggtttaaaagatggaaaaatatttgaaattggtaaagctggtaatccagatactcaatctaaagtaaatattattattggtccaggaactgagataattgctggtgaaggaaaaattttaactgcaggaggttttgacagtcatattcattatatatgtcctcaacaaattgacgatgctttacactcaggtattacaactatgcttggaggaggtactggaccagcccatggaacacttgcaacaacgtgtacacccggaccatggcacatacaaagaatgattcaatctgctgatggtttttctatgaatttggcttttgctgggaaaggaaattcttcattaccagaaggtcttgaagaacaaatactagcaggagcttcagctttaaaattacatgaggattggggaaccactcctggagcaattgataattgtttgaatatagctgacaaaaatgatgttcaagtaatgattcacacagacactttaaatgaaagtgggtttgtagaaaatactatcaaagcaattaataaaagaactatacatgcttttcatacagagggtgctggtggtgggcacgcaccagatataattaaagtttgtggagaagagtatgtaattccttcttcaacaaacccaaccaggccttatacggttaatacaatagaggaacatttagatatgcttatggtttgtcatcatcttgataaatcgattccggaggatgtagcatttgctgaaagtagaatcagacgagaaacaattgcagcagaagatattcttcatgatatgggtgcatttt

SEQ ID NO: 264884 - DNA, 304 bp, Unknown
  Bacterial polypeptide expressing nucleotide sequence isolated from the Sargasso Sea
atgcatctttcaccccaagaaaaagataaattattgattttttctgctgcgctcttagccgaaagaagacttaatcgaggtctgaagcttaattatcctgaaacaatcgcttttttaagttttcaagttcttgaaggagctagagatgggaaaagtgtaagtcaattaatgtcagagggaactacttggctttcaaaatcacaagttatggaaggcatctctgaaatggttgatgaagttcaaatagaagcgatttttcctgatgggacaaaattagttactattcacaatccgattaattaat

SEQ ID NO: 264885 - DNA, 980 bp, Unknown
  Bacterial polypeptide expressing nucleotide sequence isolated from the Sargasso Sea
tgttgcagataagtttgacgtacaagtatgtattcatactgatactttgaatgaggcaggctttgttgaagataccatcaacgctattgcaggaagaactattcatacttttcataccgaaggagcaggtggaggtcatgctccagacattataaaaatctgtggagaaaaaaatgttcttcccagtagtacaaatccaactagaccttatacaaggaacacattagaagaacatcttgacatgttaatggtttgtcatcatttagattctaaaatcccagaagacattgcatttgctgaatcaaggatcagaagagagactattgcagctgaggatatcttgcatgatgtaggtgccttttcaattattgctagtgattctcaagctatgggaagagttggcgaagtaattacaagaacttttcaaaccgcacataaaatgaaagtccaaagggggccgctaacgcaagattctgatagaaatgataattatagagtaaagagatatatttctaaagtcacaattaatcctgcaatagctcatggtattgataaacatgttgggtctatagaaaagggtaaaattgcggatttggcattgtggaaaccttccttttttgcgataaagcctgaattagttgttaagggaggatctatagtttggtcccaaatgggtgatgcaaatgcttcaattcctactccaggccctgtgcatggtcgacctatgttcgcaagtttcggccaatctctaattaagagttcttttacctttttaagtaaaaattcaattgaacaaaatattccaaataaattaggcttacaaaagaaatgtattgccgttgaaaataccagaaatatcaataaatcaaacttaaaacttaatagtgaactaccaaatatttcagttgatcctcaaacttatgaagttttttctgatggagaacttcttacttgtgaaccacttgatgaagtccctatgg

SEQ ID NO: 264886 - DNA, 823 bp, Unknown
  Bacterial polypeptide expressing nucleotide sequence isolated from the Sargasso Sea
gaagtgacttttggtggcggtaaggtcattcgcgacggaatggggcagtcacaagccgcagatcaggaatgcatggacttggttatcacaaatgcattgattgttgattacctggcaattgtgaaggcggatgtgggagttaagcatggccggatagccgccattggtaaagcaggaaatcccgatattcaggatggagtgactgtggtgattgggcctgcaacagaggtgatagcaggcgagggcaagatcttaactgcggggggtatcgactctcacattcatttcatttgccctcaacagattgatgaggccctcgccagtggcataacaacgatgattggaggtggaacaggacctgcgacaggaaccaacgcaaccacctgcacgcctggccctttcaatttggaaatgatgatgcgggccattgagggacagccaatgaattttggctttttgggcaaagggaacagcagcaagcgcgatccgttggccgagcaaattggcgcgggagcctgcggtctcaagttgcatgaagattggggtactacgccccaagcaatagacacgtgtttgtcaattgcagaggaaacagatgtacaagtcgccattcatacggacactcttaatgagagtggtttcgttgaagagacgctaaaggctattaatggtcgaacaattcatacctaccatacggagggggccggtggcgggcatgctcctgacattatcaaagccgccggtctggcaaatgtgttgccctcctcaacgaaccctacacgcccgtataccattaatactgtagacgaacatttggatatgc

SEQ ID NO: 264887 - DNA, 954 bp, Unknown
  Bacterial polypeptide expressing nucleotide sequence isolated from the Sargasso Sea
tgacgtacaagtatgtattcatactgatactttgaatgaggcaggctttgttgaagatacaatcaatgctattgcaggaagaactattcatacttttcatacggaaggagcaggtggaggtcatgcgccggacattattaaaatttgtggagaaaaaaatgttcttccaagtagtactaatccaacaagaccctatacgaggaacacattagaagaacatcttgacatgttaatggtttgtcatcatttggattctaaaatcccagaagatattgcatttgctgaatcaaggattagaagagagactattgcagctgaggatattttgcatgatataggtgctttttctataattgctagtgattctcaagctatgggaagagttggtgaagtaattacaagaacttttcaaaccgctcataaaatgaaagtccaaaggggcccactatcgcaggattctgatagaaacgataattacagagtgaagagatatatttctaaagttacaattaatcctgcaatagctcatggtattaatgaacatgttgggtctatagaaaaaggtaaaattgcggatttcgcattgtggaaaccttccttttttgcggtaaaacctgaattagttgttaaaggaggatctatagtttggtcccaaatgggtgatgccaatgcttcaattcctactccaggtcctgtacatggtcgacctatgtttgcaagcttcggccaatctctagttaagagttcttttacctttttaagtaaaaattcaattgatcaaaatattccaaataaattaggcttacaaaagaaatgtattgccgtagaaaataccagaaatattaataaatcacacttaaaacttaataataaactaccaaatatttcagttaatcctcaaacttatgaagttttttctgatggagaacttcttacttgtgaacctcttgatga

SEQ ID NO: 264888 - DNA, 862 bp, Unknown
  Bacterial polypeptide expressing nucleotide sequence isolated from the Sargasso Sea
aatacttgaaattggtaaagctggcaatccatatactcaatctaaagtaaatattattattggtccaggaacagagataattgcaggagaaggaaaaattttaacagctggaggttttgacagtcatattcattacatatgccctcaacaaattgatgacgccttgcactcaggtattacaaccatgcttggaggaggtactggaccggctcatggaacacttgcaacaacgtgtacacctggaccatggcacatacaaagaatgattcaatctgctgatggtttttctatgaatttagcttttgcaggaaaaggaaattcgtcattaccagaaggtcttgaagaacaaattctggcaggcgcttcagctcttaaactacatgaggattggggaaccactcctggagcaattgataattgtttgaatattgctgacaaaaatgatgttcaagtaatgattcacacagatactttgaacgaaagtgggtttgtagaaaatacaataaaagcaataaacaaaagaactattcatgcttttcatacagaaggtgctggtggcggacatgcaccagatataattaaagtttgtggagaagagtatgttattccttcttcaacaaatccaaccagaccatatacagtcaatacaatagaagaacatttggatatgctaatggtgtgtcaccatctcgataaatctattccagaggatgtagcatttgctgaaagtagaatcagaagagaaacaattgcagcagaagatattctgcatgacatgggagccttttcaattattgcatcagatagtcaggctatgggtagagttggagaagtaataattagaacttggcaaactgcacat

SEQ ID NO: 264889 - DNA, 701 bp, Unknown
  Bacterial polypeptide expressing nucleotide sequence isolated from the Sargasso Sea
tatgtcttataaaattgatagaaaaacttacgctcaaacttacggacccactacaggagatagagtaaggctagctgacaccgaactttttatagaagtagaaaaggatttaactacatacggagatgaagttaaatttggtggaggtaaagttattcgagatgggatggggcagtctcaagtaataagagctgatggggctgtagataccgtaataactaatgctttgatcgtagattggtggggaataattaaggctgatgtgggtataaaagatggaatgatttttgaaattggtaaggccggcaatcctgatatccaggataatgttgatattgttattggtgcatcaacagaagtaatagctggagaggggcatattcttactgcaggttcaatagatacccatattcactttatctgtccccaacaaattgagacagcactagcctctggaattacaaccatgttgggaggaggaactggacctgcaactggtacaaatgctactacttgtactccaggttattttcacatttcaagaatgcttcaatctgcagaagcatttcctatgaatttaggattttttggaaaaggaaactcaacaaacgagagaaatcttattgatcaggttgaggctggtgcatgtggattgaagcttcatgaggattggggaaccactccttctacaataaattctt

SEQ ID NO: 264890 - DNA, 812 bp, Unknown
  Bacterial polypeptide expressing nucleotide sequence isolated from the Sargasso Sea
cacatccttagttgatcagattactggtggggcttgtgggctcaaaattcatgaagactggggagctatgcccgcagcgattgacacatgcttgggcgtagccgatgaaatggattttcaagttcagctacatacagataccttgaatgaaagtggtttcgtagaagataccctagccgcaataaatgggcggacaattcatatgtatcatgctgaaggtgctggtggtggacatgcaccagatatcattagtataacaggacaaccaaattgtcttccttcctcgacaaatcctacaaatccattcacacgaaataccttcgacgaacatcttgatatgatcatggtgtgccatcatttaaaccctgcagtaccagaggatgttgcttttgcagaaagtaggattagagctgaaactatagctgctgaagacgttttgcacgatttaggagctatctcaatgttaggctcagacagtcaaggtatgggtcgaataaatgaggtaatttgtagaacatggcaacttgcatcaaaaatgcgagatcaacgcggtagacttaatgaggaaaagacaagtcttggagacaatgaaaggattaagagatatatagcaaaatatactattaatgctgctcgaacatttggtatggacaagtggattggtagtcttgaaaagggcaagcttggtgacgtggttttatggaaaccagaattttttggaataaagcctgaactagtaataaaaggtggctttattgtatgggcagcaatgggggactcagctgcatcactaatgacatgtgagccactag

SEQ ID NO: 264891 - DNA, 304 bp, Unknown
  Bacterial polypeptide expressing nucleotide sequence isolated from the Sargasso Sea
tatgcatctttcacctcaagaaaaggataagttattaattttttctgctgcgcttttagctgaaagaaggcttagtcgaggtcttaagcttaattatcctgaaacaattgcttttttaagttttcaagttcttgaaggagcacgagatggtaaaagtgtaagtcaattaatgtcagagggaactacttggctttcaaaatcacaagttatggagggcattcccgaaatggttgatgaggttcaaatagaagcggttttccccgatggtactaaattagttactattcacaatccgattaattaa

SEQ ID NO: 264892 - DNA, 760 bp, Unknown
  Bacterial polypeptide expressing nucleotide sequence isolated from the Sargasso Sea
aatggttaagattcctagagcatcatatgcggatatgtacggtcctactacaggagataaagtaagacttgcagatacagagttatttattgaagttgaaaatgatcttaccaattatggtgaagaggtaaagtttggtggtggaaaagtaataagagatggcatgggtcaatcacaaatcagtagagaaaaaggtgcagtagatacagttataacaaatgctttgattgttgatgttaatggaatttataaagctgatgtaggtttaaaagatggaaaaatttttgaaattggcaaagcaggcaatccagatactcaatccaaagtaaatattattattggtcctggaacagagattattgcaggtgaaggtaaaattttaactgctggaggttttgatagtcacattcattacatatgtcctcaacaaattgatgatgctttacactcagggattactacgatgttgggtggaggaacgggacctgctcatggaacacttgctacgacttgtacacctggtccatggcacatcaaaagaatgattcaatccgctgatggtttctcaatgaatttagcttttgctggaaaaggaaattcttcattaccggaaggtcttgaagaacaaattcttgcaggagcttcagctctaaagttacacgaagattggggtactactcctggagcaattgataattgtttaaatattgctgataaaaatgatgttcaagtaatgatacacacagacactttgaacgaa

SEQ ID NO: 264893 - DNA, 863 bp, Unknown
  Bacterial polypeptide expressing nucleotide sequence isolated from the Sargasso Sea
tatgtcttataaaattgatagaaaaacttacgctcaaacttacggacccactacaggagatagagtaaggctagctgacaccgaactttttatagaagtagaaaaggatttaactacatacggagatgaagttaaatttggcggaggtaaagttattcgagatgggatggggcagtctcaagtaataagagctgatggggctgtagataccgtaataactaatgctttgatcgtagattggtggggaataattaaggctgatgtgggtataaaagatggaatgatttttgaaattggtaaggccggcaatcctgatatccaggataatgttgatattgttattggtgcatcaacagaagtaatagctggagaggggcatattcttactgcaggttcaatagatacccatattcactttatctgtccccaacaaattgagacagcactagcctctggaattacaaccatgttgggaggaggaactggacctgcaactggtacaaatgctactacttgtactccaggttattttcacatttcaagaatgcttcaatctgcagaagcatttcctatgaatttaggattttttggaaaaggaaactcaacaaacgagagaaatcttattgatcaggttgaggctggtgcatgtggattgaagcttcatgaggattggggaaccactccttctacaataaattcttgtctaaatgttgcagataagtttgatgtacaagtatgtattcatactgatactttgaatgaggcaggctttgttgaagataccatcaacgctattgcaggaagaactatacatacttttcataccgaaggagcaggtggaggtcatgctccagacattataa

SEQ ID NO: 264894 - DNA, 304 bp, Unknown
  Bacterial polypeptide expressing nucleotide sequence isolated from the Sargasso Sea
atgcatctttcacctcaagaaaaggataaattattgattttttctgctgcgctcttagctgaaagaagactcagtcgaggtcttaagcttaattatcctgaaacaattgcttttttaagttttcaagttcttgaaggagcacgagatggtaaaagtgtaagtcaattaatgtcagagggaactacctggctttcaaaatcacaagttatggagggcattcctgaaatggttgatgaagttcaaatagaagcggttttcaccgatgggactaaattagttactattcacaatccgattaattagt

SEQ ID NO: 264895 - DNA, 307 bp, Unknown
  Bacterial polypeptide expressing nucleotide sequence isolated from the Sargasso Sea
atgatacctggtgaagttaaggctgcggaaggcagtatcacactcaatgaaggtcgtcagacgttagaaatagaagtggcgaatacgggcgatcgtcctattcaggttggatctcactatcacttttacgaagtgaataattcactgacatttgatcgtgaaaagacccgcggctaccgactcaatattcctgcgggaaccgcagtccgcattgaaccggggcaaacgcgaacggtggaattagttgagtataccggtgcacggaaagtgtatggattccagggcaaagtgatgggagacctgtaat

SEQ ID NO: 264896 - DNA, 212 bp, Unknown
  Bacterial polypeptide expressing nucleotide sequence isolated from the Sargasso Sea
attatccggaagccgtcgcctttatactgcggcgattatggaaggtgctcgtgatggtcggactgtctctgaattaatggggcatggccggactctccttacccgcgatgacgtgatggaaggtgtacccgaaatgattcacgaagtgcaggtcgaagcgactttccccgatggtactaagttagtcactgttcataaccctattgtctgat

SEQ ID NO: 264897 - DNA, 304 bp, Unknown
  Bacterial polypeptide expressing nucleotide sequence isolated from the Sargasso Sea
atgaaactgactcctagagaaaaagataaacttttaataagccttgcagcgattgtcgctaaaaatagattatcaaaaggtataaaattgaattatccagaggctatcgctttaataacagattttgttgtcgagggagctagagagggcaaaagtgttgcagaactgatggaggcaggagcacatgtcattaaaaaaaaggattgtatggaaggtattccagatatgattaaggaagttcaagtagaagctacttttcctgatggaactaaattagtaacagtgcataaacctattagatgat

SEQ ID NO: 264898 - DNA, 811 bp, Unknown
  Bacterial polypeptide expressing nucleotide sequence isolated from the Sargasso Sea
gatcaaaaatagaacaatacacgcattccataccgaaggcgcgggcggcggtcacgcacccgatatcataaagatatgcggtaagagccatgttatcccatcgtcgacgaacccaacgcgcccatataccgtaaacacattagaggagcatcttgatatgcttatggtttgtcatcacttggacaaatctattccagaggatgtggcgtttgcagagagcaggatacgaaaagagacaatagcggctgaagatatcctgcatgacatgggagcattttctatcatagcgtctgacagccaagcaatgggtcgcgtgggtgaggttatcacccgcacttggcaaaccgcgcacaaaatgaaaatacaacgcgggcggctcagcgacgaaacaggcgataacgataatctaagggtgcggcgttatgttgccaaatacacattgaatccagcaatttgccacggcatttctgcgcacgttgggagtattgaagcgggtaagcgcgctgatttggttttgtggaaaccggctttctttggggtgaagccggaaatggttctgcttggaggaagtatagcagtggcgcaaatgggtgacccgaacgcgtctattccgacaccgcaacctgtttatactcggcccatgtttgcagcctacggtcgctcagttgaaaactctgctatttgttttgtgagccaagctgcaaaaagtgaagacataggcgacaagctcggtcttgccaagcaaactaaaccagtgcaaaacacgcgaaacatcactaagatggatatggtatttaatagttacctgccg

SEQ ID NO: 264899 - DNA, 304 bp, Unknown
  Bacterial polypeptide expressing nucleotide sequence isolated from the Sargasso Sea
atgaatttaacaccaagagaaaaagataaattacttatatttactgcagcccttgtggcagaaaaacgcaaggaacgtggacttacgttaaatcaccctgaagcagttgcctttatatcggcggctattctcgagggtgcaagggacggcaagactgttgctgaattaatggatttcggaaaaagtttgttgaagaaagaggatgtcatggaaggtgtgtccgagatgatcccagatattcaagtggaagcaacttttccagatgggacaaaattagtaaccgtacataacccaataatgtaag

SEQ ID NO: 264900 - DNA, 310 bp, Unknown
  Bacterial polypeptide expressing nucleotide sequence isolated from the Sargasso Sea
atgattccgggcgaaataattgttgcagatggcgacattgatttgaataaaaatcgtcagtcaattgaaattaacgtgttaaataatggagatcgaccgatacaggtgggctctcactatcatttttttgaagttaacgatgctttaatgtttgaccgtctcgaaactaaaggttttcgactagatatagcctcgggcacagcagttcgttttgagcctggtcaatctagaactgtaattcttattcgctttggaggtagtcaaaatatatatggttttcaagaaaaagttatgggagaagttaaatgag

SEQ ID NO: 264901 - DNA, 912 bp, Unknown
  Bacterial polypeptide expressing nucleotide sequence isolated from the Sargasso Sea
aatgagtaagatgaaacgaagagattacgcgcaaatgtacggccctactaaaggagatgcagtgaggttaggtgatactaaccttttcgcggaagtagaacatgattttattacctatggagatgaatgcctgcatggcggcggaaaaacactgcgcgacggtcttggtttaactccgggctatgatagtgccatgggtgcgctggatatgcttttgtgcaatgctactgtgattgatccagtaataggcattgtaaagggcgatatagggataaaggacggtaaaatcgtagggattggtaaagccggcaatccaggtacaatggacggagtgcattctgatctaatttgtggggtggcgacaactgttcgagatgcagaaggtttaattgcaactcccggtggcatcgacgtgcacgtacatttcgacagtgcgcaattgtgcgatcatgctattgccgcaggtatcaccagcttaatggggggctctttaggcccaattaccgttggtatcgactgtggtggtgctttcaatgtgggtaagatgatccaggcgtcagaggatttccccgtgaattttggatttcttggtcgaggaaatacctcaaagcccaagtcaatctatgaccaaataaagggtggagctgtcgggttgaaaatccatgaggactgggggtcaatgcccgcagcaatcgacacgtgtctgagcgtggcagacgagttggattttcaagttcagatacatacagacactctcaatgaaagcggtttcctggagagtactcttgaagcaatcgcaaaccggacgatccacatgtatcataccgaaggtgctggtggcggtcatgccccagacgttatcagggtagcaggcgaaatgaactgtctgccatcctctaccaccccacgaat

SEQ ID NO: 264902 - DNA, 781 bp, Unknown
  Bacterial polypeptide expressing nucleotide sequence isolated from the Sargasso Sea
gatgctttttctatgaatttagcatttgcaggaaaaggaaattcttcaaaacctgaagggttgattgaacaggttaatgctggcgcatgtgcgttaaaacttcacgaagactgggggaccacacctggtgctattgataactgtttaaatgttgcagataaaatggatgtgcaagttatgatacataccgacacattgaatgaaagtggatttgtagaaaatactattgaggcaattaaaaatagaaccattcatgcttttcatactgaaggagctggaggaggacatgcacctgatataataaaagtgtgtggaaatcaaaatgttattccatcatcaacaaacccaacaagaccctatacaattaatactctagaggaacatctcgatatgcttatggtttgtcatcacttagataaatcaatacctgaagacgttgctttcgcagaaagtagaataagaaaggaaacaatagccgctgaggatatactccacgatatgggagccttttcaataattgcatctgacagtcaagctatgggaagagttggagaggttataataagaacttggcagacagctcataaaatgaaaatacaaagaggtcgacttagagaagaaaatggtgataacgataatgtaagagtaaaaagatatatagccaaatatactatcaaccctgcaattacacatggaatttctcaacatattggatcaataagtgaaggaaaaagagcagacatagttttatgggatcctgcttttttcggtgttaaacctg

SEQ ID NO: 264903 - DNA, 883 bp, Unknown
  Bacterial polypeptide expressing nucleotide sequence isolated from the Sargasso Sea
atttgaaattggtaaagctggtaatccagatactcaatctaaagtaaatattattattggtccaggaacagaaataattgctggtgaaggaaaaattttaacagcagggggttttgatagtcacattcattatatatgtccccaacaaattgatgatgcattgcactcaggcattacaaccatgttaggaggaggaactggaccggctcacggtacacttgcaacaacttgtacacccggaccatggcacatacagagaatgattcaatctgctgatggtttttctatgaatttagcttttgcaggaaaaggaaactcttcattaccagagggacttgaggaacaaattctagcaggagcttcagctttaaaattacatgaggattggggaaccactcctggagcaattgacaattgcttgaatattgctgacaaaaatgatgttcaagtaatgattcacacagacactttaaatgaaagtgggtttgtagaaaatactatcaaagcaattaacaaaagaactatacatgcttttcatacagagggtgctggtggtggacacgcgccagatataataaaagtttgtggagaagagtatgttattccctcttcaacaaatccaaccagaccatatacaatcaatacgattgaggaacatttggatatgctaatggtgtgtcaccatcttgataaatctattccagaggatgtagcatttgcagaaagtagaataagaagagaaacaatagcagcagaagatattctccatgacatgggagccttttcaattattgcatcagatagtcaggcaatgggtagagttggagaagttataattagaacttggcaaactgcacacaaaaatgaaagttcaaagaggtag

SEQ ID NO: 264904 - DNA, 304 bp, Unknown
  Bacterial polypeptide expressing nucleotide sequence isolated from the Sargasso Sea
catgaaattatcacctcgagaaaaagataaactcttaattagcttggctgcaatagtagcaagaaatagaaaaagtagaggaattaaacttaactaccctgaagcgatagctttaatttcagattttgttgttgaaggagctagagaaggtcgtaccgttgcagatttaatggaagctggagcgcatgttataaaaaaagatgaatgtatgagtgggattcctgagatgatacatgaagttcaagttgaggctacatttcccgatggcacaaaattagtcacagttcatcatcctataagataa

SEQ ID NO: 264905 - DNA, 655 bp, Unknown
  Bacterial polypeptide expressing nucleotide sequence isolated from the Sargasso Sea
atgtctaagttaacgagagcatcttatgctgacatgtttggaccaactactggtgacaaagttagacttggtgatacagagctatttattgaagtagaaaaggattttactacttatggtgaggaagttaagtttggaggcggtaaagttattagagatggaatgggtcaatcacaattgagtagagaaaaaggtgctgttgatactgttatcactaatgctcttataattgatgttacaggaatttttaaagcagatgtaggacttaaaagtggaaaaatttttgaaattggaaaagctggtaatccagacactcaacccaatgtaaatattataataggaccgggtacggaaataatagctggagaaggaaagattttgactgcaggaggctttgatagtcatatacactacatatgtcctcaacaaattgatgatgctttacactctgggattactacaatgctaggaggaggaactggtccagctcatggaactttagctacaacatgcacacctgggccttggcatataaaaaaaatgatacaatctgcagatggtttctcgatgaatttggcatttgcggggaaaggaaatgcatcattaccagatgctcttcaagaacaaattttagcaggagcctgtgctttaaaat

SEQ ID NO: 264906 - DNA, 851 bp, Unknown
  Bacterial polypeptide expressing nucleotide sequence isolated from the Sargasso Sea
acgctacaacctgcactcccaggagaattcaatattcataagatgattcaagttgtagaagagtttccgttaaactttggatttttgtgtaaaggaaatgattcccaagaagagtcacttatggaacagattagagccggagcctgcggtttaaaattgcatgaagattggggaaccactcctgccacgattaattcagcactaaatgttgcagataagacagacacccaggtagcaattcacacagatacattaaacgaatgtgggtatgttgacgacaccattgctgcaattaatggaagagttattcatacatatcataccgaaggtgcaggcggaggccacgcaccagatattatgaaaattgcctcagaaccaaatattttgccgtcatcgactaatcctacaagaccatttaccaccaatactcttgaagagcacttagacatgatgatggtatgtcaccatcttaatccatcagttccagaggatatttcatttgccgaatctaggattagagcagagacaattgctgcagaagacatacttcacgacataggagcaattagcatgatgtcatcagatagtcaggcaatgggaagagtgggagagacaactaccaggaattggcagacggcagacaaaatgaaaaaaatgaaaggagcattacctgaagattctcaagaaaatgataattttagaattaaaagatatgttgcaaaaattactgcaaaccctgcaataactcatggcatatcagaacatgttggaacattagaaaatggcaagatggcagacatcataatatggatgccacaattttttggaattaaaccaaagatgattgtaaa

SEQ ID NO: 264907 - DNA, 823 bp, Unknown
  Bacterial polypeptide expressing nucleotide sequence isolated from the Sargasso Sea
actttgaatgaggcaggctttgttgaagataccatcaacgctattgcaggaagaactattcatacctttcatactgaaggagcaggtggaggtcatgcgccagacattattaaaatttgtggagaaaaaaatgttcttccaagtagtactaatccaacaagaccttataccaggaatacattagaagaacatcttgacatgttaatggtttgtcatcatttagattctaaaatcccggaagatattgcatttgctgaatcaaggatcagaagagagactattgcagctgaggatatcttgcatgatatgggtgctttttcaattattgctagtgattctcaagctatgggaagagttggtgaagtaattacaagaacttttcaaaccgctcataaaatgaaagttcaaagggggccgttatcgcaagattctgatagaaacgataattacagagttaagagatatatttctaaagtcacaattaatcctgcaatagctcatggtattgataaacatgttgggtctatagaaaagggtaaaattgcggatttggcattgtggaaaccttccttttttggtgtaaagcctgaattagttgtcaaaggaggatctatcgtttggtcccaaatgggtgatgcaaatgcttcaattcctactccaggtcctgtacatggtcgacctatgtttgcaagtttcggccaatctctaattaagagttcttttacctttttaagtaaaaattcaattgatcaaaatattccaaataaattagggttacaaaagaaatgtattgctgtagaaaataccagaaatatcaataaat

SEQ ID NO: 264908 - DNA, 304 bp, Unknown
  Bacterial polypeptide expressing nucleotide sequence isolated from the Sargasso Sea
catgcatctcagtccccaggaaaaggacaagctcctgatcgtgaccgcggcactgctagccgaacgacgcttgaaccgcggcctgaagctcaaccaccccgaagcggtggcttggctcagttttctggtgctggaaggcgcccgtgacggcaagagcgtggcggagctgatgcaggagggcaccacctggctgcgtcagaaccaggtgatggagggcgtgcccgagctcgtccatgaggtgcagatcgaggccgtcttccccgatggcaccaagctcgtcaccctgcacgacccgattcgctga

SEQ ID NO: 264909 - DNA, 631 bp, Unknown
  Bacterial polypeptide expressing nucleotide sequence isolated from the Sargasso Sea
aataaagagagaagcttatgccgatatgtatgggccaacaactggtgataaagttagacttgctgatactgaattatttattgaagtggaaaaagatttaacaacttatggagaagaagttaaatttggtggtggaaaagttattcgagatggaatgggacaatctcaagtatctcgtaaagatggcgctgttgatacagttataacaaacgccttaatagtagatgtaaatggaatttataaagctgatattggtcttaaggatggattaatttatgaaattggaaaagcaggtaatccagatacacaacccaatgtaaatattattattggacctggaacagaaataattgctggtgaaggcaaaattataacagctggtggatttgacagtcatatacattttatttgtcctcagcaaatagatgatgcacttcattcaggtattacaactatgttgggaggtggaactggtcctgcacacggcactttagcgactacagttacacctgggccatggcatatagaaaaaatgatacaatcagctgatgcattttctatgaacttagcttttgcaggaaaaggaaatagttctttacctaaagctcttgaagaacaagtaatagccggt

SEQ ID NO: 264910 - DNA, 853 bp, Unknown
  Bacterial polypeptide expressing nucleotide sequence isolated from the Sargasso Sea
attgaaaaagatcttaccacttatggtgaagaggtaaaatttggaggtggtaaagtaataagagatggtatgggtcaatctcaaattagtagaaaaaatggtgccgttgatactgttatcacaaacgttattatattagatgtaaatggaatttttaaagctgatattggattaaaagatggtttgatacattctattggtaaagctggtaatccagacactcaaccaaacgtaaatattattattggtcctggtacagaagctattgctggtgagggtaaaataattacagccggtggatttgacagtcatatccatttcatatgcccccaacaaattgacgatgcgcttcattctggaattacaactatgctaggtggtggaactggtccagcacatggcacacttgctacaacttgtactccaggtccatggcacataaaaagaatgatacaatctgctgatgctttttccatgaatctagcttttgctggcaagggtaactcatcattaaaagatggacttatagaacaaattcatgcgggtgcctgcgcattaaaactccatgaagattggggtacaactcctggtgctatcgatgcttgtttaaatgctgcaaatgaatatgacattcaagtaatgatacacacagacacattaaatgagagtggttttgttgagaatacaattaaggctattggaaatagaacaattcatgcatttcatactgaaggtgctggcggaggacatgctccagatattataaaattatgtggagaggagtatgtaatcccatctaaaactaatccaacccgtccatataccgttaatacaattgaggagcatctagata

SEQ ID NO: 264911 - DNA, 1085 bp, Unknown
  Bacterial polypeptide expressing nucleotide sequence isolated from the Sargasso Sea
aacaagtatgggaggtgcggctgcgcttaactttcatgaagattggggttcaactcctgcagcaattgataactgtttaaatattgctgacaaatatgatgttcaagtaatgatacatactgatactcttaatgaaagtggatttgttgagaatacaattaatgctattaataaaagaacaattcatacttttcatactgaaggtgctggagggggtcacgccccagatataataaaaatttgtggggagccatatgttttaccttcatccactaatccaacccgaccttttacagtcaatacagtcgaggaacacttagacatgcttatggtttgccaccatttagataaatcaattcccgaagatgtagcgtttgcagaaagtcgaattcgaagagaaacaatggcagcggaagatattcttcatgatatgggggctttttcaattattgcatctgatagtcaagccatgggaagggttggtgaagttataattcgaacatggcaaactgctcataagatgaaagttcaaagaggaagactagctgaagaacaaggtgataatgataatttaagagtaaaaaggtatattgcaaaatatactattaatccttcgatagctcatggaatatcttcttatgttggaagcttagaaaaaaataaaaaagctgatatagtaatttgggaccctgcattttttggagtcaaaccggaaatggttataatgggaggtagcattgcatgctcacaaatgggtgatccaaacgcttctattccaacacctcaaccagtttttacaagaccaatgtttgcaagttttggtaaatcgttagaaaagtcttcctacacatttgtaagtaaagaatctttagaatcaggaaatcttaatcatttagaaattaaaaaagatatcttaccagtctttaatactcgatctatatccaaaaaagatatgattctgaatgacgtttgtccaaaaattgatgttaatcctgagacatatgaagttagagcaaatggtgaaataatcacttgcgagcctgctgaagaattgcctatggctcagagatattttatgtattgaa

SEQ ID NO: 264912 - DNA, 304 bp, Unknown
  Bacterial polypeptide expressing nucleotide sequence isolated from the Sargasso Sea
atgcatctttcacctcaagaaaaggataaattattaattttttctgctgcactcttagctgaaagaaggcttggtcgaggtcttaagcttaattatcctgaaacaatagcttttttaagttttcaagttcttgaaggagcacgagatggtaaaagtgtaagtcaattaatgtcagagggaactacctggctttcaaaatcacaagttatggagggtattcctgaaatggttgatgaagttcaaatagaagctgttttccccgatgggactaaattagttactattcataatccgattaattagt

SEQ ID NO: 264913 - DNA, 995 bp, Unknown
  Bacterial polypeptide expressing nucleotide sequence isolated from the Sargasso Sea
aatggctaaaatttccagagcagcttatgcggatatgtatgggcctactacaggagacaaagtaaggctcgcagataccgacttgtttattgaggttgaaaacgatctaaccacttatggtgaagaagttaagtttggtggtggaaaagtaataagagatgggatgggccaatctcaaattagcagagaaaaaggagctgctgatactgttattaccaacgctttaatagttgatgtaaatggaatttataaagctgatgtaggtttaaaagatggaaaaatatttgaaattggtaaagctggaaatccagacactcaatctaaagtaaatattattattggtccaggaacggagataattgcaggtgaaggaaaaattttaacagcagggggttttgatagtcatattcattatatatgcccccaacaaattgatgatgctttacactcaggtattacaactatgcttggaggaggtactggacctgctcatggcacacttgcaacaacgtgtacacctggaccatggcacatacaaagaatgattcaatctgctgatggtttttccatgaatttagcttttgctgggaaaggtaattcttcattaccagaaggtcttgaagaacaaattctagccggagcttcagctttaaaattacatgaggattggggaaccactcctggagcaattgataattgtttgaatattgctgacaaaaatgatgttcaagtaatgattcacacagacactttaaatgaaagtgggtttgtagaaaatactataaaagcaataaacaaaagaactattcatgcttttcatacagagggtgctggtggtggacacgcaccagatataattaaagtttgtggagaagagtatgttattccttcttccacaaatcctactagaccatatacggttaatacaatagaggaacatttagatatgctgatggtgtgtcatcatctcgataaatctatcccagaggatgtag

SEQ ID NO: 264914 - DNA, 304 bp, Unknown
  Bacterial polypeptide expressing nucleotide sequence isolated from the Sargasso Sea
aatgaaacttactcctagagaaaaagataaacttttaataagccttgcagcgattgtcgctaaaaatagattattaaaaggtataaaattaaattatccagaagctattgctttaataacagattttgttgtagagggagctagagagggcaaaagtgttgcagaattgatggaggcaggagctcatgtcattaaaaaaaaggattgtatggaaggtattccggatatggtcaaggaagttcaagtagaagctacttttcctgatggaactaaattagtaacggtgcataaaccaattagatga

SEQ ID NO: 264915 - DNA, 907 bp, Unknown
  Bacterial polypeptide expressing nucleotide sequence isolated from the Sargasso Sea
tacgatacatgcatttcatactgagggtgcaggaggaggacatgctcctgatattataaaaatttgtggagaatcgcatgttttaccatcttcaacaaatccaaccagaccttttacaaagaatacaatcgaggaacatcttgatatgctcatggtatgtcatcatctcgataaatctattcctgaggacgtcgcttttgcggaaagtcgtatacgccgcgagactattgcagcggaagatattctacatgatatgggtgcgttcagtatcatagcatctgatagtcaagcaatgggccgagtaggtgaagtgctcattaggacatggcaaacggctgacaaaatgaaaaagcaaagagggcagttagcagacgaaaatggtaacaatgataatttccgtgtccgaaggtatattgctaaatatactattaatcctgcgattgcacatggaatgtcgagtgaaattggcagtgttgagataggaaaacgggctgatcttgtgttgtgggatcctgctttttttggtgtgaagccagaaatggttctactgggaggaacaatcgccatggctcagatgggtgatcccaatgcatctattccaacgcctcaacccgtttactctcgcccaatgtttggtgcttacgggcgttcagtagaaaaatcagctgctacatttgttagtaaggcagctttcgacgaagggataaagaatacacttggactggcgaaggaacttttaccagttatcaacacgagagatattggtaaggcagatttgttgctcaataatgcaacgccggttatggaggtcaatccagagacatatgaagtaagggcagatggagaactattgacgtgcgaacctgctgaagttcttcctatggcgcaacgctattttatgttttaa

SEQ ID NO: 264916 - DNA, 1303 bp, Unknown
  Bacterial polypeptide expressing nucleotide sequence isolated from the Sargasso Sea
catgccctaccgcatctcccgccaggcctacgccgagacctacggacccaccaccggcgacagggttcgcctggccgacaccgatctgatcctcgaagtcgagaaggactacaccgtctacggcgatgaggtgaagttcggcggcggcaaagtgatccgcgacggcatgggccaatcccagacccctcgcgccgaaggcgccgttgacacggtgatcaccaatgccctgatccttgactggtggggcatcgtcaaagctgatgtcggcctcaaggacggccgcatcgtgggcattggcaaagccggcaaccccgacacccaggaaggggtgacgatcgtggtgggccccggcaccgaagccatcgccggggagggccacatcctcacggccggtggcatcgacacccacatccacttcatctgcccccagcagatcgaaacggccctggccagcggcgtcaccaccctgatgggcggcggcaccggaccggccaccggcaccaatgccaccacctgcacccccggcgccttccatatcgggcggatgctccaggccgccgaaggcctgccggtgaacctgggctttttcggcaagggcaacgccagcaccccggaagccctggaagaacaggtgcgcgccggcgcctgcggcttgaagctgcatgaagactggggcaccacaccggcaacgatcgatgcctgcctgtcggtggccgatcggatggatgtgcaggtgtgcatccacaccgacaccttgaatgaagccggcttcgtggaagacacgatcgccgccatcaagggacgcaccattcacaccttccacaccgaaggtgccggcggcggccatgcaccggacatcatcaagatctgcggcaaagcgaatgtgctgccaagcagcaccaaccccacccggccctacacccgcaacacgcttgaggagcacctcgacatgctgatggtgtgccaccacctcgatccgaagatcccggaagacgtggcttttgccgaatcgcggattcgccgcgaaacgatcgccgccgaagacatccttcacgacctgggcgccttctcgatcatcgccagcgactcccaggccatggggcgcgtgggcgaagtgatcacccgcaccttccagaccgcccacaagatgaaggtgcagcgcggtgcactgccggaagactccaaccgcaatgacaaccatcggctgaagcgctacatcgccaaggtgacaatcaaccccgctcttgcccatggcatcagcagcgaggtgggctcgatcgaaaccggcaagctcgccgatctc

SEQ ID NO: 264917 - DNA, 990 bp, Unknown
  Bacterial polypeptide expressing nucleotide sequence isolated from the Sargasso Sea
ttgatgtgcaagttgctattcataccgacacattaaatgaatccggtttcgttgaaaacacattagccgcgtttaaaggccgagctattcatacttatcatacggagggtgccggtggtggacatgctcccgatatcataaaagcctgtggcgcctcaaatgttttaccctcatccacaaaccctacccgcccttatacggttaataccattgatgaacatttagacatgctcatggtttgccaccacttagatcctaaaattcctgaagatgtcgcgtttgcggaatcgcgtataaggcgggagactattgcagcagaagatattctgcatgatttgggagcttttagcatgattgcatctgattcgcaggctatgggacgaattggagaggtgatctgtagaacctggcaaactgctcataaaatgaaagtgcaacgaggacctttaagtccagaccctgcccaccatgataactttcgtgccaaacgttatgtggctaagtatacgattaacccggccatcactcatggaatcagccacgaagtaggctccatagaaattggaaaactcgcggatattgttttgtggaaaccagcattttttggtgcaaagccgtcaatgattattaaaggcggtatgatcgcagccgctcccatgggagaccctaatgcttcgattcctacaccacaacccgttcactaccgtccaatgtttggagcgcttgggggagcgcgaagtgagacctgcgtaagctttgtgtcgaaagccgctaatgaaaatggcatgggcgagaagcttcgattgaataaaaggttggtttcggtccacgatacgcgcggtgtcaccaaaaaacagcttattcacaacagctatcttccgaaaatagaagtggactcacaaacttatgaggttcgggcagatggtgaccttttgacttgcgagccagcaaaagaattgcctctggcacaacgttattttcttttttaat

SEQ ID NO: 264918 - DNA, 1234 bp, Unknown
  Bacterial polypeptide expressing nucleotide sequence isolated from the Sargasso Sea
aatggctatagaaatttcgagatttgattacgcaggaatgtatggtcccacagttggggataaggtgaggctggctgatactgagctttttatagaggtagagaaagatctgacgacatacggagaagaagttaaatttggtggtggcaaagttattcgcgatggtatggggcagtcgcaagtaacaagagctaatggagcacccgatacagtaatcacaaatgctcttatccttgattacacaggcatatttaaagcagatgttgctctcagagatggaaagatagaggcaataggtaaggccggtaacccagatacccaaccaaatatagatataataattggccctggcacagaaattatcgctggggagggcaaaattttaactgcaggggggtttgatagccatattcattacatttgtcctcagcaaattgatgatgctcttcactctggtgtgaccacaatgttaggtggtggaactggaccagcacacggcactttagcaacaacttgtacgccaggtccgtggcatattggtagaatgttgcagtcagcagatggtttaccaatgaacctcgcgtttgcaggtaagggaaatgcctcgctacctggagccttggaagaacaggttttaggtggagcttgtgcgctgaaacttcatgaagattggggaacaacgccacaagcgattgattgttgtttgggcgtagcagatgatcttgatgttcaagtgatgatccatactgatacattaaacgaaagtggttttgttgaacgaactgttgattccatgaaaggaagaacaatacatgcttttcatactgaaggagcgggaggcggtcatgcgcctgacatcataaaaatttgtggcgaacaatttgtattaccgtcttcaactaacccaacaagaccatttactaaaaatacagttgaagagcatttagacatgttaatggtttgtcaccatcttgataaatctatcccagaagacatagcatttgctgaaagccgcatacggcgagaaacaattgcggcagaggatattcttcatgatatgggggccttttctataatagcatcggatagccaagctatgggtcgagttggggaagtcattataagaacttggcaaaccgccgataaaatgaaaaagcaacgaggtgctctttccgaagaaacgggtgacaatgataatttgcgagctcgacgatacattgcaaaatacacaata

SEQ ID NO: 264919 - DNA, 461 bp, Unknown
  Bacterial polypeptide expressing nucleotide sequence isolated from the Sargasso Sea
aatgaaaagaatttcaagaaagtcatacgctgacatgtatggtcccaccactggtgatcaagtaaggcttgcagatacagaattatttatagaggttgaacaagatctcactacatatggtgaagaagtcaaatttggtggtggaaaagttatacgcgatggtatgggccaatctcaatattcacgtctaaaaggtgctgttgatacagtaataactaactcattattagttgatgtaaatggtatttttaaagctgatataggtattaaagatggtcttatttcaggcattggaaaagctggtaatcctgatactcagccaaatgtaagtatcataattggaccaggaacagaaatcattgctggagaaggcaaaattattacttcgggtggttttgatagccacattcattttatttgccctcaacaaattgatgatgctttacattctgggattacta

SEQ ID NO: 264920 - DNA, 655 bp, Unknown
  Bacterial polypeptide expressing nucleotide sequence isolated from the Sargasso Sea
catggaagattggggcacaactcctgcagctatcgataattgtttaaatgttgctgatgaacatgacattcaagttatgattcatactgatacattgaatgaaagtggatttgtagagagcacgataaaagcaattaatggaagaactattcacgcatttcatacagaaggagcgggaggaggtcatgcgcctgatattataaaggtttgtggtgaagaatatgttattccttcatcaacaaaccccacaagaccttatactgttaatacagttgaagagcacttagacatgttaatggtttgtcatcaccttgataaatcaataccagaagatgttgcatttgctgaaagtcgaattcgaaaagaaacaattgccgcagaagatatactccatgatatgggagcattttcaattattgcatctgatagtcaggcaatggggcgtgttggtgaagttattataagaacatggcaaaccgctcataaaatgaaagtacaacgtggacaattaaaggaagagcagggagataatgataatttacgtgttaaacgttatattgcaaaatatacaattaatcctgccattgctcatggtatttccgatcatattggcagtattgaaaaaaataaacgtgccgatatagtcatttgggat

SEQ ID NO: 264921 - DNA, 697 bp, Unknown
  Bacterial polypeptide expressing nucleotide sequence isolated from the Sargasso Sea
atgaaaaaaataaatagagattcttatgcggatatgtacggtccaacaaccggtgataaaattagacttgctgacacagaactttttattgaagtagaaaaagatttaacaacatacggtgaagaagtaaaatttggtggaggaaaagtcattcgagatggaatggggcagtctcaagtatcccgacaagatggtgcggtcgatacagttataacaaacgctttaattgttgatgtaaaaggaatttataaagctgatattgggcttaaagatggcttaattaatgagattggaaaagctggtaatccagatacacaaccaaatgtaaatattgttataggacctggaacagaaattattgcaggtgagggaaaaattattacagcaggaggctttgatagtcatattcattttatttgtcctcaacaaattgatgatgcacttcattcaggtataacaacgatgttaggaggaggaacgggtcctgctcatggaacattagcaacgactgttaccccaggaccatggcatatggagagaatgatacaatctgctgatgctttttctatgaatttagcttttgctggtaaaggaaatagttcattacccaaagcacttgaagagcaagtaattgctggcgcaagttcattaaaattacatggaagattggggcacaactcctgcagctatcgataat

SEQ ID NO: 264922 - DNA, 1208 bp, Unknown
  Bacterial polypeptide expressing nucleotide sequence isolated from the Sargasso Sea
aatgaaaaaaataaatagagatgcttacgctgatatgtatggacctacaactggagataaaattagacttgctgatacagaactttttgttgaagtagaaaaagatttaacaacttatggagaggaagtaaaatttggtggaggaaaagttattagagatggaatggggcaatctcaagtatcacgtaaagaaggtgctgttgatacagttattacaaatgctttaattgttgatgtaaaaggaatttataaagctgatattggtctaaaagaaggattgattaacgaaattggcaaagctggtaatcctgatactcaaccaaatgtaaatattattattggacctggaacagaaataattgctggtgaaggtaaaattataacagctggaggatttgatagtcacatacattttatttgccctcagcaaattgatgatgcacttcactcaggtataacaacaatgttaggtggtggaactggtccagcacacggtacgttagctacgactgttacacctggatcttggcatatagagaaaatgatacaatccgctgatgctttttccatgaatttagcttttgcaggtaaaggaaatagttcattacctcaagcacttgaagaacaagtaattgctggtgcgagttcattaaaattacacgaagattggggtacaactccagccgcaatagataattgtttaaatgtagctgataaacatgacattcaagttatgattcacactgatacattaaatgaaagtggatttgtagaaagtacaattaaggcaattaatggaagaaccattcatgcctttcatacagaaggagctggaggaggccatgctccagatattataaaagtttgtggtgaagaatatgttattccatcttctacaaacccaacaagaccttatacggttaacacagtagaagaacatttagacatgttaatggtttgtcatcatctagataaatcaatacctgaggatgtagcttttgctgaaagtcgtatacgaaaagaaacaattgctgcagaagatatacttcatgacatgggtgcattttcaatcattgcatctgacagtcaagcaatgggtcgtgtaggtgaagttattattagaacatggcaaacggcacataaaatgaaagttcaacgtggaaaattaaaagaagagaagggtgataacgataatttacgtgttaaaa

SEQ ID NO: 264923 - DNA, 232 bp, Unknown
  Bacterial polypeptide expressing nucleotide sequence isolated from the Sargasso Sea
gaaaggggagtgaaactaattaccccagaggctatagctctaatatcagattttgtaatagaaggtgcaagagacggaaaaatggtatcagaattaatggagtcaggagctcatgttgtaaaaaaagaagattgtatggatggaataccagatatgattccagaagtacaagttgaagctacatttcctgatggcacaaaattagttaccgtacacaaaccaataagataat

SEQ ID NO: 264924 - DNA, 1708 bp, Unknown
  Bacterial polypeptide expressing nucleotide sequence isolated from the Sargasso Sea
atgaaaaaaataaaaagagatgcgtatgcagatatgtatggaccaacaactggtgacaaaattagacttgctgatacagaactttttattgaagtagaaaaagatttaacaacatatggggaagaagtaaaatttggtggaggtaaagtaattcgagatggcatgggacaatctcaagtatctcgtaaagatggtgctgttgatacagtcataactaatgctttaatagtggacataaatggaatttacaaagccgatattggtctcaaagatggattgattaatgaaattggaaaagctggaaatcctgatacccaaccgaatgtagatattattattggaccaggaacagaaataattgccggtgaagggaaaattataacatctggaggttttgatagtcatattcattttatttgccctcaacaaattgatgatgcacttcattcaggtatcacaacaatgttgggaggtggaactggtcctgcacacggaacattagcaacgacagttactcctggaccatggcacatagagaaaatgatacaatcagctgatgctttttctatgaatttagcttttgcaggtaagggaaatagttcattacctaaagctcttatagaacaagtaacagcaggtgcaagttcattaaaattacatgaagattggggtacaactccatcagcaatagataattgtttaaatgtagctgatgaacacgacattcaagttatgattcataccgatacattaaatgaaagtggatttgtagaaagtacaattcaagcaattaatggaagaacaattcatgcttttcatactgagggagctggtggaggtcatgcccctgatataatcaaagtatgtggcgaacaatatgttattccttcttctacaaatcctacaaggccttatactgtcaatacagttgaagaacatttagatatgttaatggtttgtcatcatttagacaaatcaattccagaagatgtagcattcgctgaaagtcgtattcgaaaagaaacaattgctgctgaagatatactccatgacatgggtgctttttcaattattgcatctgatagtcaagctatgggtcgtgttggtgaagttattattagaacttggcagacagcacataaaatgaaagtgcaacgtggacaattaaaagaagagaagggcgataacgataatttacgtgttaaaagatatatcgctaaatatacaattaatcctgcaatagcacatggtatttctgatcatattggaagtattgaaaaaaataaacgtgcagatattgttatttgggatacagccttttttggtgttaaacctgaaatggtattacaaggtggaagtattgcttgttcacaaatgggtgatcctaatgcatctattccaacacctcaaccagtatactcaagaccaatgttttcttcttttggaaaatctctagaaaaatccactgctacttttgtaagtaaagcatctttatataaagactcttttaaaaattctggaattagtaaatctttattaccagttaaaaatattagaaacatttctaaaaaagatatgatattaaataattattgcccaaatatagaagttaatccagaaacttatgaagttttagcagatggtgagttaatcacttgtgagccagctaaaactttacctttagctcaacgttattttatttactaaa

SEQ ID NO: 264925 - DNA, 304 bp, Unknown
  Bacterial polypeptide expressing nucleotide sequence isolated from the Sargasso Sea
atgaaattaacaccaagagaaaaggataagctaatgatcagtatggcagctaatgttgcaagaaaacgtctagaaagaggtgttaaacttaattatcctgaagttatagctttgataacagattttgtcattgaaggtgcgagggatggaaaaatggtatcagaactaatggaaacaggagctcatgtggttaaaaaagaagattgtatggatggcattccagatatgataccagaagtacaggtagaagcaacatttccagatggaacaaaattagtaacagtacataaaccgattagataat

SEQ ID NO: 264926 - DNA, 304 bp, Unknown
  Bacterial polypeptide expressing nucleotide sequence isolated from the Sargasso Sea
aatgaaattaacgcctagagaaaaagataagttgatggtcagtatggcagctaatgttgctagaaaacgtttagaaagaggtgttaaacttaattacccagaagctatagctttgataacagattttgtcatagagggtgcaagagatggaaaaatggtgtcagaattgatggaaacaggtgcgcacgtagtaaaaaaagaagattgtatggatggtattccagacatgatacctgaagtacaggttgaagcaacatttccagatggaacaaaattagtaacagtacataaaccaattagataa

SEQ ID NO: 264927 - DNA, 447 bp, Unknown
  Bacterial polypeptide expressing nucleotide sequence isolated from the Sargasso Sea
aatgaaaaaaataaaaagagaagcttatgccgatatgtatggaccaacaactggtgataaagtcagacttgctgacactgaactttttgttgaagtggaaaaagatttaacaacatatggagaagaagtaaaatttggtggaggaaaagttattcgagatggaatggggcaatctcaagtatctcgcaaagacggtgctgttgatacagttataacaaacgctttaatagtagatgtaaatggaatttataaagctgatattggtcttaaagatggcttaattaatgaaattggaaaagcgggtaatccagatacacaaccaaatgtaaatattattattgggccaggaacagaaataattgctggtgaaggaaaaattataacagctggcggttttgatagtcatatccattttatttgtcctcagcaaatagatgatgctcttca

SEQ ID NO: 264928 - DNA, 646 bp, Unknown
  Bacterial polypeptide expressing nucleotide sequence isolated from the Sargasso Sea
attttcattatcgcatcagatagtcaggcgatgggtagagttggagaagttataattagaacttggcaaactgcacataagatgaaagttcaaagaggaagtttaccagaggaaaaaggagacaatgacaactttagagttaaaagatatttagcgaaatacacaattaatcctgcaattgcccatggaatttcaaaacatattggtagtattgaaaaaaataaacgtgcagatttagttttatgggacccggcattttttggagctaaaccagagatgatattgataggtggaagtatagcttgtgctcaaatgggagatccaaatgcatcaattccaactccacagccggtatacactagaccaatgttttcatcatttggaacttctttagaaaaatcttcagtaattttcacgagtaaattggctcttgaaaagaattcatttaaagatgcaagcataagaaaagatttattgcctgtagaaaatacaagaactatttctaaaaaagatatgattttaaataacaagtgtccaaagattgaagttaatcctgaaacatatgaggtaaaagctgatggagaaataattacttgtgaaccagctaaagaacttcctttagcacaaagatattttatgttttagc

SEQ ID NO: 264929 - DNA, 1708 bp, Unknown
  Bacterial polypeptide expressing nucleotide sequence isolated from the Sargasso Sea
atggttaaaatttctagagcatcatatgcagatatgtacggcccaactacaggagataaagtaagacttgctgacactgagctgtttattgaagttgaaaatgatcttactacttacggtgaggaggtaaagtttggtggaggaaaagtaataagagatggaatgggtcaatctcaaatcagcagagaaaaaggtgcattagatacagttattacaaacgctttgatagccgatgttaatggaatttataaagctgatgtaggcttaaaggatggaaaaattttcgatattggtaaagcaggtaatccagatactcaatcaaaagtaaatattattattggcccaggaacagagattattgcaggtgaagggaaaatattaaccgcgggaggttttgacagtcatattcattatatatgtcctcaacaaattgatgatgctttacattctggcattaccacgatgttgggaggaggaactggaccagctcatggtacacttgcaacgacttgtacacctggtccatggcatatcaaaagaatgatacaatctgctgatggtttttctatgaatttagcttttgctggaaaaggaaactcttcattacccgaaggtcttgaagaacaaatccttgcaggagcttccgctttaaagttacatgaagattggggaactactcctggagcaattgataattgtttaaatatcgctgataaaaatgatgttcaagtgatgatacatacagacaccctgaatgaaagtggatttgtagaaaatacaattaaagcaataaacaaaagaaccatacatgcttttcatacagaaggtgccggcggtggacatgcaccagatataattaaagtttgtggagaggaatatgttattccttcttctacaaatcctacaagaccatacacagttaatactattgaagaacatttggatatgcttatggtttgtcatcatcttgataaatctatcccagaagatgtagcgttcgccgaaagtagaataagacgagagacaattgcagcagaggatattcttcatgacatgggagctttttctattattgcatcagacagccaggccatgggtagagtaggggaagttattattagaacttggcagacagcacacaaaatgaaagttcaaagaggaagtctcccagaggaaaaaggagataatgataattttagagttaaaagatatttagcaaaatatacaattaatccggcaattgctcatggaatttcgaaatacattggcagtattgaaaaagggaaacgtgctgatttagttttatgggatccagcattttttggcgctaaaccagagatcatattaataggtggtagcatagcttgtgctcaaatgggtgatccaaatgcatcaattccaaccccacaaccggtatatacaagaccaatgttttcttcatttggaacatcattagaaaagtcttcggtaattttcaccagtaaattggcactagaaaaaaattcattaaaagatgaaagtataagaaaagatttgatagctgtcgaaaatactagatctatttcaaaaaaagatatggttttaaataataagtgtccaaaaattgaagtaaatccagaaacatatgaagtgaaagctgatggtaaaataattacatgtgagccagcaaaagaactgcctttggctcaaagatattttatgtattaac

SEQ ID NO: 264930 - DNA, 1450 bp, Unknown
  Bacterial polypeptide expressing nucleotide sequence isolated from the Sargasso Sea
atgccctaccgcatctcccgccaggcctacgccgagacctacggacccaccaccggcgacagggttcgcctggccgacaccgatctgatcctggaagtcgagaaggactacaccgtctacggcgatgaggtgaagttcggcggcggcaaggtgattcgcgacggcatgggccaatcccagacccctcgaaccgagggagccgtcgacacggtgatcaccaatgctctgatcctcgactggtggggcatcgtcaaagccgatgtcggcctcaaggacggccggatcgtgggcatcggcaaagccggtaaccccgacacccagcaaggggtgacgatcgtggtgggtcccggcacagaagccatcgccggggagggccacatcctcacggccggtggcatcgacacccacatccacttcatctgcccccagcagatcgaaacagccctagccagcggggtcaccaccctgatgggcggcggcactggaccagccaccggcaccaatgccaccacctgcacccctggggcgtttcacatcggccggatgctccaggccgctgaaggcctgccggtgaatctgggcttcttcggcaaaggcaacgccagcaccccggaagcgctggaggaacaggtgcgcgccggtgcctgtggcctgaagctgcatgaagactggggcaccacgccggccacgatcgatgcctgcctgtcggtggccgatcggatggatgtgcaggtgtgcatccacaccgacaccctgaacgaagccggcttcgtggaagacacgatcgccgctatcaagggacgcaccattcacaccttccacaccgaaggtgccggcggtggtcatgccccggacatcatcaagatctgcggtgaggccaacgtgctgcccagcagcaccaaccccacccggccatatacccgcaacacgctcgaggagcacctcgacatgctgatggtgtgccaccacctcgacccgaagatccccgaggacgtggccttcgccgaatcacggatccggcgcgaaacgatcgccgccgaagacatccttcatgacctcggcgccttctcgatcatcgccagcgactcccaggccatgggccgcgtgggcgaggtgatcacccgcaccttccagaccgcccacaagatgaaggtgcagcgcggtgcattgccggaagactccgcacgcaacgacaaccaccggctgaagcgctacatcgccaaggtgacgatcaacccggcgttggcccacggcatcagcagcgaagtggggtcgatcgaaaccggcaagctcgcggatctggtgctgtggaaaccgggcttcttcggcattcgcccggaactggtggtgaaggggggttcgatcgtgtgggcccagatgggcgatgccaacgcctcgattcccacccccggcccggtgcacggcaggccgatgttcggcgccttcggca

SEQ ID NO: 264931 - DNA, 304 bp, Unknown
  Bacterial polypeptide expressing nucleotide sequence isolated from the Sargasso Sea
atgcatctcagtccccaggaaaaggacaagctcctgatcgtgaccgcggccctgctggcggagcggcgcttgaaccgcggcctgaagctcaaccaccccgaagcggtggcctggctcagttttctggtgctggaaggcgcccgtgacggcaagagcgtggcggagctgatgcaggagggcaccacctggctgcgtcaggaccaggtgatggagggcgtgcccgagctcgtccatgaggtgcagatcgaggccgtcttccccgatggcaccaagctcgtcaccctgcacgacccgattcgctgag

SEQ ID NO: 264932 - DNA, 1540 bp, Unknown
  Bacterial polypeptide expressing nucleotide sequence isolated from the Sargasso Sea
gatgaaaaaaattccaagacaatcttatgcagccatgtatggccccacaacaggggataaagtaaggttagctgatactgaacttttcatagaggttgaaaaagacctcacagtctatggtgaggaagttaagtttggtggtggcaaagttattcgcgatggcatgggacagtctcaggtttcaagaagtgatggagcagtagacacagttattactaatgctcttatattagatgtcacagggatatttaaagcagatattggattaaaaaacggaaatattgatcatattggaaaagctggtaaccctgatacacaacccggtgtggatattataattggtccaggtactgaagttattgcaggtgaaggtaaaattgtaacggcgggcggctttgacagtcatatacatttcatatgtcctcagcaaattgatgaagccttacattctggcattactacgatgctgggtggaggtactggacctgcacatggaacattagcaactacttgcacgccggggccatggcacatcggcaggatgcttcaatcatctgatgctttctcgatgaatttagcttatgcaggcaaaggtaattcttcgttgccttctggtttagaggaacaagttcttggtggagcagctgctctcaaacttcatgaggactggggctctactcctggtgcaattgataattgtctaaatgttgctgataaattcgacgttcaggtcatgatacatactgatacgctcaatgaaagcggctttgtagaaaatacaattaatgcaattaataaaagaaccattcatacatttcatactgagggtgcaggtggtggacacgcgcctgatataataaaaatttgcggtgaaccgtatgttttgccatcttcaactaatccgacacgaccatttactgttaacactgttgaagagcatttagatatgctgatggtttgccatcaccttgataaatcaatacctgaagacgtagcatttgctgagagtagaatacggagagaaacgatggctgctgaagacatattacacgatatgggtgctttctcaatcatcgcatctgacagtcaagctatgggacgcgttggtgaggttattattagaacatggcaaacagctcataaaatgaaagtccaacgaggaagactgtctgaagagcaaggcgataatgataatttaagagtcaaacgataccttgcaaaatatacaataaatccgtcaattgctcatggaatgtcttcctatgttggcagtctcgaaaaaaataaaagagcagatattgttatctgggacccagctttctttggtgttaagcctgagattgtaataatgggtgggagtattgcctgcgcacaaatgggcgatccaaacgcatcgattccaactccccaaccagtatatacccgcccaatgtttggaagttatggaagatcgcttgaaaactcatcggtaacttttgtcagcaagagttctctggaggcaggcagccttaatcatctcaatatacaaaaaagtatgctg

SEQ ID NO: 264933 - DNA, 1148 bp, Unknown
  Bacterial polypeptide expressing nucleotide sequence isolated from the Sargasso Sea
aatggttagcggaaaattagatgaaaagagagatgatgcagttaaaaaacttcatgaaaatggattcaaaaattcattagaagatacaactgaagaacaaggaagtttagaaattccaaggaacagatacgttgaattgtttgggccatcaaagggagacaaggtccgattagcagatacggatttggtattagaagtcgaagaagatttaatcaaacatggggatgaattggtttttggtggcggaaaaagtgcaagagatggattaggacaagcaagcggagttctacgagaacaatctgcagatttagttattacaaatgcagtgattgttgatgcaaaattaggaatcattaaagcagatattggaattaaagatggaaaaattttaggtgtagggaatgcaggaaacccagatgtcatggatgatgtcgatattattgtttcatcaaatactgagataatctcaggagagcatacaatttgtacagcaggtacaattgatagtcacattcactttatttctcctcaacaagcaatcgatgcaatttgtaatggaacaactacaatgataggaggaggcacaggacctgcagatggaacaaatgctacaacctgcaccccaggtgaatttaatattcataaaatgattcaagcagtggaagagtttccgttgaactttggatttttgtgtaaaggaaatgattcccaagaagagtcacttatggaacaggtaagggcaggagcatgcggtttaaaattgcatgaagattggggcaccactcctgccaccattaattcagcactaaatgttgcagataagacagacacccaggtagcaattcacacagatacattaaacgaatgtgggtatgttgacgacaccattgctgcaattaatggaagagttattcatacatatcataccgaaggcgcaggcggaggccacgcaccagatattatgaaaattgcctcagaaccaaatattttgccgtcatcgactaatcctacaagaccattcaccaccaatactcttgaagagcacttagacatgatgatggtatgccaccatcttaatccatcagttccagaggatatttcatttgccgaatctaggattagagcagagacaattgctgcagaagaca

SEQ ID NO: 264934 - DNA, 1711 bp, Unknown
  Bacterial polypeptide expressing nucleotide sequence isolated from the Sargasso Sea
atgccttaccggattgatcgtcgtacctacgccgaaacctacggccccaccaccggtgaccgattgcggctcgccgataccgaactgatcctcgaagtcgaaaaggactacacgatctatggcgatgaggtgaagttcggcggcggcaaagtcatccgtgacggcatgggccaaggccagaccagccgcgccgatggtgccgtcgacacggtgatcaccaatgccttgatccttgattggtggggcatcgtcaaagccgatgttggcctcaaagatgggcgcatttgcgccattggcaaagcaggcaatcccgacatcagtgatggggtgacgatcccaatcggacctggcaccgaagccattgctggagagggtcacatcctcaccgctgggggcattgatacccacatccacttcatctgcccgcagcagatcgaaacggcaatcgccagcggcgtcaccaccctgctgggtggaggcaccggtccagcaacgggcaccaacgccaccacctgcactccaggggcctttcacatcagccgcatgctgcaggccgccgatggcctgccagtgaatctgggctttttcggcaagggcaatgccagtacccctgaggcccttgatgagcaggtcctcgccggcgcctgcggcctcaaattgcatgaggactggggcaccaccccagcggcgatcgactgctgtttgagcgttgccgatcgcttcgatgtacaggtctgcatccataccgacacgctcaacgaagcagggtttgtggaagacaccatcgctgcgatcaagggccgcacgattcacaccttccacaccgagggagccggcggcggccacgcccccgacatcatccgcatctgcggcgaaaccaatgtgctgcccagcagcaccaacccaacccggccctatacgcgcaacacgctcgaggaacacctcgacatgttgatggtgtgccaccacctggattccgccattccagaagacgtggcctttgctgaatcaaggattcgccgcgaaaccatcgctgctgaagacatccttcacgatttaggcgccttcagcatcattgccagcgactcccaggccatggggcgggttggcgaggtgatcacccgcaccttccaaaccgcccacaagatgaagctgcagcgcggtgtgctcgcaggcgataacagccgcaacgacaacacccgcctgaagcgctacatcgccaaggtgacaatcaaccccgccatcgcccatggcctcgaccaccaggtgggctcggtggaagtgggcaagctggctgatctggtgctgtggaaaccaggattctttggcgtcaaaccagaactggtcttgaagggtggctcgattgcctgggcccaaatgggcgatgccaacgcctcaattcctaccccggggccagttcatggacggccaatgttcgccagctttggcggagccatggcgccttcatgcctcaccttccttagccaggcgggccttgatgccggcgtaccgcaggcacttggactacgcacgccctgcgtaccagtgcaaaacacccgcgggattggcaaagctcagatgaaaaacaacatcgccctgccgaaggtggaggtggatccagaaacctatgaagtgtttgctgatggcgaactcctcacctgcgagccggctgaggtgctgccgatggcgcagcgctacttcctgctttaag

SEQ ID NO: 264935 - DNA, 981 bp, Unknown
  Bacterial polypeptide expressing nucleotide sequence isolated from the Sargasso Sea
aatggctaagatttctagagcagcttatgcagatatgtatgggcctacaacaggagacaaagtaaggctcgcagatactgacttagttattgaagttgaaaacgatctaaccacctatggtgaagaagtaaagtttggtggtggaaaagtaataagagatgggatgggccaatctcaaataagcagagaaaaaggagctgctgatactgttattaccaatgctttaatagttgatgtaaatggaatttataaagccgatgtaggtttaaaggacggaaaaatatttgaaattggtaaagctggaaatccagacacccaatcaaaagtaaatattattattggtccaggaacagagataattgctggagaaggaaaaattttaacagcagggggttttgacagtcacattcattacatatgcccacaacaaattgatgatgctttgcactcaggtatcacaaccatgcttggaggaggtactggaccagctcacggtacacttgcaacaacttgtacacccggaccatggcacatacaaagaatgattcaatctgctgatggtttttctatgaatttagcttttgctggaaaaggaaattcttcattaccagaaggtcttgaagaacaaattctagccggagcttcagctttaaaattacatgaggattggggcactactcctggagcaattgataattgtttaaatattgctgataaaaatgatgtacaagtgatgatccatacagatacacttaatgaaagtgggtttgtagaaaatactatcaaagcaattaacaaaagaactattcatgcttttcacacagagggtgctggaggtggacatgcaccagatataattaaagtttgtggagaagagtatgttattccctcttccacaaatcctacaagaccatatacagttaatacaattgaagaacatttagatatgttaatggtttgtcaccatcttgataaatctat

SEQ ID NO: 264936 - DNA, 304 bp, Unknown
  Bacterial polypeptide expressing nucleotide sequence isolated from the Sargasso Sea
atgcatctttcacctcaagaaaaggataaattattgattttttctgctgcactcttagctgaaagaaggcttagtcgaggtcttaagcttaactatcctgaaacaattgcttttttgagttttcaagttctcgaaggagctcgagatggaaaaagtgtaagtcaattaatgtcagagggaacttcctggctttcaaaatcacaagttatggagggcattcctgaaatggttgatgaagttcaaatagaagcagttttccctgatgggacaaagttagttactattcacaatccaattaattagt

SEQ ID NO: 264937 - DNA, 304 bp, Unknown
  Bacterial polypeptide expressing nucleotide sequence isolated from the Sargasso Sea
aatgaaactgactcctagagaaaaagataaacttttaataagtcttgcagcgattgtcgctaaaaatagattgtcaaagggtataaaattgaattatccagaagctatagctttaataacagatttcgtagttgagggagctagagaaggcaaaagtgttgcagaacttatggaggcaggagctcatgttattaaaaaaaaggattgtatggaaggtattccagacatggttaaggaagttcaagtagaagctacttttcctgatgggactaagttagtaacggtgcacaaacctattaggtga

SEQ ID NO: 264938 - DNA, 1708 bp, Unknown
  Bacterial polypeptide expressing nucleotide sequence isolated from the Sargasso Sea
aatgaaaaaaattccaagacaatcttatgcagctatgtatgggcccacaacaggcgataaaataaggttagctgatactgaacttttcgtagaggttgaaaaagacctcacagtctacggtgaggaagtcaagtttggtggtggcaaagttattcgcgatggcatggggcagtctcaggtttcaagaagtgatggagctgtagacacagttattacaaatgctctaattctagatgtcaccgggatatataaagcagatattggactaaagaacggaaatattgatcatattggaaaagctggtaaccccgatacacaacctggagtggatattataattggtccgggaactgaagttattgcaggtgaaggtaaaattgtaacagcgggcggctttgacagtcatatacatttcatatgtcctcagcaaattgatgacgccttacattctggcattactacgatgctgggtggaggtactggaccagcacatggaacattagcaactacttgcacaccaggtccatggcacatcggcagaatgcttcaatcatctgatgctttctcaatgaatttagcttatgcaggcaaaggaaattcttcgttgccttctggtttagaggaacaagttcttggtggagctgctgcccttaaacttcatgaggactggggctctactcctggtgcaattgataattgtttaaatgttgctgatgaatttgacgttcaggtcatgatacatactgatacgctcaatgaaagtggctttgtagaaaatacaattaatgcaattaataaaagaaccattcatacatttcacactgaaggtgcaggtggtggacacgcgcctgatataataaaaatttgtggtgaaccctatgttttgccttcttcaactaatccaacacgaccatttactgttaacacagttgaggagcatttagatatgctgatggtttgccatcaccttgacaaatcaatacctgaagacgtagcatttgctgagagtagaatacgcagagagacgatggccgctgaagacatattgcacgatatgggtgctttctcaatcattgcatctgacagtcaagctatgggacgcgttggtgaggttattattaggacatggcaaactgctcataaaatgaaagtgcaacgaggaagactatctgaagagcaaggtgataatgataatataagagtcaaacgatatattgcaaaatatacaataaatccgtcaattgctcatggaatttcttcctatgttggcagtcttgaaaaaaataaaagagccgatattgttatttgggacccagctttttttggtgttaagcctgagattataataatgggtggaagtattgcctgcgctcaaatgggcgatccaaacgcatcgattccaactccccaacctgtgtacacgcgcccaatgtttggaagttatggaagatcacttgaaaattcatcggtaacttttgtcagtaagagttcactagaggcgggcagccttaatcatctcaatatacaaaaaagtatgttaccggtaagcaatacaaggtcaatttcaaaaaaagatatggttttaaatgatgtttgcccaactatagatgtaaatcctgaaacatatgaggttagagcaaatggtgaaattattacatgtgaacctgcggaagaactgccaatggcacaaagatattttatgtactga

SEQ ID NO: 264939 - DNA, 742 bp, Unknown
  Bacterial polypeptide expressing nucleotide sequence isolated from the Sargasso Sea
aatggttaaaatttctagagcagcttatgcagatatgtatgggcctactacaggagacaaagtaaggctcgcagataccgacttatttattgaggtagaaaacgatctaaccacttatggtgaagaagttaagtttggtggtggaaaagtaataagggatgggatgggccaatctcaaactagtagagaaaaaggagctgctgatactgttattactaatgctttagtagttgatataaatggaatttataaggctgatgttggtttaaaagatggaaaaatatttgaaattggtaaagctggcaatccagatactcaatctaaagtaaatattattattggtccgggaacagaggtaattgctggtgaaggaaaaattttaacagctggaggttttgacagtcatattcattatatatgccctcaacaaatagatgacgctttacactcaggtattacaactatgcttggaggaggaactggacctgctcatggaacccttgctacaacgtgtacacctggaccatggcatatacaaagaatgattcaatctgctgatggtttttctatgaatttagcttttgctggaaaaggaaattcttcattgccagatggtcttgaggaacaaattctggctggcgcctcagctttaaaattacatgaggattggggaaccactcctggagcaattgataattgtttaaatattgctaataaatatgatgtacaggttatgatccat

SEQ ID NO: 264940 - DNA, 304 bp, Unknown
  Bacterial polypeptide expressing nucleotide sequence isolated from the Sargasso Sea
aatgaaactgactcctagagaaaaagataaacttttaataagtcttgcagcgattgtagctaaaaatagattatcaaaaggtataaaattaaattatccagaagctatagctttaataacagattttgtagttgagggagctagagaaggcaaaagtgttgcagaattgatggaggcaggagctcatgtaattaaaaaaaaggattgtatggaaggcattccagagatgattaaagaagttcaagtagaagctacttttcctgatggaaccaagttagtaacagtacacaaaccgattaggtga

SEQ ID NO: 264941 - DNA, 304 bp, Unknown
  Bacterial polypeptide expressing nucleotide sequence isolated from the Sargasso Sea
tatgtacttgagtcctcgagaaaaagataaactacttatatcaatggctgcagatgtcgctcgtaaaagacttaacagaggtttaaaacttaatctgcctgaaacaatagccattatatctgactttgttcaagaaggtgcacgtgatggtgaatctgttgcaaatctaatgagtaaaggagcaaaagttttatcaaaaaatgatgttatggaaggaatatcagaaatgttaccagaaattcaagtagaggcaacatttcctgatggctctaaattagtaacagttcatgaacctataagataa

SEQ ID NO: 264942 - DNA, 693 bp, Unknown
  Bacterial polypeptide expressing nucleotide sequence isolated from the Sargasso Sea
tatgtcttataaaattgatagaaaaacttatgctcaaacttacggacccactaccggagatagagtaaggctcgctgataccgaactttttatagaagtagaaaaggatttaactacatacggagatgaagttaaatttggtggaggtaaagttattcgagatgggatgggacagtctcaagtaagaagagctgatggagctgtagataccgtaataactaatgctttgatcgtagattggtggggaataattaaggctgatgtgggtataaaagatggaatgatttttgaaattggtaaggctggcaatcctgatatccaggataatgttgatattgttattggtgcatcaacagaagtaatagctggagaggggcatattcttactgcaggttcaatagatacccatattcactttatctgtccccaacaaattgagacagcactagcctctggaattacaaccatgttgggaggaggaactggacctgcaactggcacaaatgctactacttgtactccgggttcttttcatatttcaagaatgcttcaatctgcagaagcatttcccatgaatttaggtttttttggaaaaggaaactcaacaaacgagagcaatcttattgatcaggtcgaggctggtgcatgtggattgaagcttcatgaggattggggaacgactccctctacaat

SEQ ID NO: 264943 - DNA, 1708 bp, Unknown
  Bacterial polypeptide expressing nucleotide sequence isolated from the Sargasso Sea
atgacactacgcttgagccgccgcgcgtacgcggaaatgttcgggccgacgacgggcgaccgcgtccggctcgccgataccgaactgctgatcgagatcgaacgcgactacacgacctacggcgaggaagtgaaattcggcggcgggaaggtgatccgcgacgggatgggccagtcgcagcgcgtggccgccgacgtgcccgacacgatcatcacgaacgcggtgatcctcgatcactggggcatcgtgaaggccgacatcgcgatcaagcacggccgcatcgccgcgatcggcaaggccggcaacccggacattcaaccgggcgtgacgatcgcgatcggcgcggcgaccgaggtgatcgccggcgaaggactgatcgtgacggccggcggcatcgacacgcacatccacttcatcagcccgcagcagatcgacgaggcgctcgcgtcgggcgtcacgacgatgctcggcggcggcacggggccggccaccggcaccaacgcgacgacctgcacgccgggcccgtggcacatggagcggatgctgcaggccgccgacggctggccgatcaacctcggcttcctcggcaagggcaatgcgagcctgccgcagccgctcgtcgagcagatcgcggccggcgcgatcgggctgaagctgcacgaggactggggcacgacgcccgcggcgatcgacaactgcctgtccgtcgccgacgacaccgacacgcaggtcgcgatccacaccgatacgctgaacgaaggcggcttcgtcgaatcgacggtcgccgcgttcaagggccgcacgatccacacgtaccacaccgaaggcgcgggcggcggccatgcgccggacatcctgaaggtgtgcggcgagatgaacgtgctgccgtcgtcgaccaacccgacgcgcccgtacacgatcaacacgctcgacgagcacctcgacatgctgatggtgtgccatcacctcgatccgtcgatcgccgaggatctcgcgttcgccgaatcgcgcattcgccgcgagacgatcgcggccgaggacatcctgcacgatctcggcgcgctgtcgatgctgtcgtccgactcgcaggcgatgggccgcgtcggcgaagtgatcatccgcacctggcagaccgcgcacaagatgaaggtgcagcgcggcgcactgccggaagacagcacgcgcaacgacaacttccgcgcgaagcgctacgtcgcgaagtacacgatcaacccggcgctcacgcatggcatcgcgcacgaagtcggctcgatcgagccgggcaagtgggccgacctcgtgctgtgggaacccgcgttcttcgggatcaagccgtcgatgatcctgaagggcgggatgatcgcgatggcgcagatgggcgatccgaacgcgtcgatcccgacgccgcagccggtccactatcgcgagatgttcgccacccgcggcggtgcgctcgcgcgcacgtcgctgaccttcgtgtcgcagatggccgccgatgcgggcatcgcggaacgctacggcctcgcgaagcggatcgtgccggtgcgcaactgccgcaacgtgacgaaggccgacatgatccacaacgcgtggcgcccgtcgatcagcgtcgatccggaaacctacgacgtgatcgccgacggccagttgctcacctgcgaaccggccacggtgctgccgatggcgcagcgctatttcctgttctgat

SEQ ID NO: 264944 - DNA, 304 bp, Unknown
  Bacterial polypeptide expressing nucleotide sequence isolated from the Sargasso Sea
atgaaactgactccccgcgagaaggacaagctgctgatcttcacggcggcgctgctggccgagcgtcgccgcgcacgcggcctgaagctcaactatccggaggcggtcgccttcatcaccgccgcgctgatggaagccgcgcgcgacggcaagacggtcgccgaagtgatgcattacggcacgacgctgctcacgcgcgacgacgtgatggacggcgtgccggagatgattcccgacatccaggtcgaggcgaccttccccgacggcacgaagctcgtgaccgtccatcacccgattccgtgag

SEQ ID NO: 264945 - DNA, 1708 bp, Unknown
  Bacterial polypeptide expressing nucleotide sequence isolated from the Sargasso Sea
aatggcaaaaatttctagagcagcttatgctgatatgtatgggcctacaacaggagataaagtaaggcttgcagatactgatttatttattgaagttgagaacgacttaactacttatggtgaagaagtaaagtttggtggtggaaaagtaattagagatggcatgggccaatcacaaattagcagaaaaaaaggagctgcagatacagttataactaatgctttaatagttgatgtgaatggaatttataaagctgatgttggtttaaaggatggaaaaatatttgaaattggtaaagctggaaatccagacactcagtctaaagtaaatattattattggtccaggaacagagataattgcaggtgaaggaaaaattttaacagcagggggttttgatagtcatattcattatatatgcccccaacaaattgatgatgctttacactcaggtattacaaccatgcttggaggaggtactggaccggctcatggaacgcttgcaacaacatgtacacccggaccatggcacatacaaagaatgatacaatctgcagatggtttttctatgaatttagcttttgctgggaaaggaaattcttcattaccagaaggtcttgaagaacaaattctagcaggagcttcagctttaaaattacatgaagattggggaactactcctggggcaattgataattgtttaaatattgctgacaaaaatgatgttcaagtaatgattcatacagacactttaaacgaaagcgggtttgtagaaaatactatcaaagcaattaataaaagaactatacatgcttttcatacagagggtgctggtggtggacatgcaccagatataattaaagtttgtggagaagagtatgttattccttcttcaacaaaccctaccagaccatacacagttaatacaatagaagaacatttggatatgctgatggtttgtcatcatctcgataaatctatcccagaggatgtagcatttgctgaaagtagaattagaagagaaacaatcgcagcagaagatattctgcatgacatgggagcgttttcaattattgcatcagacagtcaggctatgggtagagttggagaagttataattagaacttggcaaactgcacataaaatgaaagttcaaagaggaagtttgccagaggaaaaagggaataacgataactatagagttaaaagatatttagcaaaatatacaatcaatcctgcaattgctcatgggatttcaaaacatattggtagtattgaaaaaaataaacgtgcagatttagttttatgggacccagcattctttggcgctaagccagaaatgatactaattggaggaagtatagcttgtgctcaaatgggagatccaaatgcatcaattccaactccacagccggtatatactagaccaatgttttcatcatttggaacttctttagagaaatcatcagtaattttcacaagcaaactagctcttgaaaagaattctttaaaagatgcaagtataagaaaagacttattacctgtagaaaacacaagggctatttctaaaaaagatatgattttaaataataagtgtccaaagattggagttaatccagagacatacgaggtaaaagctgatggtgaaattattacctgtgaaccagctaaagaacttcctttggcacaaagatattttatgttttag

SEQ ID NO: 264946 - DNA, 139 bp, Unknown
  Bacterial polypeptide expressing nucleotide sequence isolated from the Sargasso Sea
attgatggaggcaggagctcatgttattaaaaaaaaagattgtatggagggtattccagatatggtgaaggaagttcaagtagaagctacttttcctgatggaactaaattagtaacagtgcacaaaccaattagatga

SEQ ID NO: 264947 - DNA, 304 bp, Unknown
  Bacterial polypeptide expressing nucleotide sequence isolated from the Sargasso Sea
aatgaaacttactcctagagaaaaagataaacttttaataagtcttgctgcaattgtcgctaaaaatagattgtcaaaaggtataaaattaaattatccagaggcgatagctttaataacggattttgttgttgagggagcaagagaaggcaaaagtgttgcagaactgatggaggcaggagctcatgttattagaaaaaaggattgtatggaaggcattccagatatggtgaaggaagttcaagtagaagctacgtttcctgatggaactaaattggtaacagtgcacaaacctataaggtga

SEQ ID NO: 264948 - DNA, 310 bp, Unknown
  Bacterial polypeptide expressing nucleotide sequence isolated from the Sargasso Sea
aatgaaacctggtgaaataataacaaaacaaaatagtgacattaatttgaatgataaaagtcaatcaattattttaaaagtttcaaatagtggagatcgaccaatacaagttggtagtcattatcattttgctgaaacaaatgaatatttaaaatttgatagagaaaaatcaaaaggtatgcgtttagatataccttcaggtacagctgttcgttttgaaccaggtcaatcaaaagatgtagaattaattccaataacaggaaatagaaagatatttggatttaataagaaagttatgggtcaattataa

SEQ ID NO: 264949 - DNA, 299 bp, Unknown
  Bacterial polypeptide expressing nucleotide sequence isolated from the Sargasso Sea
aatgcaattatcacctcgtgagaaagataaacttttaatagcaatggcagcggaagttgcccgaaagagaaaaagtcgaggtgtaaagcttaattacccagaagcaatttctttaatctgtgatgctgtcgtcgagggagcacgcgatggcaaaagcgtggctgaaatgatggaatacggtgcaacaatagttaaatcaactgattgtatggatggtgtgccagacatgatacctgaggtacaggtggaggctacattccctgatggaacgaagctagttacagttcacaatccaatca

SEQ ID NO: 264950 - DNA, 304 bp, Unknown
  Bacterial polypeptide expressing nucleotide sequence isolated from the Sargasso Sea
catgcatctcagtccccaggaaaaggacaagctcctgatcgtgaccgcggcgctgctggccgagaggcgcttgaaccgtggcctgaagctcaaccaccccgaagcagtggcctggctcagttttctggtgcttgaaggcgcccgtgacggcaagagcgtggcggagctgatgcaggaaggcaccacctggctgcgtcaggaccaggtgatggagggcgtacccgagctcgtccatgaggtgcagatcgaggccgtcttccccgatggcaccaagctcgtcaccctgcatgacccgattcgctga

SEQ ID NO: 264951 - DNA, 304 bp, Unknown
  Bacterial polypeptide expressing nucleotide sequence isolated from the Sargasso Sea
tatgcatctttcacctcaagaaaaagataaattattggttttttctgctgcgctcttagctgaaagaaggctcagtcgaggtcttaagcttaattatcctgaaacaattgcttttttaagttttcaagttcttgaaggagcacgagatggtaaaagtgtaagtcaattaatgtcagagggaactacctggctttcaaaatcacaagttatggagggcattcctgaaatggttgatgaagttcaaatagaagcggttttcccagatgggactaaattagttactattcacaatccgattaattag

SEQ ID NO: 264952 - DNA, 1378 bp, Unknown
  Bacterial polypeptide expressing nucleotide sequence isolated from the Sargasso Sea
tattattattggacctggcacagaaataattgctggtgaaggcaaaattataacagctggcggttttgatagtcatattcattttatttgtcctcaacaaatagatgatgcacttcattctggtattacaactatgttgggaggtggaactggtcctgcacatggtactttagctactacagttacaccaggaccatggcatatagagaaaatgatacaatcagctgatgcattttctatgaacttagcttttgcaggaaaaggtaacagttctttaccaaaagctcttgaagaacaagtaattgccggtgcatgttcactaaaattacatgaagattggggcacaactccagcagcaatagataattgtttaaatgtagctgataatcatgacgttcaagtaatgattcatacagatacattaaatgaaagtggatttgtcgaaagtacaattaaagcaattaatggaagaacaatccacgcttttcatactgaaggagctggcggtggtcacgcacctgatattataaaagtttgtggtgaagaatatgttattccttcttcaactaatccaactagaccatttacagttaatacaattgaagagcacttggatatgctaatggtttgccatcacttagataaatctataccagaagatgtagcatttgctgaaagtcgtattcgaaaagaaacaattgcagcggaagatatacttcatgatatgggtgctttttcaattattgcttctgatagtcaagcaatgggtcgtgttggtgaagttattattagaacatggcaaacagcacataaaatgaaagttcagcgtggacaattaaaagaagagcagggtgataacgacaatgtaagagttaaaagatacattgctaaatatacaattaatcctgcaatagcacatggtatttctgatcatattgggactatcgaaaaaaataaacgtgctgatattgttatttgggatactgctttttttggtgttaaacctgaaatggtattacaaggtggaagtattgcttgcgcacaaatgggtgatcctaatgcatcaattccaacaccacaaccagtgtactcaagaccaatgttttcttcttttggtaaatcattagaaaaatctactgtcacttttgtaagtaaagtttcattagataaagattcatttaaaaactctggagtaaataaatctttattacccgttaaaaatatcagaaaaatttctaaaaaagatatgatattaaatgattattgtccaaaaataaaagttaacccggaaacctatgaagttttagcagatggtgagttaattacttgtgatccagctaaaacactacctttggctcaacgttattttatgtactaa

SEQ ID NO: 264953 - DNA, 310 bp, Unknown
  Bacterial polypeptide expressing nucleotide sequence isolated from the Sargasso Sea
atgaaacctggtgaaataataacaaaacaaaaaagtgatattaatttgaatgataataggaattcaataattttaaaagtttcaaatagtggagatagaccaatacaagttggaagtcattatcattttgctgaaacaaatgaatttttaaaatttgatagagaaaaatcaaaaggtatgcgtttagacataccatctggtacagcagttcgatttgaaccgggtcaatctaaagatgtggaattaattccaattacaggaaatagaaaaatatttggttttaataagaaaattatgggtcaattgtaat

SEQ ID NO: 264954 - DNA, 766 bp, Unknown
  Bacterial polypeptide expressing nucleotide sequence isolated from the Sargasso Sea
gacatgctcatggtgtgtcatcaccttgacaaatctattccggaagatgttgcgtttgctgaaagtcgtattcgaaaagaaacgattgctgcagaagatattcttcatgacatgggtgcattctcaattattgcatcagatagtcaggccatgggtcgtgtgggagaggttattattagaacatggcagacagcccataaaatgaaagtacaacgaggacagttaaaagaagaaaatggagataatgataatgtacgagtaaaaagatatatagctaaatatactatcaatcctgctatagctcatggaatatctgaaaatattggaacaatagaaaaaaataaacgagctgatattgtaatttgggatccagcattttttggagtaaagcctgaaattatcttgatgggtggaagtattgcctgtgctcaaatgggagatcctaatgcatcaataccgactccccagccagtgtattcaagacctatgttttcttcttttggaaaatctcttgaaaaatcttctgtaacatttgtgagtcaaatatctattgatagagatatgcataagaattcagggatcaataaattattattaccagtaaagaatattagaaatgtctcaaaaaaagatatgatattaaataattattgtccacaaatagaagtaaaccctgaaacatatgaagttaaagctgatggagaacttataacatgtgaacctgctgaaaccttacctttagcacaacgatactttttgtattaaa

SEQ ID NO: 264955 - DNA, 1087 bp, Unknown
  Bacterial polypeptide expressing nucleotide sequence isolated from the Sargasso Sea
aatggctaaaatttctagagcagcttatgcagatatgtatgggccaaccacaggagataaagtaaggcttgcagatactgaattatttatcgaagttgaaaacgatctaactacatatggtgaagaagtaaagtttggtggtggaaaagtaataagagatgggatgggtcaatctcaaattagcagagaaaaaggagctgctgatactgttataactaatgctttaatagttgatgtaaatggaatttataaagctgatgttggtttaaaggatggaaaaatatttgaaattggtaaagctggaaatccagacactcaatctaaagtaaatattattattggtccaggaacagagataattgctggtgaaggaaaaattttaacagcagggggttttgatagtcacattcattatatatgtcctcaacaaattgatgatgcattgcactcaggcattacaaccatgcttggaggaggaactggaccagctcacggtacacttgcaacaacttgtacacccgggccatggcacattaaaagaatgattcaatctgctgatggtttttctatgaatttggcttttgctgggaaaggaaattcttcattgccagaaggtcttgaagaacaaattctagcaggagcttcagctttaaaattacatgaggattggggaaccactcctggagcaattgataattgtttgaatatagcagacaaaaacgatgtgcaagtaatgattcatacagatactttaaatgaaagtgggtttgtagaaaatactatcaaagcaattaacaaaagaactatacatgcttttcatacagagggtgctggtggtggacacgcgccagatataatcaaagtttgtggagaggagtatgtcattccttcttcaacaaatccaaccagaccatataccatcaatacgatagaggaacatttggatatgctaatggtttgtcaccatctcgataaatctattccagaggatgttgcatttgctgaaagtagaataagaagagaaacaatagcagcagaagatattctccatgacatgggagccttttcaattattgcatcagatagt

SEQ ID NO: 264956 - DNA, 1096 bp, Unknown
  Bacterial polypeptide expressing nucleotide sequence isolated from the Sargasso Sea
tctcacatccactatatatgtcctcaacaaattgatgatgctctgcactcaggtttaacaacaatgctaggaggtggaactggacctgctcatggaacattggcaaccacatgcacacctggatcttggcatataggtaaaatgatacaatcagcagatgctttttctatgaatcttgcatttgctggtaaaggtaattcttctaaaccagagggattaattgaacaggtaaatgctggggcttgcgcactgaaattacacgaagattggggaaccactcctggtgctatagataactgtctaaatgtagctgacaaaatggatgttcaagtaatgatacatacagatacattgaatgaaagtggatttgtagaaaatactataaaagctattaataatagaacaattcatgctttccatacagaaggtgctggtggaggacatgctcctgatataataaaagtatgcgggaatgaaaatgtaataccatcatcaactaatccaacaagaccctatactataaatactttagaagagcatttggatatgcttatggtatgtcatcatttagataaatcaattccagaagacgttgcctttgccgaaagcaggattagaaaagagactatagctgcagaggatattctccatgatttaggtgccttttcaattatagcttctgacagtcaagcaatgggaagggttggagaagttattatcagaacttggcaaacagctcacaaaatgaaagttcaaagaggtcgtctacaggaagaaaaaggtgataatgataatgtaagagttaaaagatatgtagctaaatatacaattaacccagctataactcacggtttatctaaacatataggttcaataactgaaggtaaaagagctgatattgtgatatgggatccagctttttttggagtaaagccagagattgtgatgcttggtggaagcattgcttgtgctcaaatgggtgatcctaacgcatcaattccaactccacaacctgtatatactagaccaatgttttcttcttatggaagatctctagagacatcttcaattacttttgtaagtaaagattctataa

SEQ ID NO: 264957 - DNA, 1711 bp, Unknown
  Bacterial polypeptide expressing nucleotide sequence isolated from the Sargasso Sea
tatggtttataaaatagagcggtccagctatgccaccatgtttggtccaaccaaaggtgataaagtacgtctcgctgatacagatttaattatagaggttgaagacgataaaacagtctacggcgaagaagtaaaatttggtggtggaaaggttattcgtgatggcatggggcaatctcaaattagtcgtgaagctggagctgttgacaccataattaccaatgcgttgattgtcgatgttacaggaatctataaagctgatgttggccttaaagacggtaaaattgagggtattggtaaagctggaaatccagatgtgcagccgggtgttgatataattattggaccagggaccgaggctattgcaggtgagggacgaatattaactgcagggggaattgatgcccatattcattggattagtccccagcagattgatgacgcactttattctggagtaactactatgctgggtggcggtaccggccctgcggaaggaactaatgctacaacctgcactccaggagcctggcacattagtcgaatgttacaggcagcagagggcctgccgatgaatttagggttttttggcaaaggcaatgcctcgcagccagaagaattagaggcacagattggtgccggtgcgtgtgggcttaagctgcatgaagattggggaacaaccccatcggctatagacacttgtctcagtatagcggacaaaatggatgttcaggttgcaatacacactgacaccttgaatgagtcgggttttgtcgaaaatacggttaatgcctttaaggggcgtactattcatgcattccacactgagggtgcgggtggcggacacgccccagatataattaaggtctgtggtgaagctaatgtattaccttcttcaaccaatccaacacgaccgtttactgtgaatacggttgatgagcatctcgatatgctaatggtttgtcatcatttggacgcaagaattccagaagatgttgcctttgcagaaagtcgcattcgtcgggaaaccatagcagcagaggatattttacatgatcttggagctttttctatgattgcttcggatagtcaggctatgggacgggtgggtgaggtgatcattcgcacttggcagactgccgataaaatgaagaaacagcgaggtacacttagtgaagaaaagggggacaatgataactttagggtaagacgttatattgcaaaatattcaataaaccctgctttgactcatggtattgcggactatgttggttcggttgaggtgggaaagttagcggatcttgttttgtggaagcctatgttttttggtgttaagcctgatttagtcctaaaatcaggtacgatagcagctgcggcgatgggtgatccaaacgcatctattccgacgccgcaaccggttcactaccgaccaatgtttggtagttttgggaagtcattaactgaaagctcaatctcgtttgtttcgcaggcagcgatggacgcaggaattcacgaggcgttagctttggaaaagcaggttttggcagttaatggtacgcgctcagttaagaagagggatatgatgctaaatgactatcagccgaaaatggaagtagacccagaaacatatgaagtgcgagcagatggtgagttgctcttatgtgagccagccgaggaggtttccatggcccagagatattttttattttaa

SEQ ID NO: 264958 - DNA, 313 bp, Unknown
  Bacterial polypeptide expressing nucleotide sequence isolated from the Sargasso Sea
tatgattccaggagaactttttataaaatcaggcactattgatcttaacgaaggtcgtgatgtagtaacattaaaaataaccaatacgggagataggcccattcaggtgggttctcattatcatttttatgagacaaacagtgctttggattttgatcgagaggccactagaggctttcgtctagatataccagctggtacagccgttcgttttgaacctggccaatcccgcgaggtagacctaatagcctatcagggtaatcgtgaggtgtacgggtttaacggaaaaattaacggaagtttagagggttag

SEQ ID NO: 264959 - DNA, 136 bp, Unknown
  Bacterial polypeptide expressing nucleotide sequence isolated from the Sargasso Sea
tatgagcgaaggggcaggtgttttaagacgtgatgaagtgatggatggtgtcgcagaaatgatccatgacattcaggtggaagctacatttccggacggcactaagctcgttactgttcacgaaccgatccgttaa

SEQ ID NO: 264960 - DNA, 304 bp, Unknown
  Bacterial polypeptide expressing nucleotide sequence isolated from the Sargasso Sea
atgtttttgacgcctagagagattgataaattgcaaatttttacggctgcacaggttgcattgagaagaaaagagagaggattgaaattaaatcatccagaatcagttgcgcttatagctgatcatattttagagggggccagagatggaaaatccgtatcggagataatgagctcaggaaaaaatgttctacgaaaagatgacgtacttccaggagttcctgaaattattcacactatacaagtcgaggcaacatttgaggatgggacaaaattggtgacaattcatgacccaattgtgtgat

SEQ ID NO: 264961 - DNA, 1198 bp, Unknown
  Bacterial polypeptide expressing nucleotide sequence isolated from the Sargasso Sea
aagatttcccgccaagcctacgccgacatgttcggccccactgtcggcgacaaggtgcgcctggccgataccgacctgtggatcgaagtcgaaaaggacttcaccacctacggtgaagaagtgaaatttggcggtggcaaggtgatccgcgacggcatgggtcagggccagctgtgcgcggccgatgtagtcgacaccctgatcaccaacgcgctgatcatcgaccactggggcatcgtcaaggccgacgtcggcctcaaggacggacgtatcgccgccatcggcaaggccggcaacccggatatccaaccggacgtgaccatcgccatcggcgcgggcaccgaggtgatcgccggtgagggcatgatcctcaccgccggcggcatcgacacccatatccacttcatctgcccacagcagatcgaagaggcgctgatgagcggggtgaccaccatgatcggcggcggcaccgggccggccaccggcaccaatgccaccacctgcacttccggcccctggcacatggcgcgcatgctgcaggccgccgacgcctttccgatgaacctgggtttcaccggcaagggcaacgcctcgctgcccgagcccttgatcgagcaggtcaaggccggtgccatcggtctgaagctgcacgaggactggggcaccaccccggcagccatcgacaactgcctgagtgtggccgaccaatacgacgtgcaggtggcgattcacaccgacacgctgaacgagtccggcttcgtcgaaaccaccctcggcgcgttcaagggccgcaccatccacacctaccacaccgagggcgccggcggcggccatgcgccggacatcatcaaggcctgcggtttccccaacgtgctgccgtcctcgaccaacccgacgcgcccgttcacccgcaataccatcgacgagcacctggacatgctgatggtctgccatcacctcgacccgagcatcgccgaggatgtcgcgtttgccgagagccgcatccgccgtgaaaccattgcggcggaggatatcctccacgacctcggcgcgttttccatgatcagctccgacagtcaggccatgggccgcgtcggcgaggtgatcacgcgcacctggcagactgcccgacagatgaagcagcagcgcggcccgtttgccgaagacgcgccgggcaacgacaacttccgcgccaagc

SEQ ID NO: 264962 - DNA, 315 bp, Unknown
  Bacterial polypeptide expressing nucleotide sequence isolated from the Sargasso Sea
aattatatgattccaggagaaatattacaagtgagagtgatataattttaaataaagatttagtgagtttgacaatgaaagtctccaatactggtgatcggccaattcaagtcggtagtcactatcatttcgctgaagtaaatgaaagtcttgaatttgatagaaagaaatctttaggcatgagactaaacatttcatctggaaccgcagtaaggtttgaaccggggcaaacaagagatgttgaactcattgaaatgcagggactaaaaaaattatttggatttaataaaaaagtcatgggaaaaattagatgaa

SEQ ID NO: 264963 - DNA, 645 bp, Unknown
  Bacterial polypeptide expressing nucleotide sequence isolated from the Sargasso Sea
aatgccaaaaatttcaagatcttcctatgcagatatgtacggcccaacaaccggtgacaaggttagacttgcagatactgaactttttatagaagttgaaaaagatctaactacctatggtgaagaagtaaagtttggtggcggtaaagttatcagagatggtatgggtcaatcacaaattagtagaaagaatggtgctgttgatacagtgattacaaacgctttaatagttgatgttaatggaatttataaagccgatattggattaaaagatggtgtaattcaatgtattggtaaggctggtaatcctgacacacagtcaaatgtcaatatagttattggtccagggacagaagctatagctggagaaggaaaaataattactgccggaggttttgatagtcatatacatttcatttgtcctcaacaaattgatgatgctttgcattctgggcttacaacaatgcttggtggcggaactggaccagctcatggtactctagcaacaacctgtacacccggtccttggcatattaaaagaatgatgcaatcagcagatgctttttctgtgaacttagcctttgcagggaaagggaattcatcgttaccggagggactcgaagaacaggttcttggaggtgcttg

SEQ ID NO: 264964 - DNA, 304 bp, Unknown
  Bacterial polypeptide expressing nucleotide sequence isolated from the Sargasso Sea
atgaaattaactccaagagaaaaagataaattaatgatttcgatggcagcaattgttgctagaaaacgactagatcgaggaataaagctaaattatccagaagctatagctctgataactgattttgtaattgaaggagcaagagatggcaaaatggtatcaaaattaatggaggctggagcaaatgttgttaaaaaagaaaattgtatggatggagtcgctgatatgatttcagaagtacaagtagaggcaacatttcctgatggaacaaaactagtaactgtacataaaccaatacgataat

SEQ ID NO: 264965 - DNA, 268 bp, Unknown
  Bacterial polypeptide expressing nucleotide sequence isolated from the Sargasso Sea
aatgaaacctggagaaattattactaaaggaaataatgagttaaaacttaatgaagatcgaacatctatagtaatgaaagtatctaataaaggtgatcgtcctatacaagttggtagtcattatcattttgcagaaacaaatgaatttttagaatttgatagagatacatcaagaggaatgcgtttagatataccatctggtactgcagttcgctttgagccaggtcaaacaaaagatgttgaattaattgcaattagtggagaaaga

SEQ ID NO: 264966 - DNA, 1262 bp, Unknown
  Bacterial polypeptide expressing nucleotide sequence isolated from the Sargasso Sea
aatgggaaccaccacaatgattggcggaggtacaggacccgctgatggaacaaacgctaccacatgcacaccaggagaattcaatattcataaaatgatacaggcagtagaggaatttccattaaactttggatttttgtgtaaaggaaatgattctagagaagaatcactcatagagcagataaaggcaggagcgtgtggactaaaattacatgaggattggggaaccactccagctacaattaattctgcactaaatgttgcagataagacagatacgcaagtagcaatccatacagatacactaaacgaatgtgggtatgtcgacgatacaattgcagcaattaatgggagagtaattcacacataccatactgagggtgcaggtggaggtcacgctccagatatcatgaaaattgcctcagagcctaatattttgccgtcatcgactaatcctacaagaccatatacaacgaatactcttgaagaacatctggacatgatgatggtttgtcatcatctcaacccatcagttcccgaagatatttcatttgcagaatcaagaattagagcggagacaattgccgccgaagacatacttcatgacataggagcaatcagtatgatgtcgtcagacagtcaagcaatgggaagagtgggagagacaactaccagaaactggcaaacagcagacaaaatgaaaaaaatgaaaggtccattaccagaagattccgatgaaaatgacaattttagaatcaaaagatatgttgcaaagattacagcaaatcccgcaataactcatggcatatcagaacatgttggaacattagaaaatggaaaaatggcagacatcataatatggacaccgcagtttttcggaattaaaccaaagatgattgtcaaaggaggattcattgcatatgcattgatgggagatcctaacgcatcaattccaactacagaacctgtgtactacagaccaatgtttggagcattaggaaaaacaaaacaatcaacgtcggttacatttacatcacaacttgcacttgacgacggactgcaagataaactgaacatagacaaaaagttagttgcagtaaaaaattgtagaaacattggcaagaaagacatggtacacaatgatggtacaccaaaaatagagattgatcctgaaacatacgaagtcagagttgacggagaagtagcaacagttgatcctgcaacgagtgtttcgttaggacgtttgtatagtttgttttaga

SEQ ID NO: 264967 - DNA, 304 bp, Unknown
  Bacterial polypeptide expressing nucleotide sequence isolated from the Sargasso Sea
atgaaacttagtccacgtgaacgggataaactgcttatttcaatggcagcaatggttgctcaaaaccgcaaggagcgaggtgtcaaacttaattaccccgaagcaatagctttaatcagcgattttgttgtggaaggagcccgcgacgggcggcctgtttcggagttaatggaaacgggtgcgcacgtcgttaaacgaacggattgtatggatggtatcccagaaataattcatgacgtgcaagtggaagcaactttccctgatggtacaaaacttgtaaccgttcataatccaatacgctaag

SEQ ID NO: 264968 - DNA, 1708 bp, Unknown
  Bacterial polypeptide expressing nucleotide sequence isolated from the Sargasso Sea
atgaaaaaaataaatagagacgcttatgcagatatgtatggcccaactacgggtgataaaattagattagctgatacagaactttttattgaagtagaaaaagatttaacaacatatggtgaagaagtaaagtttggtggtggtaaagttataagagatggaatgggtcagtcacaagtgtcacgaaaaaatggtgctgtagatacagtaattactaatgctttaattgttgatgtgaacggtatctataaagctgatataggacttaaggatggaaaaattaatgaaataggaaaggcaggtaatcctgacactcaaccaaatgtaaatattattattggacctggaacagaaataattgcaggtgaaggaaaaataattacagctggtggatttgacagtcatattcattttatttgcccccagcaaatagatgatgctcttcattctggtatcacaactatgttgggaggtggaactggacctgcgcatggaacattagcaacaacagtaacgcctggcccttggcatttagagaaaatgattcaatccgcagatgctttttcaatgaatctagcatttgctggaaaaggtaatagttctttaccagaagcattggaagaacaagttatcgctggtgcaagttcccttaaattacatgaagattggggtactacaccagcagcgatagataattgtttaaatattgctgataaatatgatgttcaagtaatgatacatacggatacattgaatgaaagtggatttgttgagagtacaattaaagcaataaacgaaagaacaatccatgcttttcatacggagggcgcaggaggagggcatgcccctgatataatcaaaatatgtggtgagtcttatgtcattccatcaagtaccaatccaacaagaccatatacagttaatacagtagaagaacatttagatatgttaatggtttgtcatcatttagataaatcaattcctgaagatgtagcttttgcagagagtcgaattcgtaaagaaacaattgccgctgaggatattcttcatgatatgggagctttctcaatcattgcatcagatagtcaggcgatgggtcgagtgggtgaagttattataagaacttggcaaacagctcataaaatgaaagttcaaagagggcagttaaaagaagaaactggaaacaatgataatgaacgcgttaaacgctatattgccaaatatactattaacccagcaatagcacacggtattgcagatcacattggcagtattacaaaaaataaacgagctgatcttgttttatgggaccgtgctttttttggcgtgaagccagaaatggttttaatgggtggcagtattgcttgcgctcaaatgggtgacccaaacgcttctataccaactccacaacctgtttactctcgcccgatgtttgcctcatttggtaagtcattagaaaaatcttctaatgtttttgttagtcaaatttcattagaaaaagagacatttatcaattcaggtatcatgaaagaacttctacctgttaaaaacatcagaaatatctcaaaaaaagatatggtccataatgattattgtccaaatatagaagttaatcctgaaacttatgaagttaaagctgatggtgaaattattacctgtgaacctgcagagtctctccctctagctcaacgttacttcatgtattaaa

SEQ ID NO: 264969 - DNA, 304 bp, Unknown
  Bacterial polypeptide expressing nucleotide sequence isolated from the Sargasso Sea
atgaaattaacacctagagaaaaagataaattgatggtcagtatggccgcgattgttgcaagaaaaagactggagcgaggtattaagcttaattatcccgaagccatagcgcttattactgactttgtcattgaaggtgctagagatggaaaaaaagtatctgaattaatggagtctggtgctcacgtagttacgattaaagattgcatggaaggtattgctgatatgatacctgaggttcaggtagaagcaacttttccagatggaactaaactggttacagtacataaaccgatacgctaat

SEQ ID NO: 264970 - DNA, 310 bp, Unknown
  Bacterial polypeptide expressing nucleotide sequence isolated from the Sargasso Sea
atgaaacctggagaaataataacaacaaataatgagattacactcaataaagatcacaattgtataactataaaagttgcaaatacaggagaccgtccaattcaagttggaagtcattatcattttgctgaaaccaatattgctttagactttgatagaaagatttcaaaagggatgcgacttgatattccatctggtactgctgttaggtttgagccaggtcaaatcaaaaatgttgatttaatcccgtttagtggtgaaagaaaaatttttggatttaataaaaaaataatgggtaagctgaaatgaa

SEQ ID NO: 264971 - DNA, 1165 bp, Unknown
  Bacterial polypeptide expressing nucleotide sequence isolated from the Sargasso Sea
atgcgagccatcgaagatcaacccatgaactttggctttttgggcaaggggaactcaagtcggcgcgatccgttggtcgagcaaattcgcgcgggagcttgcggcctcaaacttcatgaagattggggtaccacgccccaagccatagatacgtgccttgctgttgcggaagagacagacacacaagttgctattcatacggacactctcaacgagagtggtttcgtggaagagacgattaaggcgattaatggtcggacaatccacacttaccacacggagggggccggtggcgggcatgcgcctgacattatcaaagctgccggtttggcaaacgtgctgccctcctcaacaaacccaacgcgcccctacactataaatactgtagatgaacatttggatatgttgatggtctgtcatcatctctcacctaatattcctgaggatgttgcgtttgcggatagtcggattcgaaaagagactatcgccgcagaggatattcttcacgataaaggcgcgtttagtatgattgcctcagattcacaggctatgggtcgtgttggagaggtgattacgcgaacatggcaaaccgcccacaagatgaaggaccaatttggttcactagcagaggatccgagttggcacgataacttcagggcgaagcggtatatcgctaaatacaccattaatcctgccatcgcgcatgggatctctcacgaagttgggtcaatcgaaattgggaagatggcagacctcgtcctttggaagcctgccttctttgggacaaagccgagtttgattatcaaaagcggattcatcgcagccgcgcctatgggggatccgaatgcgtccataccaacgccgcaaccgacacactttaggccgatgtttggttcaatgggatcgtctgcgtccgcgctctcggccactttcgtctctcaactttcgttgaacacagataatccatggatgaaaaacacgaagcggaatttatcagccgttagagatatccgctcggtaaccaagactgatatgaagctaaattctgctcagccagtaatagaagtgcatccagagacttatgaagttagagctgacggtgacctgttgatctgtgaaccggcgtcttcattgcctttggcacagagatattttttattttgag

SEQ ID NO: 264972 - DNA, 373 bp, Unknown
  Bacterial polypeptide expressing nucleotide sequence isolated from the Sargasso Sea
atggttaaaatttctaaagcagcctatgctgatatgtatgggcctactacaggagataaagtaaggcttgcagatactgacttatttattgaaattgagaacgacttaactacttatggtgaagaagtaaagtttggtggtggaaaagtaataagagatgggatgggccaatcacaaattagtagaaaaaaaggagctgctgatacagttattaccaatgctttaatagttgatgtgaatggaatttataaagctgatgttggtttaaaggatggaaaaatatttgaaatcggtaaagctggtaatccagatactcaatctaaagtaaatataattattggtccaggaacagagataattgctggtgaaggaa

SEQ ID NO: 264973 - DNA, 1358 bp, Unknown
  Bacterial polypeptide expressing nucleotide sequence isolated from the Sargasso Sea
aatggtaaaaatatcaagatcttcatatgcagatatgtatggaccaacaacaggggataaagtaagactggcagatactgaactttttgtagaagttgaaaatgattttacaacatacggtgaggaggtaaaatttggtggaggcaaggttattagagatggtatgggtcaatctcaaataagtagagaaaagggtgctgttgatactgttataacaaatgcattagtaattgatgttaatggaatttataaagctgatattggattaaaggatggattaattaattgtattggaaaagccggaaatcctgatacgcaatcaaatgtaaatattattattggaccgggtacagaagcaatagctggagaaggaaaaattgttacagcaggagggtttgatagccacattcattttatttgccctcaacaaattgatgatgcacttcattcaggacttacaactatgctaggaggggggactggacctgctcacggaacattagctacaacatgtacacctggtccatggcacataaaaagaatgatgcaatccgcagatgctttttctatgaatctcgcttttgccggaaaaggaaactcttctttaccagaaggactagaagaacaggtggtcggaggagcatctgccttaaaactacatgaagactggggaacaactccaggagcaattgataattgtcttaatattgctgataaacatgatgttcaagtcatgattcatactgatactttaaacgaaagtggatttgttgaaaatactatcaaagctatcaataagcgaactattcatgctttccacacagaaggtgctggtggaggacatgctccagatattattaaagtttgtggagaaaattatgttttaccgtcttcaacaaatcctacaagaccctatacagttaacactatagaagaacacttagatatgctcatggtctgtcatcacttagataaatctatacctgaggatgtagcttttgctgaaagtagaataagaagggaaactattgcagctgaagatattcttcatgatatgggagccttttcaattatagcatctgacagtcaagcaatgggtagagtaggtgaagtaattataagaacctggcaaactgcgcataaaatgaaaattcaaagaggcaggttgcctgaagaaaaaggtgaaaatgataattttagagtaaaaagatacatagcaaaatatactattaatccagcaatagctcatggaatttcaaaacacataggaagtatagaaaatggtaaacgtgctgatttggtagtctgggatccagcattttttggtgttaagcctgagatgattttaataggtggaa

SEQ ID NO: 264974 - DNA, 304 bp, Unknown
  Bacterial polypeptide expressing nucleotide sequence isolated from the Sargasso Sea
catgaaactttcaccacgagaaaaagataaactacttataagccttgctgccatggttgcaaaaaatagattagatagaggtataaaactgaattacccagaggcaattgcaattatttcagattttgttgttgaaggtgcaagagatggaaaaactgttgctgagttaatggaattaggagcgcatgtaattaaaaagaaaaattgcatggatggtattgcagatatgataaatgaagtacaagttgaagcaactttcccagatggtacaaaactagttactgttcacaaaccaattagataa

SEQ ID NO: 264975 - DNA, 307 bp, Unknown
  Bacterial polypeptide expressing nucleotide sequence isolated from the Sargasso Sea
aatgaaacccggagaaattattcctaaaaacgaagatatagaattaaatcaaggtaaaaaaacttttacattaaaaatttcaaacacaggagatcgacctatccaagttggaagtcattaccatttttatgagactaatgagtttttagagtttgatagaaaagtttcttacggaaaaagattagatattccatccggtacagctgtaagatttgaaccaggccaatcaaaagatgttaagttaattgatataaatggattaaagaaaatttttggatttaacaaaaaagtaatgggtgatttataa

SEQ ID NO: 264976 - DNA, 199 bp, Unknown
  Bacterial polypeptide expressing nucleotide sequence isolated from the Sargasso Sea
atagctttaataacagattttgtagtagagggagctagagaaggaaaaagtgttgcagaacttatggaggcaggagctcatgtaattaaaaaaaaggattgtatggaaggtattccagatatgattaaggaagttcaagtagaagctacttttcctgatggaactaaattagtaacagtgcacaaaccaattagatgat

SEQ ID NO: 264977 - DNA, 304 bp, Unknown
  Bacterial polypeptide expressing nucleotide sequence isolated from the Sargasso Sea
atgaaattaacaccaagagaaaaagataagttaatggtcagcatggcagccaatgttgccaggaaacgtttacaaagaggagttaaacttaattacccagaagctatagctttgataacagattttgtcatagaaggtgcaagagatggaaaaatggtatcagaattaatggaaacaggtgctcatgttgtaaaaaaagaagattgtatggatggaattcaagatatgattccagaagtgcaggtagaagcaacatttcctgatggaacaaaattagtaacagtacataagccgatcagataat

SEQ ID NO: 264978 - DNA, 310 bp, Unknown
  Bacterial polypeptide expressing nucleotide sequence isolated from the Sargasso Sea
atgaaacctggagaagtaataacaaaaaaaaatagtgatattaatttgaatgatgatcgtaattcaattacgttaaaagtttcaaatagtggtgatcgaccaatacaagttggaagccattatcattttgctgaaactaatgaatatttaaaatttgatagagaaaaatcaaatggtatgcgtttagacattccatcaggaacagctgttcggtttgaacccggtcaatcaaaagatgtagaattaattccaatagctggagatagaaagatatttggttttaataagaaagtaatgggtcaattgtaat

SEQ ID NO: 264979 - DNA, 1113 bp, Unknown
  Bacterial polypeptide expressing nucleotide sequence isolated from the Sargasso Sea
aatggttaaaattcctagagcttcatatgctgatatgtacggtcctaccacaggagataaagtaagacttggagatacagagttatttattgaagtcgaaaatgatcttacaaattatggtgaagaggtaaagtttggaggtggaaaagtaataagagagggtatgggacaatcacaaatcagcagagagaaaggtgctgtagatacagtcatcacaaatgctttaatagtagatgttaaagggatttataaagctgatgtaggtttaaaagatggaaaaattattgaaattggcaaagcaggtaatccagatactcaatcaaatgtaaatattataattggtccaggaacagaaattattgcaggtgaaggcaaaatattaacagcaggaggttttgatagtcatattcattatatatgccctcaacaaattgatgatgctttacattcaggtatcaccacaatgttgggaggagggactggacctgctcatggaacacttgctacgacttgtacaccaggtccatggcatattaagagaatgattcaatctgctgatggattttctatgaatttagcttttgcaggtaaaggaaattcatcattaccagaaggtcttgaagaacaaatccacgcaggtgcttgtgctttaaaattacatgaagattggggtaccactcctggagcaattgataactgtttaagtattgctgataaaaatgatgttcaggtgatgatccatacagatacgttgaatgaaagtggatttgtagaaaacaccattaaagcaataaacaaaagaactattcatgcatttcatactgaaggtgctggtggaggacatgcaccagatataattaaagtttgtggagaagagtatgttattccttcttctacaaaccctacaaggccgtatacagtcaataccattgaggagcatttagatatgcttatggtttgtcatcacctcgataaatccataccagaggatgtagcttttgctgaaagtagaataagacgagagacaattgcagcagaggatattcttcatgatatgggagctttttcaattattgcatcagacagccaagctatgggtagagttggagaagt

SEQ ID NO: 264980 - DNA, 1294 bp, Unknown
  Bacterial polypeptide expressing nucleotide sequence isolated from the Sargasso Sea
cctggccagcggcgtgaccaccatgctgggcggcggcaccggccccgctacgggcacgctggccaccacctgcacgtcgggccccttcaacatggagcgcatgctgcaggcggccgacgcgttccccatgaacctgggcttcctcggcaagggcaacgccagcctgcccgatgcgctgcacgagcagatcaacgcgggtgccattggcctgaagctgcacgaagactggggcaccacgccctcggccatcagcaactgcctggatgtggccgaagccaccgacacgcaggtcgccatccacagcgacacgctcaacgaatcgggctttgtggagaacaccattgccgccgtgggcgggcgcggcatctgcgccttccacaccgagggcgcgggcggcggccatgcaccggacatcctgcgcgtggtgggcgaggacaacttcttgccatcgtccaccaaccccaccatgccctacacacagaacacgctggacgagcatgtggacatgctcatggtgtgccaccacctcgacgccagcattgccgaagacctggcctttgccgaaagccgcatccgcaaggaaaccatcgccgccgaagacatcctgcacgacctgggcgccatcagcatgatgagcagcgacagccaggccatgggccgcgtgggcgaagtcatcctgcgcacctggcagaccgcgcacaagatgaaggtgcagcgcggctggctggcccccaccgcagggcgcgacgagctggccgaaatcctgcagcgcaacgacaacttccgcatcaagcgctacgtggccaagtacacgatcaaccccgccattgcgcacggcattgcccacgaggtgggctcactggaggtcggtaagtgggccgacatcgtgatctggaagcctgcgttcttcggcgtcaaacccgcgctcatcttgaagggcggcctgatcgccatggccgccatgggcgaccccaatgcctccatccccacaccccagcccgtgcactaccgccccatgttcggcgcgtttggcggtgccattgccaagacctcgctcacctttgtgtcgcaagcggggctgaacgcgggcattggcgaacgctttggcctgcgcaagcagctcagcgccgtgcgcaacatccgtggcgtgcgcaaacagcacatggtgcacaacagctacacgcccaaaatggaggtggacgcgcaaacctacaccgtgcgcgccgacggccagctgctcacctgcgagcccgccaccctgctgcccatggcgcagcgctactttttgttctga

SEQ ID NO: 264981 - DNA, 310 bp, Unknown
  Bacterial polypeptide expressing nucleotide sequence isolated from the Sargasso Sea
tatgattccaggagaaataattacaagtgacagtgaaatagttttaaataaagatttagtgagtttgacaatgaaagtctccaacactggtgatcgaccaattcaagtcggtagccactatcatttcgctgaagtaaatgaaagtcttgaatttgatagaaagaaatctttaggcatgagactaaacatttcatctggaactgcagtaaggtttgaaccaggtcaatcaagagatattgaacttatcgaaatacaaggactaaaaaaattatttgggtttaataaaaaagtcatgggaaaaataaaatga

SEQ ID NO: 264982 - DNA, 676 bp, Unknown
  Bacterial polypeptide expressing nucleotide sequence isolated from the Sargasso Sea
tgcagaagatattctccatgacatgggtgcattttcaattattgcgtctgatagtcaagcaatgggtcgtgttggtgaagttattattagaacatggcaaaccgcacataaaatgaaagttcaaaggggacaattaaaggaagagcaaggtaataatgataatttacgtgttaaacgttatatagctaaatatacaattaaccctgcaattgctcatggtatttcagatcatattggaagtatcgaaaagaacaagcgtgcagatattgtcatttgggacacagctttttttggtgttaagcctgaaatggttttgcaaggtggaagtattgcttgcgcgcaaatgggcgatccaaatgcttctattccaacacctcaaccagtgtattctagaccaatgttttcttcttttggaaaatcattagaaaaatctaccacaacatttgtaagtaaagcatctcttgataaaaattcattcaaaaattctggaattagtaaatctttattgccagttaaaaatattagaaaaatttctaaaaaagatatgatgttaaatgattattgtccgaaaatagaagtgaatccagaaacttatgaagttttagcagatggtgagttaattacttgtgagccagctgaaacactacctttagctcaacgttattttatgtactaa

SEQ ID NO: 264983 - DNA, 316 bp, Unknown
  Bacterial polypeptide expressing nucleotide sequence isolated from the Sargasso Sea
cttggaggctatagtgcaattatcacctcgtgagaaagataaacttttaatagcaatggcagcggaggtcgctcggaaaagaaaaagccgtggtgttaaacttaattacccagaagctattgctctaatttgcgatgctgttgttgagggagctcgtgatggaaaaagtgtagctgaaatgatggaatatggtgcaacaatagttaaatcgactgattgcatggacggtataccagatatgataccagaggttcaggtagaggcaacattcccagacggaacgaagcttgtcacagttcataacccaataagatag

SEQ ID NO: 264984 - DNA, 1664 bp, Unknown
  Bacterial polypeptide expressing nucleotide sequence isolated from the Sargasso Sea
aatggcagtggaaatttcgagatttgattacgcaggaatgtatggccccacagaaggggataaggttaggttggctgataccgagatttttattgaggttgaaaaagatctaactacttacggagaagaagttaagtttggtggtgggaaagttattcgcgatggtatgggtcagtcgcaagtaacaagagctgatggagcgcctgatactgtaataacaaatgctctcattctcgattacacgggtatatataaagcagacgttgccctcagagatggaaagatagaggcaataggcaaagctggtaacccagatacccaaccaaatgttgatataataattggccccggcacagaaattattgctggggagggtaaaatattaactgcaggaggatttgacagccatattcattatatttgtccgcaacaaattgatgatgctctgcactctggtttgactacaatgttaggtggtggaacgggaccggcacatggcactttagctacaacgtgtacgccaggtccatggcatattggcagaatgttgcaggcggcggatggattgccaatgaaccttgcctttgcaggcaaaggaaatgcctcgctacctgatgcgttggaagaacaggttctaggtggagcttgtgcgttaaaacttcatgaagattggggaacaacgccacaagcaattgattgttgcttgggcgtagcagatgatcttgatgttcaagtgatgatccacactgacacattaaacgaaagtggttttgtcgaaagaactgtagactccatgaaaggaagaacaatacacgcttttcataccgaaggagctggaggcggtcatgcgcctgacattataaaaatttgtggtgaacaatttgtattgccgtcttcaactaatccaacaagaccatttaccaaaaatacagttgaagaacatttagacatgctaatggtctgtcatcatcttgataaatctattcctgaagacatcgcatttgctgaaagccgcataaggcgagaaacaatagcagcagaagatattcttcacgacatgggagccttttctataattgcttcggacagccaagctatgggccgagtcggggaagttattataagaacttggcaaaccgctgataaaatgaaaaagcaacgaggtgcgctctccgaagaaacaggtaataatgataatctacgagctcgacgatatatcgcaaaatatacaataaatcctgcaatcgctcacggagtttcccatgtggttggttcagtggaacccggtaagcgagcagatctagttctttggaatccagcattttttggagtaaagccagagatggttttattgggaggtacaatagcggttgctcaaatgggagatccgaacgcgtccattcccactccgcaaccagtttacacccgttccatgtttggagcttacgggcgagctttgtcggagacttctgtgacgtttgtttcgggtgctgctcatgctgaaggtgtcggagtaaagctaggtttagccaagcaaacggtgccagtcaaaaacaccagaaatattggaaaacttgatttaaaattgaatgtagctttaccaaaaatcgatgttgatccagaaacatatgaggttcgtgcggatggagagcttttaacttgtc

SEQ ID NO: 264985 - DNA, 307 bp, Unknown
  Bacterial polypeptide expressing nucleotide sequence isolated from the Sargasso Sea
catgaaaccaggtgaaataataactttaaatggttctataactttgaatgaaggacgcgaaggttgttccataatggtgtccaatacgggagaccgtcccattcaggtgggcagtcattatcatttttttgaaactaacgaagctctttctttcgaccgggaaagtgcgcgaggaatgcggttggatatcgcctctgggacagctgttcgatttgagcctggtcaatctagaaaagtaaatcttattcctttttcaggagaaaaaagaatttttggttttaacggtaaaataatgggtgatctttaa

SEQ ID NO: 264986 - DNA, 304 bp, Unknown
  Bacterial polypeptide expressing nucleotide sequence isolated from the Sargasso Sea
atgaaactcactcctagagaaaaagataaacttttaataagtcttgcagcaattgttgctaaaaaacggttgtcaaaaggtataaaattaaattatccagaagctatagccttaataacagatttcgtagtagagggcgctagagaaggtaaaagtgttgcagaacttatggaggcaggagctcatgttattaaaaaaaaggattgtatggaaggtattccagatatggtgaaggaagttcaagtagaagctacttttcctgatggaactaaattagtaacagtgcacaaacctattaggtgat

SEQ ID NO: 264987 - DNA, 304 bp, Unknown
  Bacterial polypeptide expressing nucleotide sequence isolated from the Sargasso Sea
atgaaactaacacctcgagaaaaagataaacttttaattagcctttcagctatggttgcgagaaatagattagcaaagggcataaaattaaattatccagaagtgatagctttaatatcagattttgttatcgagggagcaagagagggcaaaagtgtttcggaacttatggaagctggtgctcatgtaataaaaaaaaaagattgtatggaaggtgttccagatatggtgaatgatgttcaggtagaagctacttttccagatggaactaaattagttacagtacataaacctataaggtagg

SEQ ID NO: 264988 - DNA, 304 bp, Unknown
  Bacterial polypeptide expressing nucleotide sequence isolated from the Sargasso Sea
atgaagctgacacctcgcgagaaggacaagctgctgatcttcaccgccgcgctactcgccgaacggcgccgcgcccgcggcctaaagctgaactatccggaggcggtcgcgttcatcaccgccgcgctgatggaagcggcccgtgacggcaagaccgtcgccgaggtcatgcattacggcaccacgctgctgacgcgcgccgatgtgatggaaggcgtggctgaaatgatccccgatatccaggtcgaagccaccttccccgacggcaccaagctcgtcaccgttcaccatccgatcccgtaac

SEQ ID NO: 264989 - DNA, 304 bp, Unknown
  Bacterial polypeptide expressing nucleotide sequence isolated from the Sargasso Sea
atgaaactaacacctcgtgaaaaagataaacttttaattagcctttcagcaattgtagcaagaaacagattagcaaaaggcataaagttgaattatccagaagcgatagcgctaataactgatttcgtaatagagggagcgagagagggcaagagtgtctcggaactcatggaagctggtgctcatgtaataaaaaagaaggattgcatggaaggtgttccagatatgatcaaagatgttcaagtagaggctacttttccagacggaactaaactagttacagtgcataaacctataaggtaat

SEQ ID NO: 264990 - DNA, 677 bp, Unknown
  Bacterial polypeptide expressing nucleotide sequence isolated from the Sargasso Sea
aatgaaagaaatttctagaaaatcttattctgatatgtatggaccaacagttggagatcaaattaggctggcagacactgatttaattatcgaagttgaaaatgatttcaccaactatggagaggaagttaaatttggtggcggtaaagtaattagggatggcatgggtcaatctcagatacctagatcacaaggtgcagtcgatacagtaattaccaatgccttagttatagatgttaaaggtatatttaaagctgatgttggaattaaagatggtaaaatatgtgaacttggaaaggcaggaaaccctgacactcaaaataacgtcaacataataattggacctggaacagaaattattgctggtgaaggaaaaattattacggcaggaggttttgatagtcatattcattttatatgtccacaacaaatagatgatgctcttcactcagggataactacaatgttgggaggtggtactggacctgcccacggaacacttgcaacgacctgtactcctgggccatggcatataaaaagaatgatacaatcagcagatgctttttctatgaaccttgcttttgctggaaaaggaaactcttctttaccagaaggtttagaggagcaaatagctgctggagcatgctcgttaaaacttcatgaagattgggggacta

SEQ ID NO: 264991 - DNA, 1261 bp, Unknown
  Bacterial polypeptide expressing nucleotide sequence isolated from the Sargasso Sea
ctcaggtattacaactatgttaggtggaggaactggacctgcacatggtacgttagctacaactgttacaccaggaccttggcatatggagaaaatgattcaatcagctgatgctttttctatgaatttagcatttgcaggtaaaggcaatagttcactacctcaagctctggaagaacaagtaattgctggtgcaagttcattaaaattacatgaagattggggaacaactcctgcagcaattgataattgtttaaatattgctgataaatatgacattcaagttatgatacatacagatactttaaatgaaagtggatttgtagaaagcacaattagagcaattaatggaagaacaatacatgcttttcatacagaaggggctggaggtggtcatgctccagatattataaaagtttgcggtgagaaatatgttattccatcttctacaaaccctacaagaccttatacaataaacacagtagaagaacacttagatatgttaatggtttgtcatcatcttgataaatcaatacctgaagatgttgcatttgcagaaagtcgtattcgaaaagaaacaattgctgctgaggatatacttcatgacatgggtgcgttttcaatcattgcatctgatagtcaagcaatgggtcgtgtaggtgaagttattattagaacatggcaaaccgcacataaaatgaaggtgcaacgtggacaattaaaagaagagaagggtaataacgataatttgcgagttaaacgatatatagcaaaatatacaattaatcctgcgatagctcatggtatatcagatcatattggtagtattgaaaaaaataaacgtgcagatatagttatctgggatacagcgttttttggagttaaacctgaaatggtgctacaaggtggaagtatttcttgtgcacaaatgggtgatcccaatgcttccattcctacacctcaaccagtatattcacgtccaatgttctcttcttttggtaaatctttggagaaatcatctgttacctttgttagtcaaatatctttagataaaaatattcataaaaaatctggaattagcaaatctttgttgcctgttaaaaatattagaaaaatatctaagatggacatgatattcaatgattactgtccaaacatagaagttaatccagaaacttatgaagttgttgcagatggagaattaattacttgtgaaccatctaaaacattaccattagcccaacgttattttatgtattaa

SEQ ID NO: 264992 - DNA, 1200 bp, Unknown
  Bacterial polypeptide expressing nucleotide sequence isolated from the Sargasso Sea
cctgcacgccgggtccgtggcatctcgaacgcatgttgcaggcagccgatggctatccgatgaatctcggctttctcggcaagggcaatgtgagccagccgcaaccggcgctggagcagattgccgccggcgcgatcggtttgaagctgcacgaagactggggcacgacgcctgccgcgatcgacaactgtctgtccgtcgccgacgacaccgacacgcaggtcgcgatccacaccgatacgctaaacgaagcaggtttcgtggaagcgaccgtggccgcgttcaagggccgcacgattcacacgtatcacacggaaggcgcgggcggcggccatgcgccggacatcatcaaggtgtgtggcgaagcgaacgtgttgccctcgtccaccaatccgacgcgcccgtataccgtcaacacgctcgaagaacatctcgacatgctgatggtgtgtcaccacctggacccgtcgattgcggaagatatcgcgtttgccgagtcgcgcattcgtcgcgagaccattgctgccgaagacatcctgcatgacctcggcgcgttgtcgatgctgtcgtcggattctcaggcgatggggcgcgtgggcgaagtgatcatccgtacgtggcaaaccgcgcacaagatgaaagtgcaacgcggcgcgctgcctgaagacaacgcgcgccacgacaatttccgcgcgaagcgttatgtcgccaagtacacgatcaatccggccatcacgcacggcatctcgcacgaggtcggctcgatcgagccgggcaagtgggccgatctggtgttctgggagcccgcgtttttcggcatcaaaccgtcgctgatcctgaagggcggcatgatcgcaatggcgcagatgggcgacccgaacgcatcgatcccgacgccgcaaccggtccactatcgcgagatgttcgcgacgcgtggcggtgcgctgggtcgcacctccctgaccttcgtttcgcagatggcggcggatgcgggtgtcggcgaacgctatggtttgaacaagcgtatcgttgccgtaaagaactgccgcaacatcacgaaggccgacatgattcacaacgcgtggcgcccgtcgatcagcgtcgatccggaaacgtatcaggtgatcgccgatggtcagttgctgacttgcgagcccgccacggtgctgccgatggcacaacgctacttcctgttctaag

SEQ ID NO: 264993 - DNA, 187 bp, Unknown
  Bacterial polypeptide expressing nucleotide sequence isolated from the Sargasso Sea
ttctgattatgttgttgaaggtgcaagggacggcaaatctgtagctgaattaatggaaagtgcagcacatgtgttaaaaaaagatgactgtatggaaggagttgctgaaatgattgccgaagtgcagacagaagcaacttttccagatggaacaaagttagtcacggtacataaacccataaggtaa

SEQ ID NO: 264994 - DNA, 1265 bp, Unknown
  Bacterial polypeptide expressing nucleotide sequence isolated from the Sargasso Sea
gcattcaggtattacaactatgctaggaggaggtactggacctgctcatggaacactagcaacaacctgcacacctggtccatggcatatacaaagaatgattcaatctgctgatggtttttctatgaatttagcttttgctggaaaaggaaattcctccctgccggaaggtcttgaggaacaaattctagccggagcttcagcacttaaattacatgaggactggggaacaactccaggtgcaattgacaattgtttaaatattgctgacaaaaatgatgtccaggttatgattcatacagatacacttaatgaaagtggatttgtagaaaatacaataaaggcaattaacaaaagaactattcatgcttttcatacagagggtgctggcggtggtcatgcaccagatataattaaagtttgtggagaagagtatgttattccttcttccacaaatccaaccaggccttacacagttaatacaatagaggaacatttagatatgcttatggtttgtcaccatcttgataagtctattccagaggatgtagcatttgctgaaagtagaataagaagagaaacaattgcagcagaagatattcttcatgatatgggtgccttttcaattattgcatcagatagccaggctatgggtagagttggagaagttataataagaacttggcaaactgcacataaaatgaaagttcaaagaggaagtttatcagaggaaaaaggggataatgataattttagagttaaaagatatttagcaaaatacacaattaatcctgcaattgctcatggaatttcaaaacatattggtagtattgaaaaaaataaacgtgcagatttagttttatgggacccagcattttttggtgccaaaccagagatgatattaataggcggaagtatagcttgtgctcaaatgggagacccgaatgcatcaattccaacccctcaaccagtatacactagaccaatgttttcatcatttggaacttctttagaaaaatcttcagtaatttttacaagcaaactagctattgaaaagaattcattgaaagatgcaaatattagaaaagatttattacctgtagaaaacacaaggaccatttctaaaaaagatatgattttaaataataagtgtccgaaaattgaggttaatcctgagacttacgaggtaaaagctgatggtgaaataattacctgtgaacctgctaaagaacttcctttggcacaaagatattttatgttttagc

SEQ ID NO: 264995 - DNA, 1384 bp, Unknown
  Bacterial polypeptide expressing nucleotide sequence isolated from the Sargasso Sea
agtaaatattattattgtccaggaacagagattattgccggagaaggtaaaattttaactgctggaggttttgatagtcatattcattatatatgtcctcaacaaatagatgatgctttgcactcaggtattactacgatgttgggaggaggaacaggacctgctcatggtactcttgcaacgacttgcacacctggtccatggcatatcaaaagaatgattcagtctgctgatggtttttctatgaatttagcttttgctggaaagggaaattcttcattaccagaaggtcttgaagaacaaattctcgctggagcttcagctttaaagctgcatgaagattggggaactacccctggagcaattgataattgtttaaatattgctgataaaaatgatgttcaagtaatgatacatacagatactttgaacgaaagtggatttgtggaaaatactattaaagcaataaataaaagaactattcacgcttttcatacagaaggcgctggtggtggacatgcaccagatataattaaagtttgtggagaagattatgttataccttcttctacaaatcctacgagaccatacactgttaatactatagaagaacatttagacatgcttatggtttgtcaccatcttgataagtctataccagaagatgtagctttcgctgaaagtagaataagacgtgaaacaattgcagctgaagatattcttcatgacatgggtgctttttcaattattgcatctgatagtcaggccatgggtagagtgggagaagttataattagaacttggcagacagctcacaaaatgaaagttcaaagaggaagtctaccagaagaaaaaggagataatgataattttagagttaaaaggtatttagcaaaatatacaattaatccagcaattgctcacggaatttcaaaacatattggaagcattgaaaaaaataaacgtgctgatttagttttgtgggatccagcattttttggtgtaaaaccagaaataatattaatgggtgggagtatagcttgtgctcaaatgggtgatccaaacgcatcaattccaacaccacaaccggtatatactagaccgatgttttcttcatttggaacgtcattagaaaagtcttcggtaatttttactagtaagttggcattagaaaaaaattcattaaaagattcaagtataagaaaagatttgttagccgtagaaaacactagatctatttcaaaaaaagatatggttttaaataataagtgtccaaaaattgaagtaaatccagaaacatatgaagtaaaagctgatggggaaataattacatgtgaaccagcaaaagaactacctttagcacaaagatattttatgtattaac

SEQ ID NO: 264996 - DNA, 391 bp, Unknown
  Bacterial polypeptide expressing nucleotide sequence isolated from the Sargasso Sea
atgagtgcaattgaaattatcaaaatgggaaatccacttcttagagaagttgctgaaaagttctcagttgaagaaattaaaagcccggataccggattacttttggaggacatgtgggattctttggaggcagcaggtggcattggtttagctgctcctcaaataggtattttgaaacaactagcagttattaagctttctgaagactctgatcggtatcccgatatggaggatagtgaggcatttgtaatttttaatcctgagattacggtattggataaaacggaacagggattttgggagggctgtttaagcgtcccaggcttaagaggctttgtagaaaggccaagaaaaatcagggttgatttcctggatgaaggagcgcaaccca

SEQ ID NO: 264997 - DNA, 188 bp, Unknown
  Bacterial polypeptide expressing nucleotide sequence isolated from the Sargasso Sea
atctataaaagtaacctatacagatgaaaataaaaaaaataaaactcttgaggctaacggtttgctcgcaacttgtatacaacacgaaatagaccatttaaatggtattctttttattgatcatatctctaaactaaaaagagaaatgattcttaaaaaggctattaaagaatatacaaaaaattaaa

SEQ ID NO: 264998 - DNA, 531 bp, Unknown
  Bacterial polypeptide expressing nucleotide sequence isolated from the Sargasso Sea
tgttggctgctggaggtgttgggttagcggctaaccaaataggagaactttcaagaattataactctgcatataccagaagaaaaaaaaccctgggtattaataaatcctgagattatcagtaaaaagggatcgagagatgtgttagaaggatgcttgtcttttcctggttatgaaggtttagtaaaaagatcagtatcggtttctgcaagatggctagatcttaataagtcactttataaggttactaaagaagaattatttgctcaggctcttgagcatgaaattgatcaccttaatgggattctttatactgaccatttactagaacatgaaaaactaaaacaagctggcttgaagcaagaccaacctcatttgcacgatgtagacatgaaaataatcgctcataaagaacaagatgaaccgagtgaaattgtagagtccaaattgaatttttcaaaactatattctgattcatcaatatcacaaatgcaatatgatcttttcaacgaagggtttttagaaaattaga

SEQ ID NO: 264999 - DNA, 203 bp, Unknown
  Bacterial polypeptide expressing nucleotide sequence isolated from the Sargasso Sea
aactataaaattaaaatttagagatgaaatggggagaccacgtaaaatgaaagcagatggacttctagcgaggtgtattcaacacgaaatggatcacttaaacggaatattatttgttgatagagttacatcaaaagatgatttgaataaagaacttataaaggaagggttcaacgaaaaagacgtaatttctataaattaat

SEQ ID NO: 265000 - DNA, 364 bp, Unknown
  Bacterial polypeptide expressing nucleotide sequence isolated from the Sargasso Sea
cttggattttaaagcaatagttacaattaactttgaagataaagagaataataaaaaagctaattatattttatttaatcctgaaattattaaatattcagaggaaactatagtaatggaagaagggtgtttgtccctcccagatcaatatgcagatgtagtaaggcctaaagagattattttagaatatattgatgaaaatgagaaaactataaagaagcaaattgatggctatgaagcaagaattttacaacatgaaatagatcatttatcaggaaaattatttgttgattatttatcttctttaaaaagaaatatgttaataaaaaaagttaaaaaaaaacaacaactaaaaaataagtga

SEQ ID NO: 265001 - DNA, 178 bp, Unknown
  Bacterial polypeptide expressing nucleotide sequence isolated from the Sargasso Sea
tattcaaataggaattccaaagagaattatagttatggatatttcaaaagatgggaataaaaatccaatgtttttcgtaaacccaataataaaaaataaagataaagaaaaaacaacatatgaagaaggatgtttgtccgtccctaattattttgctgaagttgatagacctaaatat

SEQ ID NO: 265002 - DNA, 307 bp, Unknown
  Bacterial polypeptide expressing nucleotide sequence isolated from the Sargasso Sea
ctttattaatccggtaatcgaaaaactttcagacgaaacagaggatgactgggaaggttgtctgtctataccgggaatgtcgggtttagtaagaagatttaaacgaattaagtattcagcaaaagatttaaatggcaataatattgttggtgaagttgaaggtcttcatgcaagagtcattcagcacgagtttgatcatcttaatggagttttatatacttcaagattggctcataaaagtgcatttggatactctgaagaaatcgaaaagttttggaaaaaaaataatgatgaaaacaaaaaataa

SEQ ID NO: 265003 - DNA, 631 bp, Unknown
  Bacterial polypeptide expressing nucleotide sequence isolated from the Sargasso Sea
atgaaaaaagttatagattgttttaaagaagataatcctgtaatacaaaaaaaactaagagaggtatcagttgaagaaggattggaaatcgcaacagaactatttcagatacttaacgaaagaaaagacggtattgggttggcagctaatcaagtgggaattgatgcacaagtggccgttgtcaatgttcgtgaacctttggtactcatcaatccgaagattgtatcaaagacgaatgagataccttattatgaaggttgtttatcttatcctggcaagggatgtcacaccaagagatacgaaacgatagaagtaacaactgaacaaattgaaggtacttggatatttactggcgtcgaagcttcaacagaaggtaaaggtagttgggagcaagacaaagataaacaagacagagaacttagaaccttagaagcagtttgtgttcagcatgagatagaccacctaaatggtatgagaattttagatagacaagtagatactacttatgtcagagaagaaaagaaaataggtcgtaaccaactcgttacaatcaaacgaaacgatgctgtaaaagtattgaagtataaaaaggcacaaaagtttttaaatcaaggatgggaaattacttgaa

SEQ ID NO: 265004 - DNA, 529 bp, Unknown
  Bacterial polypeptide expressing nucleotide sequence isolated from the Sargasso Sea
atggcaattttagagattagaatagttcctgatcctattctaaaaataaaagcacataaaataaaaaaaatagacgattctataaaaacattagcgttagatatgtttgaaacactacaagatgctcatggtgttggtttggcagccaatcaagtaggtgttttaaaaagaattgcagttattcaaacttctttagaagatgaaccaatttatattattaatccagaaattactgaaatgtcaggcgaaagagaagtagaagagggatgtttaagcgtaccaggatatattggaaatatctttaggtcagaaaatgtaaaaataaaagctctaaatttagacggtaaaagaataaaaatagatgctaccggattattagcacaagcattagaacatgagatagatcacttgaatggtattttatacctcgatcatttaaaaagtcatgaaagtctacgaaaaattaccgatgaaactgaaacagatactgaagacgaagaggtaagtgccaaagagactacttcataaa

SEQ ID NO: 265005 - DNA, 291 bp, Unknown
  Bacterial polypeptide expressing nucleotide sequence isolated from the Sargasso Sea
ttaatcctaaaattattcaatattccaaagaaactgttgtaatggaagaagggtgtttatcattaccagaacaatatgcagatgttgagcgaccaaaagagattgttttagaatatattgatgaaaataataatactataaagaaacaaatagatggctatgaggccagaattttacagcatgaaatagatcatttgtcaggaaaattatttgttgattatttatcttctttaaaaagaaacatgttaataaaaaaagtaaaaaaaatgaaaaatgtaaaaaataaatgaa

SEQ ID NO: 265006 - DNA, 399 bp, Unknown
  Bacterial polypeptide expressing nucleotide sequence isolated from the Sargasso Sea
tatgacaatcttacctatcaggatatttccagatcctattcttagacaaaagactgaagaaataaaagaaattaataaagaattaattgattttggatttaacatgttggaaactatgcaggctgcaagaggaataggtttagctgcaccacaagttggaaaattagtaaaattgataacaattcaaattcctgaaaatgaaccaatgataatgtttaatcctaaagttgagaaatcttttgggaaacgaaatgtggaagaaggttgtttgagtgtcccaggattcactggaattattgaaagatctgtaactatagatgcctcatatttagatcagaataaatcaaaaataaaactaacagcttcagaacttttatcgcaggcgattgagcatgagat

SEQ ID NO: 265007 - DNA, 241 bp, Unknown
  Bacterial polypeptide expressing nucleotide sequence isolated from the Sargasso Sea
aatggaagagggatgtttatcgctacctgagcaatatgcagatattgaaaggtcaaaacaaattgttttagagtatattgatgaaaatgaaaaaataataaaaaaagaaatagatggttatgaagccagaatattgcagcacgaaatagatcatttatctggaaaattatttgtagattatttatcttctttaaaaagaaatattataataaaaaaagtgaaaaaattgaaatattcatga

SEQ ID NO: 265008 - DNA, 214 bp, Unknown
  Bacterial polypeptide expressing nucleotide sequence isolated from the Sargasso Sea
tttgcagaaattgagagacctcaaaatatagtagtagagtacttagatgaaaataataaacaaataacaaaagaagttagtggagtggaatcaagaattttacaacatgaaattgatcatctttctggaaagttatttgtagattatctttcttctttaaaaaggaatataatgatcaaaaaagtacaaaaatttttaaaaaacaaaaaataat

SEQ ID NO: 265009 - DNA, 345 bp, Unknown
  Bacterial polypeptide expressing nucleotide sequence isolated from the Sargasso Sea
atttccctagaatttttgttaatggtaatattaaagattttgatggtgaaagtactttttcagagggttgtttatccataccccaagttgcattagaggtcgttagaccagaaaaaattatatttaaatatcaagatatgaacgagaaatggcatgaggaagaatttgatggcttattggcgcgtgctattcaacatgaaatggatcacttgaatggtgttttaactattgatttagtaagtgaaatacaaagagaaaaagttcagaaagatataaataaaattaaaaatgattctatttctcggataaaacaaaattctggtaacaaaaggttcgttttatagg

SEQ ID NO: 265010 - DNA, 252 bp, Unknown
  Bacterial polypeptide expressing nucleotide sequence isolated from the Sargasso Sea
gatgagccaaagaaaaataattatagaacctgatcctatcttaagaaaaaaaagcgaactagtagaaaaagtagatcaaagtttaaaaaaacttttagatgatatgttagaaactatgtatgcagcaccaggcattggtttagcagcaattcaaattggtatcccaaaaagattaattgttctcgatgtctcaaaagaagatcataaaaaagatccattatatcttattaatccagaaattacatttacttc

SEQ ID NO: 265011 - DNA, 160 bp, Unknown
  Bacterial polypeptide expressing nucleotide sequence isolated from the Sargasso Sea
aatcttaaagcaaaaggactactttcaacctgtattcagcatgaaattgatcacctaaatggcactttatttattgattatttgtcaaaaataaaaagagatatgattttaaaaaagttagtaaaatataaaaaagaaaataataaatttgttctttaat

SEQ ID NO: 265012 - DNA, 388 bp, Unknown
  Bacterial polypeptide expressing nucleotide sequence isolated from the Sargasso Sea
ttgggcagcaattcaagtcggtatcttaaaaagggtagtagtagtagatatttcaaaagatgatcaagaaaagcatcctttattctttgtaaatcccgaaataacttatcgatctaaagaaacatcagtatatgaagagggatgtctttctttacccggacaatttgctgaaattgaaagaccagcagagtgtcatttgaaatacattgattttaatggaaaagaaaaagaattaaaagctgatggtctattatcaacttgtatccaacatgaagtagatcatttaaatggagttttatttattgattatctgtcaaaacttaaaaaagatatgattattaaaaaactcttaaaacataaaaaagatattgaaagagtaatagtttaa

SEQ ID NO: 265013 - DNA, 232 bp, Unknown
  Bacterial polypeptide expressing nucleotide sequence isolated from the Sargasso Sea
ctgccccttgccatccagaagtacccccacgtgtcgctgcgaaacgacaacaagatcatcggggtcttcgacgccgagctcgagaaactcgcgcaggcgatgttcaagatcatgtacgagaccgaaggcgtcggtctggccgccccacaggttggcgtgaactacaggatgatggtgtacaacgaggctggcgagcccggacgggggaaggaggtcgtgttggtcaatccca

SEQ ID NO: 265014 - DNA, 400 bp, Unknown
  Bacterial polypeptide expressing nucleotide sequence isolated from the Sargasso Sea
atgtcaattttaaaaatagctaaattaggtcacccagtattacttgaaaaggctagtgctgtaaaaaatattcatcaaccatttatcaaacaaattattgatgatatggcccaaactatgcttgatgctaatggaatagggttagcggcccctcaagttcatttaagtaaacaaataattgttttccgaacctttgaagatgaacaaaatactgaaaaaagtgaagataaaacaattaaagttacagcattaattaatccaaaaataaataatatttcagatgaaactaataatgagtgggaaggctgcctttccataccaggaatgctaggtcttgtaaaaagatataataaaattgaatatgagggattagatgtgaaaggcaatattgtaaaagaaa

SEQ ID NO: 265015 - DNA, 187 bp, Unknown
  Bacterial polypeptide expressing nucleotide sequence isolated from the Sargasso Sea
atatttagattataatggagaaaataaaattttagaagctgatggtctccttgcaacttgcatacaacatgaaatggatcatcttgaaggaattctgtttatagactacttgtcaaaattgaaaaaaacaatgattgttaaaaaattatcaaaaagaaaaaatccccctgatagaattattgtttaa

SEQ ID NO: 265016 - DNA, 166 bp, Unknown
  Bacterial polypeptide expressing nucleotide sequence isolated from the Sargasso Sea
aaataaaattttagaagctgatgggctccttgcaacttgtatacagcacgaaatggatcatcttgaaggaattttatttatagactacttatcaaaattgaaaaaaacaatgattgttaaaaaattatcaaaaagaaaaaatcctcctgatagaattatcgtttaa

SEQ ID NO: 265017 - DNA, 459 bp, Unknown
  Bacterial polypeptide expressing nucleotide sequence isolated from the Sargasso Sea
tatgaccgcaaaaagcgtagttcattacggtaatccaatacttaaaaaaaagtgtaagccggttacagattttagcaatttagatcctttgatcgatgatatgtttgacacgatgtatgaggaaaatggcataggtttagcagcaaaccaaatagatgtagatttacaattgtttgttgtagatatttcagacatagatgaagagggagaatctattcatgtttttgctaatgctgaaattgttgaagctgaaggtgaatcttggatgaacgaaggttgtctatctgttcctgatgtaagattagatgtaaaacgtccaaataaaatcacactaaaatatcaagatagatatggtaataaattcacaaacgagtttgatgctctattagccagagtaattcagcatgaagtagatcatttaaatggaaatttgattatcaatagagtgtcaaaagctga

SEQ ID NO: 265018 - DNA, 313 bp, Unknown
  Bacterial polypeptide expressing nucleotide sequence isolated from the Sargasso Sea
ccaacagtaacttttttaaatgatgaaaaatgtagtttcaatgaggggtgcctaagtatcccagatataagggaagatattgaaagatttgattcaattaaaattgatttcttagatgaagaatttaattcacactctttagattttaatggaattttatcaagggttattcttcacgaatatgatcatattcaaggtattttattcactgataaaatatcaaaattcaaaagaactttgattcaaaaaaaattaaataaaatttctcgcggacaaattgatgttaattatcctatgaaattttcaaaataat

SEQ ID NO: 265019 - DNA, 625 bp, Unknown
  Bacterial polypeptide expressing nucleotide sequence isolated from the Sargasso Sea
tctgagcgagcacacacagaaaatcattacagatctcaaggacacggcaaatgcgattccctgcgccggaattgccgcgaatcagatcggttactctgagcgtgtgtttgtaggctataaagataatcagcttgagacatactcgatctacatcaaccccaaaatattgaaaaaaacagagtcttctgtcagaaaaccctacccttcggcacaggactattactcagacaatgacgatctgcatcgagactgcagtatggaggcctgtctcagcattccggaggttaacatgactttccagaggtatgacacaatatctgttgaatatcaggatgaggaaggtatagtgcgcaatgaagaaagatctggctttctctcaaaactctttcagcatgaacttgaccatctaaatggactgacagtggcgaatcgaattatttactccattcacaagaaaaaagagggtgcgtttttccccgcggtagagtccgtcaaggatgaaaacaagatcaaggactttgtaaataacagagaaaaagtgtttaaatacctatacgactatatgctggcgaatctattgtgttcgtgctatttgaataaattgcactgctccgattgtatttag

SEQ ID NO: 265020 - DNA, 426 bp, Unknown
  Bacterial polypeptide expressing nucleotide sequence isolated from the Sargasso Sea
aatggcactgcttaatatttttactttccctgatccggtattgagggaaaaagctttaccggtaacagactttgataaaagccttgataataccgcgcaatccatgctggaaacaatgtacgtgtccagcggaatcgggcttgcagcgatccaggcaggtatccttaaacaaataatagtgatcgatttaaaaagtggagaggaagacattagtctcagggaaccacatatctttgttaatccaaaaatattaaagaaatacgggtctactgtctccgaagaaggctgtctcagcgtgattgattttaggagtgatgttgagcgtgctgaaaaaatttcggttgaataccaggatgtaaaggggaatatccataaaatggaagctgaagaaatgatgtcaatttgtcttcagcatgaaatcgatca

SEQ ID NO: 265021 - DNA, 580 bp, Unknown
  Bacterial polypeptide expressing nucleotide sequence isolated from the Sargasso Sea
tatggctgtaaaagaaatagttcaagtttgggatggtaaagaaatcatacgagataatgtagagttcttaatggagcctacaaaaaaagtaaactttccattatcaacaaataccaaagaaatcatttccgatctaattgatacgtataacgcaacaccttgtgcaggagttgcagcaaatcaaattggttataataaaaatatctttatcggaaaaaaaaatgacttagaccatgataaagacttcattatacatatcaaccctaaaatagataaaactagtgatgattcaatgcaaagcggtccggaagggtgtttaagcatccctgagaaaacatttatcatgccgcgctttgataaaataaccattcgtcgatatgatgagaatggtagaaaacaggttgataaattgaatggatttatctcgagattatttcaacatgagattgagcatttgcagggtagactgatgatcggtggaaagattcatgatgagatgccagtagataaagccgttgaaaagatatatgatgagttatctaattattattctcagcatgataatgatttaaaaatttga

SEQ ID NO: 265022 - DNA, 214 bp, Unknown
  Bacterial polypeptide expressing nucleotide sequence isolated from the Sargasso Sea
attaagcgcccacctctgttcagttcgatggctagatcggaatggaaatgagcaagaacaagaatttgatgggctatggtctacttgcgttcaacatgagatcgatcatttaaatggaaaacttttcatagattatattggtacaataaagagacagttgattaccaggaaaatgcaaaaattcaagcgtgaaatggagcgaaaagaaacatag

SEQ ID NO: 265023 - DNA, 367 bp, Unknown
  Bacterial polypeptide expressing nucleotide sequence isolated from the Sargasso Sea
tatggcagttaaacctattcttacagagcccaataaacttttaagacaagtttctaaacctgttaataaagttacaaaagatgagcaaaaattaatggatgatatgctggatacgatgtatgcagcaaatggaataggtcttgctgcagttcaaattggtgtaccaaaaagaataattgttatggatattagtaaagatccaaagacaaaagagccaaggtattttgtgaatcctgttataaagaataaagactcacttaaagcaacttatgaagaaggatgtttatcagtaccaaatcaatttgctgaaatcgatagaccaagtcaatgtgatgtggagtatctggattataatggtgaaaaaaaa

SEQ ID NO: 265024 - DNA, 205 bp, Unknown
  Bacterial polypeptide expressing nucleotide sequence isolated from the Sargasso Sea
aaaagatgttaatggaaataagtttaactcagaagcatcagaacttttagctgtttgcatccaacatgaaatagatcatcttgatggcaagatttttgttgattatctatcagacatgaaaagatccaagatagagaaaggtttaataaaacaaaaaaacaataatacaagcccacaaagaacagagaatccatatactaaatga

SEQ ID NO: 265025 - DNA, 175 bp, Unknown
  Bacterial polypeptide expressing nucleotide sequence isolated from the Sargasso Sea
agaagcttcagaattattggcagtttgtattcaacacgaaatagatcatcttgatgggaaaatatttgtcgactatctatctgtcatgaaaaaatctaagattgagaaaggtttaattaaacaaaaaaacaataaaacctgcactcaaagaaaagagaatccatatatcaagtga

SEQ ID NO: 265026 - DNA, 394 bp, Unknown
  Bacterial polypeptide expressing nucleotide sequence isolated from the Sargasso Sea
tatgatattaaaggaagataaatttcttcagtttaatgaagagataaaacaacgaggtggttgtaagaaggtttcatttgaagaaggggaacagatagcagctgaattgttagaagaactaacaaagagtaaatcaggtgttggattagctgctccacagattggatatgatgcacaagtaatggttgttaatgtaaagaaacctatggtattcattaatcctactatactcagccttgatgatgaaattatctacaaagaagcttgtttatcatttcctaataagtatatcaatactcacagacataaatggattaatataaaagctgataactttgaacaacattataattgtggtggtagtatggtgtttggtcctaccaatgaacatatg

SEQ ID NO: 265027 - DNA, 262 bp, Unknown
  Bacterial polypeptide expressing nucleotide sequence isolated from the Sargasso Sea
agtttatttgaatccgaaaatcattgattattcaacagaaaaacaaacttatcgtgaaagttgtttgtcaatacccaatagaacagaagtcttagatagcaagtctaaaactattgtaattgaatatgatacaatgaaagaagagcataaaaccgatacaatatcagattttacagctgtaatttttcaacatgaaatagatcatttaaatgggatattgtacctagatcatctaaatcaagaagtaaaagatgcagaataa

SEQ ID NO: 265028 - DNA, 526 bp, Unknown
  Bacterial polypeptide expressing nucleotide sequence isolated from the Sargasso Sea
tatggcagtaaaaaccattttaacagaaccaaataaaatattacgtcaggtttcacttcctgttgaaaatgtgagtaatgaagaaagacgattaatggatgatatgcttgaatccatgtatcatgcgaaaggaatcggtttagctgcaattcagataggggttccaaaaagaattattgttatggacctatccaaagaagaaggagaaaaagatccaaaatattttgttaatccagtaataaaaaatagaaactcaaatttatcaaaatatcttgaagggtgtttgagtttgcccgatcaatttgctgaagttgatagaccaagtacctgcgaagtagaatatttagattacaatggaaacaaaaaaatattaaaagctgacggtctgcttgcaacatgtatccaacacgaaatggaccatttagagggaatattatttattgaccatttgtccaagttaaaaaaatccatgattataaaaaaactatcaaaactaaaaaataaagaagacagaatagttctttag

SEQ ID NO: 265029 - DNA, 397 bp, Unknown
  Bacterial polypeptide expressing nucleotide sequence isolated from the Sargasso Sea
gatgacaatacttaaagttttgcattttccagacgaaaggctccgattaaaagccgttccagtcacggaaatcggaccggaaatatgtgttattgccgaaaatatgcttgaaaccatgtattcggaaggaggtattggtttggcagcaacccaagttaatatacaagaaaggattgtggttattgacctatctgaagataaaaatgaaccaataattctaatcaatcctgaaatattaaaattggagggaaaggaagttacgcaagaaggttgtttgtcagtgcccgattattttgatgttgttgaacgtgcaaaaaatatagagtttcgttactccacaatcaaaaatgaaatcattacaaaaaaagttgatggtcttttagcaatttgtatacaa

SEQ ID NO: 265030 - DNA, 309 bp, Unknown
  Bacterial polypeptide expressing nucleotide sequence isolated from the Sargasso Sea
tatgtctatattgaaaattgctaagttaggtcatcctatattattaaaaaaaggtgcagaaattaatgaattttcaagtgattcattaaaaagaattatatacgatatgtctgaaaccatgattgattataatggaattggattggctgctccacaagtgcatctatcaaaaagaataattatttttagaaatcctgacattgaagaaaaagaaaaaatacaaatcactcccttaataaatcctatttataaacctttaagtgaagaaaaagagatgattggggaagggtgtttatcgatacctggaaa

SEQ ID NO: 265031 - DNA, 252 bp, Unknown
  Bacterial polypeptide expressing nucleotide sequence isolated from the Sargasso Sea
atgaaaagggtggttacgacgaaggctgtttatctattccaggattttacgaagaggttgtgcgtcctttaaaagtagaaataagatttcaagatctagacggcaaagaaaaaaaaataatacctgaagggctccttggtgtcgttgtccaacacgaaacagatcatttagatggaaaattaatggtcgactacatttcatctgttaagagacaacgtattcgatcaaaacttttaaaacaaaaaaaataaa

SEQ ID NO: 265032 - DNA, 583 bp, Unknown
  Bacterial polypeptide expressing nucleotide sequence isolated from the Sargasso Sea
aatggctattcttaaaatcacacgtatggggcaccccgttctcaaaacacgcgctcaggaaattcctgatccgactgctcgtgagatacgtactttgattgaggatatgcatgaaaccttggatgatgtccaaggtgcaggtcttgccgcaccgcaagttcatgtaagcaaaaggttggtaatttttgctgctccgagagagcatgacgaagatgaaagcatccctgaaacggactttacgccgatgactgaaatcatcaatccagaatggcatcctctatcagatgatatggcgttaggttgggagggatgtctttccgttccaggtttaaccggagcggtccctcggcatactcacatccgttatcgcggttattccccgcaaggtagtttgattgaacgaaatgcaacgggttttcatgctcgagtattccaacacgagtttgatcatttggatggtattctttatccgatgagaatgaatgacctttctctacttgtttttaccaaagaagcaaagaggtttggtttaccgtcgttgctgattggcaaagatagcggtgatgaaaggggtgaagcataa

SEQ ID NO: 265033 - DNA, 250 bp, Unknown
  Bacterial polypeptide expressing nucleotide sequence isolated from the Sargasso Sea
tttcttgagagggctgtctttcatccctgatcaaaccgccgaggtgaaacggcccgccgaagtgtcgataaaatttctggatgaaacaggcgcaacgcaaacattaacagctggtgggctattggccgcttgtatccagcatgaaattgatcatttgaatggtgttttgtttattgatcacatctctcgccttaaacgcgatatgatcacacgcagggtgatgaaagaattgcgccagacaaccgcttga

SEQ ID NO: 265034 - DNA, 244 bp, Unknown
  Bacterial polypeptide expressing nucleotide sequence isolated from the Sargasso Sea
cttgagtatacctggcgtctatttgaatgtagtaagaccatcaactatcaaattaaaatttagagatgaaatggggagaccacgtaaaatgaaagcagatggacttctggcgaggtgtattcaacatgaaatggatcacttaaacggaatattatttgttgatagagttacatcaaaagatgatttgaacaaagaacttataaaggaagggtttaacgaaaaagacgtaatttctattaattaa

SEQ ID NO: 265035 - DNA, 213 bp, Unknown
  Bacterial polypeptide expressing nucleotide sequence isolated from the Sargasso Sea
tagattttaataataagcgaatagagtttgaagcaaacggtttactagcaacatgtattcaacatgaaattgatcacttaaatggaaaattatttgttgatcatatttcagcgctcaaaagaaataggatagaaaaaaaaattaccaaattaaaaaaagaaggaaatctttcctctagaaaaaatactccaaattataaatcagcgatttaat

SEQ ID NO: 265036 - DNA, 526 bp, Unknown
  Bacterial polypeptide expressing nucleotide sequence isolated from the Sargasso Sea
atgtcaaagagaagaatattaattgagcctgatccaatattaagaaaaaaaagtcagaaactagaaacagttgacgacggattgagaagattaatggatgacatgttagaaacaatgtatggagctccaggtataggtctggctgcggtgcaaataggaattttaaaaagattagtagtcatagacatctcaaaagaagatcaaacaaaaaaacctttattttttgtcaatccaataattacctataaatcggaaaatacatctgttcatgaggagggctgcttatctttaccagggcattttgcagaaattgagagaccatctgagtgttacgtagattacatagattattatggcaaaaagaaaactttaaaagcatcgggacttttagcaacgtgtattcagcacgaggtggatcatttaaatggaatattatttattgattatctatcaaagcttaaaaaagatatgattataaaaaaacttttaaaacaaaaaaaagaaatcggaaaaattgttctttaaa

SEQ ID NO: 265037 - DNA, 373 bp, Unknown
  Bacterial polypeptide expressing nucleotide sequence isolated from the Sargasso Sea
atgtcaaaaaaaaaaattataattgaaccggatccgatattgagaaaaaaaagccagagactagaaacagttaatgacgaattaagaaaattaatggatgatatgttggaaacaatgtatgatgcaccaggtataggtttggctgcagttcaaataggaattttaaagagagttgtagttattgatatctcaaaagcagatgaaaaaaaaaaacctatttttttaattaatccttcaattacatataaatctaaaagtacctctgttcacgaggaaggatgtttatctttacctgggcattttgcagaaattgaaagaccagctgaatgtcaaattgattttattgactattttggtaagcagaaaagctaaa

SEQ ID NO: 265038 - DNA, 347 bp, Unknown
  Bacterial polypeptide expressing nucleotide sequence isolated from the Sargasso Sea
aatgtctcaaagaaaaattgtaatcgagccagatccaatcttaaggaaagaaagcgaacctatagaaaaagttgataatgatcttaggaaattattagatgatatgttggaaactatgtatgctgctcctggtataggtttagcagcggtgcaggttggtattttaaaacgtttaattgttatcgatatctcaaaagataaagaaaaaaaaaatcctctatttttaataaatcctgaaatagtttccaaatctaaaaacacctctatatatgaagaaggctgtttatctttaccgggacactttgctgaaatagagagaccagcagaatgtcagattaattttttag

SEQ ID NO: 265039 - DNA, 397 bp, Unknown
  Bacterial polypeptide expressing nucleotide sequence isolated from the Sargasso Sea
atggctatacttaaagtattacattttccggatgaaagacttcggttgaaaggcgtcacaattgaggaaattgattctgaaatagccagcctagctgaaaatatgctcgaaacaatgtatttagagggagggattggattggctgcaacccaggttaacattcaaaaaaggattgttgtcatcgatctatcagaaaataaagacgacccactgatcttaattaatccaaaaatatcaaaactagagggaaaagaaattacccaagagggttgtctttccgtacctgagtatttcgataacgttgagagagcaaaaaatatcgaatataactacgaaacacaaaataagaaaactattgtagcaaaagccgaaggtttattagctatatgtatacaac

SEQ ID NO: 265040 - DNA, 532 bp, Unknown
  Bacterial polypeptide expressing nucleotide sequence isolated from the Sargasso Sea
tatgtctattctcaaaatatcaaaaatcggtcatccaatcttgctaaaagaatgttctgagataaaagaattctcttcagattctctaaaaaaaatagtttatgatatgtctgaaacaatgcttgactatagtggtataggtttagctgcaccccaagtacatatttcaaaaaaaataatagtatttcgtaatcctgataatgaagagaaagataaaattgagataacaccattaataaatcctatttttacacccatgggaaaagaaactgaggatgattgggaaggttgtttatcaatacctggtatgcagggtttagttagaagatttaaaaaaataaaatattctggatttgatcttgatggtaaagaaattgaaaatgaagttgaaggtctacacgcaagggtaatacaacatgaggtagatcatttaaatggagttttatatacatcacgcttagcacataaaaatgcttttggttttgaaaaagaaataactatatattggaaaaatgaacaaaacagaaaataa

SEQ ID NO: 265041 - DNA, 496 bp, Unknown
  Bacterial polypeptide expressing nucleotide sequence isolated from the Sargasso Sea
aatggaagaaatagtaatatttggacatccatcattaagaacaaagtcttcagaaataactgaatttaataatgagttagaaaaactatccgaaagaatgataaaaataatgtatgaagcaccgggagttggtttagctgcgcctcaaattggaattaataaaaatatatttgtattcgatgcgggtgatggtccaaaaactgcaataaatccgactaaaattgaagtagaaggaagtgctgtatttttagaaggatgtttatctcttcctggttattactgggaaatcgaacgacctgaattcgcaaaaatatattgtcaaagtcttaatggtgaacctataacttatgaaggtgatgaactaactggtagggtattacaacatgaatttgatcatttaaaaggaaagttattactttcatctctaactagaaaagaaagaaaagaggcaattaaaaaaataacagtgaacggttttccaggcgatgacatataa

SEQ ID NO: 265042 - DNA, 289 bp, Unknown
  Bacterial polypeptide expressing nucleotide sequence isolated from the Sargasso Sea
atttaacccaaatattgtttcatactctcaagaaaaaattgtaatggaagagggttgtttatctcttcctgaacaatttgcagaaattgagaggcctcaaaatatagtaattgagtacttagatgaaaacaacaaaaaaataacaaaagaagttagtggagtggaatcaagaattttacaacatgaaattgatcatctttctggaaagttatttgtagattatctttcgtcattaaaaaggaatataatgatcaaaaaagtacaaaaatttttaaaaaacaaaaaataa

SEQ ID NO: 265043 - DNA, 644 bp, Unknown
  Bacterial polypeptide expressing nucleotide sequence isolated from the Sargasso Sea
aatgaaaaaagtaattaattgttttaaagaagataatccagttttaaagaaaaaactgagaaaggtgtctgttgatgaaggacttaaaatcgcagaagagttattcaggatacttaatgagagaaaagatggaattggccttgcggctaatcaggtgggtattgatgctagtgttgctgttgttaatgttcgtgaaccattaatattaattaatcccgttattaaagagcaatgggatgagatagattattatgagggatgtttaagttatccaaaacaaggtatccatactaagagatacaagaatataataatacaaactgaacaagaagaaagtggatggtattttagtggagcagatagtggtgaggaatctaaaggtagttgggaaacagaacagaaagaaaatgataaagaacaaagaatattagaagccatatgtgttcaacacgagatagatcatttaaatggaatgactatccacgatagagaaaacaaaccaaaaccaatagtaaaaaagaaatcttatggaagaaatgaaaaggttgaaattacagatggtaaaatattatcaacaatgaaatacaaaaaagcaaaaccactattagatagtggtctatgggaaatttatgtaggaggcccgt

SEQ ID NO: 265044 - DNA, 574 bp, Unknown
  Bacterial polypeptide expressing nucleotide sequence isolated from the Sargasso Sea
atgataaagcctataattgcatatggtgatccaatattaaagaagaaagcttctgaaatcaatattgataaacctggtgagttgaaatcactaataaaagatttgtgggacactatgtataacgctaaaggagttggaatagcagctccacaaattggtatttctaaatcaatttttgttgctgatttttcattttttaaagatgaagataatttttttgcaaatgaattaataaatatgaaacaggtatttataaatccaaaaattattaaagaaaaagggcattattttacttaccctgaaggctgtttaagcataccaaacatttcagaaaatgtaaaaagaaagagtagattaaaaatcaaattttttgatgaaaatttattagatcatgaaatggattgctcaggaattattgcaagagtaattcagcacgagtatgaccacttacaaggagttttattcactgataaactttcatataaagaaagaaaaaaaattagagaagaactaaacttgatatcaattggagatattgaagaaaaatataaaatgagtttttttaaaaaataag

SEQ ID NO: 265045 - DNA, 367 bp, Unknown
  Bacterial polypeptide expressing nucleotide sequence isolated from the Sargasso Sea
aattttaaaacgtgtaattgtaattgatatttccaaaaatgaagaaaaaaaaaaccccctttttttaataaatccagaaataatttctaagtctaaaaaaacttctgtttatgaggaaggctgtctctcactgccaggtcattttgcagaaattgaaaggccagcggaatgtcaaattaaatttgttgattataatggaaaagaaaaagaattgttggctaacggacttttagcgacttgcatacagcatgaagttgatcatctcaatggcgttttatttattgattatttatctaaattaaaaaaagatatgattatcaaaaaattaattaaacataaaaaagaacttaataaagttgttttatag

SEQ ID NO: 265046 - DNA, 389 bp, Unknown
  Bacterial polypeptide expressing nucleotide sequence isolated from the Sargasso Sea
ccctcaagttcatataaataaaagtatatttgtttttaggaatccagaaaatttaaaaaaggattctaatatcgaagtttcagcaattattaatcctacaattgaaacaattggagataaaaaaaatgatgactgggaaggatgtttatcaattcctaatatgttaggtttagtaagacgcttttcggaaatccaatatacgggatatgatatatttggcaataaattacaagtaaaggctaaaggtttacacgcgagaattattcaacatgaatttgatcatttaaaaggtgttttatacaccaaacgtttagctcacagagatgcttttggttttgaaaatgaaatagaaagatattggaaaaaaaaagaaaatgaaaaaaaataat

SEQ ID NO: 265047 - DNA, 625 bp, Unknown
  Bacterial polypeptide expressing nucleotide sequence isolated from the Sargasso Sea
atgagcaagcacacacaaaaaatcattacagatctcaaggacacggcaaatgcgattccttgcgccggaattgccgcgaatcagatcggttactctgagcgtgttttcgtaggctataaagataatcaacttgagacatactctatctacatcaacccaaaaatattgaaaaaaacagaatcctctgttagaaaaccctatccatcggcacaggactattactcagacaacgacgctctgcatcgtgattgcagtatggaggcctgtctgagtattcctgaggtcaatatgaccttccagaggtatgacacaatatctgttgaatatcaggatgaggaaggtgtattgcgcaatgaagaaagatctggctttctctcaaaactctttcagcatgaactcgatcatctaaatggactgacagtagcaaatcgaattatttactccattcacaagaaaaaagagggtgcgtttttccccgcggtagagtccgtcaaggatgaaagtaagatcaaggactttgtaaataacagagaaaaagtgtttaaatacttatacgactatatgctagcgaatctattgtgctcgtgctatttaaataaattgcactgctctgattgtacttagt

SEQ ID NO: 265048 - DNA, 298 bp, Unknown
  Bacterial polypeptide expressing nucleotide sequence isolated from the Sargasso Sea
taatttatataatccacatataatatcatactcaaaagaaactgttataatggaagaaggctgtttgtcacttccggaacaatttgctgaaatagaaagaccaaaaaaaatttcttttgaatatttagatgataaaaataaattagtaaaaaaagaagcagatggaatagaagcaagaattcttcaacacgaaattgatcatctttcaggaaaattatttgttgactatctttctgctttaaaaagaaatattattattaaaaaagttaaaaaaaaattgaaaaataaaaataaatga

SEQ ID NO: 265049 - DNA, 395 bp, Unknown
  Bacterial polypeptide expressing nucleotide sequence isolated from the Sargasso Sea
aattgatgtagatctccaattattcattgttgatatttctgatatagaagaagaaggtgaatctatacatgtgtttgcaaatgccgaaattattgattctgatggtgaatcttggctaaacgaaggatgcttatcagtccccgatatacgtttggatatcaaaaggtcaaataaaatcactcttaaatatcaagatagaaatggtaaagcattttcaaaagaatttgatgggctattagcacgagtaatccaacatgaaatagatcatcttaatggcaatttaattatagatagagtttcaaaagctgaaaaaattggcataaataaagatttaaaattgattaaagaaaattcacttagaaagttggaatctggaagggcttccacgctatagt

SEQ ID NO: 265050 - DNA, 247 bp, Unknown
  Bacterial polypeptide expressing nucleotide sequence isolated from the Sargasso Sea
atgaatgaaattgtaacttttggtcatccatcccttaaatctaaatcagtaaatattactgaatttgatgaagcactaaaaaaattatcagagagaatgataaaaattatgtatgaggcacctggagtaggtctagcagctccacaaattggtataaataaaaatatttttgtttttgatgctggagaaggtccgaacgtagcagtcaatccaaagaaaatcgaagttgagggttctgcaatatttt

SEQ ID NO: 265051 - DNA, 310 bp, Unknown
  Bacterial polypeptide expressing nucleotide sequence isolated from the Sargasso Sea
agtttttataaatccctcggttgagaaaatttcagatgaaacagaagatgattgggaaggttgtttatcaattcctggtatgtcaggtttagttaggcgatataaacgaatcaaatactcagctgtggacttaaatggtaaagatataacaggtgaggttgaaggattacatgcgagagtaattcaacatgaatttgaccatcttaacggtattttatatacatcaagattagcacataaaaatgcatttggattttcagaggaaatagaaaaattttggaaaaaacatcatgatgaaaactcaaaataa

SEQ ID NO: 265052 - DNA, 205 bp, Unknown
  Bacterial polypeptide expressing nucleotide sequence isolated from the Sargasso Sea
tatgacaataaaaagaattcttactgctccagacccttttttgaagcagatatctaaaccagtggattctgtgaataaagaaatacaggttctaatggatgatatgttggagacaatgtatgatgctccaggcattggtttggcagcagtacaaattggtgttccattaagggtcattgtaattgatattgcatggagaaacgaa

SEQ ID NO: 265053 - DNA, 363 bp, Unknown
  Bacterial polypeptide expressing nucleotide sequence isolated from the Sargasso Sea
ttaaacgtttgatagtaattgatatttctgtagataaagaaaaaaaaaatcctttatttttagttaatccagaaataatttctaaatctaatgatacgtctgtttatgaggaggggtgtttatctttacctggttattttgctgaaattgaaagaccagctgaatgtcaaataaaatatgtagattataatggtaaaaaaaaagagatgaaagcaaacggactcttagcgacctgtattcaacatgaagtcgatcatttaaatggtatattatttatagactatttatcaaaattgaaaagagacatgattataaaaaaattagtaaagaataaaaaagaattaaacaaaattgtactttaat

SEQ ID NO: 265054 - DNA, 229 bp, Unknown
  Bacterial polypeptide expressing nucleotide sequence isolated from the Sargasso Sea
caatttgcagaggtaaaaagaccaaagtcatgtaaaataaattttttagattatgatggaaaaaaacaagagttaagcgccgaaggtcttctagctacttgcatccaacatgagattgatcatctaaatggaattttatttattgaccatttatcgaaacttaaaaaagatttaattttaaaaaaaaacaaaaaacaaaacaaagaaatcgatagggtggtagtttaac

SEQ ID NO: 265055 - DNA, 346 bp, Unknown
  Bacterial polypeptide expressing nucleotide sequence isolated from the Sargasso Sea
aatggccaccatgccgatagtctgggctccagaccctgtgcttaaaactaaatgcaacccagtaaatacaatcgatgcaactattcttagtctcatggacaacatgctggaaacgatgtaccaagctcctggggttggtcttgccgctccacaagttggaataaaacaaagaattattgtgattgactgttcatccaaagacgaggctccccagccctatcgaatggtcaatccagaattagtttctgtatctacggaactttctacgcatgaagaaggttgcctttccctacccggtttttatgccgagattactaggccagcagaagcaagagttagctacacc

SEQ ID NO: 265056 - DNA, 496 bp, Unknown
  Bacterial polypeptide expressing nucleotide sequence isolated from the Sargasso Sea
catgcgtatcacgcaatacggggaaagcatcctccacaggaagggaaaagccgtcaccgacttctcccccgagctcgccgggttggtcgacgaaatgatcgccgctatgcgccgggccgagggcatcggactggccgcccagcaagtgggcgaagccctccgcctgtgcgtcctcgaggttcccgatcaccccgactacccgatagcttgtattctggacggcaagcccctctcccctgccctcctcatgcccatgcccatggccaacccgaaaatcgagtttcttcccggggacgagttctactacgaggaaggttgcctctccttccccgagatccggggggacgtggcccgaccggaacgaatccgagtcgagtaccaagacctagacggcgccccgcacgtcctcgagtgcgatggtttgctcgctcgctgcatccagcatgaggtcgaccacctggacggaatcctcttcatcgaccgtaggagaaggccc

SEQ ID NO: 265057 - DNA, 559 bp, Unknown
  Bacterial polypeptide expressing nucleotide sequence isolated from the Sargasso Sea
tatggccgtattaaaaatagccaaactgggaaaccccgtattaaggcagattgccaagccggtagacctaaatgaactggttaacccagatagcagtttacaggagtttatcgatgacatgattgaaacaatgcatcatgaggggggggttggactggcggctcctcaggtaaatcgctccattcaaattgtagtgctagaatacgccgaaaatgaaagataccctaatgaggtatctataccccttactgttctggttaaccctgtactttccaaatatagtgaagaaacaaaagatggttgggagagttgcttgagtttagtagactttcgtggattggtgtcaagatccactaaaattacattagatgcctatgaccgccagggaaagaaaatcaataaaacggtttcagattttgaagcggtggtattacagcatgaaattgatcatctcaaaggatttgtttttctagatcgtatgaaagattttaagcaactatcttatcaagaggagtttgaaaggttttggttaaaaaaggaagatgcgccttcaacataa

SEQ ID NO: 265058 - DNA, 378 bp, Unknown
  Bacterial polypeptide expressing nucleotide sequence isolated from the Sargasso Sea
atctgtcgcatagaatgtttatttttagaaatccagaaatagaagatgatgataaaattaacatatcagtttttattaacccagtaattgaaaagctttcagacgaaacagaagatgactgggaaggttgtctttctatcccaggaatgttaggtttagtaagaagatttaaacgaataaagtattcagcgatagatttaaacgggaataatattgctggtgaagttgaaggcctacatgcgagagtcattcaacatgagtttgatcatcttaatggagttctttatacttcaagattagctcataaaagtgcttttggatactctgaggaaatagaaaagttttggaaaaaaaataatgatgaaaacaaaaaataaa

SEQ ID NO: 265059 - DNA, 329 bp, Unknown
  Bacterial polypeptide expressing nucleotide sequence isolated from the Sargasso Sea
aatgtcccaaagaaacatcgttattgaacctgatcctattttgaggaaaaaaagtgaaaacttagaaaaagttgatgatgaacttaagaaattaatggatgatatgttagaaactatgtacgctgcaccaggtataggattagcagcagttcagataggtatcttaaaacgattaattgttattgatatttcaaaaaaagatgaaaaaaaagatccattattcttaataaatccagaaataatttctaaatcaaataatacttcaacttatgaggaaggctgtctatctttaccaggacattttgcagaaatagagagaccagcagaat

SEQ ID NO: 265060 - DNA, 147 bp, Unknown
  Bacterial polypeptide expressing nucleotide sequence isolated from the Sargasso Sea
aaaaaaaaacaggatatgaggctagagtacttcaacatgaaattgatcatttatcaggaaagttgtttattgattatttatctaatttaaaaaaaaacataataataaagcgagtaattaaattaaaaaaaattggtgaaatctaat

SEQ ID NO: 265061 - DNA, 508 bp, Unknown
  Bacterial polypeptide expressing nucleotide sequence isolated from the Sargasso Sea
aaaattgctaaaatgggtcacccaattttacgaaaaaaatctgcagaaatattagatccaaggtcggattcagttaaatatctagttgaggatatgattgaaactttggaggatattcaggggctaggtttggctgcaccacaagttcatgtttctaaaagattagtaattttttattcaccaaatgaaaaccctaatcataataatgcgccattaaatatattaataaatccaaaaattgagcctctaggaactgagatggattatgattgggaggggtgtctttcggtccctggcttaagaggactggtcccaaggtataaaaagatcagatattcagcttttaatgaggaaggtattttttttgatagaatagtagacggtttacactcaagggtagttcagcatgagtgtgatcatttagatggaatactatatgtacagaggatggataaattagaaaatttaatatttgaaactgagatgaagttttataataatctctaaa

SEQ ID NO: 265062 - DNA, 460 bp, Unknown
  Bacterial polypeptide expressing nucleotide sequence isolated from the Sargasso Sea
ttgaatctaaaaaaaatcgtatttgatatgtctgaaactatgctagatgttgatggtataggattggcagctcctcaagtgcacttatcacacagaatgtttatctatagaaatccagaaatagaagatgatgataaaattaatatttcagtctttattaatcctgtaatcgaaaaactttcagatgaaacagaggatgattgggaagggtgtctgtctataccaggaatgtcgggtttagtaagaagatttaaacgaattaagtattcagcaatagatttaaatggcaataatattgttggtgaagctgaaggtctacttgcgagagtcattcagcacgaatttgatcatctaaatggattgctatatacttcaagattggctcataaaagtgcatttggatattctgaggaaatagaaaagttttggaaaaaaaataatgatgaaaacaaaaaataaa

SEQ ID NO: 265063 - DNA, 505 bp, Unknown
  Bacterial polypeptide expressing nucleotide sequence isolated from the Sargasso Sea
atggctttactcaacatcctcaattacccggacaagcggctgcacaagattgcgaagccggtcgaagtggtcaacgaccgcatccgccggctcgtcgccgacatggccgaaacgatgtacgccgcgccgggcgtcggcctcgcggcgacccaggtggacgtgcatgaacgcgtggtcgtgatcgacgtgtcggaaacgcacgacgaactgctcgccttcatcaacccggaaatcatctggtcgagcaacgaaaagaagctctcggaagagggctgtctctcggtgccgggcatttatgacaacgtcgagcgcgccgagaaagtgcgcgtgcgggcgctgaacgagaagggcgagactttcgagatcgattgcgaaggcttgctggccgtgtgcatccagcacgaaatggatcacctgatgggccgtgtgttcgtcgagtacctgtcgtcgctgaagcagacgcgcatcaagagcaagatgaagaagctcgcccacgcgatgtaat

SEQ ID NO: 265064 - DNA, 181 bp, Unknown
  Bacterial polypeptide expressing nucleotide sequence isolated from the Sargasso Sea
gatgaatgaaattgtaacttttggtcatccatcccttaaatctaaatcagtaaatattactgaatttgatgaagcactaaaaaaattatcagagagaatgataaaaattatgtatgaggcacctggagtaggtctagcagctccacaaattggtataaataaaaatatttttgtttttgat

SEQ ID NO: 265065 - DNA, 222 bp, Unknown
  Bacterial polypeptide expressing nucleotide sequence isolated from the Sargasso Sea
tatgatatatcctatttatatgtatggaaatactattctaaagaagaaagcatcgaaggttaaaaaaggtgatattgatattaaaaaactttcagaagatatgtttgaaactatggagttggctgatgggattggtttagcagcaccacaaataggaaaatcaataagagtttttgtagtggatggtacaagtttaaaagatcctaaaatgtctgattttaa

SEQ ID NO: 265066 - DNA, 226 bp, Unknown
  Bacterial polypeptide expressing nucleotide sequence isolated from the Sargasso Sea
tatgaccgttttagaaataaaacttatccctgatcccgttttaagaaaaaaagctgaacctgttaaagttgttaccaatgatattatttctgttttgaatgatatggcagaaacaatgtatgatgctccaggaattggattagcagcaaatcaagttgggattcttaaaaggttaattgttatggattgctcaacagatgatgaagatcccaaccttattaaaatg

SEQ ID NO: 265067 - DNA, 550 bp, Unknown
  Bacterial polypeptide expressing nucleotide sequence isolated from the Sargasso Sea
atggctgttttaaaagttgttcactatggagatcctattttacgaaaagaatgtaaacaggtaacggactataaagttcttccagaaataatagaaaatatgtttgatactatgtatgaggaagagggcataggtcttgcagcaaatcaagttggaattgatatgaaccttatgataattgatgtttcgcatacggatgaagctgaagatgctaatatttttgttaatggtgaaataatagaaagttttggttcttctgaaatggaagaaggttgcttgtctattccagatgttagactgcctgttaaaaggcctgaaaaaattagatttaaatatgaattacctgatggatcagaacacattggtgattttgatggtttacttggaagagctattcaacatgagatggatcatcttaaaggaatttttattattgaccgagttaatcctatattagctatacagtataagaaaaagttaaaagaaattgaaaatagctcaattatcctcaaaaaatctgaaaacaaaaaaagagacttcgtactttaaa

SEQ ID NO: 265068 - DNA, 181 bp, Unknown
  Bacterial polypeptide expressing nucleotide sequence isolated from the Sargasso Sea
gattttaatggcaaaaagcaagagatgaaagcagagggattattatcgacttgtattcaacatgaaatagatcatctaaatggtattctatttattgattatctatcaaaattaaaaaaagatattatagttaaaaaagtttctaaacaaaaaaaagaccaagagagaattgtagtttaat

SEQ ID NO: 265069 - DNA, 505 bp, Unknown
  Bacterial polypeptide expressing nucleotide sequence isolated from the Sargasso Sea
atggctactttaaaaattttaatatttcctgatcctaaattaaggacagtggctaagcctattaaggatgtaaatgattcaataagaaaactatctcaagacatgttagagacaatgtattcaggtgaaggcattggcctagcaggcactcaggttgatgtgcacaaaagaattatagtaatagatgtgagcaacgagaaaaacgatcccttagttttaataaatccagttataaaagaagttattaataatgaaaacaaagcctactcagaaggttgcctttcagtgcccggtatctatgaagaactcgaaagaccaagtgctgtagaagtttctgccctagatcttgagggtaaagaatttacttttattgcggaagatatactctctgttgttatacaacatgaaatggatcacttggaaggtaaaatgatggttgattttctttcaaacctgaaaagagaaatgattagaaaaaaaatggccaagtataaagccacataat

SEQ ID NO: 265070 - DNA, 574 bp, Unknown
  Bacterial polypeptide expressing nucleotide sequence isolated from the Sargasso Sea
aatgataaaacctattattgcatatggtgatccaattttaaatttaaaagttgaaaaaataaaatatagtgagtcaaacagtattgattctcttgtaaacgatctgtgggatactatgtataatgcaaatggggtagggattgccgctcctcaaattggagtatcaaaatcaatctttgttgcagatttttctttttttgaggacgaggatagttttaataaagatgaacttataaatattaaacaggtatttattaacccaaaaattataaaagaatctggtgatgattttatttattctgagggctgcctaagtatacccaatatatcagaagaggtaattagaaaagaaaagatcaagattaattttttaaatgagcaatttcaacctaaacagatgaactgttctggaataattgcaagggtcattcaacatgaatatgatcatttacaaggaatactttttactgatagaatttcaaaggacgcaaggatttcaatagatagtgaattaaaaaacatatctactggcaaagttgagtcaaagtatgaaatgagtttttataaaaactag

SEQ ID NO: 265071 - DNA, 574 bp, Unknown
  Bacterial polypeptide expressing nucleotide sequence isolated from the Sargasso Sea
atgaaaaggattcttaacatagcccagataggcgcaccggttttgcgtgaaagcacaaagcgactaaacagagaagagttgctgagccctccaatccaagaattcatagatgatctgattcataccatgagaagtgctaacggggctggcctggcagccaaccaggtgcatcagtcactgagaatttgtacaatcgaagtcaaggacaatccacgctatccctaccggccgaacattcctctgaccatcctggtgaatcccgatttatttccggcaagcgaactgatgtttgagaactatgagggatgtctcagtattcctaatctgaggggcaaagtgaaacggtactgtgaaatccgagttgaggcaatggaccgtttcggtaattcgatttcagaaaccgtcaggggtatgaccgcgacaacctaccagcatgaagtcgaccaccttgatggcaatttgtttttggatcgtgtcgaagattcaaagagtcttgtgacatgggaaaacttccaacgctaccatcaaaatcaggtcgcagatcaggtccgggagcttgttgaacgttacggca

SEQ ID NO: 265072 - DNA, 505 bp, Unknown
  Bacterial polypeptide expressing nucleotide sequence isolated from the Sargasso Sea
aatgataagacctattgttgcatatggtgatccaattttaaatttaaaagttgaaaaattaaaatatagtgaatcaaacagtattgattcccttgttaacgatctttgggatactatgtacaatgcaaatggagtagggattgccgctcctcaaattggagtctcaaaatcaatctttgttgcagatttttctttttttgaagacgaggataattttaataaagatgaacttataaatattaaacaggtatttattaatccaaaaattataaaagagtctggtgatgattttacttattctgagggctgtcttagtatacccaatatctcagaagaggtaattagaaaagaaaagatcaagattaactttttaaatgaacaatttcaacctaaacaaatgaactgttctggaataattgcaagggtaattcaacatgaatatgatcatttacaaggaatactttttactgatagaatttcaaaggatgcaaggatttcaatagat

SEQ ID NO: 265073 - DNA, 145 bp, Unknown
  Bacterial polypeptide expressing nucleotide sequence isolated from the Sargasso Sea
atgaaattattaaagattttagaatttcctgacccaaggcttagaacaaaagcaaagccggttcaggaagttactaacgtccataaagaattgatcgacaacatgatccataccatgtacgaaagcaagggcattggtcttgctg

SEQ ID NO: 265074 - DNA, 496 bp, Unknown
  Bacterial polypeptide expressing nucleotide sequence isolated from the Sargasso Sea
gatgaatgaaattgtaacttttggtcacccatcccttaaatctaaatcagtaaatattactgaatttgatgaagcactaaaaaaattatcagaaagaatgataaaaattatgtatgaggcacctggagtaggtctagcagctccacaaattggtataaataaaaatatttttgtttttgatgctggagaaggtccgaacgtagcagtcaatccaaagaaaatcgaagttgagggttctgcagtatttttagagggatgtctttcattacctggttattattgggaaattgaaagaccagaatattcaaaaatctactgtcaagatataaacggtgaagatattacatatgaaggggaagagcttatgggtagagttctccaacatgaatatgaccatttaaaaggcaagcttttattatcatctttatctagaaaagagagaaaagaagcaattaaaaaaattgcactaaatgggtttccaggaaatgacttataa

SEQ ID NO: 265075 - DNA, 343 bp, Unknown
  Bacterial polypeptide expressing nucleotide sequence isolated from the Sargasso Sea
atggcattattaaaaatacttatattccctgacccccgtctacgcacagttgcaaaagctgtagagttagttgacgattccattaagaaactggcccaagatatgttagagactatgtatcaaggatcgggtataggtttagcagctactcaggtaaatgttcacaaaagagttattgtcttggatataagtgagtctaaagatgagcccatgatattaataaatcccgaaataaaaaaaattattgatcctaataaaaaaatattttctgaagggtgcctctccgttcctggattttatgaagaacttaaaaggcctggttcagttgaaatttcatatctcg

SEQ ID NO: 265076 - DNA, 544 bp, Unknown
  Bacterial polypeptide expressing nucleotide sequence isolated from the Sargasso Sea
gatgtttaaaaatgagatacaacactcctgtcagccgctaccgattgcccaggtaggggaagccattttaaaacaacgggcaattgaagtacgcgactttgatgaaacgctcagtcagttagcatcgcaaatggtggcaagcatggtagaagcaaaaggcgtcgggatcgctgccccacaagtgcacagcccgctagcgctatttatcatggcatcacggccaaacgagcgttaccccgatgcaccgctaatggagcccgttgtggtggttaatccacacatcgagttggcatctttacaactcgaaaaaggtgaggaaggctgtttatctgtcccaggacaacgatttaccatttggcgtcaccacagtatagttgtgcgctatcaaaacctagcgggacagtggcaacacgccgaattaacgggttttattgcacgtattttccaacatgaattcgatcatcttcaagggatcactttgcttgagcgttcacaaatgccacagcaaacactaatggcacaagaaggtaacccacaggcatga

SEQ ID NO: 265077 - DNA, 565 bp, Unknown
  Bacterial polypeptide expressing nucleotide sequence isolated from the Sargasso Sea
atgctaatttatgactatatatctagggtggcaatattgaaaatagcaaaattaggtcatccagttttaataaaaaaaactaataaaattaatgatttaaataatgtcgatttaaaaaaaattgtatttgatatgtcggaaacaatgttggatgcaaatggtataggacttgctgcacctcaggttcatctctcacatagaatgtttatttatagaaatccagatattgaagaagaagataaaatcaatatttcagtttttatcaatccctctgttgaaatgatttcagatgagacagaagacgattgggaaggttgtttgtcaatacctggcatgtctggtttagtaagaagacataaacgtattaagtacacagctacagatttaaacggaaaaaatataaaaggggaggctgaaggattgcatgcaagagtaattcaacatgagttcgatcatcttaatggtattttatatatatctagattggcacataaaaatgcatttggatacactgaagaaatagaaaaattttggaaaaaacataatgatgaaaactcaaaataaa

SEQ ID NO: 265078 - DNA, 394 bp, Unknown
  Bacterial polypeptide expressing nucleotide sequence isolated from the Sargasso Sea
atgtcaattcttaaaatttcccgcttggggcatccaattttattgaaaaaaactcatcctgttcaaaacattgcagctaacgaaataaaaaaaattatatatgatatgtctgagacgatgatagatgcaaaaggaataggattagctgctcctcaagtttatataaataaacaaattatgatttttagaacctttaatgaagataatgatgaaaataatgaaataaaaattacagctctaattaatccaaaaataagtaaaatttcaaatgaaactgatgaacaatgggagggatgcttgtctattccaggtatgttgggcctagttaagcgctacaaaaagattaaatatgaagggttagatatgaatggcaatattataaaaaaagaagctg

SEQ ID NO: 265079 - DNA, 304 bp, Unknown
  Bacterial polypeptide expressing nucleotide sequence isolated from the Sargasso Sea
atgtattttgtaaaccctgttataaaaaacaaagatccactaaaagcaacttacgaagaaggatgtctttcagtaccaaatcagtttgcagaagttgatagaccaagtaagtgtgaaattgaatatttagattatgatggtaataagaaactattaaaggcagacggtttactagctacatgcgtacagcatgaaatggatcatttagaggggatattatttattgattatctttcaaaattaaaaaaaactatgataattaaaaaattatctaagaaaaaatctacagcagcaattctttaaa

SEQ ID NO: 265080 - DNA, 413 bp, Unknown
  Bacterial polypeptide expressing nucleotide sequence isolated from the Sargasso Sea
tatggctatattgaaaattgctaagatgggacatccaatacttctacaaaaagctaaaaaagttgatgatccaacagatccaaaaattaaaacattagtgaatgacatgctagaaacactagatgatctaggaaatggtgttggtttagcagcacctcaagttcatgtctcacttcaggtagtcatttttgaaactgcatctaatgatggaaaagaagcaaacttaataacattaattaatcctaaaatagatgttttaactaaagaaactagtattgattgggaaggatgcctctctgtgcctggactaagaggacaagtaattcgtcctaataaaattaaatattcaggactagatctgaaaggaaataaaatagaaactattgctgaaggatttaatgctcgagttgtac

SEQ ID NO: 265081 - DNA, 547 bp, Unknown
  Bacterial polypeptide expressing nucleotide sequence isolated from the Sargasso Sea
gatgtttaaagatgagatgttacaagcgcccagtcagccactgccaatcgctttggtgggtgaagccattttaaaagagcacgccattgaagtacgcgacttcgatacggccttgagtcaattagctgagcagatggcgctgagcatggtggccgccaatggcgttggtattgccgcaccacaagtgcacagtccgctagcactgtttatcatggcatctcggccgaacgagcgttatcccgatgcgccgctgatggaccctgtcgtagtggtcaatccacagatcttgtctgcctctgcggaattagttagcggtgaagaaggctgcttatcggttcccggtcaaaggtttagcatttggcgccaccagacgattgtcgtgcgctaccaagatcttgcagggcactggcaacagactgagttaacaggttttattgctcgtattttccaacatgagtttgatcatctacaagggatcactttgctagagcgttcacaaatgccggagcaaacagtaatggcgcaagcaggtaatcatcaggcatga

SEQ ID NO: 265082 - DNA, 634 bp, Unknown
  Bacterial polypeptide expressing nucleotide sequence isolated from the Sargasso Sea
atgacaatcttacctatcaggatatttccagatcctattcttagacaaaagactgaagaaataaaagaaattaataaagaattaattgattttggatttaacatgttggaaacaatgcaggctgcaaggggaataggtttagctgcaccacaagttggaaaattagtaaaattgataacaattcaaattcctgaaaatgaaccaatgataatgtttaatcctaaagttgaaaaatcttttgggaaaagaaatgtggaagaaggttgtttgagtgttccaggattcactggaattattgaaagatctgtaactatagatgcctcatatttagatcagaataaatcaaaaataaaactaacagcttcagaacttttatcgcaggcgattgagcatgagattgatcaccttaatggtatagtatatcttgaccatcttaaaagtcatgaggatttacataaatctggaattactcccaatgatattcattggcatgatgtaggatataaaatttttataaataaagccaaagcttcatcacaagataaaattatcgatgaagttattgataaaaagatagaactatctaagattaaatcagacagttctattgatgaagcttctgtggatatataga

SEQ ID NO: 265083 - DNA, 574 bp, Unknown
  Bacterial polypeptide expressing nucleotide sequence isolated from the Sargasso Sea
atgataagacctattattgcatatggggatccaattttaaatttaaaagttgaaaaaataaaatatagtgaattaagtattatagattccctaattaacgacttatgggatactatgtacaatgcaaatggagtaggaattgctgctcctcaaattggcgtcttaaaatcaatttttgttgctgatttttctttttttaaggatgaagataattttaatcaaaatgaacttataaattttaaacaggtatttattaatccaaaaattataaaagaatctggtaatgattatacttactctgagggttgccttagtattccaaatatctcagaagaggtgattagaaaagaaaaaataaagattaactttctaaatgaaaaatttgaacctaaacaaatgaactgttcgggaataattgcaagagttattcaacatgaatatgatcatttacaaggaatactttttacggatagactttctaaggatttaaggatttctctagatagtgaattaaaaaatatatctaatggaaaagttgaatcaaagtatgaaatgagtttctataaaaactaac

SEQ ID NO: 265084 - DNA, 496 bp, Unknown
  Bacterial polypeptide expressing nucleotide sequence isolated from the Sargasso Sea
aatgtctgagatagtggtatttggacatccatcattaacaacaaaatccgtaaatgttgaaagtatagatgactacattgtttcactaacaaaaaaaatgattcagataatgtatgatgcaccaggcgtaggtttagcagccccacaaataggtattaataaaaatatatttgtatttgatgctggtgatggtcctaaagtagcaatcaatccaaaacttgaagatttgcaggggactgttgtttttatggaaggttgtttatctttaccagggtattactgggatattgaaagatatgaatatgcgaaactgtcatgtttaaatcaaaatggtgaggaagtaacttatgaaggtgaagatttactgggtagagtactgcaacatgaatatgatcatctacaaggccaattattgttaaaacaactaaaaagaaaagtaagaaaagaagcattaaaagaaatctctattaaaggttttccaggtgacaaaatataa

SEQ ID NO: 265085 - DNA, 550 bp, Unknown
  Bacterial polypeptide expressing nucleotide sequence isolated from the Sargasso Sea
catggctattttaaaaattgctaaaatgggtcatccaatacttcggcggtctgccgaggaagtattagacccgacggcagatcaaattcgacgcttggtccaggacatggttaatacgatggaagacgcggacggggcaggtttagcggcaccgcaagtgcatgttccccttcgtgtcgttgttttccatgtcccagcggaacgtgatgaagagaacccggaaccagtgccacttagtgtgctggttaacccagttgtggaaccgctgacggaagaaatcgaagtcgactgggagggttgtttgtcggttcccggtatgatgggtgctgttccgcgtttcacaaaagtgcgctatcgggcgttaacgctgggcggcgaaccaatcaatcgcgttgcagaaggttttcacgcaagagtggtgcagcacgaatgcgaccatctggatggcgttctctatccgcagcggatgaatgatctgtcattgttaatgtttagtgatcaacttcggtatcacgatgacgtaaacttggacgaggcggcagcatcgtga

SEQ ID NO: 265086 - DNA, 457 bp, Unknown
  Bacterial polypeptide expressing nucleotide sequence isolated from the Sargasso Sea
atgacattaagaaaaattcttatagaaccagatccagtattgagacagatatccaaacctgtaattcaagtaggtgacaaagaaagaaaaattatggatgatatgctagagacaatgtataaagctaatgggataggactggcagccattcaaataggaataccaaaaagaataattgttatagatatttccaaaaaagaagaaaaaaaaaatcctatatattttgttaatccagttataaaaaataaaaaaaaagaattattaacttatgaagagggatgcttgtcagttcctaatcaatttgcagagatagacagaccaattgaatgtgaagtagagtatttggattataataataaaaaaaaaaattcaaaatttagtggacttttagcaacgtgcattcagcatgaaatggatcatcttgaagggtattttgtttatagattatttatctaaa

SEQ ID NO: 265087 - DNA, 304 bp, Unknown
  Bacterial polypeptide expressing nucleotide sequence isolated from the Sargasso Sea
atggctaaaaaattagatattttaatatttccagacccaagattaagaaaagtagctaaaaaagttactaaattcgacaaatgtctagaaaaattagctcaagatatgctcaaaactatgtatgaagctaatggaataggtttagcagcaacacaagtagacaaacatataaggcttgtagttatggatctttctgaggaaagaaatgatccaagaatatttgtaaacccagagtataaaattcttgaaggatatgaaatgtttgaatttgaagaaggatgcttatcaatacccgggatttaat

SEQ ID NO: 265088 - DNA, 433 bp, Unknown
  Bacterial polypeptide expressing nucleotide sequence isolated from the Sargasso Sea
catggatgatatgctggagacgatgtatacagctcctgggattggtctagctgcaatacaagttggaattttaaaaaggttggtggtaattgatatttctaaagaagaagaaaaaaagaaacctatatttcttataaatcctcaaataatacatcagtcgaaaaatacttcggtatacgaagagggttgcctatctctgccaggacagtttgcggaaatagaaagacctgcagaatgcactattaaatatatagattataacggaaaagaaaaagagttaaaatcggatggtcttttagctacttgtattcaacatgaagttgatcacttgaacggaatactatttattgattatctgtcaaagcttaaaaaagatatgatcataaaaaagttagttaaacagaaaaaggaaattgagagagtaatagtctaa

SEQ ID NO: 265089 - DNA, 469 bp, Unknown
  Bacterial polypeptide expressing nucleotide sequence isolated from the Sargasso Sea
atggcaattaaaactataattactgaacccaataaattgcttagacaaatatccacatcagtagatcatgttggtaaagacgaacaaaaattaatggatgatatgctggaaactatgtatgaagcaaatggaataggacttgcagcaatacaaataggtgttccaaaaagaattatagttatggatatcagcaaaaatgaaagtaaaaaagagccaagatattttgtcaatccagttattaagaataaaaactctttaaaaacgacttatgaagaaggctgtttgtctgtacccaatcaatttgctgaaattgatagaccaaaaacatgtgaagtagaatatttagattataatggaaaaaaaaaattattaaaagctaatggattgcttgcaacatgtatacaacatgagatggatcatttagagggaatactatttattgactatctttcaaaattaaaaagatcca

SEQ ID NO: 265090 - DNA, 535 bp, Unknown
  Bacterial polypeptide expressing nucleotide sequence isolated from the Sargasso Sea
ttatgtgtctattcttaaaatatcaaaaatcggtcatccaatcttgctaaaagaatgttctaagataaaagaattctcttcagattctataaaaaaaatagtttatgatatgtctgaaacaatgcttgactataacggtataggtttagctgcaccccaagtacatatttcaaagaaaataatagtatttcgtaatcctgataatgaagaaaaagaaaaaattgagataacaccattaataaatcctatttttacacccatgggaaaagaaactgaggatgattgggaaggttgtttatcaatacctggtatgcagggtttagttagaagatttaaaaaaatcaaatattctggatttgatcttgatggtaaagaaattgaaaatgaagttgaaggcttgcacgcaagggtagtacaacatgaggtagatcacttaaacggtattttgtatacatcacgtttagcacataaaaatgcttttggttttgaaaaagaaataactacatattggaaaaatgaacaaaacagaaaataa

SEQ ID NO: 265091 - DNA, 520 bp, Unknown
  Bacterial polypeptide expressing nucleotide sequence isolated from the Sargasso Sea
tatggctataagaagtattattacagaacccaataaattgctcagacaaatttcaaaaccagtaagtcaagttggaaaggaagagcagaaactaatgaaagatatgttggagactatgtatgctgccaacggaattggtcttgctgcaatacaagttggaataccacaaaggattatagtgatggatatttgcaaagaagaaaataaaaaagagccaagatattttgtaaatcctataattaaaaataaagaccctttaaaagctacttatgaagaaggatgcctttcggttccaaaccaatttgcagatatagatagaccaagtaaatgtgaagtagaatatttggattataatggacaaaaacaattattaaaggctgaaggtttacttgctacatgcattcaacatgaaatggatcacctagagggaatattatttattgattatctttcaaaattaaaaaaatcgatgataattaaaaaattatcaaaattaaaatcaaatacagccgaagtttaa

SEQ ID NO: 265092 - DNA, 244 bp, Unknown
  Bacterial polypeptide expressing nucleotide sequence isolated from the Sargasso Sea
aaaagtctatatacattctcagagggttgcttatcaatacctggatataatgaagaaatcacaagacctgataaaattctcctaaaatggcaagatgttaatggcaagtttcatgaagaagaaccagaaggtattctgacagtttgcattcaacatgaaattgatcacctagagggaaaactgatggtcgactatatatcttcgttaaaacgcgaaagaattagatcaaaacttagaaaataag

SEQ ID NO: 265093 - DNA, 385 bp, Unknown
  Bacterial polypeptide expressing nucleotide sequence isolated from the Sargasso Sea
atgccagttaggaaaatcataaaaatgggccatccaactctgcggcaaagagcaaaatccctacaaaagaaagatttaacaaaagctcgtttcaagaacctcttgtctgacatggtcgatactctaagagattacggcggggtgggtctggctgcgccccaaatcgatgagagccttcgggttgtgattattgagattcgtgataccaatcttaggtatggggtgcagaaattgtttccactgaccgtctttgttaatccagaaattgagctgatcgactctcaaaccgcgggtttctgggaaggttgcctgtcaattcccggaatgagaggttacgtagaacgcccacagaacatctccgtatcttttatcgatgaactcggag

SEQ ID NO: 265094 - DNA, 454 bp, Unknown
  Bacterial polypeptide expressing nucleotide sequence isolated from the Sargasso Sea
atgttaaagcttatttatgcacctgatcccatattaaaaaaagatagtgtatctttaccgcaagtagaccaacatcatagagaattaataaaacaaatgtatgaaattatgtattctgcaaatggagtaggtttagctgctccacaaataggtttaaatattcgcatatttattcttgatgctagctctagagacgaagaaaaaaaacctatgacaatgataaatcctaaaattatatcattagatgaaaataaagtgccatatgaagagggttgtttatcttttccggagcattttgcagaaatagaccgtcctgaaaaaattaaaatggagtatcttgatgaggataactcaaaaaaaatttctacattcacaggttttgaatcaaggattatacaacatgaattagatcatctaaacggaattttattcgttgatcatttaagtcgttaaa

SEQ ID NO: 265095 - DNA, 367 bp, Unknown
  Bacterial polypeptide expressing nucleotide sequence isolated from the Sargasso Sea
atgaccatccacaccatcttgaaaatgggcgacccccgcctgctgcgcgtggcccagccagtgacggcattcgataccgatgaattgcaccagctggtacgcgacatgttcgagaccatggcatcggtgaacggagccgggctggccgcaccgcagatcggggtggatctgcaactggtcatctttggctccaacgaccgcaacccgcgttatccgaaccggccactggtgccacccaccgtcctgctcaacccggtgatcacgcctctgggggcagaagaggaagaagactgggaagggtgcctttccgtgccgggtttgcgtggcaaggtgccccgctggtcacgcatccgctacacaggcttcg

SEQ ID NO: 265096 - DNA, 145 bp, Unknown
  Bacterial polypeptide expressing nucleotide sequence isolated from the Sargasso Sea
agtaaaccttcaggctgaaggtttactggcgatttgtttacagcacgagctggaccatttaatgggcaaattgtttatagattatttatcgccattaaaacgtgaccgtattaagaaaaagctgaaaaagaagctcgcctcgcag

SEQ ID NO: 265097 - DNA, 496 bp, Unknown
  Bacterial polypeptide expressing nucleotide sequence isolated from the Sargasso Sea
atgactatcagaactataataacagaacctaataaattacttagacaaatttctaaaccagtcaatgttgttggaaaagaagaacaaaaattgatggatgatatgcttgagacaatgtacgacgcaaatggaattggtctcgcagcgatacaagttggcgtaccaaagagaattattgtaatggatattagtaaagatgagaataaaaaagagccaagatatttcgtaaatccagttattaaaaataaagatcctgaaaaagcaacttatgaagaaggctgtctttctgtgccaaatcagtttgcagaaattgatagacctagtaagtgtgaagtagaatatcttgattatgatggagaaaagaaattgctaaaagcagatggtcttcttgcaacatgtattcagcatgaaatggaccatttagagggaatactatttattgattatctttcaaaattaaaaaaatcaatgataattaaaaaattatctaagagaa

SEQ ID NO: 265098 - DNA, 455 bp, Unknown
  Bacterial polypeptide expressing nucleotide sequence isolated from the Sargasso Sea
tatgtcaattcttaaaatttctcgcttggggcatccaattttactggaaaaaactaatcctgtacaaaatattccagataatgaaatcaaaaaaattatatatgatatgtctgagacgatgttagacgcaaaaggaataggattagctgctcctcaagtttatataaataaacaaattatgatttttaggacttttaatgaagatggtgatgaaaataatgaaataaaaattacagctttaattaatccaaaaataagcaaaattacaaatgacactgatgaacaatgggaaggatgcttatctatcccaggtatgttaggcctagtgaagcgctacaaaaagattaaatatgaagggcttgatatgaatggcaatattataaaaaaagaagctgagggtttagaagcaagagttgttcaacatgaatatgatcatttaatgggaattttgtata

SEQ ID NO: 265099 - DNA, 309 bp, Unknown
  Bacterial polypeptide expressing nucleotide sequence isolated from the Sargasso Sea
ttgcattaatcaatcctgtaatcaaaaacttaagcgaagagacatcggtgtacgaagagggttgtctatcaatacctgaaacttttattgaaattgagagaccaaaaatttgtgaggtggaatatattgacgataagggagagaagaaaaatcttaaatgtgatgggcttttatctacttgtattcaacatgagattaatcatttagatggaaaattaattattgaccatttatcaaaattaaagaaagattttatcataaaaaaaatttcaaaaattaaaaaaaatccagacagaatagtagtttaaa

SEQ ID NO: 265100 - DNA, 433 bp, Unknown
  Bacterial polypeptide expressing nucleotide sequence isolated from the Sargasso Sea
atggatgatatgttggaaacaatgtattcagcgcctggaataggtttagcagcagtacaaattggaatattaaagcgtgtagttgtaatcgatatatcaaaaggtgaagagaagaaaaatccaatatttttggtaaatcctgagataacttttaaatcaaatcaaacttcaacatatgaagagggatgtttatctttaccagggcactttgcggaggttcagcgtcctgcagagtgccacttaaattacatagactacaacggtaagaagcagaaattacaaactgatggacttttagcaacatgcgttcaacatgaaatagatcatctcaatggtgttttatttatcgattatctttcaaagcttaaaagagatatgattattaaaaaacttaaaaaaaataaaaaagaaataaataagattgttttgtaaa

SEQ ID NO: 265101 - DNA, 333 bp, Unknown
  Bacterial polypeptide expressing nucleotide sequence isolated from the Sargasso Sea
aggaagataaaataaatatttctgtttttataaatccttctgttgaaatgatttcagatgaaacagaagatgattgggaaggttgtttgtcaattcctggcatgtctggtttagtaagaaggcataaacatattaaatactcagctacagatttaaacggaaaaaatataaaaggggaggctgaaggattgcatgcaagagtaattcaacatgagttagatcatcttaatggtattttatatgtatctagattggcacataaaaatgcatttggatattctgaagaaatagaaaaattttggaaaaaacataatgatgaaaactcaaaataaa

SEQ ID NO: 265102 - DNA, 446 bp, Unknown
  Bacterial polypeptide expressing nucleotide sequence isolated from the Sargasso Sea
tatgacagtaaaaactattttaacagaaccgaataaaattttgcgtcaagtttctctacctgtggaaaaagtgggagatgaggaaagacgattaatggatgatatgcttgaaacaatgtatgatgcaaaaggaattggtttagcagcaattcaaataggtgtacccaagcgaattattgtaatggatattgctaacaaagacaaagaaaaagaaccaatgtattttgttaacccattaattaaaaaaaaaaattctgaacattctacatacgaagaaggatgtctttcagttccaaaccaatttgcagaagttaatagaccaagtacatgtgaggttgaatatttagattataatggaaataaaaaaatattaaaagcttctggcttgctcgcgacttgcattcagcatgagatggaccacctagaaggaatattatttattgatt

SEQ ID NO: 265103 - DNA, 256 bp, Unknown
  Bacterial polypeptide expressing nucleotide sequence isolated from the Sargasso Sea
ttttctgtttacaaggagggctgtctctcaatacctgagttttatgaagaaattgagagaccgtccgaatgtcgggtcaagtatctcgataaaaaaaataaggtacaattcttggattgtgatgggcttcttgcgacatgcgtccagcatgagatagatcatttagacgggaaattatttattgactacctttctcgtctaaaaagaacatctatcgaaaaaaaatttatcaaacaatataagcaaaaggcttaag

SEQ ID NO: 265104 - DNA, 526 bp, Unknown
  Bacterial polypeptide expressing nucleotide sequence isolated from the Sargasso Sea
aatgacaatcaaagatataatcactgtaccagatgaaaccttaaaaaaaatttcagagccaattgagaaaataggagtaaatgaaaaaaaactcataaaagatttgattgaaacaatgtatgagtctaatggcatcggactggcagcggttcaagttggtatactaaaaagaatcttagttatcgatatttcaacaaaagatgaaaaaaaaaacccaatgagttttattaatcccgttattaaaaaatttagtgatgaaacctcagtatatgaagagggatgtttgtcaataccggaaacttttatagaaattgagcgaccaaaaacttgtgaagttgaatatattgatataaatggggatcaaaaaatcctaaagtgtaatggacttttatcaacttgtcttcagcatgagataaatcatctagatggtaaactaataattgattacttatcaaaattaaaaagagatttaataatcaagaaaatttcaaaatcaaagaaaaatctaaatagaataattgtttaa

SEQ ID NO: 265105 - DNA, 274 bp, Unknown
  Bacterial polypeptide expressing nucleotide sequence isolated from the Sargasso Sea
tatgtcaacatatgaagagggttgcctctcagttcctgatcagtatgctgaaattgatagacctgaggaatgtgaggtaagctacctagattataatggaaagaaggcaacattgcacgcggagggacttctcgctacctgtatccaacatgaaatggatcatcttgaaggcattctatttattgattatttatcaaatttgaaaaaaaatatgattgttaaaaaattaatcaaatcaaaaaaacaatcgagtaaagagcgtatcgtcgcttaa

SEQ ID NO: 265106 - DNA, 526 bp, Unknown
  Bacterial polypeptide expressing nucleotide sequence isolated from the Sargasso Sea
atgagcattaaaaacatcattaccatacctgatgaaacactaaaaaaaatttctgagccagtagaaaaagttgggacaaatgaaaaaaaacttatcaatgatttatttgaaacaatgtataagtccaagggtattgggttagcagcagttcaagtgggtattcttaaacgaattttagttatagatgtatctagcaaagatgaaaaaaagaaacctttaagtttaataaatccaattatcaaaaaaattagtaacgagacctctgtatatgaagaaggatgcttatcaataccagatacctttatagaaatagagagacctaaaatgtgtgaggttgaatatgttgatataaatggcaaaataaaaaacctaaaatgtgatggtcttttatctacttgccttcagcatgaaataaatcatttagatggtaaattaattattgatcatttatcaaaactaaaaaaagatataataataaagaaaatttcaaagttaaaaaaaaatcctgatagaataatagtttaat

SEQ ID NO: 265107 - DNA, 538 bp, Unknown
  Bacterial polypeptide expressing nucleotide sequence isolated from the Sargasso Sea
atgtttgagaacttagaaattttaaaatttccagatgaaaggctgagacggttatctgtccctgtcgaagcctttaacaaagagttgaaggccttagcagataagatgctagaaatcatgtaccaatcaaatggaataggcttagcagcgccccaggttaatcaaacaattagactcatagtcgtcgatgtttcagaagacaggaataacccatgtatttttatcaacccaaaaataaagcaaccgtcaggatcggttgacagcagcgagggctgcctctctgttcctgaaatcagaacaacaatcaagcgatatgaaaacatcactctcgaataccaagacctcaatggtgttaggctcgaagaatcattggacgatctgttgtcgatatgcgttcagcatgaaatagaccacttagatggaaagctttttattgattatgttcctgatgtaaaacttcaaaggcttagaaaaaaaatcgccaaaagcaaaaaaaaccaaccaacaatagagggaacaacggtgagggttgtttgat

SEQ ID NO: 265108 - DNA, 504 bp, Unknown
  Bacterial polypeptide expressing nucleotide sequence isolated from the Sargasso Sea
cagtaccagatgaaacattaaaaaaaatttcagaacctatagaaaaagttgggggtaatgaaaaaaaactaattaatgatttatttgaaactatgtataattctaatggaattggtcttgcagcagtacaggtgggtgtattgaaaagagttttagttgttgatgtctcttcaagagaagaagaaaaaaaaccaatttgttttgtaaatcctattattaaaaagattagtgatgaaatgtcagtatatgaggagggatgtttatctattcccgatacgtttattgaaattgaaagaccaaaaacatgtcaggtagagtatgtcgatattaatggaaaaattaaaactcaagagtttgatggtcttttatcaacctgtgttcaacacgaaataaatcatctagatggaaaacttatcattgatcatttgtcaaaattaaaaaaagacatgattatcaaaaaaatttcaaagattaaaaaaaatccagacagaataatagtttaaa

SEQ ID NO: 265109 - DNA, 541 bp, Unknown
  Bacterial polypeptide expressing nucleotide sequence isolated from the Sargasso Sea
tatttattatgtgtctattctaaaaatatcaaaaatcggtcatcctattttgctaaaagaatgcgctgagataaaagaattctcttcagattctctaaaaaaaatagtttatgatatgtcagaaacaatgcttgactataacggtataggtttagctgcaccccaagtacatatttcaaagcaaataatagtatttcgtaatcctgataatgaagagaaagataaaattgagataacaccattaataaatcctagttttacacccatgggaaaagaaactgaggatgattgggaaggttgtttatcaattcctggtatgcaaggtttggtaagaagatttaaaaaaattaaatattctggatttgatcttgatggtaaagtaattaaaaatgaagttgaaggcttacatgcaagggtagtacaacatgaggtagatcatttaaatggcattttgtatacatcgcgcttagcacataaaaatgcttttggttttgaaaatgaaataaatacatattggaaaaatgaacaaaacagaaaataa

SEQ ID NO: 265110 - DNA, 535 bp, Unknown
  Bacterial polypeptide expressing nucleotide sequence isolated from the Sargasso Sea
tatgagcgttaaagaaatattaaaaatgggtaaccctcttttaagaaaagaggctgaagatttcactattgaagaaatcaaaagtccagaaacaaaattattacttgaagacatgtgggactctctagaagttgccggtggaattggattagcagctcctcaaattggcattttaaaaaaattagctgtaataaagttatccgaagaatcagatagatatccagacatggaggatagtgagccttatgtcatctttaatccaaaagtttctgtggtggatgaaactgaacaaggtttttgggaaggttgcctaagtgttcctggattaagaggttttgtcgaaagaccgaggagtatcagagtagattttttagacgaaaatgcagaaccaaaaactattgaggctgaagattttctagctacggtttttcagcatgagttggatcatttagttggaaaactttatgtagatagaatgaaagatattaagactttaatgtttgaggaagaaatggtttttgatgaaataaaagaa

SEQ ID NO: 265111 - DNA, 531 bp, Unknown
  Bacterial polypeptide expressing nucleotide sequence isolated from the Sargasso Sea
aaattatgacagtaaaaactattttgacagaacctaataaattattacgccaagtctctcaacccgttgaaaaagtgggaaatcaagaaagaaaattaatggatgatatgcttgaaacaatgtatgaagcaaaaggaattggtttagcagcaattcaaataggtgtgcccaaacgaattattgtaatggatattggtaatagggaaaaagaaaaagagccaatgtattttgttaatcctgtagttaaaaataaaaactctgagcattcaacttatgaagaagggtgtttatcagttccaaatcaatttgcagaaattgataggccaagcacatgtgaagttgaattcttagactataatggaaataaaaaaatattaaaagcttctggattacttgctacttgtattcaacatgagatggatcacttagaaggaatattatttattgattatctttcaaagttaaaaaaaatgatgattgtgaaaaaactatctaagcaaaaaaataaagtagatagaattgttgtttagt

SEQ ID NO: 265112 - DNA, 526 bp, Unknown
  Bacterial polypeptide expressing nucleotide sequence isolated from the Sargasso Sea
tatggcagtaaaaactattttaacagaacccaataaaatattaagaaaaatttctttgcctgttaaaaaagtaggtaaagaggaacagcttttaatggatgatatgttggatacaatgtatgatgcaaaaggtattggtttagctgcaattcaaataggcattccaaaaagaattattgtaatggatctttctaaagataatgagaataacaatccaatgtactttgttaacccggtaattaaaaataaaaaccaaaatttgtcaaagtacgaagaaggatgtttaagtgttccaaatcaatttgttgaagtaaaccgaccaagttcgtgtgaagttgaatatttggattataatggaaaaaaaagaaatcttaattgtgatggtttattagcaacttgtattcagcatgagatggatcatttagaaggaattacaattttaacatatgtttcaaatctaaagagatcaatgattataaaaaaactatcaaaagtaaataataatgaagacaaagtagttctttaa

SEQ ID NO: 265113 - DNA, 216 bp, Unknown
  Bacterial polypeptide expressing nucleotide sequence isolated from the Sargasso Sea
aatggctataaagaaaattttaacagtccctgatcaaattttaagaaaaaaatccctgcccgttgaggatgtaaataaggagataaaagttcttttgaaagacatgttagaaactatgtatgatgctcctggtattggtttagcggctattcaaataggagttcctaaaaggttagttgttatggatctatcaaaaaaccctgaaaaaaaggaacc

SEQ ID NO: 265114 - DNA, 526 bp, Unknown
  Bacterial polypeptide expressing nucleotide sequence isolated from the Sargasso Sea
catgagtataagagagattataactgtaccagatgaaacattaaaaaaagtttcagaccccatagaaaaatttggaattaatgaaaaaaaattaattaatgatttatttgaaactatgtataattctaatggaattggacttgcagctgtacaagtgggcatattaaaaagagttctagttgttgacgtttcatcaaaaaaagagaaaaaaaacccaatttgttttgtaaatcctgttattaaaaaagttagtgatgaaatgtctttatatgaagaggggtgtttatctattccggatactttcattgaaattgagagaccaaaaatttgtgaggttgagtatgtggatgtgaatggaaaaattaaaacccaagaatttgacggtcttctatcaacttgtgttcaacatgaaataaatcatttagatggaaaacttataatagatcatttgtcaaagttaaagaaagacatgattattaagaaaatttcaaagtttaaaaaaaatccagacagagtaatagtttga

SEQ ID NO: 265115 - DNA, 373 bp, Unknown
  Bacterial polypeptide expressing nucleotide sequence isolated from the Sargasso Sea
ggcctggccgccagccaggtggacgtgcacaagcgcttcatggtcatcgacgtgagcgaggagcatgacgcgccgcaggtgttcatcaacccgcagatcgccagcgccagcgaaagcggccgcgtataccaggaaggctgcctgtcggtgcccggcatctatgccgacgtgacccgtgccgacagcatcgtcgtgcgcttcctggaccgcgagggccgcgagcaggaactggctgccgatggcctgctggccacctgcatccagcacgagatggaccacctggacggcaagctgttcatcgattacctctcgccgctcaagcgcgaaatggtgcgcaagaagctggccaagcagcgcaagcacgtcgcctgag

SEQ ID NO: 265116 - DNA, 246 bp, Unknown
  Bacterial polypeptide expressing nucleotide sequence isolated from the Sargasso Sea
attatgatggggaagggtgtttatcagttcctggactaagaggtttagtgccaaggcacagaaaaataagatataaaggtttaaatgaaaaaggtaagaaaattgataaaattgttgaagggcttcatgcaagagttgttcagcatgaatgtgaccatctagaaggtataatttatgttcaaaggatggataatttagaagacttagtttttgagtctgagatgaagttttataataaattctaga

SEQ ID NO: 265117 - DNA, 454 bp, Unknown
  Bacterial polypeptide expressing nucleotide sequence isolated from the Sargasso Sea
atgaacgatatagttgtcttcggccatccatctttaacaagtaaatcagaaaatataatcaatatagatgattatgttgttaatttatcaaaaaagatgatcgatattatgtatgctgctccaggggttggtttagctgcccctcaaataggtataaataaaaatatatttgtatttgatgctggagatgggcctaaagttgctataaatccaaaacttgttaaaactgaaggttctatagtctttatggaaggatgtctatctttaccaggttattattgggatattgaaagacatgaatacgccaaaattcaatgtctcaatgaaaatggtgatgaaacaatatatgaaggtgacgaactgatgggtcgagtgttgcaacacgaactagatcatttgaaaggaaaattacttctcaaatctatgacacgaaaacaacgaaaagaagcttgaa

SEQ ID NO: 265118 - DNA, 550 bp, Unknown
  Bacterial polypeptide expressing nucleotide sequence isolated from the Sargasso Sea
aatgtcagtattagaagtagtgaactatgggaatccaatacttcgcaataaatgtattcaagttacagatttttctaaattatcagatttcattgatgatatgtttgatactatgtatgagcaagagggtatcggtttagccgctaatcaggttggcgttgatatgaacctttttattattgatatctcgcataccgatgataatgaatttccaagaatatttattaatggcgagatcacatcttcacaaggagaaagtgttttttccgaaggatgtctctctattccagaggttgcacttgaggtgactagacctgaggtcatttcatttaagtaccaagatattgataaaaaatggcatgaagaagagtttgatggacttctcgcccgtgcaatacaacatgaaatcgatcatttaaatggtatcttaataattgacttggtgagtgagatgcaaaggttgaaggttaataaagaagtgaaaagaattaagaatgattccattattaagtttaaaagacagccaattaccaaagggtttgttctttag

SEQ ID NO: 265119 - DNA, 505 bp, Unknown
  Bacterial polypeptide expressing nucleotide sequence isolated from the Sargasso Sea
atggaaatactattagttcctaacgagtttttacgtcaaaaagctaacagacttattaatattacaagtgaagatattaaaattgctaatcaaatgatggatactatgattaaagcaccaggtgttggattagcagcaaatcaggtagggatattaaaacaaattattacaattaattttgaagataaggaaagtgataaaagagctaattacatattattcaacccttcaataatagagtattctgaagaaaaagttattatggaagaaggatgtttatcgctgcctgagcaatatgcagacattgaaagaccaaaacaaattgttttagaatatatggatgaaaatcaaaaaagtataaaaaaagaaatagatggttatgaagctagaatattacagcacgaaatagatcatttatctggaaaattatttgtagattatttatcttctttaaaaagaaacattatattaaaaaaagtgaaaaaattgaaaaaacatgattgat

SEQ ID NO: 265120 - DNA, 351 bp, Unknown
  Bacterial polypeptide expressing nucleotide sequence isolated from the Sargasso Sea
ccaatgaaacatatgtcttcatcaatagtgagattatctcattctcttcagaggagagttatttccaagaaggatgtctatcaataccaggtgttgctttggatgtactaagacctgaaaaaatcatacttaaatatcaaacattagatcaagtctggcatgaaaaggaatttgaaggacttttagcaagagctattcagcacgaaatcgaccacttaaatggtatccttattattgatagggttgggaaactagagcgaatgaagtatcaaaaggaaattaaagaaataaaaacacatgctaaaacactaatagcaaaaaagaatcaaaataagaggttcgttttataaa

SEQ ID NO: 265121 - DNA, 538 bp, Unknown
  Bacterial polypeptide expressing nucleotide sequence isolated from the Sargasso Sea
ttggctaaattacaagttttacattttcctgacagcagactgagacaaaaagccagtaaagtcactgtttttgacgaaaaattaactgagtttgctaacgatatgctagagacgatgtatttctcaaaaggtattggtctagctgctgttcaagtaaatgttgcaaaaagggtcatagttatagatgttagtgaaaacagagatgaaccgctttttcttgttaatcctgagataatagatagacaggaacctataaaatttgaggaggggtgtttatcagtacctggtttctatgagaaagtcgacagattcaatgtgatagaatttgaagctcaggatttacagggagaaatttataaacaaaaagcagtaggtctacttgctgtctgcatacaacatgagatagatcatcttgatggaaaactttttgttgactacatttcgaatatgaaaagagatagaatagcaaaaaaaattaaaaaactaaccgaacaaggcaaattagaaacaagaaacgatgtgccgtattctatctaga

SEQ ID NO: 265122 - DNA, 541 bp, Unknown
  Bacterial polypeptide expressing nucleotide sequence isolated from the Sargasso Sea
atgggaatacttaaaatagcaagaatgggacatccggtactttcaagttcctctaagagggtagaagatccaacggctcctgacattaaaaaattgattagtgatatggttgagactatggaggatgcacctggaattggccttgctgctccgcaggtgcaccaacctctgcgtatagttgtttttaaagttccagagttacgagttacggaaaaaaaacaagccgtttcacttacagtgctcataaaccctgtcatcgaggtgctatctgaagataccgaaaagggaatagaggggtgtttatcccttccaggcatgtccggggttgtacccagattttcgcatattggctattatggtgttgacacaagcgggaaaaaaatagaacgcgaggctagagacttccacgcaagggtcgttcaacatgaatgtgatcacttggatggggtcctctatcctatgcggatgactgatttatcgtcctttgggtttgttgaggaaatggaaaagcaaaaccagaataggctaatgagaaaataaa

SEQ ID NO: 265123 - DNA, 520 bp, Unknown
  Bacterial polypeptide expressing nucleotide sequence isolated from the Sargasso Sea
tatggctatcagaactataataacagaacctaataaattacttaggcagatttctaaaccaataaatagtgttggtaaagaagaacaaaaattgatggatgatatgcttgagacaatgtatgacgctaaaggaattggtcttgcggccatccaagtaggtgtaccaaagagaattattgtaatggatataagtaaagacgagaataaaaaagagccaagatatttcgtaaatccaattattaaaaataaagatctagaaaaagcaacttatgaagaaggatgtctttctgttccaaatcagtttgcagaaattgatagacctagtaagtgtgaagtagaatatcttgattattatggagaaaagaaattgttaaaggcagatggtcttctcgcaacatgcattcagcatgaaatggatcatttagaggggatactatttattgattatctttctaaattaaaaagatcaatgataattaaaaaattatcaaaattaaaatctacttccgctgaagcttaa

SEQ ID NO: 265124 - DNA, 499 bp, Unknown
  Bacterial polypeptide expressing nucleotide sequence isolated from the Sargasso Sea
gatggaaatactgatagttcctaatgagtttttacgtcaaaaagcaaaaaaacttagtaatattacaaatgaagatattaaaattgctaatcaaatgatggatactatgatgaaagcccctggtgttggtttagcagcaaatcaggttggaatattaaaacaaattattacaattaattttgaagacaaggaaaatgataaaagagctaattacatattatttaacccctcaataatagagtattctaaagacacagttattatggaagaaggatgtttatcattgcctgagcaatatgcagatattgaaagaccaaaacaaatttttttagagtatattgatgaaaatcaaaaaacgataaaaaaagaaatagatggttatgaagctagaatattgcaacatgaaatagaccatttatctggaaaattatttgtagattatttatcttcattaaaaagaaacattataataaaaaaagttaaaaaaatgaaaaattaa

SEQ ID NO: 265125 - DNA, 436 bp, Unknown
  Bacterial polypeptide expressing nucleotide sequence isolated from the Sargasso Sea
ctagcagatgatttgtttgaaacaatgtacaaaaataatggcataggtcttgctgctgttcaggttggtgttttaagaagaatgattgtaattgatgtttcaaagaaagatgaggaaaaaaaacctttttgtttaataaacccagtcataaaatcatttggtaaagatagatcgacatatgaagaaggttgtttgtcaatacctgaaacatttatagaaattgaaagaccaaagacctgtatagttgaatatgtagatatcacaggaaacaaaaaaaatttggaatgtgatggtttactatctacatgcgtccaacatgaaattaatcacttagatggtaagttgatcattgattttttgtcaaagcttaaaaaagattttctaataaaaaaattatctaaaaacaaaaatacatctagtagagttattgtgtaaa

SEQ ID NO: 265126 - DNA, 466 bp, Unknown
  Bacterial polypeptide expressing nucleotide sequence isolated from the Sargasso Sea
aatgtcgaaaaaaacaattatatttgagcctaaccccatacttagaaaaaaaagcgaaaagttaaatgctgtagacgatgatttgagaaaacttatggacgatatgttggaaacaatgtacgcagctccaggcattggtttagcagcagttcaaataggagtattgaagcgtttaatagttattgatatttctaaagaagaacagaaaaaaaccccgcttttcttagttaatcccataataaattttaaatcaaaagagacttcgatatatgaagaaggctgtctttcacttcctggatattttgcagagatagaaagaccagctgaatgccatattagctatattgactatgcggggaaaaaaaaggatttaaaagcaactggacttttatcgacttgtattcagcatgaaatagatcacctaaatggtattttatttatagattatttatcaaaattgaaaaaa

SEQ ID NO: 265127 - DNA, 312 bp, Unknown
  Bacterial polypeptide expressing nucleotide sequence isolated from the Sargasso Sea
catggcaattttagacgtattaagttttcccgatgagcgacttcgtaccgtagcaaaaccggtagaagaagtgaatgacgacattaaacaattggtttcagatatgtttgaaaccatgaaagacgagaatggaattggtttggctgctactcaagtcgacagacatgttcaagttgttgtaatgaacgtagcggaagatcaagacgagcctcgtgtttttatcaacccggaaatcaccaaaaaagacggcagcactattagtgaagaaggttgtctttcggttccaggcaactacgcaaaagttgagcgcgc

SEQ ID NO: 265128 - DNA, 418 bp, Unknown
  Bacterial polypeptide expressing nucleotide sequence isolated from the Sargasso Sea
tatgttggagaccatgtatgctgccaacggaattggtcttgccgcaatacaagttggaataccacaaaggattatagtcatggatatttgcaaagaagaaaataaaaaagagccaagatattttgtaaatcctatgattaaaaataaagatcctttaaaagcaacttatgaagaaggatgcctttcggttccaaaccaatttgcagaaatagatagaccaagtaaatgtgaagtagagtatttagattataatggaaaaaaacaattattaaaggctgaaggtttacttgctacatgcattcaacatgaaatggatcacttagaaggtatattatttatcgattatctctcaaaattaaaaaaatcgatgataataaaaaaattatcaaaattaaaatcaagtacagccgaagtttaa

SEQ ID NO: 265129 - DNA, 526 bp, Unknown
  Bacterial polypeptide expressing nucleotide sequence isolated from the Sargasso Sea
tatgacaattaaagcaattttgacagaaccaaataaaatcttaagacaagtttcaaaaccagttacaaaagttggaaaagaagaacaaaatttaatggatgatatgatcgaaacaatgtatagcgcaaatggaattggcttagctgcaattcaaataggtgtaccaaaaagaattattgtgatggacatttcaaaaaatgatgaaaaaaaaaatcctatgtattttgtaaatccaattataaaaaacaaaaattctgatctttcaagatatgaagaaggatgtttgtcagttccagatcaatttgcagaaattgatagaccaagttcatgtgaggttgaatatttggattataatggaaaaaaaaattttttaaaaacttcaggtttacttgcaacatgtattcagcacgaaatggatcatttagagggaatattatttattgactatctttcaaaattaaaaaaatctatgattataaaaaaactatctaaacaaaaaaataaagcagacagaattgttgtttag

SEQ ID NO: 265130 - DNA, 451 bp, Unknown
  Bacterial polypeptide expressing nucleotide sequence isolated from the Sargasso Sea
aatgtcaaaaaaaaaaatcgtaattgaacctgatccaattttaagaaaaaaaagcaaaatattagaaaaagttgacgatgaattgaggaaacttatggatgatatgttggagactatgtatgatgctcctggaattggtttagcagctgttcaaatcggagtattaagaagagttattgtattagacatttcaaaaagtgatgaaaaaaaaaatcccttatttttaataaatcctgaaataacatttaaatcgaataaaacatcaacttatgaggaaggttgcttgtctttaccgggtcatttcgctgaagttgaaagaccagaagaatgccatcttaacttcattgattatgatggtaataaaaaagacttaaaagctaatggtcttctagcaacctgtattcaacatgaggttgaccatttagacggcattctttttattgatcatatt

SEQ ID NO: 265131 - DNA, 538 bp, Unknown
  Bacterial polypeptide expressing nucleotide sequence isolated from the Sargasso Sea
tttggctaaattacaagttttacattttcctgacagcagactgagacaaaaagccagtaaagtcactgtttttgacgaaaaattaaccaagtttgctaacgatatgctagagacgatgtatttctcaaaaggcatcggtctagctgctgttcaagtaaatgttgcaaaaagggtcatagttatagatgttagcgaaaacagagatgaaccgctgtttcttgttaatcctgagataatagatagacaggaacctataaaatttgaggaggggtgcttatcagtacctggtttctatgaaaaaatcgacagatttaatgtaatagaatttgaagctcaggatttacagggagaaatttataaacaaaaagcagaaggtctgcttgctgtctgcatacaacatgagatagatcatcttgatggaaaactttttgttgattacatttcgaatatgaaaagagatagaatagcaaaaaaaattaaaaaactaaccgaacaaggcaaattagaaacaagaaacgatgtgccgtattctatctag

SEQ ID NO: 265132 - DNA, 526 bp, Unknown
  Bacterial polypeptide expressing nucleotide sequence isolated from the Sargasso Sea
aatgagcattaaaaatatcattacagttccagatgaaactcttaagaaagtttcagaaagagtcgaaaaaatcggagcgaatgaaaaaaaacttattaatgacctatttgaaaccatgtataaatctaatggaattggattagctgcagttcaggtaggtgtattaaaaagaattatagtaattgatgtatcaaataaagatgagaaaaatcaaccattaagtttcataaatccaactattaaaaaaattagcgatacaacttctatttatgaagaaggatgtttgtcaattccagatacttttatagaaattgaaagaccaaaaatttgtgaggtggagtacattgatttaaatggacaaataaaaaatttgaagtgtgatggtcttttatcaacgtgtcttcaacatgaaataaaccacttagatggtaaattgataattgatcatttatcaaaattaaaaagagatataattattaaaaaaatttcaaaatccaaaaaaaatccagatagaataatagtttaa

SEQ ID NO: 265133 - DNA, 526 bp, Unknown
  Bacterial polypeptide expressing nucleotide sequence isolated from the Sargasso Sea
atgtctgttaaaaaaattataatcgagcctgatccaattttaagaaaaaaaagtgaacctttagaggcagttaataatcaattaaaaaaattaatggatgatatgttgcagactatgtataaagctccaggaataggtttggcagcagttcaaattggaattcttaaaagagtaatagttatagatattactaaagaggatcaaaaaaaaaatccattatttttggttaatcctagtttaacatttaaatctaaagatacctcagtttatgaggagggatgcttatccctcccagggcattttgcagaaatagagagaccagcagaatgtcatttagattatttagattataatggtaaaaaaaagactttaaaggcaacaggtctactagcaacttgtatacaacatgaaattgatcatcttaatggaattttatttatagattatttatcaaagcttaaaaaagatatgataataaaaaaattaattaaaaaaaaaaaagaattagataaaatagttttataaa

SEQ ID NO: 265134 - DNA, 364 bp, Unknown
  Bacterial polypeptide expressing nucleotide sequence isolated from the Sargasso Sea
atgggcattaaagatatcattacagtacctgatgaaactttaaaaaaaatttcagaacctatagaaaaagtgggtgttaatgaaaaaaaacttattaatgatttatttgatacaatgtataactctaaaggtatcggtcttgctgcagtgcaagtaggaatacttaaaagaattctagtaattgatgtgtctacaaaagatgaaaaaaaaaaacctttaagttttattaaccctattattaaaagattaagtgaagaaacttcaatttatgaagaaggatgtttgtctattccagaaacttttatagaaattgaaagaccaaaaatctgtgaagtggaatatattgatatagatgaaaaaaaag

SEQ ID NO: 265135 - DNA, 493 bp, Unknown
  Bacterial polypeptide expressing nucleotide sequence isolated from the Sargasso Sea
cccaataaattactcagacaagtttcaaaaccagtaaatcaagttggaaaagaagagcagaaactaatgaaagatatgttggagaccatgtatgctgccaacggaattggtcttgctgcaatacaagttggaataccacaaaggattatagtcatggatatttgtaaagaagaaaataaaaaagagccaagatattttgtaaatcctataattaaaaataaagaccctttaaaagcaacttatgaagaaggatgcctttcggttccaaaccaatttgcagatatagatagaccaagtaaatgtgaagtagagtatttagattataatggaaaaaaacaattattaaaggctgaaggtttacttgctacatgtattcaacatgaaatggatcatctagagggcatattatttatcgattatctctcaaaattaaaaaaatcgatgataattaaaaaattatcaaaattaaaatcaagcatgcccgaagtttaat

SEQ ID NO: 265136 - DNA, 520 bp, Unknown
  Bacterial polypeptide expressing nucleotide sequence isolated from the Sargasso Sea
tatggctatcagaactataataacagaacctaataaattacttaggcaaatatctaaaccagtcagtagtgttggaaaagaagagcaaaaattaatggatgatatgcttgagacaatgtatgccgcaaatggtattggtcttgcagctatacaaattggaattccaaaaagaataatagtaattgatttaaatagagacgaaattaacaaaaaacctatgtattttgtaaaccctgtcataataaataaagatccactaaaagcaacttacgaagaaggatgtctttcagtaccaaatcagtttgcagaagttgatagaccaagtaagtgtgaaattgaatacttagattatgatggtaataagaaactattaaaggcagacggtttactggctacatgcgtacagcatgaaatggatcatttagaggggatattatttattgattatctttcaaaattaaaaaaaactatgataattaaaaaattatctaagaaaaaatctacagcagcaattctttaa

SEQ ID NO: 265137 - DNA, 538 bp, Unknown
  Bacterial polypeptide expressing nucleotide sequence isolated from the Sargasso Sea
atgtttgagaacttagaaattttacaatttccagatgaaagattgcgtcgcttatccatgcctgttgaaagcttcaaccaggatctgaaaacattggcagacaagatgttagaaatcatgtaccagtcaaacgggattggactagctgctcctcaagttaaccaaacaattcgacttatagttgtagatgtttctgaggaaagagataacccttgtatttttgtaaacccagaaataaaagagccagcaggctctgttgacagcagcgagggatgtctttctgttcctgaaatcagaacaacaatcaaacgatatgaaaacatcacacttaagtatcaggatctcaatggaaaaaagcacgaagaggtgcttaatgatctgatatcaatatgcgttcaacatgaaatagaccacttagacggcaagctttttattgattatgtgccagacgttaagctacaaaggcttagaaagaaaattgccaaaaacaaaaaaaaccaactgccaacaaaaggaacaactgtgagggttgtttaat

SEQ ID NO: 265138 - DNA, 361 bp, Unknown
  Bacterial polypeptide expressing nucleotide sequence isolated from the Sargasso Sea
catgtcagatttaaaaatccttatatttccagatccaaagcttagaaaagtggccaaaaagatagataaattcgacaaaagtttagaaatactttccaaaaacatgcttaagacaatgtatgaagctgaaggtataggcctcgctgcgacacaggttaatattcacattagattggtcgtcatggatttaagcgaagaaaggaatgaaccccgtgtgtttgtaaaccccgaatacacaatattagacaaaagtccatttacttatgaggaaggttgtctgtctattcctggtttttatgaagaatatctaggccgtcaaagatcctacttaaatggcaggatctccagggcaactttcatg

SEQ ID NO: 265139 - DNA, 521 bp, Unknown
  Bacterial polypeptide expressing nucleotide sequence isolated from the Sargasso Sea
tattaagaaaattcttcaagaaccgaataaaatattaagacaaaaatcaacaccagtaacagatgttggaaaagcagaaaaaatattaatggatgacatgcttgaaaccatgtatcacgcaaatggtattggacttgcagcaattcaaattggcatcccaaaaagaattattgttttagacatttcaaaaaataaaaataaaaaaaatccatttttttttgtaaaccctgtaataaaaaataaaaatactgaaaattctacttatgaagaaggatgtttatctgttcctaattactttgctgaaatagatagaccaaaaaaatgtgatgtagaatacttagattacaacggtaaaaaacaattattaaaagccgaaggtctacttgcaacttgtattcaacatgaaatggatcatttagagggaatattatttatcgattatctatcaaaacttaaaaaaacaatgattataaaaaaactatcaaagcaaaaagatagaccagatagaattattgtttaac

SEQ ID NO: 265140 - DNA, 526 bp, Unknown
  Bacterial polypeptide expressing nucleotide sequence isolated from the Sargasso Sea
atggcgaaaagaaaaatcatactggttccagatgaaatcctcagaaaaaaatctgaaaaaattgagaaaataaccgataaagaaaaaaagttagcggacgatttatttaaaacaatgtatgataataatggcataggtcttgctgctgttcaagttggtattttaaggagaatgattgttattgatgtttcaaaaaaagatgatgaaaaaaaacctctttgtttaataaatccagtcataaaatcttttggcaaagataggtcgacatatgaagaaggatgtttatcgatacccgaaacatttattgagatcgaaagaccaaaaacctgtattgttgaatatgttggtatttcaggaaataaaataaacatggaatgtgatggcttactatctacatgtattcagcacgaaattaaccatttggatggaaagctgatcattgattttttatcaaagctgaaaaaagatattctaataaaaaaattatctaaaaacaaaaatacatctagtagagtaattgtgtaaa

SEQ ID NO: 265141 - DNA, 526 bp, Unknown
  Bacterial polypeptide expressing nucleotide sequence isolated from the Sargasso Sea
atggctataagaaaaatacttacagaaccaaacaaaattttacgtcaaatatctaaacctgtggagaaggttaccaaagtagaacaatctttgatggacgatatgttagaaactatgtatgacgcaaatggaataggtctagcagcagttcagatcggaataccaaaaagaattattgttatggacctttctaaagaagataaaataaaaaatccaatgtattttataaaccctgtgattaaaaataagaataaagaattatctacttatgaagaaggttgtttgtcagtaccgaatcaatttgctgaagttgatagaccggcaacatgtgaaattgaatatctagattattacggtgaaaaaaaaataattaaagccgacggattgctggcaacatgtattcagcatgaaatggatcatttagagggaatattatttatcgactatctttcaaaattaaaaaaatcgatgatcattaaaaaactttctaggcagaaaaaaagttctgaaactttagttatttaat

SEQ ID NO: 265142 - DNA, 315 bp, Unknown
  Bacterial polypeptide expressing nucleotide sequence isolated from the Sargasso Sea
gatggctataagaactataataacggaacctaataaactacttagacaagtttcaaaaccagtaaccaaggtaggaatagaagaacagaaattaatgaaagatatgttggagactatgtatgctgctaatgggataggcctagccgcaatacaagttggaattccacaaagaattatagtcatggatatctgtaaagaagaaaataaaaaagaaccaagatattttgtaaatccaataattaagaataaaaatcctttaaaagcaacttatgaagaaggatgcctttctgttccaaacaaatttgcagatataga

SEQ ID NO: 265143 - DNA, 388 bp, Unknown
  Bacterial polypeptide expressing nucleotide sequence isolated from the Sargasso Sea
tatggctattcgacaaatattaacagaaccgaataaaattttaagacaaatatcaaaatctattgaaaatgttacgaaagatgatcaagttctaatggatgatatgttagagacgatgtatcatgcaaatggaattggattagccgccattcaaattggaataccaaaaagaataattgtgatggatatttcaaaaaaggatgaaaaaaaagatccaatgtattttgttaaccctgttataaagaataaaaataatcaattatcaacatatgaagaaggatgtttgtctgtaccaaatcaatttgctgaggttgatagaccagcaacatgtgaagttgaatacctaaattatcatggtgaaaagaaaattttaaaagcaagtggatta

SEQ ID NO: 265144 - DNA, 191 bp, Unknown
  Bacterial polypeptide expressing nucleotide sequence isolated from the Sargasso Sea
catgactataagaaaaattttaacgataccagattctattttaagacaaaaatctttaccagtagataaagtaaatagagaaatcaaaactcttatggatgacatgttaaacacaatgtacgatgcacctggaattggtctagccgctatacaaattggtattccaaaaaggattgtagttatggacttat

SEQ ID NO: 265145 - DNA, 516 bp, Unknown
  Bacterial polypeptide expressing nucleotide sequence isolated from the Sargasso Sea
aaaaaattattactgtaccagatgaaattttaaaaaaaatttctgaacccgttgaaaaagttggagtaaatgaaaaaaaattaattaatgatttatttgaaacaatgtatcattctaaaggtattgggttagcagcagtacaagtgggtatacttaaaaggattttagtcattgatatatcaactaaagatgaaaaaaataaacctttaagttttataaatcctaaaataaaaaaaattagtgatgaaacttcaatttatgaggaaggatgtctatcaatacccgatacttttattgaaattgagagacccaaaatttgtgaagtagaatacatagatttagatggcaaagttcaaattatgaaatgtgatggacttttatcaacttgtcttcagcatgaaataaatcatttagatggtaaattgataattgatcatttatcaaaattaaaaagagatttaattattaaaaaaatctcaaagacaaaaaaaaatcctgacagaatagtagtttaaa

SEQ ID NO: 265146 - DNA, 492 bp, Unknown
  Bacterial polypeptide expressing nucleotide sequence isolated from the Sargasso Sea
catgttgaagctcatttatgcacctgatcctatattaaaaaaagagagtgtatctatacctcaggtagacaatcatcataaagagcttataaaacaaatgtatgagattatgtattctgcaaatggagttggtttagctgctccacagataggtttaaatattcgtatatttgttcttgatgctggctccagagacgaagaaaaaaaacctattacaatgataaatcctaaaattatatctttacatgaaaataaagtgccatatgaagagggttgtttatcttttccagaacattttgcagaaatagaccgtcctgaaaaaattaagatagagtatcttgatgaaaacaattcaaaaaaaatctctacattttcaggttttgagtcgagaataatacaacatgaattggatcacttaaacggtattttgttcgttgaccatttaagtcgtttaaaaagagatgtgattattagaaagatgagaaagtataa

SEQ ID NO: 265147 - DNA, 358 bp, Unknown
  Bacterial polypeptide expressing nucleotide sequence isolated from the Sargasso Sea
tatgagtattttagaaatattaacaattccagacaagagattgaagcaaaaatcatcagatgttgaaaattttgataaagacttagcgaaaatggtcaaagatatgtttgaaactctatatgcttcaggaaatgggattggcctagcagccccgcaggttgggataaaaaaaaggattgtggttattgatttgaaggaagaaggaaaatcaaacccaatgactttgataaacccaaaaattattttttactttgaggaaaagtttgttaatgaagagggttgtctctcaattccagggttttatgcagatgtttcaagatctaattcagttgaagtagaatgggagggtctggacaga

SEQ ID NO: 265148 - DNA, 491 bp, Unknown
  Bacterial polypeptide expressing nucleotide sequence isolated from the Sargasso Sea
aagagcaaaatccttgcaaaagagagatttaacaaaagctcgtttcaagagcctcttgtctgacatggtcgatacacttagagattacggcggggtgggtctggctgcgccccaaatcgatgagagcctgcgggttgtgattattgaaattcgtgacaacaatcttaggtacggagttcgagaatcgtttccactgaccgtcttcgtcaacccagaaattgagctgatcgactctcaaacggcgggtttctgggaaggttgcttgtcaattcccggaataagaggttacgtagaacgcccacagaacatctccgtatcttttgtcgatgaactcggggagtttcgtgctctggatttgcacggatttcccgcaacagttttacagcatgaactcgatcacctggatggcattctttacatagacagaatgaaggacttgcgctctttgagtttcgaagatgagtggacaagacatttaaaagaaaactaga

SEQ ID NO: 265149 - DNA, 550 bp, Unknown
  Bacterial polypeptide expressing nucleotide sequence isolated from the Sargasso Sea
tatgagcgttaaagaaatattaaaaatgggtaaccctcttttaagaaaagaggctgaagatttcactattgaagaaatcaaaagtccagagacacaattattacttgaagatatgtgggactctctagaagttgctggtggaattggattagcagctcctcaaattggcattttaaaaaaactagctgtaataaagttatccgaagaatcaaatagatatccagacatggagaatagtgagccttatgtcatctttaatccaaaagtttctgtggtggatgaaactgaacaaggtttttgggaaggttgccttagtgttcccggattaagaggttttgttgaaagaccgaggagtatcagagtagattttttagacgaaaatgcggaaccaagaactattgaagctgaagattttctagctacggtttttcaacatgagttggatcatttaattggaaaactttatgtagatagaatgaaagatataaagactttaatgtttgagggcgaaatggtttttgatgaattaaaagaagaagtcttggattga

SEQ ID NO: 265150 - DNA, 437 bp, Unknown
  Bacterial polypeptide expressing nucleotide sequence isolated from the Sargasso Sea
tatggctagattaaaaatattaacatttcccgaccctagattaaggaaagttgcttctgcagtaaaagaattcgacaaaagtcttataaaaattactgaaaacatgcttgaaacaatgtatgaagaaaatggtattggtttagctgcaactcaggttgatattcataaaagaatagtggttatggatttatctgaagaaaaaaacaatccgaaagtgtttattaatcctgaatttaaagtattagacgacaaaagtttattttcatgtgaggaagggtgtttatcaattccaggagtaagagaagaaattactagaccagacaaaataaaagcttattggcaagatattgagggaaaaaattacgaagatgaaccagaaggtcttcttgctgtatgttttcagcatgaaatagatcatttggaaggaaagctgctag

SEQ ID NO: 265151 - DNA, 538 bp, Unknown
  Bacterial polypeptide expressing nucleotide sequence isolated from the Sargasso Sea
atgtttgagaacttagaaattttacaatttccagacgaaaggctgaggcggttatctgtccctgttgaagcctttaacaaagagttaaaggccttagcaaataagatgctagaaatcatgtaccaatcaaacggaataggcttagcagctccccaggttaatcaaacaattagactcattgtcgtcgatgtttcagaagacaggaataacccatgtatttttatcaacccaaaaataaagcaaccgtcagggtcagttgacagcagtgagggctgcctgtctgttcctgaaatcagaacaacaatcaagcgatatgaaaacatcactctcgaataccaagacctcaatggcgttaggcacgaagaattattggacgatctgttgtcgatatgcgttcagcatgaaatagaccatttagacggaaagctttttattgactatgttcctgatgtaaagcttcaaaggcttagaaaaaaaatcgccaaaagcaaaaaaaatcaaccaacaatagagggaacaaaggtgagggttgtttgat

SEQ ID NO: 265152 - DNA, 333 bp, Unknown
  Bacterial polypeptide expressing nucleotide sequence isolated from the Sargasso Sea
ttattgttatggatttatcagaaaataaagatgatcccagaatatttataaatccaacatacaaaactcttaaaaatcatagcctacatgagtttgaagaaggatgtctttctattcccggttttaatgaggtcatagcccgccctgataaaattgaattaagatggcaggatttagatggaaatgagcatgttgatcagcctaaaggccttctaacagtatgtattcagcatgaaattgaccatttagaaggaaaactaatggttgattatgtaagcgcactgaaaagagatagggttagaaacaaacttttaaaagaatataaaagataat

SEQ ID NO: 265153 - DNA, 313 bp, Unknown
  Bacterial polypeptide expressing nucleotide sequence isolated from the Sargasso Sea
gaaaaatccaatgtattttgttaatccagtaataaaaaataaaaattctcaaaaatcaatttatgaagaaggatgcctgtctgttccaaatcaatttgcagaaattgatagacccaaatcctgtgacatcgaatatattgattataatggcaagaaagaaaatttatctgcagatggtttgcttgccacttgcatacaacacgaaatggatcatctagaaggaatattatttattgattatttatctaaactaaaaaaatcaatgatactaaaaaaactttctaagaataagcctgatagaattgttgtttag

SEQ ID NO: 265154 - DNA, 535 bp, Unknown
  Bacterial polypeptide expressing nucleotide sequence isolated from the Sargasso Sea
atggcagttagagacatattgagaatgggacatccgacactccgaaaaaagtcggagcctgttggcattcatgatgtcagttcttcaaaaattcaaaatcttattactgatcttagtgataccctcgaagcttcaggcggtatcggcctcgcggcgccacagattggggaattagtaagagtagtgattataaagattcccaaaggttctagcagctatggcgagcttgaggcactgcctctcacagttttcataaaccccatcattacacccgttggtcaggaacaaaaatctcattgggaagggtgcctatcagttccaggacttcgaggcctagtatctcgtccccaaaatattcaacttcgatactacgacccagaaaaaaaagaaacctctttaaaagtcgaaggctttctatccacagtgctgcaacatgaatgcgaccacttggacggaactctttatctagacagactatcagacacgaaagacctgtcctttgaagaagaatttcttgagtacaaccttaactgag

SEQ ID NO: 265155 - DNA, 412 bp, Unknown
  Bacterial polypeptide expressing nucleotide sequence isolated from the Sargasso Sea
tatggccatcagaactataataacagaacctaataaattacttagacaaatatctaaaccagtcaatggtgttggtaaagaagagcaaaaattaatggatgatatgctcgaaacaatgtatgccgcaaatggtattggtcttgcagctatacaaattggaattccaaaaagaataatagtaattgatttaaatagagatgaaattcaaaaaaaaccaatgtattttgtaaacccagttataaaaaacaaagattcgctaaaagcaacttatgaagaaggatgtctttcagtaccaaatcagtttgcagaagttgataggccaagtaagtgtgaagttgaatacttagattatgatggtaataagaagctattaaaggcagacggtttactggctacatgcgtacagcatgaa

SEQ ID NO: 265156 - DNA, 328 bp, Unknown
  Bacterial polypeptide expressing nucleotide sequence isolated from the Sargasso Sea
atgaaaagaaaaaccccaatgtactttgtaaatcctacaattaaaaacaaagataaagaaaaaacaacatatgaagagggatgtttatctgttccagattattttgcagaagttgaccgacctaaatattgtgaggttgaatatttaaactataatggagaaagtaaatttttaaaagcaagtgggctccttgcaacttgtatacaacatgaaatggatcatcttgaaggaattctattcatagattatttatcaaaattgaaaaaaacaatgattattaaaaaattatcaaaaagaaaaaatccccctgatagaattattgtttaat

SEQ ID NO: 265157 - DNA, 302 bp, Unknown
  Bacterial polypeptide expressing nucleotide sequence isolated from the Sargasso Sea
tttaattaaccctgtatttagaccgcttagcgatgaaaaagaggatgactgggaaggttgcttatcaataccaggtatgcaaggcttagttagaagatataaaaaaattaattactatggatttgatatagatggaaataaaattgaaaacgatgctgaaggcttacacgcaagagttgtgcagcatgaaatagaccatctagatggcatcttatatacaaatagactagcagataaaaaagcttttggatttgaaaaagaaatagtagaattttggaaaaatgaaaaaaacagacattaac

SEQ ID NO: 265158 - DNA, 526 bp, Unknown
  Bacterial polypeptide expressing nucleotide sequence isolated from the Sargasso Sea
tatggctattaaaaaaattcttcatgaaccaaataaaatattaagacaaatatcaactgaagttgtagatgttggaaaaaatgaaaaaaaattaatggatgatatgttagaaacaatgtatcatgcaaacggaattggattggcagctatccaaattggtgtcccaaaaagaattattgttttagatatttcaaaaaatgaagataaaaaaaatccaatgttttttgtaaatcctgttataaaaaataaaaactctgaaaattccacttacgaggaaggatgtttgtctgtgcctaattactttgctgaaatagatagaccaaaaaaatgtgatgtagaatatttggactacaatggcgaaaagcaattattaaaagcagaaggtctgcttgctacctgtattcaacatgagatggatcatctgcaaggaatattatttatagattatctatcaaaattaaaaaaaacaatgattataaaaaaactatcacgacaaaaagacagaccagatagaattattgtttag

SEQ ID NO: 265159 - DNA, 511 bp, Unknown
  Bacterial polypeptide expressing nucleotide sequence isolated from the Sargasso Sea
aatggataaattactttatgttccaaatccactactacgccaaaaagctgataaaatacaatctgttggaactaaggaaaaagaaattgccaaaaaaatgatgcaaataatgataaaagcaccaggcgtaggtctagcagcaaatcaaattggaattctaaaacaaatagtaactatattttttgtagatcaagagactaaaaaagaaacacaatatacattatttaatcccaatattgtttcttattctcaagaaaaaattgttatggaagagggttgcttatcacttcctgaacaatttgcagaaatagaaagacctcaaaatatagtagttgagtacttagatgaaaataacaaactaataaaaaaaatagttagtggagtggaatcaagaattttacaacatgaaattgatcatctttctggaaagttatttgttgattatctttcttcattaaaaaggaatataatgattaaaaaggtacaaaaatttttaaaaaataaaaaataa

SEQ ID NO: 265160 - DNA, 515 bp, Unknown
  Bacterial polypeptide expressing nucleotide sequence isolated from the Sargasso Sea
gagtataagaaaaattttaactgaacctgacaaaatattgagacaagtttctaaaccagtagaaagtgttgggaatgaagaacaggatctaatgaaggatatgttagatacaatgtatgctgcaaaaggaatagggctagctgcaatacaagttggtattccaaaaagaataatagtaatagacttaaataaagatgaaaaaaaagatccaatgtattttgtaaatccaataattaaacaaaaaaattcagtaaattcaatttatgaagagggatgtttatctgtaccaaatcaatttgcagaaattgaaagaccaaataagtgtgaagtagaatatttagactttaatggaaaaaaacaacttttaaaagccgaaggtctccttgcaacttgcattcaacacgagatggatcatttggaaggaattctttttattgattatttatcaaaattaaaaaaatctatgatattaaaaaaactttctaaaaataagcctgatagaatagttgtgtaaa

SEQ ID NO: 265161 - DNA, 270 bp, Unknown
  Bacterial polypeptide expressing nucleotide sequence isolated from the Sargasso Sea
aacattctacttatgaagaaggctgcttatcagttccaaatcaatttgcagaagttaatagaccaagtacatgtgaggttgaatatttagattacaagggaaacaaaaaaatattaaaagcttctggcttgctcgccacttgtattcagcatgagatggaccacttagaaggaatattatttattgattatctttcaaaattaaaaaaaatgatgattgtaaaaaaactgtctaagcaaaaaaataaaatagacagaattgttgtttagt

SEQ ID NO: 265162 - DNA, 499 bp, Unknown
  Bacterial polypeptide expressing nucleotide sequence isolated from the Sargasso Sea
gatgagtattaaagatataattacagttcctgatgaaactttaaaaaaaatttctgaaccattagaaaaagttagcaacaatgaaaaaaaacttatcaatgatttatttgataccatgtatgcatcgaaaggaattggattagctgcagtgcaaataggtgtcctgaaaagaattttagtaattgatgtgtccactaaagatgaaaagaggaagcctttaagttttataaatcccgttataaaaaatgttagtaatgagacctcgatttatgaagagggttgtttgtcaattccagacacctttatagaaattgaaagaccaaaaatttgcgaagtggaatatattgatataaatgggaaaaaaaaaaacttaaagtgtgatggacttctatcaacttgtttacaacacgaaataaatcatttagatgggaaattaataattgattacttatcaaaattaaaaagagatatcatcataaaaaaaattcaaaaacaaaaa

SEQ ID NO: 265163 - DNA, 526 bp, Unknown
  Bacterial polypeptide expressing nucleotide sequence isolated from the Sargasso Sea
tatggctataagagaaatactgacagaaccaaacaaaattttacggcaaatatctaaacctgtggagaaggttaccaaagaagaacaaacgttgatggatgatatgttagatactatgtatgacgcaaatggaataggcctagctgcaattcagattggaataccaaaaagaattattgtattagatctttccaaagaagataaagaaaaaaatccaatgtattttgtaaatcctgtaattaaaaataaaaataaagaattatctacttatgaagaaggttgtttgtcagtaccgaatcaatttgctgaaattgatagacctacaacatgtgaaatagaatatctaaattattatggtgaaaaaaaaatacttaaagcgaatgggttattagcaacatgtattcaacatgaaatggatcatttagagggagtattatttatcgattatctttcaaaactaaaaaaatcaatgataattaaaaaactttctaaacagaaaaaaaattctgaaactttagttatttaa

SEQ ID NO: 265164 - DNA, 520 bp, Unknown
  Bacterial polypeptide expressing nucleotide sequence isolated from the Sargasso Sea
atgactatcaaaacaattattaccgaaccaaataaattgcttaggcaaatttcgaaaccagttaacgtagttggaaaggaagaacaaaagttaatggatgatatgcttgagactatgtatgccgcaaatggaattggtcttgcagcgatacaaattggagtgccaaagagaattattgtaatggatataagtaaagaggagaataaaaaagaaccaagatattttgtaaatccagttataaaaaataaagatacaataaaagcaacttatgaagaaggatgtctttccgtgccaaatcaatttgcagaaattgatagacccagtaagtgcgaggttgaatacatggattatgatggaaataaaaagttactaaaagcagaaggtctattagctacatgtatacagcatgaaatggatcacttacaaggaatactatttattgattatctttcaaaattgaaaagatcaatcataattaaaaaattattaaaactaaagtctagttctgcagaagcttaat

SEQ ID NO: 265165 - DNA, 511 bp, Unknown
  Bacterial polypeptide expressing nucleotide sequence isolated from the Sargasso Sea
atggataaattactttatgtaccaaatccactattacgccaaaaagcagataaaatccagtctgttggaattaaggaaaaagaaattgccaaaaaaatgatgcaaataatgataaaagcaccaggtgtaggtttagcagcaaatcaaattggaattctaaaacaaattgtgactatattttttgtaaatcaagagactaaaaaagaaacacaatatacattatttaaccccaatattatttcttactctcaagaaaaaattattatggaagagggttgtttatctcttcctgaacaatttgcagaaattgagagacctcaaaatatagtagtcgagtacttagatgaaaataacaaacaaataacaaaagaagttagcggagtggaatcaagaattttacaacatgaaattgatcatctttctggaaagttatttgtagattatctttcttcattaaaaaggaatataatgattaaaaaagtacaaaaatttttaaaaaacaaaaaataat

SEQ ID NO: 265166 - DNA, 520 bp, Unknown
  Bacterial polypeptide expressing nucleotide sequence isolated from the Sargasso Sea
atggctatcagaactattataacagaacctaataagttacttagacaaatttctaaaccagtcaatgctgttggtatagaagaacaaaaattgatggatgatatgcttgagacaatgtattcagcaaatggaattggtctcgctgccatacaagttggtgtaccaaagagaattatcgttatggatataagtaaagatgagaataaaaaagagccaagatatttcgtaaatccagttattaaaaataaagatccactaaaagcaacttatgaagaaggatgtctctctgttccaaatcagtttgcagaaattgatagacctagtaagtgtgaagtagaatatcttgattatgatggagaaaaaaaattgttaaaggcagacggacttcttgctacatgtattcagcatgaaatggaccatttagaggggatactatttattgattatctctcaaaattaaaaaaatcaatgataattaaaaaattatcaaaattaaaatctacctcagcagaagcttaat

SEQ ID NO: 265167 - DNA, 381 bp, Unknown
  Bacterial polypeptide expressing nucleotide sequence isolated from the Sargasso Sea
tggtttagctgctccacagataggtttgaatattcgtatatttgttcttgatgcaggcgctagagatgaagaaaaaaaacctatcacaatgataaatcctaaaattatatcattacatgaaaataaagttccatatgaagagggttgtttatctttcccagagcattttgcagaaatagaccgtcctgaaaaaattaagatagagtatcttgatgaagacaactcaaaaaaaatttctacatttacaggttttgagtctaggataatacaacatgaattggatcacttaaacggtattttattcgttgaccatttaagtcgtttaaaaagagacgtgattatcagaaagatgagaaaatataaaaaagaaaaagaaataat

SEQ ID NO: 265168 - DNA, 523 bp, Unknown
  Bacterial polypeptide expressing nucleotide sequence isolated from the Sargasso Sea
tatgttaagaaaaattcttacagaacctgatcctattctcaggaaaaaatgtgaacctttagaaaaagtagacattgatacaaaaaagctaatggatgatatgcttgagactatgtatgcagctccaggaattggcttagctgcagtacaagttggaattttaaaaaggttagtggtgattgatatttccaaaggtgaagaaaaaaaacaacccatatttctgataaatcctcaaataatacatcggtctaaaaaaacctcagtatatgaagagggctgtttatctctaccaggacaattcgctgaaatagaaagaccggcagaatgtactattaaatatattgattataatgggaaagaaaaagatttaaaagctgatggccttttagctacttgcatccaacatgaagttgatcatttgaatggaatattatttattgattacctatcgaagcttaaaaaagatatgatcataaaaaaacttgttaaacagaaaaaagaaattgagagagtaatagtctaa

SEQ ID NO: 265169 - DNA, 388 bp, Unknown
  Bacterial polypeptide expressing nucleotide sequence isolated from the Sargasso Sea
gatggcgaaactctatgcagagatgtgccaggcgatgtggatgtcagatggtataggtttagctgcaccacagataggtgtgaataaaagggtaattatagtagatgagtctacagaagaatatggaaaatatgctcacttaatggtaaatcccaaaataacttggaaaagcgaagaaaaggtgttacttgatgaagggtgtttgagtgtaccagaccaaaatggtgaagtttcacgttctaagtctataaaactaacctttcaaaataaagatggtaaatacaagaaatggaaactagatggaattgctgccagagtggttcagcacgaaattgaccatttagaaggtattttatttgtggattatctcgatgctaaagacaattaa

SEQ ID NO: 265170 - DNA, 355 bp, Unknown
  Bacterial polypeptide expressing nucleotide sequence isolated from the Sargasso Sea
aatgttaaaaaaaattttaattgaacctgatcctattttaagacaaaagtgtgaagctctagaaaaagtagactcaaatacaaaaaaactcatggatgatatgttagaaaccatgtacgcagcgcccggcattggtttagcagcaatacaaattggaattttgaaaagattggttgtcatagatatttctaaagaagaaggaaaaagacagccaatatttttagtaaatccagaaataacgtatagatctaaagaaacctcagtttatgaggaaggctgtttatctttacctggacaatttgccgaagtagagcgaccagctgaatgttctattaaatatatcgattataatgga

SEQ ID NO: 265171 - DNA, 352 bp, Unknown
  Bacterial polypeptide expressing nucleotide sequence isolated from the Sargasso Sea
atggccataaagaaaattattacggaacccagtaagattttgaggcaaaagtcaaaaacagttgaaaacgtcggaaacgaagaaagaaagcttatgaatgatatgctagatacaatgtatcatgctaatgggataggtttagctgctatacaaataggaatcccaaaaagaataattgttatggatatttcaaaaaacacggaaaaaaaaactcctatgtattttgttaatccaataattaagaataaaaattctgaacattctacttatgaagagggttgtttatcagtaccaaattattttgcagaaattgacagaccaaaaaaatgtgaagttgagtacttagattata

SEQ ID NO: 265172 - DNA, 526 bp, Unknown
  Bacterial polypeptide expressing nucleotide sequence isolated from the Sargasso Sea
atgagcattaaagatataattacagttcctgatgaaatgctaaagaaaatttctgaaccactagaaaaagttagtattaatgaaaaaaaacttatcaacgatttatttgacaccatgtacgcatctaaaggtattggactagctgcagtacaaataggtatcctgaaaagaattttagtaattgatgtatctaccaaagatgaaaagagtgagcctttaagcttcataaatcctgttataaaaaaagttagcaatgaaacctcagtctatgaggagggctgtctatcaattccagacacattcatagaaattgaaaggccgaaaatttgtgaagtggaatatattaatataaatggagaaaaaaaaaatctaaagtgtgatggacttttatcaacttgtttacaacacgaaataaatcatctagatggaaaattgataattgaccatttgtcaaaactgaaaagagatatcatcattaaaaaaatttcaaaaacaaaaaaaaatcccgacagaatattagtttaga

SEQ ID NO: 265173 - DNA, 253 bp, Unknown
  Bacterial polypeptide expressing nucleotide sequence isolated from the Sargasso Sea
caagagggctgtttatctgtacctgaatattatgcagatgtagaaagagcaaaagaagttgaagtagaatggtttgacgactctggggtaaagtgtaaaaaaaaactttcaggccttttgtctatatgcattcaacatgagattgatcatttagacggtatattatttatcgatcatttatcagccttaaaaagaaaaatggcaattcaaaaaataaaaaaaatcaaaaaaaatataagtaatgatggatgat

SEQ ID NO: 265174 - DNA, 508 bp, Unknown
  Bacterial polypeptide expressing nucleotide sequence isolated from the Sargasso Sea
atggaaatattattagttccacatccagctttacgtcaaaaagcaaataaattaacttctattactgaagaagatatagaaattgcaaattttatgatggaaactatgattaaagctcctggagttggtttggcagcaaatcaggtcggagttttgaaacaaattgttacaataaaatttgaagataaagaaaataatagaaaagctaattatattttgtttaatcctagaataattcaatattcagaagaaacagctataattgaagaaggatgcttatctttacctgaacaatatgcagatgtgaaacgaccaaaagaaattatacttgaatatattgatgaaaaggaaaaaacaataaaaaagcaaatagatggttatgagtcaagaattttgcaacatgaaatagatcatttatcaggcaagttatttgttgattatttatcttctttaaaaagaaacatgttaataaaaaaagttaaaaaactacaaaattttaaaaaataat

SEQ ID NO: 265175 - DNA, 433 bp, Unknown
  Bacterial polypeptide expressing nucleotide sequence isolated from the Sargasso Sea
aaattgatggatgatatgcttgagacaatgtacgacgcaaatggaattggtctcgcggcgatacaagttggcgtaccaaagagaattattgtaatggatattagtaaagaagagaataaaaaagagccaagatattttgtaaatccagttattaaaaataaagatcctgaaaaagcaacttatgaagaaggctgtctttctgtaccaaatcagtttgcagaaattgatagacctagtaagtgtgaagtagaatatcttgattataatggagaaaagaaattgctaaaagcagatggtcttcttgcaacatgtattcagcatgaaatggaccatttagagggaatactatttattgattatctttcaaaattaaaaaaatcaatgataattaaaaaattaactaagaaaaaatctccgtcagcaattctttaaa

SEQ ID NO: 265176 - DNA, 511 bp, Unknown
  Bacterial polypeptide expressing nucleotide sequence isolated from the Sargasso Sea
atggataaaatactttatgtgccaaatccattattacgtcaaaaggcaaaaaaaatcaaaacagttggaaaagaggaaataaagatagctcaaaatatgaaaaaaataatgattaaagcacctggtgttggtttagcagcaaaccaaattggtattttaaaacaaattgttactattgcatttttagatcgtgaaaaaaataaaactatagaatataatttatttaatccaaaaataattaatttttctaaagaaaaaattgttatggaagaaggttgcttgtcacttccagatcaatttgcagaaatagaaaggccaaaaaaaatcgtgttagaattcttagatgatagcaataatttaataaaaaaagaagttgacggagtagagtcaagaattttacaacacgaaattgaccatctttcaggtaaattatttgtagactatctttcttctttaaaaagaaatattataataaaaaaagttcaaaaatatttaaaaagtaaaaattaat

SEQ ID NO: 265177 - DNA, 351 bp, Unknown
  Bacterial polypeptide expressing nucleotide sequence isolated from the Sargasso Sea
tatggctaaaaatttaaaaatattaatctttccagacccaagattaagaaaagttgctgaaaaagttacaaaattcgacaaaagtctagaaaatttagcaaattctatgttaaagacaatgtatgatgcaaatggcataggtctagcggctactcaggtagacaagcatataagacttattgttatggatttatcagaaaatagagatgatcccaggatatttataaatccaacatacaaaattcttaaaaatcatagcctatatgagtttgaagaaggctgtctttctattcccggttttaatgaggtcatagctcgccctgataaaattgaattaagatggcaagattt

SEQ ID NO: 265178 - DNA, 337 bp, Unknown
  Bacterial polypeptide expressing nucleotide sequence isolated from the Sargasso Sea
atgactgtaaaaaaaattttaacagaaccaaataaattattaagacaagtatctaaaccagtagattttgttggaaaagaagaacaagaattaatggatgatatgattgacacaatgtatgatgcaaacggtattggattagcagcaatacaaataggcgtaccgaaaagaataatagttttagatattagcaaagatcaaaaaaataaaactccaatgttttttgtaaatccagtagtcaaaaataaacatgtagataaaacatcttatgaagaaggttgcttatcagtgccaggtcaatttgcagaaattgaaagaccaagcagctgtgatgtag

SEQ ID NO: 265179 - DNA, 505 bp, Unknown
  Bacterial polypeptide expressing nucleotide sequence isolated from the Sargasso Sea
atgaataaaatttcattaaaaatttatcctgatgaggttctaaggactgtatgttctgaaatttctaatattgactcagatattgtaaaaattgttgaatctatgaaagaaataatgataaaagaaaaaggtattggattagctggacctcaagtaggagtaactaaaagattatttataactcaagatttttctaagaatgatgagctagattttttagttatgattaatcctaagataaaagaagaatcgggagaagttagctcaaaagagggttgtcttagcattccaggatattatgattatattcctaggtttgataacatttctgtagaatatgttgatctaaatggagatttaaattccaaagtttttgaaagtatgcaatcgatagtttttcaacatgaattagatcatctcgatggaatattatttcctgacagattagcaaagattagaaaagaaattttctttaaaaaaattaataaagaattcagaaaataaa

SEQ ID NO: 265180 - DNA, 526 bp, Unknown
  Bacterial polypeptide expressing nucleotide sequence isolated from the Sargasso Sea
atgaccaaaagaaaaatcatactggttccagatgaaatcctcagaaaaaaatctgaaaaaattgagaaaataactaataaagaaaaacagttggcggacgatttatttaaaacaatgtacaacaataatggcataggtcttgccgctgtccaagttggtgttttgcgaagaatgattgttattgatgtttcaaagaaagatgaagaaaaaaaacctttttgtctaataaacccagtcataaaatctttcggtaaagataggtcgacatatgaagaaggttgtttgtcgatacctgaaacatttattgagattgaaagaccaaaaacatgtattgttgaatacattgatgtttcaggaaataaaataaacatggaatgtgatggtttactatccacatgtatccaacacgaaattaatcacttagacggtaagctgatcattgattttttgtcaaagctgaaaaaagatattctaataaaaaaattatctaaaaacaaaaatacatctagtagagtaattgtgtaaa

SEQ ID NO: 265181 - DNA, 462 bp, Unknown
  Bacterial polypeptide expressing nucleotide sequence isolated from the Sargasso Sea
aagtgacagactttgatcaaagtctcgataataccactcaatccatgctggaaacaatgtacatttctagcggaatcgggcttgcggcgatccagacaggtatcctcaaacaaataatagtgatcgatttaaaaagtggtgaaaaagacactagcctcagggaaccacatgtctttgttaatccaaaaatattaaagaaatatgggtcgactgtctctgaagaaggctgtctcagcgtgattgatttcaggggtgatgttgagcgtgctgaaaaaatatcgattgaataccaggatgttaatggtaatatccatcaaatggaagctgaaggaatgatgtcaatttgtcttcagcacgaaatcgatcatttaaaaggtattttatttattgatcacttgcctgtattgaagcaaaaaatggtgaaaaagaaactgacaaaacttgccatgacaaatgcatgaa

SEQ ID NO: 265182 - DNA, 520 bp, Unknown
  Bacterial polypeptide expressing nucleotide sequence isolated from the Sargasso Sea
aatgaaaattcttttagtacctgatcctattttaagacaaaaagctctaaaaatagataatatagaagaagaagatatagctatagctaataaaatgatgaatataatgattaaagttccaggcgtaggacttgcagcaaatcaagtaggtattttaaaacaaattgtaacaataaattttaaggaagatgaaaatagtaaagaaaaaaaatatattttatttaatccaaagattttaacttattccaaagaaacagtaataatggaagaaggttgtctttctttacctgatcaatatgctgatattgaaagacctcaaaaaattactcttgaatatttagatattaaaaaaaaattaataaaaaagactgttgatggttatgaggcaaggatattacaacatgaaattgatcatttatctgggaaattatttgttgattatctatcttctttaaaaagaaatattttaattaataaagttaaaaaacaatcaaaaagggataaagaaaatggaaaataa

SEQ ID NO: 265183 - DNA, 526 bp, Unknown
  Bacterial polypeptide expressing nucleotide sequence isolated from the Sargasso Sea
tatggctacaaaaaaaattttaacagaaccaaataaactacttaggcaaatatcaaaaacagtagaaaaagtaaaagatgaagaaagaaagcttatggatgatatgttggaaactatgtatgctgctaacggtattggtcttgcggctatccaaattggtgtaccaaaaagaattattgtgatggatataagtaaaaaagaaaatgaaaaaaatccaatgttttttgtaaatccagtaataataaaaaaaaatattgaaaaagccacttacgaagaaggttgtttgtctgtacctaatcaattcgctgaaattgatagaccaagctcatgtgaggtggaatatttagattatgatggtaataaaaaaaacttaaaagctgaaggtttattagcaacttgtatacaacatgaaatggatcatttagaaggaattttatttattgattatttatcaaaattaaaaaaaacaatgataatcaaaaaactttctaaattaaaaataaagcccgatcgaataattgtttaa

SEQ ID NO: 265184 - DNA, 454 bp, Unknown
  Bacterial polypeptide expressing nucleotide sequence isolated from the Sargasso Sea
atgacaataaaaaaaattataactttaccagatccttttttaagaacaaatgctatacctgttactaaagttacaaaagaaataagacaacttttagatgatatgcttgaaacaatgtatgttgctaatggtgttggtttggcctcaactcaaataaaagataatagaagacttatagtaatggattgtggaaaggaaaatgaaaataaattagttcaaaatgaaaaagaattagttccttatcccataaaaatgattaatccaaaattaacatttaagagttcagacttaattgaaagagaagagggatgtttatcgattcccggtcaccaggcaaaaattaaaagacctagattaatcaaggttagatatttagatgaaaatggaattaaaagggaattagaaactgacggcttattagctgcatgtattcagcacgaaatgatcatttaaa

SEQ ID NO: 265185 - DNA, 526 bp, Unknown
  Bacterial polypeptide expressing nucleotide sequence isolated from the Sargasso Sea
tatgagtgttaaagaaataattacagtaccagatgaaactttaaaaaagatttctgatcctgttgaaaaaattggtattaatgaaaaaaaattgattaatgacttatttgagactatgtacgtttcaaacgggattgggcttgctgctgtccaaataggtattcttaaaagaattttagttgttgatgtttcaactaaagatgaaaagaatcaaccaatagtattaatcaatccagtgattaaaaacttaagtgatgatacatcagtttatgaggagggatgtctctcgatacctgaaacatttattgaaattgaaagaccaaaaatatgtgaagttgagtatatcgatgaaaaaggctcaaaaaaaaatcttgaatgtgacggacttttatcaacctgtattcaacatgagattaatcatttggatggaaaactgataattgatcatttatcaaaattaaaaaaagattttattattaaaaaaatctcaaaaattaaaaaaaatccagacagaatagtagtttaa

SEQ ID NO: 265186 - DNA, 331 bp, Unknown
  Bacterial polypeptide expressing nucleotide sequence isolated from the Sargasso Sea
aagcaaggttgataataaaaaagaaccacgatattttgtaaatccagttattaaaaataaagacccactaaaagcaacttatgaagaagggtgtctttctgtgccaaatcaatttgcagaaattgatagacctagtaagtgtgaagttgaatacctagattataacggtaataaaaaaatattaaaagccgatggtttattggcaacatgtattcagcatgaaatggatcatttagaaggaatattatttattgattatttatcaaaattaaaaaaatctatgataattaaaaaattatctaagaaaaaatctacttcagcaattctttaa

SEQ ID NO: 265187 - DNA, 524 bp, Unknown
  Bacterial polypeptide expressing nucleotide sequence isolated from the Sargasso Sea
ttatctaataaagtttatggaaatattattagttccacatccaattttacgtcaaaaagcgaataagctaaaatccattactaaagacgatataaaaatagccaatcttatgatgcaagctatgattaaagcacccggtgtcggattggcagcaaatcagattggggttttaaaacaaattgttactattaattttgaagataaagagaatgataaaaaagctaattatattttatttaatcctgaaattattcaatattcaaaagaaactgtagtgatggaagaggggtgtttatctcttccagatcaatatgcagacgtagaacgaccaaaagaaatcattttagaatatatggataaaaatgaaaaaactataaagagacaaatagatggatatgaggcaagaattttgcagcatgaaatagatcatttatcaggaaaattatttgttgattatttatcttctttaaaaagaaacatgttaataaaaaaagtaaaaaaaaaccaaaagtcaaaaaaataaa

SEQ ID NO: 265188 - DNA, 281 bp, Unknown
  Bacterial polypeptide expressing nucleotide sequence isolated from the Sargasso Sea
gaaaattgtgtggacatcacgcgaattgtctgtttacaaggagggctgtctttcaatacctgagttttatgaagaaattgagagaccatccgaatgtcgggtcaagtatctcgataaaaaaaataaggtaaaattcttggattgtgatgggcttcttgcgacatgcgtccagcatgagatagatcatttagacgggaaattatttattgactacctctcccgtctaaaaagaacatctatcgaaaaaaaatttatcaaacaatataagcaaaaggcttaag

SEQ ID NO: 265189 - DNA, 299 bp, Unknown
  Bacterial polypeptide expressing nucleotide sequence isolated from the Sargasso Sea
catgtcagatttaaaaattcttatatttccagatccaaagctaagaaaagtggctaaaaggattgataaattcgacaaaagtttagaaatgctttccaaaaacatgcttaagacaatgtatgaagctgaaggtataggccttgctgcgacccaagttaatattcacattagattggtcgtcatggatttaagccaagaaaggaataaacctcgtgtgtttgtaaaccccgaatatacaatattagacaaaagtccatttacttatgaggaaggttgtctgtctatccctggttttaacg

SEQ ID NO: 265190 - DNA, 139 bp, Unknown
  Bacterial polypeptide expressing nucleotide sequence isolated from the Sargasso Sea
cttttggcaatctgtatacaacacgaaattgatcatttagatggaaaactatttgtagattacttatctaatcttaaacagaatagattaaaaaaaagaatatccaagatagaactgaaggagagcactgcaagctaag

SEQ ID NO: 265191 - DNA, 550 bp, Unknown
  Bacterial polypeptide expressing nucleotide sequence isolated from the Sargasso Sea
atgtcggtattagaagtggtaaactacggaaatccaatacttcgtaagaaatgtagccaagtaactaatttttccaaattatcagattttatcgatgatatgtttgatactatgtatgaagaagaaggcattggactagctgctaatcaggttggagttgatttgaacttatttattattgatatttctcatacggatgataatgaatttccaaggatatttattaatggtgaggtcacatctgcaagcggagaaagtgttttttctgagggatgtctatctattccagaggttgcccttgaagtaactaggcctgaagtaattttatttaaatatcaagacattcatgaaaaatggtatgaggaggagtttgatggtcttctttcccgtgcaatacaacatgaaatcgatcatttgaatggtgttttaattattgatctagtgagtgagatgcaaagattaaaggtcaataaagaagtaaaaagaattaagaatgattccattattaagttaaaaaggcaaccaattagcaaagggattgtcctttagt

SEQ ID NO: 265192 - DNA, 469 bp, Unknown
  Bacterial polypeptide expressing nucleotide sequence isolated from the Sargasso Sea
tatgtgggatactatgtataatgccgagggtgtaggtttagctgcacctcaaattggtagacaaattaaattatttataattgatgcttctcctttttttgaagaaaaggaagtaacagattatgaattaaaaaacttgaaaagagtttttataaacccaacagtaacttatttaaatgatgaaaaatgtagtttcaatgaggggtgtttaagtatcccagatataagggaagatattgaaagatttgattcaattaaaattgatttttttgatgaagaatttaattcacactctttagattttaatggaattttatcaagggtaattcttcacgaatatgatcatattcaaggtgttttattcaccgataaaatatcaaaattcaaaagaactttgattcaaaaaaaattaaataaaatttctcgtggacaaattgatgttaattatcctatgaaattctcaaaataa

SEQ ID NO: 265193 - DNA, 544 bp, Unknown
  Bacterial polypeptide expressing nucleotide sequence isolated from the Sargasso Sea
atggcagttttaaatattttgaaatatccgcatcccaatttgcggctgcgtgcacatccagtgaatgccatagatgccgatatacacaaactatgtgatgatatgttggagaccatgtatgcagcttctggcataggtctggcggctactcaggtagatgtgcgtaaacgagtagtggtgatagatttaagtgacggcaatgttaagggtaagtattcgtatactaacatcacacaagtactggttaacctttctaaaccactctgtttaatcaatccagaggtaaaagttttagataaaaatgtggtgccatatgaagaaggttgtttatctgtgcctaatgttaatgctgtagtaaaacgtcctaataaaatactgttacgtgcacagacattgcaggacagtaatatggagatagaggcaactggtttgttggcaacctgtttgcagcatgaaattgatcacttagatggcaaactgttcatagatcatttatctcagctaaaaatgcagcaagtgaggcgtaagtttaaattaaaataat

SEQ ID NO: 265194 - DNA, 277 bp, Unknown
  Bacterial polypeptide expressing nucleotide sequence isolated from the Sargasso Sea
atgaatattagaaagattttaatattaccagatcctgtattaagaaaaaaatctttaccggttaaaaaagtagacaaggatattcaaaacttgatggatgatatgttagctactatgtatgatgcaccaggaataggtttggcagcaatccaaattggaattttaaaaagaatagtggtgatggatgtatcaaaagaaccagaaaagaaagaaccaatgtatctaattaatccagaaataacctggaaatcaaatgttaatgcatcctacgaagagg

SEQ ID NO: 265195 - DNA, 516 bp, Unknown
  Bacterial polypeptide expressing nucleotide sequence isolated from the Sargasso Sea
aattagaaaaatttttaactgaaccagacaaatttctacgccaagtatctaagactgtcctaaaggtaactgacgaagaaagacatttaatggacgatatgctagaaacaatgtatgatgctaatggtataggattagctgctatacaagttggagtgcctaaaagaattttagtgatagatttaggaaaaaaagagaataaaaatatgcctttattttttgtaaaccctaaaataattaaaaaaaatgacaaattggcaacatatgaagaggggtgtttatctgttccagatcaatttgcagaaattgatagaccaaataaatgtactgttgaatatttagattataatggaaagaaaaaagtattagatgctgatggacttctagcaacatgtcttcaacacgaaatggatcatttagaaggaatattatttattgactatttgtcaaaacttaaaagagattatatcatcaaaaaattaacaaagagcaaaccagatagaatcgttgtataga

SEQ ID NO: 265196 - DNA, 229 bp, Unknown
  Bacterial polypeptide expressing nucleotide sequence isolated from the Sargasso Sea
tatgattagacctattattttacacccagatgcacgattgaaaaaaaaatctgtgcaagttgagagtataaatgacgccttaattgaattggcagaagatatgatggagacaatgtatgatgctcctgggatcggcttggcggcccctcaaattggtgtattagaaaggttaattgtaatggattgtgccaaaaaagaggatgaagaaccggatccaattattatgttg

SEQ ID NO: 265197 - DNA, 355 bp, Unknown
  Bacterial polypeptide expressing nucleotide sequence isolated from the Sargasso Sea
atggctattaaaactataataacagaacccaataagttacttagacaaatttctaaaccagtcaatggtgtaggtaaagaagagcaaaaattgatggatgatatgcttgaaacaatgtatgacgcaaatggaattggcctagctgccatacaagttggtataccaaagagaattattgtaatggatataagcaaaggtgagaataaaaaagagccaagatatttcgtaaatccagttattaaaaaaaaagatctagaaaaagcgacttatgaggaaggatgtctttctgtgccaaatcaatttgcagaaattgatagacctagtaagtgtgaagtagaatatcttgattattagg

SEQ ID NO: 265198 - DNA, 499 bp, Unknown
  Bacterial polypeptide expressing nucleotide sequence isolated from the Sargasso Sea
cctgacgaaactttaaaaaaaatctctgaaccagtagaaaaagtcagcactaatgaaaaaaaacttattaatgatttatttgatacaatgtacgcttcgaaaggtattggattagctgcagtacaaataggtatcctgaaaagaattttagtaattgatgtttctactaaagatgaaaagagggagcctttaagtttcataaatcctgttattaaaaaagttagtgatgaaacctcaatttatgaggagggttgtttatcaattccagatacatttatagaaattgaaaggccaaaaatttgtgaagtggaatatattgatatcaatggtgaagaaaaaaatttaaaatgtgacggtcttttatcaacttgtttacagcacgaaattaatcatttagatggaaaattgataattgaccatttatcaaagttaaaaagagatatcattatcaaaaaaatttcaaaaacaaaaaaaaatcctgacagaatattagtttaga

SEQ ID NO: 265199 - DNA, 388 bp, Unknown
  Bacterial polypeptide expressing nucleotide sequence isolated from the Sargasso Sea
cttgcggcaattcaaattaggagtaccaaaaagaattatagttatggatatttctaaaaatgatcaagaaaataacccaatgtattttgtaaatcctgtaattaaaaataaaaataaagaattttctacctacgaagagggctgcttatctgtaccaaatcaatttgcagaagttgatcgtccagctacctgtgaaattgagtatttagactattatggagaaaaaaaattattaaaagcgcagggattattagctacatgtattcaacatgaaatggatcatttagaaggaatattatttattgactatctttcaaaactaaaaaagtcgatgattataaaaaaactttctaaaagcaaaaaaaattcagaaactttagttatttaa

SEQ ID NO: 265200 - DNA, 391 bp, Unknown
  Bacterial polypeptide expressing nucleotide sequence isolated from the Sargasso Sea
tgtgcaggttggtgtaccccttagagttattgtcatggatatttcatggaataaggaggacggtataaaagaaccaaagtattttgttaatcctgtcatttcaaataaagcaaaagatttatctatttatgaagaagggtgtctttcagtgccagatcaatatgctgaaattgagagacctgaaaagtgtgttattaattacttagattatgatggtgaagaaaagcaagaagaggtggaaggcctttttgcaacttgcattcaacatgaaatggatcatcttgaaggaattttgtttattgatcatttatcaaaattaaagaaaaatttaattgtaaagaaactagtaaaagcaaaaaaacaatcatcaaaagaacgaattgtagcctag

SEQ ID NO: 265201 - DNA, 511 bp, Unknown
  Bacterial polypeptide expressing nucleotide sequence isolated from the Sargasso Sea
atggctgttttacagatcttaacaattcctgaccctagattgaagtataaatctattaatgttgaaaattttgataaaaaccttgaggaaattataaatgacatgcttgatactctaagtgcttcaggtaatggtataggtttggcagcaccacaggtgaatatccatcaaagaataatcgttatggatctgagagaagatgaaaaatctaatccacaaatttttataaacccaaggataataaaattttcttctgaaaaaaatattaatgaggaaggttgtttatctattcctgaattttatgcagaggtagaaagaccatcaaaaattgaggttgaatggtttgattcaaaaggtaaaaaattaaaaaaagaaatgactggattactatcaatatgtatgcagcacgaaatagatcatttaaatggagttttgtttatagatcatatttctaaactaaaaaaaaagatggtactccaaaaattcaaaaaactaaaaacaaaacaataga

SEQ ID NO: 265202 - DNA, 315 bp, Unknown
  Bacterial polypeptide expressing nucleotide sequence isolated from the Sargasso Sea
aatcccatgtatttgttaatccagaattaattaataaatctccaaataattcaacctatgaagaaggttgtttatctgtaccgggtcagtttgctgaaattgatagaccaaatagttgtcatgtaaaatatttagattactacggccaacctaaagaacttaaagccacaggtatgcttgcgacatgtattcagcatgaaatggatcatttagaaggaatattatttattgattatttgtctaaattaaaaaaaacaatgattataaaaaagctttctaagcaaaagaaagcaatcgaaagaattgtagtttaaa

SEQ ID NO: 265203 - DNA, 304 bp, Unknown
  Bacterial polypeptide expressing nucleotide sequence isolated from the Sargasso Sea
atgttttataatccagtaataaaaaaaataagccaaaaaacatctatttatgaagagggatgcttatcaataccaaatacatttattgaaatagaaagacccaagatttgcactatatcttatgtagaccaagagggagcaaaaagagaaatggattgtgatggacttcttgcaacctgtatacagcatgaaataaatcatttagatggaaaattaataattgattatttatctaaaattaagaaagatttaataataaaaaaattatctaaacaaaaaacttcaaatagagttgttgtttaaa

SEQ ID NO: 265204 - DNA, 385 bp, Unknown
  Bacterial polypeptide expressing nucleotide sequence isolated from the Sargasso Sea
tggtcttgccgcaatacaagttggaataccacaaaggattatagtcatggatatttgcaaagaagaaaataaaaaagagccaagatattttgtaaatcctatgattaaaaataaagatcctttaaaagcaacttatgaagaaggatgcctttcggttccaaaccaatttgcagaaatagatagaccaagtaaatgtgaagtagagtatttagattataatggaaaaaaacaattattaaaggctgaaggtttacttgctacatgcattcaacatgaaatggatcacttagaaggtatattatttatcgattatctctcaaaattaaaaaaatcgatgataataaaaaaattatcaaaattaaaatcaagtacagccgaagtttaa

SEQ ID NO: 265205 - DNA, 309 bp, Unknown
  Bacterial polypeptide expressing nucleotide sequence isolated from the Sargasso Sea
catggccactttaaaaattttaatatttcctgacccaaaattaaggactgtggctgagcccattaaagaggttgataattcgatagccaaacttgtagaagatatgtttgaaaccatgtatgaaggtgatggtatcggcttggctgcaactcaagttgatattcacaaaagagttatagtcattgacgttagtaatgaaaagaatgctcctttagttcttattaatccaatgataaaaagaataattaataatgaaaagaagccctattccgagggttgcctttcagtgcccggtatttatgaagagct

SEQ ID NO: 265206 - DNA, 391 bp, Unknown
  Bacterial polypeptide expressing nucleotide sequence isolated from the Sargasso Sea
atgactgaattaagtatattactacatcctgaccctcgacttaaaaaagtatgcactcaagtaactaatattgatgagagtatcaagaaactttgtttagatatgacagatactatgtataaatactctggtgttggtcttgctgctccacaagttggtatactaaaaagagtagtggttatggattgttcagaggaagaagaaaagagtccaataactcttataaatcctgagatagtttggtcttctaaagaggattctaaatttgaggaaggttgtttgtctattcctgatatacgagaagaaataaaaagaccttctgaagttcaagtaaaatttactgatataaatggaaaatcaaatgagagttatttcaaagggttatgggcta

SEQ ID NO: 265207 - DNA, 404 bp, Unknown
  Bacterial polypeptide expressing nucleotide sequence isolated from the Sargasso Sea
cgctccaggtattggtctagctgctgtacaaattggtattttaaaacgtattatagttattgatgtgtctaaaaaagaggaagaaaaaaaaccattatttctaatcaatcctgaaattaaatttaaatcaaaaaaaacttcattttatgaggaaggatgtttgtcccttccaggttattttgctgaaattgaaagacctgcaaaatgcgatgttgaatttattgattattatggaaaaaaaaaagaacttaaagcagatggtctcctctcaacttgtattcaacatgaaattgatcatttaaacggcgttttatttattgattatctgtcaaaactcaaaaaagatatgataataaaaaaattaacaaaacaaaaaaaatcattagataaaacggttttataaa

SEQ ID NO: 265208 - DNA, 291 bp, Unknown
  Bacterial polypeptide expressing nucleotide sequence isolated from the Sargasso Sea
tatgtctttaaaaaaaatagtaactgtaccggatccaattttaagaaaaatttcaaatccaatagaaaaaattggaaatgatgaaaaacaacttgttcatgatatgtttgaaactatgtatacctctaatggaattggtttagcagcaattcaaattggtgtgccaaaaaggataattgtactagatgtgtcaaataaagatgaagaaaaaaatcccatgtgctttattaatccaaaaataaaaaaaacaagcgatgaaagatcaagctatgaagagggatgtctttccat

SEQ ID NO: 265209 - DNA, 520 bp, Unknown
  Bacterial polypeptide expressing nucleotide sequence isolated from the Sargasso Sea
atggccataagaactataattacagaacctaataaactgctcagacaagtttcaaaaccagtaagcaatgttggaaaagatgagcagaaattaatgcgagatatgttggagactatgtatgctgccaacggaattggtcttgctgcaatacaagttggaatacctcaaaggattattgtcatggatatttgcaaggaagaaaacaaaaaagaaccaagatattttgtaaatcctgtaattaaaaataaagatactttaaaagcaacctatgaagaaggatgtctttcagttccaaatcaatttgcagagatagatagaccaagtaaatgtgaggtagagtatttagattataatggacaaaaaaaattgctgaaagctgaaggtttacttgctacatgcattcaacatgaaatggatcacttagaaggtatattatttatcgattatctctcgaaattaaaaagatcaatgataattaaaaaattatcaaaattaaaatccagtacagctgaagtttaat

SEQ ID NO: 265210 - DNA, 514 bp, Unknown
  Bacterial polypeptide expressing nucleotide sequence isolated from the Sargasso Sea
atggctctacgacctataaagaattgcttcgatcccgtattacgaaaacaatgcgagatagttaaaaatattgacggggaattggtcacattgtcggaagacatgatcgaaaccacacttgctgcgccaggggttggtctggctgcgaatcagataggaatttcgcagagaatttttgtggtcaacatgggggtggagatggacaaagacaatttagtcactctgatcaatcctgaaatcacggcaattgaaggcagcgaacttggtgaggaaggctgcctcagtattcccgacgtggttgcgaaagtgaagcgggctactcaagttgagataaaagcggttgacctaaatggtaaagatgttcgttatgaagccagcggttttctggcccgcgcccttcagcatgaaatggatcatttaaacggcattcttttttgggacagtttagggaaaataaagcgggatattttaaaaagaaaatttaaaaagaaactaaaagagcaggatgaatgaa

SEQ ID NO: 265211 - DNA, 520 bp, Unknown
  Bacterial polypeptide expressing nucleotide sequence isolated from the Sargasso Sea
tatgactattaaaccaataattactgaacctaataaaatattgaggcaaatttctcaaccagttaaaaaagttggaaaagaggaacaggaactaatgaatgatatgttggaaacaatgtactctgcaaatggaataggtcttgcagcaattcaaataggtgttccaaaaagaattattgttatggatattagtaagaatgaaaacaaaaaggaacccaggtattttgttaatccaattataaaaaataaagatattttaaagtccacttatgaggagggttgtttatcagtccctaatcagtttgctgaaatagatagaccgaaaaaatgtgtaattgattatttagattaccacggagaaaaaaaaacattagatgctgaaggtttattggctacgtgtattcaacatgaaatggatcatttagaaggaatactttttattgattacctatctaagttaaaaaaatctatgattgtcaaaaaattatcaaaaatgaaatctactcggataattgtttga

SEQ ID NO: 265212 - DNA, 526 bp, Unknown
  Bacterial polypeptide expressing nucleotide sequence isolated from the Sargasso Sea
tatgacagttaaaacaattttaacagaacctaataaattactaagacaaatttctcaacccgtcgatcaagttggtgaaaatgagaagaaattaatggatgatatgattgaaactatgtatgcagcaaatggcataggtcttgcagcaatacaaattggctttccaaaaagaataatagtgatggatattagcaaggataaaaaaaataaaactcctatgtattttgttaatccaattattcttaataaagccacagaacaatcaacttatgaagaaggttgtttatctgtcccagatcaatttgcggaaattgatagaccaaaaaaatgtgaagttgaatatttagattataatggtgaaaaaaaattacttaaagcagaaggtttgttggccacatgtattcaacatgaggtagatcatttagaaggaattttatttattgattatttatccaaattaaaaaaatcaatgattataaaaaaactttcgaagcaaaaaaataagcctgacagaattgttgtttaa

SEQ ID NO: 265213 - DNA, 526 bp, Unknown
  Bacterial polypeptide expressing nucleotide sequence isolated from the Sargasso Sea
atggcaataaaaaaaattttaacagaaccaaataaactgctaagacaaatttcaaaagtggtagaaaaagttggcaaagaagagcaaaaattaatgaatgacatgcttgaaactatgtatgatgcaaatggtataggccttgcagcaattcaagttggagtgccattaagagtaatagttatggatatctctaaaaatcaagaaaaaaaaaatccaatgttttttgtaaaccctgtagtaaaaaataaaaatataaagctttctacttatgaggaaggatgtttgtctgttccaaatcaatttgcagaaattgatagaccaaatagttgtgaggttgaatatttggattataatggcaaaaaaagttttctaaaagcagaaggtttattagcaacttgtattcaacatgaaatggatcatttagaaggtatattatttattgattatttatcaaaacttaaaaaaacaatgattattaaaaaactatctaaacaaaaaggaaaagcggacagaatagttgtttaat

SEQ ID NO: 265214 - DNA, 577 bp, Unknown
  Bacterial polypeptide expressing nucleotide sequence isolated from the Sargasso Sea
ttgtcaatattacctatcagaatatttccagatccttttctaagaaaaaaatcaaaagaaattactgaaattaataaagatattatcgattttggtcatagcatgcttgaaactatgcaaactgcaagaggagtaggtttagcagcaccacaagttggaaaacttataagaatgataactatacaagtacctgaaaaagctcctatgattatgattaatccaaatttaattaatcaagaaggactaagaagagttgaagaaggttgtttgagtgttcctggatttactggaattgtagaaagatctataaaaattgatgctcaatatttggatgaaaataaaaataaaattcaactttctgctgaagaattattagcacaagctattgaacatgagattgatcatctaaacggaataatgtacttagatcacctaaaatcacaccaagaactgcataaaactggaattacgcctaatgaggttcattggcatgatgtaggatataaaatccatgttaacaagcaagaagccttaaaaaacgatttaataacagaagaagtcatgaaaaaaaaataga

SEQ ID NO: 265215 - DNA, 526 bp, Unknown
  Bacterial polypeptide expressing nucleotide sequence isolated from the Sargasso Sea
atggcaattaaaaaaatcattacagagccaaataaaattttaagacaaaaatccttaacagttaataaagtaggtatagacgaacaaaaattaatggatgatatgttggaaaccatgtatcacgcaaatggaattggtctcgcagcaatacaaataggagtaccaaaaaggattatagtaatggatatttcaaagaatgatgaaaaaaaaaatccgatgtattttgtaaatcctttaataaaaaacaaaatttcagaaacctcaacttatgaagaaggatgtttgtctgttcccaatttttttgcggaagtagataggcctaaaaaatgtgatgttgagtatcttgactataatggtaaaaaaaatttaataaaagcagacggattactagcaacttgtattcaacatgaaatggatcatttagaaggaattttatttattgattatttatcaagactaaaaaaaacaatgattataaaaaagttatctaagcaaaaagacagaccagatcgaattattgtttaaa

SEQ ID NO: 265216 - DNA, 265 bp, Unknown
  Bacterial polypeptide expressing nucleotide sequence isolated from the Sargasso Sea
gaaataaaaagcaacaaaagtttatataccttctcagaaggatgtctttctgtaccaggttttaatgaggaaattactaggcctgatcaaataattctaaaatggcagaatcttgatggcgatcgattagaagatgaaccagagggcttgttaactgtatgtattcaacatgaaatagatcatttagaaggcaaacttatggtcgactatttatcaacattaaagcgagatagaataagaaataagctaaataagcgaatttaaa

SEQ ID NO: 265217 - DNA, 464 bp, Unknown
  Bacterial polypeptide expressing nucleotide sequence isolated from the Sargasso Sea
tatgttaagaaaaattcttacagaacctgatcctattctaaggaaaaaatgcgaacccttagaaaaagtagatgccgaaacaaaaaaactaatggatgatatgctagagactatgtatgcagctccaggaattggcttagctgcaatacaggttggaattttaaaaaggctagtggtgcttgatatttctaagggtgaagaggaaaagaagcctatgtttcttattaatccaaaaataatacatcagtctaaaaaaacttctatatatgaagagggttgtttatctttaccagggcaattcgcagaaattgaaagaccggcagagtgtattcttaaatatattgattataatggtaaagaaaaagagttgaaagcagatggccttttagctacttgcgttcaacatgaagttgatcatttaaatggaatattatttattgattatttatcaaagcttaaaaaag

SEQ ID NO: 265218 - DNA, 511 bp, Unknown
  Bacterial polypeptide expressing nucleotide sequence isolated from the Sargasso Sea
atggataaattactttacgttccaaatccactattacgccaaaaagcaaataaaattcagtctgttggaattaaggaaaaagaaattgcaaaaaaaatgatgcaaattatgttaaaagcaccaggtgtaggtttagcagcaaatcaaattgggattctaaaacaaattgtgactatattttttgttgatcaagagactaaaaaagaaactcaatatacattatttaaccccgatattgtttcttactctcaagaaaaaattgttatggaagagggttgtttatctcttcctgaacaatttgcagaaatagagagacctcaaaatatagtagtccagtacttagatgaaaataacaaacaaataacaaaagaagtgagtggagtggaatcaagaattttacaacatgaaattgatcatctttctggaaagttatttgtagattatctttcttcattaaaaaggaatataatgatcaaaaaagtacaaaaatttttaaaaaacaaaaaataat

SEQ ID NO: 265219 - DNA, 316 bp, Unknown
  Bacterial polypeptide expressing nucleotide sequence isolated from the Sargasso Sea
tatgacaataagaaaaatattaacagaaccgaacaaaattttaagacaagtctctttaccagtagaaaaagtaggctatgaagaaagagagcttatggacgatatgttagaaacaatgtattcagcaagaggaattggtcttgctgctattcaaatcggaattccaaaaaggattatagtaatggacttgtcaaaagaagatcaaaaaaaggagccaagatattttgttaatccagtaattaaaaataaaaataaaaaattagctacttatgaagaaggttgtttatcagtaccaggacagtttgcagaaattgat

SEQ ID NO: 265220 - DNA, 517 bp, Unknown
  Bacterial polypeptide expressing nucleotide sequence isolated from the Sargasso Sea
tatgagtataagaaaaattttaacagaacctgataaaatattgagacaagtttctaaaccagtagaaggtgttaggaatgaagaacaggatttaatgagagatatgttagatacaatgtatgctgcaaaaggaataggactagctgcaatacaagtcggtattccaaaaagaataatagtaatagacttaaataaagatgaaaaaaaaaatccaatgtattttgtaaaccctataattaaaaaaaaaaattcagtaaattcaatttatgaagaaggatgtttatctgtaccaaatcaatttgcagagattgaaagaccaaataagtgtgaagtagaatatttagactttgatggaaaaaaacaacttttaaaagctgaaggtctgcttgcaacttgtattcaacacgagatggatcatttggaaggaattctttttattgattatttatcaaaattaaaaaaatctatgatattaaaaaaactttctaaaaataagcctgatagaatagttgtttaa

SEQ ID NO: 265221 - DNA, 442 bp, Unknown
  Bacterial polypeptide expressing nucleotide sequence isolated from the Sargasso Sea
tatggctatcagaactataataacagaacctaataaattacttagacaaatttctaaaccagtcaatggtgttggtaaagaagagcaaaaattaatggatgatatgttagagacaatgtatgacgcaaacggaattggtctcgcggctatacaagttggtgtaccaaagagaattattgtaatggatataagtaaagatgagagcaaaaaagagccaagatatttcgtaaatccagttatcaaaaatagagatccagaaaaagcaacttatgaggaaggatgtctttctgtgccaaatcagtttgcagaaattgatagacctagtaagtgtgaagtagaatatcttgattatgatggagaaaagaaattgttaaaggctgatggtcttcttgcaacatgtattcagcatgaaatggaccatttagaggggatactatttatt

SEQ ID NO: 265222 - DNA, 391 bp, Unknown
  Bacterial polypeptide expressing nucleotide sequence isolated from the Sargasso Sea
atgcatatttgcatgactataagacgaattttaacagagccagatagaacattaagagaaaaatctcagccagtagagcaggtagatgaaaatctgcgaaagctgatagatgatatgttagagacaatgtatgcggcccctggaattggacttgcggcaattcaagtcggcgtacctaaaagagtaattgttttagatatagcgccaaaagatcaaccaaagcaaccaatgtgttttgtaaatccagaaataattaaaaaatctaacaataactcaacttatgaagaagggtgtttatccgtgccagggcaatttgcagaaattgaaagaccagataaatgccatgtaaaatatttagattataatggcaaacctcaagaaatgaagcaga

SEQ ID NO: 265223 - DNA, 526 bp, Unknown
  Bacterial polypeptide expressing nucleotide sequence isolated from the Sargasso Sea
atggcaataagagaaatattaacagaaccaaataaaattttacgacaaatatcacaatctgttgagaaggtaactaaagaggagcaaaagttaatggatgatatgcttgaaacaatgtatcaagcaaatgggattggattagccgcaatccaaattggagtccctaaaagaataattgtaatggatattgcaaaaaaagatgaaaagaaaaatccaatgtattttgttaatccaataattaaaaataaaacaaaaaatctatcaacatacgaggaaggctgcttatcagttcctaaccaatttgctgaagttgatagacctgaaacgtgtgaggtcgaatacttagattataacggagagaaaaaaattttaaaagcaaccggattgctagcaacttgtattcagcacgagatggatcatttacagggaatattgtttattgattatctttcaaaattaaaaaaatcaattataattaaaaaactatctaaacagaaaaaaagttctgaagcattagtaatttaat

SEQ ID NO: 265224 - DNA, 538 bp, Unknown
  Bacterial polypeptide expressing nucleotide sequence isolated from the Sargasso Sea
atgttcgagaacttagaaattttaaaatttccggatgaaaggttgaggcgtttatcttcccctgttgaagcctttaacaaagagttgaaggccttagcagataagatgctagaaatcatgtaccaatcaaacggtataggtttagccgcgccccaggttaatcaaacaattagactcatagtcgtcgatgtttcagaagacaggaataacccatgtatttttatcaacccaaaaataaaacaaccgtcaggatcggttgacagtagcgagggttgcctgtctgttcctgaaatcagaacaacaatcaagcgatatgaaaatatcactctcgaataccaagacctcaatggcgttaggcacgaagaatcattaggcgatctgttgtcaatatgcgttcagcatgaaatagaccatttagacggaaagctttttattgattatgttcctgatgtaaaacttcaaaggcttagaaaaaaaatcgccaaaagcaaaaaaaaccaaccaacaacagaaggaacaacagtgagggttgtttgat

SEQ ID NO: 265225 - DNA, 340 bp, Unknown
  Bacterial polypeptide expressing nucleotide sequence isolated from the Sargasso Sea
agattaatagtaattgatttatcagaggacaaaagtagtcctttacatatagtcaatcctgattatgaaattttagatgatactcttgaattgtcggaagaaggctgcttatcaattccttcttttaggcaggaagttaaaagagcaaagaaaataaaattaaaatatcaagacctaaatggctcagataaagagttaactgcagaaggtttattaggtttttgcatacagcatgaaattgatcatctaaacggaaaattattagtagattattcatcgtctttaaagaggaatagaattaaggataagcttttgaagcttaaagatgaaaaaaaataga

SEQ ID NO: 265226 - DNA, 508 bp, Unknown
  Bacterial polypeptide expressing nucleotide sequence isolated from the Sargasso Sea
aatggccgttatgccgatagtttgggctccagatcctgtgcttaaaaccaagtgcacacaggttagcgaaataaatgataacatcctaagtctcatggaagatatgttagaaactatgtatcaagcaccggggattggtcttgctgcaccacaagtaggtgtgaaacagagaattatcgtggtcgactgttcacccaaaaacgaagcccccaagccatatcgcatgatcaacccagaattggtttctgtatcgaaagaacttactacccaagaggaggggtgcctttcccttcctgggttttatgcagaaatcactaggccagccgaggcgcgagtacgatatactgatgaaaaaaataaacagcaaaccatagatgtcgatggtttgctgtcagtttgtattcaacatgagatagatcatctgaatggcattctctttgtggatcacctttcttcgcttaaacgcaatatgatactcaaaaaaatggttaaggctaaaaaagaatag

SEQ ID NO: 265227 - DNA, 520 bp, Unknown
  Bacterial polypeptide expressing nucleotide sequence isolated from the Sargasso Sea
tatgactgtaaaacaaatattaactgaaccgaataaaattctaagacaagtttcaaagccagtggaaagtgtcagtaaagaagaacaaatattaatggatgatatgttagaaactatgtatgcagcaaatggtattggtttagcagcaattcaaataggagttcctaaaagaattattgtaatggatctaagtcgtaatgaagaaaaaaaagagcctagatattttgtcaatcctataattaaaaataaaaattctgataaagctacttatgaagaaggatgcctgtcagttccaaatcaatttgctgaaattgatagaccaagcacatgtgttgttgaatatttggattatgatggaaaaaaacaaattttaaatgcagaaggattgcttgctacttgcatacaacatgaaatggatcatctggaaggtatactttttattgattatttatcaaaattaaaaaaatcaatgattttaaaaaaattatcaaaaaaaaaatccaaccagatagttatttaa

SEQ ID NO: 265228 - DNA, 520 bp, Unknown
  Bacterial polypeptide expressing nucleotide sequence isolated from the Sargasso Sea
tatgactgttaaaacaattcttaaagaaccaaatcaaatattaagacagatttctaaacctgtagaaaaagttggtaaagaagagcaacaattaatgaatgatatgttagacactatgtattcggcaaacggtataggtcttgcagcaattcaaataggtgttcctaaaagaattattgtgatggatttgagtaaagatgaaaataagaaagagccaagatattttgtaaatcctgttattaaagacaaagatatttcaaaatctacttatgaagaaggatgtttgtcagttccaaatcaatttgcagaaattgatcgaccaaaaaaatgtgttgttgaatatttagattattatggaaaaaaaaaaattcttaaagcagagggactattagctacctgtattcagcatgaaatggatcatcttgaaggcatattgtttattgattatttatcaaaattaaaaaaatctatgattattaaaaaactatcaaaagttaaatctactcgcatagttgtttaa

SEQ ID NO: 265229 - DNA, 483 bp, Unknown
  Bacterial polypeptide expressing nucleotide sequence isolated from the Sargasso Sea
catggctataagaagtattattacagaacccaataaattgctcagacaaatttcaaaaccagtaagtcaagttggaaaggaagagcagaaactaatgaaagatatgttggagactatgtatgctgccaacggaattggtcttgctgcaatacaagttggaataccacaaaggattatagtcatggatatttgcaaagaagaaaataaaaaagagccaagatattttgtaaatcctataattaaaaataaagatcctttaaaagcaacttatgaagaaggatgcctttcggttccaaaccaatttgcagatatagatagaccaagtaaatgtgaagtagagtatttagattataatggaaaaaaacaattattaaaggcagaaggtttacttgctacatgcattcaacatgaaatggatcatctagagggtatattatttatcgattatctttcaaaattaaaaaaatcgatgataattaaaaa

SEQ ID NO: 265230 - DNA, 526 bp, Unknown
  Bacterial polypeptide expressing nucleotide sequence isolated from the Sargasso Sea
atggcaattaagaagattatcacagaaccaaataaaattttaagacaaaaatcattaccagttaaaaaagttggaaaagcagaacaaatattaatggatgatatgttagaaacaatgtacgcagcaaatggtattggccttgctgcaatccaaataggagttccaaaaagaataatagtaatggatatttcaaaaaaagatgaaaaaaagaatccaatgtactttgttaatcctataataaaaaataaaaattccgaaacttctacctatgaagaaggctgtttatctgttccaaatttttttgcagaagttgataggccaaagaaatgtgatgtcgaatattttgactatgatggtaaaaacaaaattttaaatgctgaaggattattagctacttgtatccaacacgaaatggatcatttagaaggagttttgtttattgattacttatcaaaattaaaaaaaacaatgattgttaaaaaattatcaaaaaaaagagatagaccagatagaattattgtttagg

SEQ ID NO: 265231 - DNA, 505 bp, Unknown
  Bacterial polypeptide expressing nucleotide sequence isolated from the Sargasso Sea
atgcccttattaaaaattttaatatttcctgatcctcgattaaggactgtggccaaggccgtagaaaaagttgatgattcacttaaaaagctaacagaagatatgttagaaactatgtatgaaggttcaggaattgggctagccgctactcaagtagatgttcataaaagagttatagtagttgatataagcgaaaagaaagatgagcccttagtacttattaacccagtgctcaagaaagtgattgatccagagctgaagacatattcagaagggtgcctttccgttccgggcttttacgaagagcttgaaaggccttcagaaatagaaatatctttccaagatgttaacggtcaagatcatacgttaattgctaatgggcttttatctgttgtggttcaacatgagatggatcatcttgaaggtaaaatgatggtggattcgatttcaaatgttaaaagagaaatgattagaaaaaaactatccaaggcaaaaggcacctagt

SEQ ID NO: 265232 - DNA, 526 bp, Unknown
  Bacterial polypeptide expressing nucleotide sequence isolated from the Sargasso Sea
atgagtgttaaagatattataactgtaccagacgaaactcttaaaaaaatttctgaaccattagaaaaaattggaataaatgaaaaaaaacttattaatgatctctttgagacgatgtataattcaaaaggtattggtcttgccgcagtacaagttggtatattaaaaagaattttagttattgatatatctagtaaagatgaaaaaaaagaacctttaagttttataaatcctacaataaaaaaaattagcgaggctacttccatatatgaagaaggatgtttatcaatacctgatacttttatagagattgaaagacctaaaatttgtgaagtagattatatagacatgaacggaaaaaagaaaaatatgaaatgtgatggtcttttatcaacatgccttcaacatgaaataaatcatttagatggtaaattgataattgatcatttgtcaaaattaaaaagagatttgattattaaaaaaatttcaaaaacaaaaaaaaatcctgatagaataatagtttaga

SEQ ID NO: 265233 - DNA, 482 bp, Unknown
  Bacterial polypeptide expressing nucleotide sequence isolated from the Sargasso Sea
attaggcagatttctaaatctggtgaaaaaagtaggtaaagaagaacaaaaattgatggatgatatgttggagactatgtattccgcaaatggaatagggttagctgcaattcaaataggcgttccaaaaagaattattgttatggatataagtaaagataaaaataaaaaagaacctagatattttgtaaatcctgtgattaaaaacaaggatctcttaaagtcaacttatgaagaagggtgtttgtcagtcccaaaccagtttgctgaaatagatcgaccaaaaaattgtgatgttgagtaccttgattataatggtgaaagaaaacttttaaaagctgaaggcttattggctacttgtattcagcatgaaatggatcatttagaaggaattctttttattgattatttatctaaattaaaaaaatctatgattattaaaaagctatctaaaattaaatctactcggatagttgtttgat

SEQ ID NO: 265234 - DNA, 520 bp, Unknown
  Bacterial polypeptide expressing nucleotide sequence isolated from the Sargasso Sea
tatggcagttaaaacaatacttaaagaaccaaataaaattttaagacaaatatcaaaacctgttgagaaagttggaaatgaggaaaggcagttaatgaaagatatgttggaaacaatgtatgaggcaaatggtataggtctagcagcaatccaaataggagtgcccaaaagaattattgttatggatatctctaaagatgatgaaaaaaaacaaccaagattttttgtaaaccctgttattaagaataaggatttatcaaaatctacttatgaggagggatgtctatctgttccaaaccagtttgctgaaatagatagaccaagtaaatgtgaagttgaatatcttgattatgatggagaaaagaaaattttaaaagcagagggattacttgcaacttgtattcaacacgagatggaccatctagagggaatactgtttattgattatttatcaaaattgaaaaaatcaatgataattaaaaaactatctaagaataaatcaaatcggataatagtttga

SEQ ID NO: 265235 - DNA, 523 bp, Unknown
  Bacterial polypeptide expressing nucleotide sequence isolated from the Sargasso Sea
tatgcttaaagaaattgttacagttccagatgaaatattaaaaaaaatttctgatccaattgaaaaagttggaattaatgaaaaaaaattaattgaagacttatttgaaacaatgtaccactccaagggaattggtcttgctgcagttcaagtaggtatactaaaaagagttttagttgttgacgtttcgaataaggatgaagaaaatcaaccaattgcattaatcaatcctgtaataaaaaacttaagcgaagagacatcggtttacgaggagggttgtctatcaatacctgaaacttttattgaaattgagagaccaaaaatttgtgaggtggaatatattgacgaaatgggggagaagaaaaatcttaaatgtgatgggcttttatctacttgtattcaacatgaaataaatcatttagatggaaaattaattattgaccatttatcaaaattaaagaaagattttattataaaaaaaatttcaaaaattaaaaaaaatccagagagaatagtagtttaa

SEQ ID NO: 265236 - DNA, 526 bp, Unknown
  Bacterial polypeptide expressing nucleotide sequence isolated from the Sargasso Sea
tatggcaattaagactatcattacagaacctaacaaaattttaagacaaaaatcattaccagttaaacaggtaggagtggaagaacaaaggttaatggatgatatgctagaaactatgtatgatgcaaatgggataggtttagccgcaattcaaataggagttccaaaaaggataatagtaatggatatctcaaaaagtggtgaaaaaaataatcctatgtattttgttaatcctttaataaaggataaagttgatgcaacttctacatatgaagaaggctgtttgtcagttcccaatttctttgctgaagtaaatagaccaaaagagtgtaatgttgaatatctagattatgaaggtaagaaaaaaatattaaaagctgagggtttactagcaacctgtatccaacatgaaatggatcatttagagggaattttattcattgattatttatcaaaattgaaaaaaacaatgattgttaaaaaattatcaaagcaaaaaagtagacctgatagaataattgtttaa

SEQ ID NO: 265237 - DNA, 508 bp, Unknown
  Bacterial polypeptide expressing nucleotide sequence isolated from the Sargasso Sea
atggctaaaaatttaaaaatattaatcttcccagacccaagattaagaaaagttgctgaaaaagttataaaattcgacaaaagtctagaaaatttagcaaattctatgttaaaaaccatgtatgatgcaaatggtataggtctagcagcaactcaaatagatcaacatataaggcttattgtcatggacttatctgaagaaagaaacgagcctagaatatttataaatccaacatataaagttcttgaaggtcatagcctatatgagtttgaggaagggtgtctttctataccaggctttaatgaggtaatagcccgccctgataagattgaattaaggtggcaagatttagaaggaaatgagcatattgaaaggcctgagggccttctaacagtatgtattcagcatgaaattgaccatttagatggaaaactaatggttgattatgtaagtgcgcttaaaagagatagagtaagaagcagacttttaaaagaatataaacgataat

SEQ ID NO: 265238 - DNA, 526 bp, Unknown
  Bacterial polypeptide expressing nucleotide sequence isolated from the Sargasso Sea
atgactattaggaaaattcttacagaacccaataaaactttacgccaagtttctttgccagttgataaagttggaaagtcagaacaacttttaatggatgatatgttggagacaatgtatcatgcaaaaggcattggtttagcagcgatacaaattggcgttccaaaaagaattatagtcatggatctatcaaaagaagaagaaaaaaaagacccaagatattttgtaaatccagtaataaaaaataaaaacttaaatttatcaaaatacttagaaggctgtttaagtattccagatcaatttgctgaggttgataggccaagcacatgtgaggtagagtatttagattataatggaaacaaaaaattattaaggactgatggtttgcttgcaacatgtattcaacatgaaatggatcatttagaaggaattctatttattgaccatttatctaagttaaaaaaatcaatgattataaaaaagctatctaaactaaaaagcaaagaagacagagttgttctttagt

SEQ ID NO: 265239 - DNA, 370 bp, Unknown
  Bacterial polypeptide expressing nucleotide sequence isolated from the Sargasso Sea
cattcggcttatagttgtcgatgtttctgaagacagagataatccatgtatttttgtaaacccagaaataaaagagcccgcaggctctgtcgacagcagtgagggatgtctttctgttcctgaaatcagaacaacaatcaaacgatatgaaaacatcacccttgaatatcaagatctcaatggagaaaggcatgaagacggacttggtgatctgatgtcaatatgcgttcaacatgagatagaccatttagacggcaagctttttattgattatgtaccagacgttaagctacaaaggcttagaaaaaaaattgccaaaaacaaaaaaaatcaactgccaacagaaggaacaactgtgagggtcgtttga

SEQ ID NO: 265240 - DNA, 385 bp, Unknown
  Bacterial polypeptide expressing nucleotide sequence isolated from the Sargasso Sea
agcagctgtacagtaggtatattgagaagaattttagttattgatgtgtctaataaagatgataaaaaagaacccttaagttttatcaatccaataattaaaaaagttagcaatgatacctctatatatgaagaagggtgtttatctataccagatacttttatagagattgaaagacctaagatttgtgaagtagaatatattgatataaatggaaaaatgaaaaatcttaaatgcgatggtctattatcaacttgtcttcaacatgaaataaatcatttagatggtaaacttataattgatcatttgtcaaaattaaaaaaagattttattattaaaaaaatttcaaaattaaaaaaaaatcctgatagaataatagtttaaa

SEQ ID NO: 265241 - DNA, 520 bp, Unknown
  Bacterial polypeptide expressing nucleotide sequence isolated from the Sargasso Sea
atggctatcagaactataataacagaacctaataaatcacttaggcaaatatctaaaccagtcaatagtgttggtaaagaagagcaaaaattgatggatgatatgctagagacaatgtatgacgcaaacggaattggtcttgctgcgatacaaattggtgtaccaaagagaattattgttatggatttaagtaaagatgagactaaaaaagagccaagatatttcgtaaatccggttatcaaaaataaagatccagaaaaagcaacttatgaggaaggatgtctttctgtgccaaatcagtttgcagaaattaatagacctagtaggtgtgaagtagaatatcttgattatgatggagaaaagaaattgctaaaggccgatggtcttctggcaacatgtattcagcacgagatggaccatttagagggaatcctatttattgattatctttcaaaattaaaaaggtcaatgataattaaaaaattatcaaaattaaaatctacttctgtagaagcttaat

SEQ ID NO: 265242 - DNA, 277 bp, Unknown
  Bacterial polypeptide expressing nucleotide sequence isolated from the Sargasso Sea
ataggaaaagaaactgaggatgattgggaaggctgtttatctattcctggcatgcaaggcttagttagaagatttaaaaaaattaaatattctggatttgatcttgatggtaaagtaattgaaaatgaagttgaaggcttacatgcaagggtagtacaacatgaggtagatcatttaaacggcattttgtatacatcacgcttagcacataaaaatgcttttggttttgaaaaagaaataactacatattggaaaaatgaacaaaacagaaaataaa

SEQ ID NO: 265243 - DNA, 333 bp, Unknown
  Bacterial polypeptide expressing nucleotide sequence isolated from the Sargasso Sea
tatgtcagtaaaagaactaattacagtacctgatgatattcttagaaaaaaatctgagccattaaataaagttgatgttaatgaaaaaaagctcataaaagatttatttgaaactatgtaccgtcacaatggtataggtttagcagctgttcaagttggaattctaaaaagagtagttgttttagatgtctcaaaaaatgaaaatgaaaaaaaacctttatgctttattaatccacaaataaaaactttaagtgaaaaaatgtctacatatgaggaaggttgtttatcaatacctaatacctttattgagatagagagacccagaaatttgta

SEQ ID NO: 265244 - DNA, 526 bp, Unknown
  Bacterial polypeptide expressing nucleotide sequence isolated from the Sargasso Sea
atgagcattaaagatataattacagttcccgacgaaactttaaaaaaaatctcagaaccattagaaaaagtaagtgataacgaaaaaaaacttattaaagatttatttgatacaatgtacgcctcaaaaggtatcggattagctgcagtacaaataggtattttgaaaagaattttagtaattgatgtgtcttctaaagatgaaaagaaggagcctttaagtttcataaatcctattattaaaagagttagtgatgaaacctcaatttatgaggagggttgtttatcaattccagacacatttatagaaattgaaaggccaaaaatttgtgaagtggaatatattgatatcaatggagaaaaaaaaaatttaaagtgtgatggtcttttatcaacttgtttacagcatgaaattaatcatttagatggaaaattgataattgaccacttatcaaagttaaaaagagatattatcatcaaaaaaatttcaaaaacaaaaaaaaatcctgacagaatattagtttaga

SEQ ID NO: 265245 - DNA, 511 bp, Unknown
  Bacterial polypeptide expressing nucleotide sequence isolated from the Sargasso Sea
aatggaaatactattagttcctaatgaagttttacgccttaaagcaaaaaaactaactaaaattaccaaagctgatattaatgttgctcatcaaatgatggatactatgattaaggctccaggtgttggattggcagccaatcaagttggaatattaaagcaaatcgttacaataaattttgaagataaggaaaatgacaaaaaaacgaattatattttattcaatccttcaattatagagtattcagcagaaaaaactattatggaagagggatgtttgtctttgccagagcaatatgcagatgttgaaagaccaaaacaaataattatcgagtatacagatgaaaatgaaaaattaataaaaaaagaaatagatggttatgaagcgagaatactgcaacatgaaattgatcatttatctggaaaattatttgttgactatctatcatctttaaaaagaaacatattaataaaaaaagtaaaaaaattacaaaatacaaaaaatagatga

SEQ ID NO: 265246 - DNA, 538 bp, Unknown
  Bacterial polypeptide expressing nucleotide sequence isolated from the Sargasso Sea
tatgactttattaaatatattacattacccagacaataaactacgtcaaaagggcgagaaagttaatacttttgacgaaaatcttaaaaagatagctaatgatatgcttgaaaccatgtatgctgcaaaaggtataggattagcggctgttcaagtcaatcttcccataaggctaattgttatcgatataagcgagactcgaaatgagcctattattttagtaaatccaataataaatgatagaaaggaaaaaattatttttgaagagggatgtttatcagtgcctggtttttatgaaaaagttgaaagatataatgatataaatgttacgtataatgatatagatggtaatactatcaataaaaatactgaaggtttactagctgtctgtatacagcatgagatagatcatttggatgggaaactttttgttgattatatatcaaatttaaaaagagatagaattgcaaaaaaaatcaaaaaatcactagcaagtggttcggtgcctaccagaaaagatgtaccatacaacatataa

SEQ ID NO: 265247 - DNA, 508 bp, Unknown
  Bacterial polypeptide expressing nucleotide sequence isolated from the Sargasso Sea
catggccactttaaaaattttaatatttcctgacccaaggttaagaactgtggctgagcctattagagaggttgataattcgatagccaaacttgtagaagatatgtttgaaaccatgtatgagggtgaaggcattggcttggcagcaactcaagttgatattcataaaagaattattgttatagacattagcaatgaaaagaatgatcctttagttctaatcaatcctacgataaaaagaataattaaaaatgaaaagaagtcctattccgagggttgcctttcagtgcccggtatttatgaagagcttgaaaggccgagtgctgtagaaatttgtgcacttggtttagatggtaaagaatttacattggttgcggaagatttgctctctgttgttatacagcatgaaatggatcacttagatggaaaaatgatggttgattttctttctaatttaaaaagagagatgattagaaaaaaaatggctaagcttgagactgcgcaataa

SEQ ID NO: 265248 - DNA, 520 bp, Unknown
  Bacterial polypeptide expressing nucleotide sequence isolated from the Sargasso Sea
atggctatcagaactataataacagaacctaataaattacttagacaaatatctaaaccagtcgatcgtgttggtaaagaagaacaaaaattaatggatgatatgctagagacaatgtatgaagcaaacggtattggtctcgcggcgatacaaattggtgtaccaaagagaattattgtaatggatataagtaaagatgagagtaaaaaagagccaagatatttcgtaaatccggttatcaaaaataaagatccagaaaaagcaacttatgaggaaggatgtctttctgtgccaaatcagtttgcagaaattgatagacctagtaagtgtgaagtagaatatcttgattatgatggagaaaagaaattgctaaaagccgatggtcttcttgcaacatgtattcagcacgagatggaccatttagaggggattctatttattgattatctttcaaaattaaaaaggtcaatgataattaaaaaattatctaagaaaaaatctacagcagcagttctttaaa

SEQ ID NO: 265249 - DNA, 520 bp, Unknown
  Bacterial polypeptide expressing nucleotide sequence isolated from the Sargasso Sea
atggctataagaactataataacagaacctaataaaattcttagacaaatttctaaaccagttaatggtgttggtaaagaagaacaaaaattgatggatgatatgctagagacaatgtatgacgcaaacggaattggtctcgcggcgatacaagttggtgtaccaaagagaattattgtaatggatataagtaaagatgagaataaaaaagagccaagatatttcgtaaatccagttattaaaaataaagatccagaaaaagcaacttatgaggaaggatgtctttctgtgccaaatcagtttgcagaaattgatagacctagtaagtgtgaagtagaatatcttgattatgatggagaaaagaaattgctaaaggcagatggtcttcttgcaacatgtattcagcatgaaatggaccatttagaggggatactatttattgattatctttcaaaattaaaaagatcaatgataattaaaaaattatcaaaattaaaatctacctctgcagaagcttaat

SEQ ID NO: 265250 - DNA, 550 bp, Unknown
  Bacterial polypeptide expressing nucleotide sequence isolated from the Sargasso Sea
atgtcagtgttagaagtggtgaattacggaaatccaatacttcgtaagaaatgtagtcaagttacagatttttctaaattacctggtcttatcaatgatatgttcgatactatgtatgaagaagaaggcatcggtctcgctgctaatcaggttggagttgatatgaacctttttattattgatatctcacatactgatgatgatgaatttccaaggacatttattaatggcgagattacttcatcaagaggagaaagtgttttttctgaaggatgtctctctattccagaggtttcccttgaagtaactaggcctgagataattctatttaaataccaagatattcatgaaaaatggcacgaagaggagtttgatggtcttcttgcccgtgcaatacaacatgaaatagatcatttgaatggcatgttaattattgatctggtgagtgagatgcaaagattaaaggtaaataaagaaataaaaagaattaagaatgattccattatcaaattaaaacggcaaccaaatagcaaagggtttgttctttagt

SEQ ID NO: 265251 - DNA, 529 bp, Unknown
  Bacterial polypeptide expressing nucleotide sequence isolated from the Sargasso Sea
tatgtctatattaaaaatagcaaaaatcggacatcctgtattattaaaaaaaagtaatgaaatcaaagactttggttcagatactttaaaaaaaataatttatgatatgtctgaaacaatgattgattacagcggaataggtcttgcagctcctcaagttcatatgtctaaaagaataattatttttaggaatccagatgttgaagaaaaagaaaaaattcaaatcactcctcttatcaaccccaaatatgaaccagtatcaaaagaaaaagatgatgattgggagggttgtctctcaattcctggaatgcagggtttagttagtagatataaaaaaataacatatacaggctatgatctaaatggagatagaattaaaaatacagctgaaggtcttcacgctagagttgtgcaacatgaaatagatcatcttgatggtattttatatactgagagattaacaaacaaaaaagcttttggatttgaaaaagaaataatagaattttggaaaaatgaaaaaacaaaataa

SEQ ID NO: 265252 - DNA, 538 bp, Unknown
  Bacterial polypeptide expressing nucleotide sequence isolated from the Sargasso Sea
atgttcgagaacttagaaattttacaatttccagacgagagactgcgccgcttgtctgaacctgttgaatccttcaacatagagctgaaagcactggcagataagatgctagaaatcatgtatcaatcaaatgggataggcttagctgcacctcaggttaatcaaacaattcgactcatagttgtcgatatttcagaagataggaacaaaccaaatgttttcgtcaacccaaaagtaaaacaaccatcagggtcggttgatagtagcgaaggctgtctctctgttcctgaaattagaacaactgttaagcgatatgaaaatatcacactcgaataccaagacctcaaaggcggtttacatgaagaacaactcgagagcctaatgtctatatgtgttcaacatgaaatagaccatttagacggcaaactttttattgattatgttcctgatgtaaagcttcaaagacttagaaaaaaaattgcaaaaaacaaaaaaagccagtcaacaatagaaggaacaacagtgagggttgtttgat

SEQ ID NO: 265253 - DNA, 502 bp, Unknown
  Bacterial polypeptide expressing nucleotide sequence isolated from the Sargasso Sea
atggaaatactattagtgcctaacgagttgttacgtcaaaaagcaaacaggcttattaatattacaagtgaagatattaaaattgctaatcaaatgatggatactatgattaaagcaccaggagttggattagcagcaaatcaggttgggatattaaaacaaattattacaattaattttgaagacaaggaaaatgataaaagagctaattacatattatttaacccttcaataatagaatattctgaagaaaaagttattatggaagaaggatgtttatcgcttcctgagcaatatgccgacattgaaaggccaaaaaaaatttttttagagtatattgatgaaaatgaaaaaaatataaaaaaagaaatagatggttatgaggcgagaatattgcagcacgaaatagatcatttatctggaatattatttgtagattatttatcttctttaaaaagaaacattataataaaaaaagtgaaaaaattgaaaaattcatgat

SEQ ID NO: 265254 - DNA, 517 bp, Unknown
  Bacterial polypeptide expressing nucleotide sequence isolated from the Sargasso Sea
tatgacaataaaaaatattattacagaacctgacaaaattttacgaaaaatctcaagtccagttcaagaagttggagatgctgagagaaaaataatggatgatatggttgagacaatgtacagtgctaatggtattggtttagctgcaattcaaattggtattccaaaaagaataattgtaattgatttaaaaattgaaaataaaaaaaatccattattttttgttaatccagttattaaaaataaagataacttaaaatctacttatgaggaaggatgtttatcagttccaaatcaatttgcagaaatagatagacctaaaaaatgtgatgtagaatatctagattataatggtgaaaaaaaaatattaaaagcagaaggtttattagcaacgtgcattcaacacgaaatggatcatttagaaggaatactttttatagactatctatccaagttaaaaaaatctatgattatcaaaaaactatctaaaagcaaatctacaaggatagtagtttga

SEQ ID NO: 265255 - DNA, 562 bp, Unknown
  Bacterial polypeptide expressing nucleotide sequence isolated from the Sargasso Sea
atggctataagagaaataattaaggtaccaaatccaattctcaagaaagtatcgaaaccagttgatcaggttgatgatgagattagaggaatattggatgatatgctggatactatgtatgatgcaccaggtatcggtcttgccgcaattcagataggaattcctctaagaatgctagtaatcgatatttcttctattggtgaaaaagaaaataatgagaaaaatcctcaattttttataaatccagaaataattgctccatctaataacttaagttcatttgaagaggggtgtttatctgttcctggaatctgggaagaaatagagagaccagatgagtgtattgttaaatttctcaatagaaatggtgaaaaagaagaaaaaaaatgtgaaggcttaatggctacagtaattcaacatgagatggatcatcttgaaggtattgtttttgtagatcatttatcaaggttaaggcgtgatctttcaataaaaaaatctgtaaaattccaaaaaaatccaacaaaagaaaatcgattatctcgttatgacgaacaacaatgat

SEQ ID NO: 265256 - DNA, 514 bp, Unknown
  Bacterial polypeptide expressing nucleotide sequence isolated from the Sargasso Sea
atgaatcaaattatttatgttcctgatccaatattacgtcaaacttcaaaaaaaataaaaaaaattacatcaaaagaaatagatatttcaaaaaaaatgatagatttaatgttgaaagctcctggagtaggtcttgcagcaaatcaaattggaatattaaaaaaaatagtgaccattaatcttccaaatgaaaataatgagaaaaataaaatttatactttatttaatccaataattacttcgtactccaaaaaaaaagttattatggaagaaggatgtttatctattccaaagcagtttgcagatattgaaagaccagaaaatataaccatagaatacttgaatgaaaaaaatgagaaaattaaagaaaaaaaacaaggttatgaagctagaatacttcaacatgaaatagatcatctgtatggacggctttttatagattatctttcttctttaaaaagaaatattataattaaaaaagttttaaaattgaaaaaggctggagatatctgat

SEQ ID NO: 265257 - DNA, 310 bp, Unknown
  Bacterial polypeptide expressing nucleotide sequence isolated from the Sargasso Sea
catgacaataaaaactattttaacagaaccaaacaaaatattacgtcaagtttctcttcctgttgacaaagtaggaaatgaagaaagaaaattaatggatgatatgcttgaaacaatgtatgacgcaaaaggaattggtttggcagcaattcaaataggtgtacccaagcgaattattgtcatggatctatctaaagaagcaggaaagaatgaaccaaaatattttgttaatccaataataaaaaataagagtgagaaaatttcaacctatgaggagggttgcttatcagtagttatcagtttttgctga

SEQ ID NO: 265258 - DNA, 520 bp, Unknown
  Bacterial polypeptide expressing nucleotide sequence isolated from the Sargasso Sea
atggataaattgctttacgttccaaatccacttttacgccaaaaagcaaataaaattcaatctgttggaattaaggaaaaggaaattgcaaaaaaaatgatgcaaataatgttaaaagcaccaggtgtaggtttagcagcaaatcaaattggaatcttaaaacaaattgtaactattttttttgttgatcaagagactaaaaaagaaacccaatatacattatttaaccccaatattatttcttactctcaagaaaaaattgttatggaagagggttgtttatcacttcctgaacaattcgcagaaattgagagacctcaaagtatagtagttgagtacttagatgaagataacaagcaaataaaaaaagatgttagtggcatggaatcaagaattttacaacatgaaattgatcatctctctggaaagttatttgtagattatctttcttcattaaaaaggaatataatgatcaaaaaagtacaaaaatttttaaaaacaaaaaataatgaaagataaa

SEQ ID NO: 265259 - DNA, 320 bp, Unknown
  Bacterial polypeptide expressing nucleotide sequence isolated from the Sargasso Sea
aaaaacaccattatgttttattaatccaatagtgcgcaaaatgagtagtgaaaaatctgtatacgaggaaggttgtttatcaatacctgacacatttattaaaattgagagacctaagacctgtctaattgaatacatagatataaaaggaaaacaaaacttgatggaatgtgataatctcttatctacttgtattcaacatgaaataaatcatttagacggtaaacttataattgattatttatcaaaattaaaaaaagatttaattattaaaaaattatctaaagcgagaaaaaatccagatagaatagttgtataga

SEQ ID NO: 265260 - DNA, 562 bp, Unknown
  Bacterial polypeptide expressing nucleotide sequence isolated from the Sargasso Sea
aatgcgaaatacctataaaaaattagaagtacttcattttcccgatcctaggttgcgaaagattgccaaggaagtggatacttttgatgaaagcttgcaagctcttattgatgatatgttttttacaatgtatgaagaaaaaggaattggtcttgcggcaactcaagttgatatccataagagaattattgttatagacataacaaatgataagtcagagaaaatatatttaataaatcccaaactgatttcattatcctcaactaaagattcaatggatgaaggttgtttatcggttccaggcttttacgagacagtaagtagacctaatcaagtaaaaattgagacgtacaatacaaaaggtgaaaaaacagttcttgatgctgagggtttacttgcagtatgcatacagcacgaaattgatcatttaaatggaaaactttttgtagatcatatatctaatttgaagaaaacaagaatcgaaaaaaaaatattaaaacttaaaaaagaaggtaaaataataaaaagaactggtaagccttactcaaattctgttatctag

SEQ ID NO: 265261 - DNA, 313 bp, Unknown
  Bacterial polypeptide expressing nucleotide sequence isolated from the Sargasso Sea
atggctataagaactattattacagaacccaataaattactcagacaagtttcaaaaccagtaaatcaagttggaaaagaagagcagaaactaatgaaagatatgttggagaccatgtatgctgctaacggaattggtcttgctgcaatacaagttggaataccacaaaggattatagtcatggatatttgcaaagaagaaaataaaaaagagccaagatattttgtaaatcctataattaaaaataaaaaccctttaaaagcaacttatgaagaaggatgcctttcggttccaaaccaattgcagatataga

SEQ ID NO: 265262 - DNA, 577 bp, Unknown
  Bacterial polypeptide expressing nucleotide sequence isolated from the Sargasso Sea
atgattagaccaatacttgcatatggcaatccacttttaaagcaaaagtcattcaaggttgatattgacaatgaagatgtttcagacttgatttttgacatgtgggagacaatgtataatgctaatggtgttggattagcagctccacaaattggagttttaaaacaaatatttatagcagattttgaacattttaaagaggaagattcttttgatatatcagaaatacagaaacttcagcaagtattcataaatcctattattatagatgaatttggtgaggattttaaattttcagaaggctgccttagtataccagaaatatctgaggaagttattaggaaaaaaaaattaacaatagaatttatagatgaaaaatttaatttaaaacaaattacatgttcaggaattattgcaagagtaattcaacacgagtatgatcatctaaatggtattttatttactgacagaatatcttcattaaggaaaaaagagttgaaagctaaacttgatataatagctcttggaaagtttgaacctaactataagatgagtttttataaagagaatatttaag

SEQ ID NO: 265263 - DNA, 376 bp, Unknown
  Bacterial polypeptide expressing nucleotide sequence isolated from the Sargasso Sea
tatgtctaaaaaattaaaaattctggtatttccagatccaaaactaagaactgtagccaaaaagattacaaaattcgacaaaagtctagaaaaattgtcagataacatgttacatacaatgtatgatgctaatggaattggtttagcggctacacaagtagatgaacatataagactggtagtaatggatttgtctgaagacagaaatgaaccaatggtttttgtaaatcctgaatataaagtacaaaaagagcataaattagttgaatttgaggaagggtgcctatctatacctggttttaatcataatattgccagacctgacaatattgagcttaagtggcaagatttaaaagggaaagaacatgaaataaag

SEQ ID NO: 265264 - DNA, 437 bp, Unknown
  Bacterial polypeptide expressing nucleotide sequence isolated from the Sargasso Sea
aatgatattaccaattctttcatatggaaactcaattttaaaaaaaaaatgtgttgatattgactcatcctatccaaacttaaatgagctaataagtgatatgtgggatactatgtataatgctgagggtgtaggtttagctgcacctcaaattggtagacaaattaaattatttataattgatgcttctcctttttttgaagaaaaggaagtaacagattatgaattaaaaaacttgaaaagagtttttataaacccaacagtaacttttttaaatgatgaaaaatgtagtttcaatgaggggtgtttaagtatcccagatataagggaagatattgaaagatttgattctattaaaattgatttttttgatgaagaatttaattcacactctttagattttaatggaattttatcaaggggtaattcttcacgaa

SEQ ID NO: 265265 - DNA, 535 bp, Unknown
  Bacterial polypeptide expressing nucleotide sequence isolated from the Sargasso Sea
atggcagttagggacatattgagaatgggacatccgacactccgaaaaaagtcggagcctgttggcattcacgatgtcagttcttcaaaaattcaaaatcttattactgatcttagtgataccctcgaagcttcaggcggcatcggcctcgcggcgccacagattggggaattagtaagagtagtgattataaagattcccaaaggttctagcagctatggcgagcttgaggcacttcctctcacagttttcataaaccccatcattatacccgttggtcaggaacaaaaatctcattgggaaggctgcctatcagttccaggacttcgaggcctagtatctcgtccccaaaatattcaacttcgatactacgacctagaaaaaaaagaaacctctttaaaagtcgaaggctttctatccacagtgctgcaacatgaatgcgaccatttggacggaactctttatctagacagactatcagacacgaaagacctgtcctttgaagaagaatttcttcagtacaaccttaactgag

SEQ ID NO: 265266 - DNA, 357 bp, Unknown
  Bacterial polypeptide expressing nucleotide sequence isolated from the Sargasso Sea
gatggttttaaaaatcttactttttccagattcaaggcttagaacggtggcttctgaggtagaggatgttaatgcagaaattaagactctatgtgaaaacatgctggaaactatgtatgaatgtgggggtataggcttggcagccactcaagtcaatgttcataagagggttatagttattgatataagtcctgagaaggactcccctcttgtgcttatcaacccaaaaattaaagttttgccttcagaaactaaattagactatgaggaaggctgtctgtctgttcctggattttttgaaaccatcaacaggcctgactccatagaagttgatgctttagatgaaaatggaaaaga

SEQ ID NO: 265267 - DNA, 589 bp, Unknown
  Bacterial polypeptide expressing nucleotide sequence isolated from the Sargasso Sea
atgattttaccaatagtcggatatggccatccagtattaaaaaccaaagctaaaaaaattaacaaatcttttgaaagcttatccaatataatcaataatatgtgggaaacgatgtataatgctaatggggttggtttagcagcacctcagattggattatcaataagactttttattgttgataccaaaccattttcagatgatgaaagcctcaaccaagaggagagcctaaaattaaaatcctttaaaaaggtatttattaacccagagattttggatgaaaatggagaggcttgggattttaacgaaggatgtctaagcattcctgaaattagagctgatgtcaaaaggagtgaaaccattaaaataaaatattatgatactaattttattgaacaatttgaagagtttgatggtttgatcgctagggtaattcagcatgaatacgatcacatcgaaggaattttgtttactgataaaatatccccactaaaaagaaaacttttaagaagaaagctgttagatattagtaagggaaaagtacctactgattatttaatgaagttttctaaaattaaaatgagataat

SEQ ID NO: 265268 - DNA, 283 bp, Unknown
  Bacterial polypeptide expressing nucleotide sequence isolated from the Sargasso Sea
tatggcattgctcgatattctggtctatccggacccccgacttcggaataaggcgctgccggttgaggtcgttgacaccgcccttcgcaagcttgtcgaagacatggcggagacgatgtacgcagcgccaggcattggtcttgccgctacccaggtaaacgtcgcgaaacggattgtagtgatcgatacttctgaacgccaggatcggctccaggtattcatcaaccctgagctgaccggtatgggcgagttggttgaaacagaggaaggctgcctgtccgtc

SEQ ID NO: 265269 - DNA, 517 bp, Unknown
  Bacterial polypeptide expressing nucleotide sequence isolated from the Sargasso Sea
atgagtataagaaaaattttaacagaacctgataaaatattgagacaagtttctaaaccagtggaagttgttggaaatgaagaacaggatttgatgagagatatgttggctacaatgtatgctgcagaaggaataggactagcagcgatacaagtcggcgttccaaaaagaataatagtaattgatttaagtaaagatgagaaaaaaaatccaatgtattttgtaaatccaataattaaacaaaaaaattcagtaaattcaatttatgaagagggatgtttatctgtaccaaatcaatttgcagaaattgaaagaccaaataagtgtgaagtagaatatttagactttaatggaaaaaaacaacttttaaaagctgaaggactgcttgcaacttgcatccaacacgagatggatcatttggaaggaattctttttattgattatttatcaaaattaaaaaaatctatgatattaaaaaaactttctaaaaataagcctgatagaatagttgtttaaa

SEQ ID NO: 265270 - DNA, 526 bp, Unknown
  Bacterial polypeptide expressing nucleotide sequence isolated from the Sargasso Sea
atgactgtaaaagtaatattaactgaaccaaataaaattttaagacaagtatcaaaacctgtagagaaagtcacaaaagatgaacagatattaatggatgatatgttggaaactatgtatcatgcaaatggaattggattggctgcaatacaaataggagttcccaaaagaataatagttatggatatttccaaaaaagatgaaaaagaaaatccaatgtattttgtcaatcctacaatcaaaaacaaagataaagatttatcaacatatgaagaaggatgcttgtcagtaccaaatcagtttgctgaagttgatagaccatcaacatgtgagattgaatatttagattattatggcgaaaaaaaaattctgaaagcaaatgggttgctagcaacatgtattcaacatgaaatggatcacttagaaggaatattatttatcgattacctttcaaaattaaaaaaatccatgataattaaaaaactctctaaacagaaaaaaagttcagaagctttaattatttagc

SEQ ID NO: 265271 - DNA, 523 bp, Unknown
  Bacterial polypeptide expressing nucleotide sequence isolated from the Sargasso Sea
tatgtcagtaaaagaactaatcacagtaccggatgacatccttagaaaaaaatctgagccattaaataaagttgatgttaatgaaaaaaagctcataaaagatttatttgaaactatgtaccatcacaatggtataggtttagcagctgttcaagttggaatccttaaaagagtagttgtcttagatgtatcaaaaaatgaaaatgaaaaaaaacctttatgttttattaatccacaaataaaaactttaagtgaaaaaatgtctacatatgaagaaggttgtttatcaatacctaatacctttattgagatagagagaccagaaatttgtaccgtatcttatatagatgaaaatggtgataagaaagaaatggaatgcgatggattactctcaacatgtttacaacatgaaataaatcacctagatggaaaactaataattgattatttatctaaaatcaaaaaagatttaataataaaaaaattgtctaaacaaaaaacttctaatagagttgttgtttaa

SEQ ID NO: 265272 - DNA, 568 bp, Unknown
  Bacterial polypeptide expressing nucleotide sequence isolated from the Sargasso Sea
aatgagcctaagagaaataattaaagtacctaatccttttttgaaagttactgctaaacctgtaactgttattgatgaaaatatcttaactattttaaatgatatgatggaaacaatgtatcatgcaaatggtattggtttagccgccacacaaattgcaattgataaaaggttaattgtcatggattgtggaaaaataaaatttgaaactaaagacatatcagacgaagaatataataaaaaaattaaggatgaacaaattgaaccttttccaattaaaatgatcaatccagaaattataagtataggtaaaaatattgaagaaagagaagaaggctgcttgtctataccaggatacaatgccaaagttaaaaggccttcatctttaaaagtaaagtatatagatgaaaataaaaaagataaaaccattaatgctgaaggattattagcaacttgcattcaacatgaaatagaccatttgaatggtattctttttattgatcatctatcaaaattaaaaagagagataattttaaaaaaagctatcaaagaatattctaaaaattaa

SEQ ID NO: 265273 - DNA, 526 bp, Unknown
  Bacterial polypeptide expressing nucleotide sequence isolated from the Sargasso Sea
atgagcattcaaaaaattattactataccagatgaaactttaaaaaaaatctctgaacctattgaaaaagttggagtaaatgaaaaaaaattaattaatgatttatttgaaacaatgtataattccaaaggtattgggttagcagcagtgcaagtgggtatacttaagagagttttagtcattgatatatcaactaaagatgaaaaaaataaacctttaagttttataaatcctaaaataaaaaaaattagtgatgaaacttcaatttatgaagaagggtgtttatcaatacctgatacttttattgaaattgaaagacctaaaatttgtgaggtagaatacatagatttagatggtaaagttcaaaatatgaaatgtgatggacttttatcaacttgtcttcagcatgaaataaatcatttggatggtaaattgataattgatcatttgtcaaaattaaaaagagatttaattattaaaaaaatctcaaagacaaaaaaaaatccagacagaatagtagtttaaa

SEQ ID NO: 265274 - DNA, 553 bp, Unknown
  Bacterial polypeptide expressing nucleotide sequence isolated from the Sargasso Sea
attggcaatacaaacaatcttgaaaatgggcaaccccttattaagagaagttgcttcggagttttcaaaagacgaaattctgcacgcggatacgaatgaattattagttgatatgtgggaaaccttagacttttcaggtggaataggtcttgccgcaccacaaattggggtttctaagcaattagcagtgattaagctctctgaagattcagataggtatcctgatatggagactacagagccttatattatcttcaatccacaaataacagtattagataaagaagttcaaggtttttgggaagggtgcttaagcgttcctgggttaaggggctatgttgagagaccaagaaaagtaaagattgattatctagatgaaaatgcagacgagagaacaattgaggtagaagatttcttagctaccgtttttcaacatgagctagatcatcttataggtatgttgtatgttgatagaatggaagacgtaagcactttaatgtatgaagatgaaatgattcttcaagaagttaatgaggaagaagtattagattaa

SEQ ID NO: 265275 - DNA, 538 bp, Unknown
  Bacterial polypeptide expressing nucleotide sequence isolated from the Sargasso Sea
gatgtttgagaacttagaaattttgcaatttccagatgaaagactgcgccgcttatccatgcctgttgaaaccttcaacagggatctgaaaacattggcagacaagatgttagaaatcatgtatgagtcaaacgggattgggctagctgctcctcaagttaaccaaacaattcggcttatagttgtcgatgtttctgagggcagagataatccatgtatttttgtaaaccctgaaataaaagagcctgcaggttctgtcgacagcagcgagggatgtctttctgttcccgaaatcagaacaacaatcaaacgatatgaaaacatcacccttgaatatcaagatctcaatggagaaaggcatgaagagacccttggtgatctgatgtcaatatgcgttcaacatgagatagaccatttagatggcaagctttttattgattatgtaccagacgttaaactacagaggcttagaaaaaaaattgccaaaaacaaaaaaaatcagccaccaacaaaaggaacaactgtgagggttgtttga

SEQ ID NO: 265276 - DNA, 369 bp, Unknown
  Bacterial polypeptide expressing nucleotide sequence isolated from the Sargasso Sea
catggctataagaactattattacagaacccaataaattactcagacaagtttcaaaaccagtaaatcaagttggaaaggaagagcagaaactaatgaaagatatgttggagactatgtatgctgccaacggaattggtcttgctgcaatacaagttggaataccgcaaaggattatagtcatggatatttgcaaagaagaaaataaaaaagagccaagatattttgtaaatcctataattaaaaataaagaccctctaaaagcaacttatgaagaaggatgcctttcggttccaaaccaatttgcagatatagatagaccaagtaaatgtgaaaaagagtatttagattataatggacaaaaacaatt

SEQ ID NO: 265277 - DNA, 445 bp, Unknown
  Bacterial polypeptide expressing nucleotide sequence isolated from the Sargasso Sea
tcttcgaaaattaatggatgatatgcttgaaactatgtacgcagctccaggtattggtttagcagctgtgcaagtaggaattttaaaaagattaatagttattgatgtatcaaaagaccaagagaagaaaaatccattatttctagttaatcctgaaattgtattcaaatctaaagagacatcgatttatgaggaaggatgtctatcacttccggaacattttgctgaaatagaaagaccagctgagtgtcatgtagattacctagactacaatggtaaaaaaaaaactttaaaagccaaaggtcttttatctacttgtttacaacacgaaatagatcatctaaatgggatactattcattgattatctatcaaaactaaaaaaagatatgataataaaaaaattaactaaacataaaaaagaaattagcaaaattgttatttga

SEQ ID NO: 265278 - DNA, 526 bp, Unknown
  Bacterial polypeptide expressing nucleotide sequence isolated from the Sargasso Sea
atggctattaaaactatattaactgaaccaaataaaattttaagacaaatttcaaaacaagtcgaaaaggttggtgaggaagaaaaaaaaatcatggatgacatgctcgaaacaatgtaccaagcaaatggaattggtttagctgcaattcaaataggaattccaaaaagaattatagtaatagatttggcaaaaggagaagaaaaaaaaaatcctatgtattttgtaaatccagttataaaaaataaaaatcaaaattttgcaacttatgaagaaggatgcctttctgttccagatcaatttgctgaggttgatagacctagtacatgcgaagtagaatatttagactacaatggtgaaaaaaaaattttaaaagcagagggtttgattgctacctgcattcaacatgagatggatcatttacaaggaattttatttattgattatctttcaaaactaaaaaaatcaatgattataaaaaagctttctaaaggtaaaaataaatctgatagaatcactttttaaa

SEQ ID NO: 265279 - DNA, 520 bp, Unknown
  Bacterial polypeptide expressing nucleotide sequence isolated from the Sargasso Sea
atggcattgctaaccgttcatacctttcctgacccggtgctgaagcagaaagctctcccggtagatgaatttgacgaaaaattatctgagatcgccgagaatatgctcgagaccatgtatgaagaaaggggaatcggcttagctgccgtgcaggtggcagttctcaaacaactggtggttgttgatttgaaaagcggagaagaagataccagcctccgagaaccgagggtttttgtcaatccccgaatcgttgacagaagcggagaaactatttcggaagagggctgcctgagtgttactgaattcagagctgaagtgaaaagatctgaatcgatcaaactcgaatatcaggacctccaaggaaatccccagactttggaagcagatgggcttctttccatatgtattcagcatgaactggatcatctccagggcattcttttcatcgatcatctacccttgcttaaacagaagatggtgaaaaaacgcctcgcgaagcttgctcgtgaagccgcatgag

SEQ ID NO: 265280 - DNA, 520 bp, Unknown
  Bacterial polypeptide expressing nucleotide sequence isolated from the Sargasso Sea
tatggctattaaaactattcttacagaaccaaataaaattcttagacaggtatctaaaacagtagataatgttggtaaagatgagcaaaaattaatggatgatatgttagaaactatgtatcaagctaatggaataggtcttgcggcaatacaaataggtattccaaaaagaattatagttatggatattagtaaagaagaaggaaaaaaagagccaagatattttgtaaatcctgttattaagaataaagaccctttaaaatttacttatgaagaagggtgtttatctgttccaaatcaatttgctgaaattgatagaccaagtaaatgtgaagtagaatatttagattataatggaaaaaaaaaactgttgaaagcagatggattacttgccacatgtatacagcatgaaatggatcacttagaaggaatattgtttatcgactatctttcaaaattgaaaagatcgatgattattaaaaaattatctaaattaaaatctaatacagcaatactttaa

SEQ ID NO: 265281 - DNA, 535 bp, Unknown
  Bacterial polypeptide expressing nucleotide sequence isolated from the Sargasso Sea
catgattcgcgagatcctgaagatgggcgatccgcgcctgctcgaagtcgccaagccggtcgagcggttcgatacacccgaactgcacgagatcgtcgcggacatgttcgagacgatgcaccacgcgaacggcgccggcctggccgcgccgcagatcggcatcgggctgcagatcatcatcttcggcttcggcaacaacaaccgctacccggacgcgccgccggtgccggagacggtgctgatcaacccgaagatcgagtacctgccgccggacatggaagagggctgggaaggctgcctgtcggtgccgggcatgcgcggcgtcgtcagccgctacgcgaaggtgcgctacagcggcttcgaccagtacggcgagaagatcgaccgcgtggccgacggttttcacgcacgcgtcgtgcagcacgaatacgatcacctgatcggcaagctgtatccgatgcggatcaccgacttcacgcgcttcggcttcacggaagtgctgttcccggggctcgatccggcttccgacgattga

SEQ ID NO: 265282 - DNA, 526 bp, Unknown
  Bacterial polypeptide expressing nucleotide sequence isolated from the Sargasso Sea
atggcaattaagacaatcattacagaaccaaataaaattttgagacaaaaatcattaccggttaatcaggttggaaaagaagaacaacgattaatggatgaaatgttagaaacaatgtatgacgcaaatggaattggtcttgcagcaattcaaattggagttccaaaaagaataatagtaatggatatatcaaaaaatgaagaaaaaaaaaatccaatgtattttgttaacccaataataaaaaataaaaatctggaaacttctacatatgaagaaggatgtttatctgttccaaatttttttgctgaagtggacaggccaaaaaaatgtgacgtcgaatatttagattattatggtaaaaaaaaaatattaaaggcagaaggattattagctacatgtattcagcatgagatggatcatttagaaggtatattatttattgattatttatcaaaattaaaaaaaacaattattgttaaaaaactatcaaaaaaaaaagatcgaccagatagaattattgtttaat

SEQ ID NO: 265283 - DNA, 526 bp, Unknown
  Bacterial polypeptide expressing nucleotide sequence isolated from the Sargasso Sea
atgacaaaaagaaaaatcatactggttccggatgaaatacttaaaaaaaaatctgaaaagattgaaaaattaaccaacaaagaaaaacagttggcagatgatttgtttgaaacaatgtacaaaaataatggcataggtcttgctgctgttcaggttggtgttttaagaagaatgattgtagttgatgtttcaaagaaagatgaggaaaaaaaacctctttgtttaataaatccagtcataaaatcatttggtaaagatagatcgacatatgaagaaggttgtttatcaatacccgaaacatttatagaaattgaaagaccaaagacctgtattgttgaatatatagatatctcaggatataaaaaaaatatggaatgtgatggtttactatctacatgcgtccaacatgaaattaatcacttagatggtaagttgatcattgattttttgtcaaagcttaaaaaagatattctaataaaaaaattatctaaaaacaaaaatacatctagtagagttattgtgtaaa

SEQ ID NO: 265284 - DNA, 327 bp, Unknown
  Bacterial polypeptide expressing nucleotide sequence isolated from the Sargasso Sea
aatgagcgtaaaagaaattatcaccgtacctgatgaaattttgaggaaacattcaaccgaagtcgagaaagttggaaaaaatgaaaaaaatttaatcaaaaatttatttgatacaatgtatgcctctaagggtataggactggctgcaattcaaattggtgtaccaaaaagaatagttgtaattgatgtttctaataaggaacaagaaaaaaaaccgatatgtttaattaatccaattatattcaaaaaaagctctgaaacgtctgtatatgaagaaggttgtttgtctatacctaatacatttattgaaatagaaaggcccaaaaa

SEQ ID NO: 265285 - DNA, 538 bp, Unknown
  Bacterial polypeptide expressing nucleotide sequence isolated from the Sargasso Sea
catgtttgagaacttagaaattttacaatttccagatgaaaggctgaggcggttatctgtccctgttgaagcctttaacaaagagttgaaggccttagcagataagatgctagaaatcatgtatcaatcaaatggaataggcttagcagcgccccaggttaatcaaacaattagactcatagtcgtcgatgtttcagaagacaggaataacccatgtatttttatcaacccaaaaataaagcaaccatcaggatcggttgatagcagcgagggctgcctctctgttcctgaaatcagaacaacaatcaagcgatatgaaaacataactcttgaataccaagacctcaatggagttaggctcgaagagtcattggacgacctgttgtcaatatgtgttcagcatgaaatagaccacttagacggaaagctttttattgattatgttcctgatgtaaaacttcaaaggcttagaaaaaaaattgccaaaagcaaaaaaaaccaaccaacaatagagggaacaacggtgagggttgtttga

SEQ ID NO: 265286 - DNA, 358 bp, Unknown
  Bacterial polypeptide expressing nucleotide sequence isolated from the Sargasso Sea
agtaattatttttaggaatccagacatagaagaaaaagaaaaaataaaaattacccctctaataaacccaatttacaaaaccttaggagatgaaaaagaaaatgactgggaaggatgcttatctataccaggaatgcaaggactggttacaaggtataaaaaaataagatatactggttttgatattgatggaaataaaattgataatgaagttgaaggattacacgctagagttattcagcatgaaatagatcatctcgaagggattttatatacagaaagactggctgataagaaagcttttggatttgaaaaagaaattatagagtattggaaaaatgaaaaaacaacaaaataa

SEQ ID NO: 265287 - DNA, 469 bp, Unknown
  Bacterial polypeptide expressing nucleotide sequence isolated from the Sargasso Sea
atgacagtaaaaactattttaacagaacctaataaaatattacgtcaagtttctcttcctgttgaaaaaattggaaaggaggaacaggtattaatggatgatatgcttgaaacaatgtatatggcaaaaggaattggtttagctgcaattcaagtaggagtacctaaacgaatcattgttatggatattggaaatagggataaagataaagagccaatgtattttgttaacccaataattaaaaataaaaattctaaacattctacatatgaagaaggatgtttatcagttccaaaccaatttgcagaagtcaatagaccaagctcatgtgaggttgaatatttagattataatggaaataaaaaaatattaaaagcgtctggattacttgctacttgtattcaacatgagatggaccacttagaaggaatattatttattgattatctatcaaagttaaaaaaaataa

SEQ ID NO: 265288 - DNA, 538 bp, Unknown
  Bacterial polypeptide expressing nucleotide sequence isolated from the Sargasso Sea
catgttcgataacttagaaattttaaaatttccggatgaaaggttgaggcgtttatcttcccctgttgaagcctttaacaaagagttgaaggccctagcagataagatgctagaaatcatgtaccaatcaaacggaataggtttagcggcgccccaggttaatcaaacaattagactcatagtcgtcgatgtttcagaagacaggaataacccatgtatttttatcaacccaaaaataaaacaaccgtcaggatcggttgatagcagcgagggttgcctgtctgttcctgaaatcagaacaacaatcaagagatatgaaaatatcactctagaataccaagacctcagtggcgatgggcatgaagaatcattggatgatctgatgtcgatatgtgttcagcatgaaatagaccatctagacggcaagctttttattgattatgttcctgatgtaaagcttcaaaggcttagaaaaaaaatcgccaaaagcaaaaaaaaccactcaacaacagaaggaacaacagtgagggttgtttga

SEQ ID NO: 265289 - DNA, 496 bp, Unknown
  Bacterial polypeptide expressing nucleotide sequence isolated from the Sargasso Sea
aatgtttgatatagttacttttggacatccttcattaaaaatgaaatcacaagatgtagaaaattttgataatgaattaaaagacttaacggataaaatgctcgaaataatgtatgaagcacctggagttggattagctgctcctcaaataggcattaataaaaatatatttgtatttgatatcggagaaggtcctaaaatcgcagttaatccaatttcaattaaagtatcaggaaaagttaattttcttgaaggctgtttatctttaccaggatattattgggaaattgagcgtcctgaatatgcaaagctagattgttttgatttaaaaggaaataaaatattctatgaaggagatgacttattaggcagggtactgcagcatgaattagatcatttaaaaggaaaagtacttctaacatgcttagataggaaaacaagaaaacaagcattaaaagatatatctataaacggttttccaggtaatgatgtttaa

SEQ ID NO: 265290 - DNA, 511 bp, Unknown
  Bacterial polypeptide expressing nucleotide sequence isolated from the Sargasso Sea
atggataaattactttacgtaccaaatccactattacgccaaaaagcagataaaattcagtctgttggaattaaggaaaaagaaattgccaaaaaaatgacgcaaataatgataaaagcaccaggtgtaggtttagcagcaaatcaaattggaattctaaaacaaattgtgactatattttttgtagatcaagagactaaaaaagaaaaacaatatacattgtttaacccaaatattgtttcatactctcaagaaaaaattattatggaagagggttgtttatctcttcctgaacaatttgcagaaattgagagacctcaaaatatagtagtcgagtacttagatgaaaataataaacaaataacaaaagaagttagtggagtggaatcaagaattttacaacatgaaattgatcatctttctggaaaattatttgtagattatctttcttcattaaaaaggaatataatgatcaaaaaagtacaaaaatttttaaaaaacaaaaaataat

SEQ ID NO: 265291 - DNA, 538 bp, Unknown
  Bacterial polypeptide expressing nucleotide sequence isolated from the Sargasso Sea
atgtttgagaacttagaaattttgcaatttccagatgaaagactgcgccgcttatccatgcctgttgaaagcttcaatagggaccttaaaacattggcagacaagatgctagaaatcatgtatgactcaaacgggattggactagctgctcctcaagttaaccaaacaattcggcttatagttgtcgatgtttctgaagacagagataatccatgtatttttgtaaacccgaaaataaaagagcccgcagggtctgtcgacagcagcgagggatgtctttctgttcccgaaattagaacaacaatcaagcgatatgaaaacatcaccctcgaatatcaagatctcaatggagaaaggcatgaagagacccttggtgatctgatgtcaatatgcgttcaacatgagatagaccatttagacggcaagctttttattgattatgtaccagacgttaagctacaaaggcttagaaaaaaaattgccaaaaacaaaaaaaaccaactgccaacagaaggaacaactgtgagggttgtttgat

SEQ ID NO: 265292 - DNA, 445 bp, Unknown
  Bacterial polypeptide expressing nucleotide sequence isolated from the Sargasso Sea
attggcagacaagatgttagaaatcatgtatgagtcaaacgggattggactagctgctcctcaagttaaccaaacaattcggcttatagttgtcgatgtttctgaggacagagataacccatgtatttttgtaaacccggaaataaaagagcctgcaggctctgtcgacagcagcgagggatgtctttctgttcccgaaatcagaacaacaatcaaacgatatgaaaacatcaccctcgaatatcaagatctcaatggagaaaggcacgaagaggcccttggtgatctgatgtcaatatgcgttcaacatgagatagaccatttagacggcaagctttttattgattatgttccagacgttaagctacaaaggcttagaaaaaaaattgccaaaaacaaaaaaaatcaactgccaacagaaggaacaactgtgagggttgtttga

SEQ ID NO: 265293 - DNA, 514 bp, Unknown
  Bacterial polypeptide expressing nucleotide sequence isolated from the Sargasso Sea
atgttgaagcttatttatgctcccgatcccatattaaaaaaagagagtgtatctatacctcaggtagacgatcatcatagagaacttataaaacaaatgtatgagattatgtattctgcaaatggagttggtctagctgctccacagataggtttaaatattcgcatatttgttcttgatgctggctccagagatgaagaaaaaaaacctatcacaatgataaatcctaaaattatatcattacatgaaaataaagttccatatgaagagggttgtttatctttcccagagcactttgctgaaatagaccgtcctgaaaaaattaagatagagtatcttgatgaagacaactcaaaaaaaatctctacatttacaggttttgagtcgagaataatacaacatgaattggatcacttaaacggtattttattcgttgaccatttaagtcgtttaaaaagagacgtgattatcagaaagatgagaaagtataaaaaagaaaaagaaataatttaaa

SEQ ID NO: 265294 - DNA, 450 bp, Unknown
  Bacterial polypeptide expressing nucleotide sequence isolated from the Sargasso Sea
tattaaaagatatgtgggattcattagaagcggcaggaggtataggccttgctgctcctcagattggaatatctaaacaactcgcagttattaagttatctgaagaatcagagagatatcctgatatggaggatagtgaagcattcattatatttaatccaaaaataacagtcatggatgaaaccgaacagggattttgggaagggtgtcttagtgttccaggtttgagaggatttgttgaaaggccaagaggcatcagagtagatttcctagatgaaaatgctgagcctaagtctatagagataaaggattttttggcaaccgtctttcaacatgagctagatcatttaattggaaagctttatatagacagaatgaaggatataggcactctaatgtttgaggatcaaatgatttttgaagaaatagaagaagaattactggattagc

SEQ ID NO: 265295 - DNA, 463 bp, Unknown
  Bacterial polypeptide expressing nucleotide sequence isolated from the Sargasso Sea
cctggtagatgaatttgacgaaaaattatctgagctcgccgagaacatgctcgagaccatgtatgaagaaaagggaattggcttggccgccgtgcaggtggcctttctcaaacaaatggtagttgttgatttaaaaagcggagaagaagatatcagcctccgagaaccgaggatttttgtcaatccccgcatcgttgaaagaagcggagaaactatttcggaagagggatgtctgagcgtgactgaattcagagctgaagtgaaaagatctgaatcgatcaaactcgaatatcaggacctccaaggaaatccccagactttggaagcagatggacttctttccatatgtattcaacatgaattggatcatctccaggggattcttttcatcgatcatctacccttgctaaaacagaagatggtgaaaaaacgcctcgcgaagcttgctcgtgaagccgcatga

SEQ ID NO: 265296 - DNA, 550 bp, Unknown
  Bacterial polypeptide expressing nucleotide sequence isolated from the Sargasso Sea
aatgagtgctaaggaaattttaaaaatgggtaatccacttctgagagaggtggctgagaacttttctgtagaagaaattaaaagtcttgaaacgaaggacttattaaaagatatgtgggattcattagaagcggcaggaggtataggccttgccgctcctcagattggaatatctaaacaactcgcagttattaagttatctgaagaatcagagagatatcctgatatggaagatagcgaagcattcataatatttaatccaaaaataacagttatggatgacaccgagcagggattttgggaagggtgtctcagtgttccaggattaagaggatttgttgagaggccaagaagtattagagtagattttctagatgaaaatgctgaacctaagtctatagaaatagaggatttcttagcgaccgtctttcagcatgagttagatcatttaattggaaagctttatatagacagaatgaaagatataagcactctaatgtttgaggacgaaatgatttttgaagaagtagaagaggagttattggattag

SEQ ID NO: 265297 - DNA, 364 bp, Unknown
  Bacterial polypeptide expressing nucleotide sequence isolated from the Sargasso Sea
ggaataccacaaaggattatagtcatggatatttgcaaagaagaaaataaaaaagagccaagatattttgtaaatcctataattaaaaataaagaccctttaaaagcaacttatgaagaaggatgcctttcggttccaaaccaatttgcagatatagatagaccaagtaaatgtgaagttgagtatttagattataatggacaaaaacaattattaaaggctgaaggtttacttgctacatgcattcaacatgaaatggatcacctagaaggtatattatttatcgattatctctcaaaattaaaaaaatcgatgataattaaaaaattatcaaaattaaaatcaagtacagccgaagtttaat

SEQ ID NO: 265298 - DNA, 499 bp, Unknown
  Bacterial polypeptide expressing nucleotide sequence isolated from the Sargasso Sea
aatgtatcaaagtaccaaatttcctcaattatcagatcttattgatgatatgttcgataccatgtatgaagaagaaggcatcggtctagccgctaatcaggttggaattgatttaaatctttttattattgatatctcgcatactgatgacgatgaatatccaaggatatttatcaatggcgaaatcacatcatcaagaggagaaagtgttttttctgaaggatgtctctctattccaaaagttgcccttgaagtaaccaggcctgaggtaattctatttaaataccaagatattcatgaagaatggtatgaagaggagtttgatggtcttcttgcccgcgcaatacaacatgaaatcgatcatttgaatggtgtgttaattattgatttggtgagtgagatgcaaagattaaaggtcaataaagaaataaaaaaaattaaaaatgattccattatcaagttaaaacggcaaccaattagtaaagggtttgttctttag

SEQ ID NO: 265299 - DNA, 526 bp, Unknown
  Bacterial polypeptide expressing nucleotide sequence isolated from the Sargasso Sea
aatgacaacgagaaaaattcttatagaaccagatcctattttaagaaaaaaatgttctccattagaaaaagttgatgatcaaaccagaaaactaatgaaagatatgctcgaaactatgtataaagctccaggtattggcctagcagcaatacaaataggaattttaaaaagaattgtagttattgatatttcaaaagatgaagaaaaaaaaagtccattatttcttgtaaatcctgaaataatattcagatcaaaaaacacatcagtgtatgaagaaggctgtttatcattacccggtcaatttgcagaaatcgaaagacctgctgagtgtcatttaaaatatttagattttgatggaaaaacaaaagaacttaaagctgatggtcttttgtctacgtgcattcaacacgaagttgatcatttaaatggtattttatttattgattatttatcaaaattaaaaaaaaatatgataattaaaaaacttttaaaacagaaaaaaacctcacaaagaattgtagtttaa

SEQ ID NO: 265300 - DNA, 327 bp, Unknown
  Bacterial polypeptide expressing nucleotide sequence isolated from the Sargasso Sea
tttggatattaagatttatccagacccagttttattaaaaaattgcgagtctgttgaaaaagtagatgataacttcatctccacagtttctatgatggtagacactatgagggcggccgaaggtataggtctagctgctccgcaagttggaatactccaacggttttttgtttgcttagactttgatgatgagaataaagaaaaaactattgttttgattaaccctgaaataactaagatggaaggtagaatcgagtcaaaagaaggatgccttagcataccaggattctacgaatatgtttataggtatgaaaagattgagatcaa

SEQ ID NO: 265301 - DNA, 562 bp, Unknown
  Bacterial polypeptide expressing nucleotide sequence isolated from the Sargasso Sea
atggctataagagaaataataaaggtaccgaatccaattctaaagaaagtatccaaacctgttgatgtggttgatgatgagattagaaaagtattggatgatatgcttgacaccatgtatgatgcgccaggtataggtcttgctgcaatacaaattggaattcctctcagaatgctagtgatcgatatttcatctgttggtgatcaagataataatgaaaaagatccacaattctttataaatcctgaaattatagacccgtctgatgatttaagttcatttgaggagggatgtttatctgttcctgggatatgggaagaaattgaaagaccagatcagtgcattgttaaatttgtaaatagagatggtcagaagaaagaaaaaaaatgtaagggcttattggccacagtaatacaacatgagatggatcatcttgaaggcattgtttttgttgatcatttatcaagactgaagcgtgatctttcaataaaaaaatccataaaatttcaaaaaaatccaacaaaagaaaatcgattatctcgttataatgaacaacaatgat

SEQ ID NO: 265302 - DNA, 523 bp, Unknown
  Bacterial polypeptide expressing nucleotide sequence isolated from the Sargasso Sea
atgggcgcgcgaggcgatgacgcgcgaacgcgcgcgtacggcgcgagcgaaccggacggcacgtggcgagagaagaatttaaacgcgttcgggaatctcatcaacgtcgctcgaggcggacgagaggtgttgcaggcgggggcgcccccgctgcgagacgtcgcgaagcaagtggcgcccgagcgcgtggagaccggggagatacaagagctcatcagcgagatggtgcgcgtgtgtaaggctcgaggcgttggactggccgcgccgcagttggggacgcgtctgcgcgtcatcgtgttggaggacacggtggagggaatgtcggacgtctcggcgaaggagctcgagcgacaaaagagaaaaccgttcgcggtcaaagtcgtgataaatccagagctcgaaccgatcggggacgcgagcgccgcgttttttgaggggtgcttatccgtcgcgggataccgcgcggtggtcaggcgacatctcaaggtgcggtgtcgagggctgggcggcgacggagcgcccg

SEQ ID NO: 265303 - DNA, 520 bp, Unknown
  Bacterial polypeptide expressing nucleotide sequence isolated from the Sargasso Sea
atggcactacttaacattcactctttccctgacccgatattgaggaaaaaagctttaccagtaacagaatttgatcaaagccttgatcaaacagctcaatccatgctggaaacaatgtacgtgtctagtggaatcggacttgctgcgatccaggtaggcattctcaaacaaattatagtaatcgatttaaaaagtggtgagcaagacattagcctaagggaaccacatgtctttgttaaccctaaaatcttaaaaaaattcggatcaactgtctctgaagaaggatgtctcagcgtaattgatttcagaggagatattgagcgtgctgaaaaaattttagttgaatacgaggatgttaaaggcaatatccatcaattagaggctcacgaaatgatgtcaatttgccttcaacatgaaattgaccatttaaacggaattttatttattgatcatttgcctatactgaagcaaaaaatggttaaaaagaagttgacaaaacttgccatggaaaatgcatgaa

SEQ ID NO: 265304 - DNA, 316 bp, Unknown
  Bacterial polypeptide expressing nucleotide sequence isolated from the Sargasso Sea
tcagaaaataaagatgatcccagaatatttataaatccaacatacaaaactcttgaaaatcatagcctatatgagtttgaagaaggatgtctttctattcccggttttaatgaggtcatagcccgccctgataaaattgaattaagatggcaggatttagatggaaatgagcatgttgatcagcctgaaggccttctaacagtatgtattcagcatgaaattgaccatttagaaggaaaactaatggttgattatgtaagtgcactgaaaagagatagggttagaaacaaacttttaaaagaatataaaagataat

SEQ ID NO: 265305 - DNA, 526 bp, Unknown
  Bacterial polypeptide expressing nucleotide sequence isolated from the Sargasso Sea
tatgacactaagaaaaattcttatagagccaaatccaatattgagacaggtatctgaaccagtgaccaaagtaggagaagaagaaagaaaattaatggatgatatgcttcaaacaatgtatgaagccaatggaataggactggctgctatacaggtaggtattccaaaaagaataattgtaattgacctttcaaagaaagatgaaaaaaaaaatcctttatactttgttaatccaattataaaaaataaaaaaaaggaattatcaacttatgaagaaggttgcttgtcagttccagatcaatttgcagaaattgataggccaagcgaatgtgaagtagagtatttagactataatagcaaaaaaaacattttaaaagtaagtggacttctagcaacttgcatccaacatgagatggatcatctagaaggcattttgtttatagactatttatctaaattaaaaaaaacaatgataattaaaaaactttctaagcaaaaaggcaaagttgatagaatagttgtttag

SEQ ID NO: 265306 - DNA, 277 bp, Unknown
  Bacterial polypeptide expressing nucleotide sequence isolated from the Sargasso Sea
gataaagagctccaagggttttgggaaggatgtttaagtgttcctggattaagaggatatgttgagaggcctagaaaagttaagattgattatcttgacgaaaaagcagttgaaagaacaattgaagtagaagatttcttggctaccgtttttcaacacgagctagatcaccttataggcatgttgtatgtagatagaatggaagacgttagcactttaatgtttgaagatgagatggttcttcaagaagttagcgaggaagaaatattagattaaa

SEQ ID NO: 265307 - DNA, 526 bp, Unknown
  Bacterial polypeptide expressing nucleotide sequence isolated from the Sargasso Sea
catgactatcagaaaaattttgacaattcctgacccattgttacgtaaaaaatctctttcagtagagaaagttgataaagaaataagaaatttaatggatgatatgattagcactatgtacgacgcaccaggtattggtttggctgcagtccaaataggagttcctaaaagagttgttgtgatggatctttcaaaaaatccagacagaaaaaaacctatgtattttattaatcctgaaattatttggaaatcaaacgttaattcatcttacgaagagggttgtctttcaataccaaatcaattcgcaaaggtagaaagaccagacaaatgtcatatcaaatatcttgattacgaaggtaatgaaaaaaaacttgaagcagaaggtttgctttctacttgtattcaacatgaaatagatcatttaaacggggttttatttatagattatttgtcaaaattaaaaaaggatatgattataaaaaaagtttctaaagacaaaaaagagttggaaagggtagtggtttaa

SEQ ID NO: 265308 - DNA, 625 bp, Unknown
  Bacterial polypeptide expressing nucleotide sequence isolated from the Sargasso Sea
tatgaacgctggggtgatcttggccgggagttttgcgcagctggcccgagcggctgaacagtcgcgggacacgatgttggtcccgaagacggcgctcgagacccctcctctagagattcacacccttggagctgaggtgttgcgtcagcctgcccgtcgcatcggcaaggtgacagagcagacccgcgagctggctcgggacatgctcagaagcatgtacaccgccaagggcatcggactggcggctccgcaggttgggattcatcagcagcttctggtgattgacctcgacctggagaacgccgcgacacctccgctggtgttgatcaaccctgagatcagtgccgccagcgccagcatcgacacctatgaggagggttgtctcagcattcccggtgtttacctcgatgtggtcaggccgactgccattgagctcagcttccgcgatgagatgggacggccgagaaagatgaaggccgatggcctaatggcccgtgtcatccagcatgagatggatcatctcaatggggtgttgtttgtggatcgcgtcaccgatgaagccggtcttcagaaggaattgaaggatcatggttttcagcgccagcacgttcagagcgtttcctga

SEQ ID NO: 265309 - DNA, 607 bp, Unknown
  Bacterial polypeptide expressing nucleotide sequence isolated from the Sargasso Sea
ttggctggaagcttcgctcacttggcccgcgcggcggataaatccagggacaccatgctggtgccgaaggagggattggagactcccccactggagatccacaccctcggagccgaggtgctgcgtcagcccgcccgccgcatcggcaaggtgaatgaacaggtgcgcgatctggccagggacatgctgcgcagcatgtacaccgcaaaggggattggactggcggcccctcaggtgggggtgcaccagcagctgctcgtgattgaccttgatctcgacaaccccacaacaccgccgctggtgttgatcaaccctgagatcagctcagccagtgcaggactcgatacctatgaagagggttgtctgagcatccctggggtttatctcgatgtggtgcgaccaacggcgattgagctcagcttccgcgatgagatgggacgtcccaggaagatgaaggcggacgggctgatggcccgctgcatcctgcatgaaatggatcacctcaatggcgtgttgtttgtcgatcgtgtgacagatgaggcggtcttgcagaaggagctcaaggagcacggcttccagcgccagcatgttcagtccgtttcctgag

SEQ ID NO: 265310 - DNA, 346 bp, Unknown
  Bacterial polypeptide expressing nucleotide sequence isolated from the Sargasso Sea
gttgatattcacattagattggtcgttatggatttaagcgaagaaaggaatgagcccagagtatttgtaaaccccgaatacacaatattagacaaaagtccatttacttatgaggaaggttgcctgtctattcctggttttaacgaagaaatatctaggccgtcaaagattcttcttaagtggcaggatcttcaaggtaacttccatgaagaaaagccagatggcattttcactgtttgtgcacagcatgaaatagaccatttagacggaaagctttttgtagactacctaagcccaataaaaagggacagaattagaaagaaactagaaaaaagaagaaattaaa

SEQ ID NO: 265311 - DNA, 451 bp, Unknown
  Bacterial polypeptide expressing nucleotide sequence isolated from the Sargasso Sea
catgtcagatttaaaaattcttatatttccagatccaaagcttagaaaggtggccaaaaagattaacaaattcgacaaaagtttagaaatgctttccaaaaacatgcttaagacaatgtatgaagctgaaggtataggccttgctgcgacacaggttgatattcacattagattggtcgttatggatttaagcgaagaaaggaatgagccccgagtgtttgtaaatcccgaatacacaatattagacaaaagtccatttacttatgaggaaggttgcctgtctattcctggttttaacgaggaaatatctaggccgtcaaagattctacttaaatggcaggatcttcaaggcaacttccatgaagaaatgccagacggcattttcactgtttgtgcacagcatgaaatagaccatctagacgggaagctttttgtagactacctaagccca

SEQ ID NO: 265312 - DNA, 508 bp, Unknown
  Bacterial polypeptide expressing nucleotide sequence isolated from the Sargasso Sea
catgacagtattaacagttttacattatccagacgaccgtttacgcacagtagccgctgctgtgcctgaagttacggccgaaattaagcaactgacagcagatatgctggacactatgtatgccgaaaatggcataggcttagccgccactcaggtcaatgtgcacaagcgtgttgtcgtgatcgatatttcagaaaaccgtgacgagccgatgatttttatcaatccggaaatcgttgccaaaagtggtgacactgaatacgaagaaggctgtttgtctgtgccgcaaagctacgccaaagtagaacgcgccgcagctgtgacagtcaaagcgcaaaacaccaaaggcgagtggtttgaaattcaggctgaaggtttactggcgatttgtttacagcacgagctggaccatttaatgggcaaattgtttatagattatttatcgccattaaaacgtgaccgtattaagaaaaagctggaaaaagaagctcgcctcgcagcccgttaa

SEQ ID NO: 265313 - DNA, 511 bp, Unknown
  Bacterial polypeptide expressing nucleotide sequence isolated from the Sargasso Sea
tatggctaaaaatttaaaaatattaatctttccagacccaagattaagaaaagttgctgagaaagttacaaaattcgacaaaagtctagaaaatttagcaaagtctatgttaaaaacaatgtatgatgcaaatggcataggtctagcggctactcaggtagaccaacatataagacttattgttatggatttatcagaaaatagagatgatcccagaatatttataaatccaacatacaaaatccttgaaaatcatagcctgtatgagtttgaggaaggctgtctttctattcccggttttaatgaagtcatagctcgccctgataaaattgaattaaggtggcaggatttagatggaaatgagcatattgataagcctgaaggccttctaacagtatgtattcagcatgaaattgaccacttagaaggaaaactaatggttgattatgtaagcgcgctaaaaagagatagggtacgaagcagacttttaaaagaatataaccgaaaatag

SEQ ID NO: 265314 - DNA, 526 bp, Unknown
  Bacterial polypeptide expressing nucleotide sequence isolated from the Sargasso Sea
atggctataaaaaaaattttaaccgaaccaaataaatttctaagacaaatatcaaagccagtagaaaaagtaagtgatgaagaaagaaaattaatggatgatatgttagaaactatgtacaatgcaaatggtataggactcgctgcaattcaaataggtatacccaaaagaattattgttattgatataagtaaaaaagaagatggtaaaaaaccaatgttttttgtaaacccagtagtaataaaaaaaaataataaaaacgctacttatgaagaaggttgtttatcagtaccaaatcaatttgcagagattgatagaccgagtcaatgcgatgtagaatatttagattatgatggaaataaaaaaattttaaaagctgaaggattgttagcaacttgcatacagcatgagatagatcatttagagggcattctatttattgattacttatctaaattaaaaaaaacaatgataataaaaaaactttccaaattaaaagttaagcctgatcgaatagttgtttaat

SEQ ID NO: 265315 - DNA, 465 bp, Unknown
  Bacterial polypeptide expressing nucleotide sequence isolated from the Sargasso Sea
tatgacaattaaaaaaattcttactttaccagaccctatattaaggaaaaaatctagcaatgtcgttgacgtagacaataacttaaggcaattaatggacgatatgttacaaaccatgtacgatgctccaggtataggtttagctgcaatacaaataggtgttcctaaaagggtagttgtgatggatttagcaaaaaatgatgagaaaaaaaatcccatgtattttattaatccagaaattatttggaaatctgaagaaaaatcttcatatgaagagggatgtttatcaatacccaatcaatttgctaaaattgaaagagctgaaaaatgtaatgttaaatacttagattataatggaaataaaaaaaaaattgaggcaacaggtcttttgtcaacttgtcttcaacatgaaatagaccacttaaacggaattctatttattgactatttgtcaaaattaaaaaa

SEQ ID NO: 265316 - DNA, 391 bp, Unknown
  Bacterial polypeptide expressing nucleotide sequence isolated from the Sargasso Sea
tataatgcaaatggaatagggctagcggcaacacaggttgatcgacatttgaggttaattgtaatggatttgtcagaaaacaaggacgatcctagggtattcattaatcctacctataaaatcttagataatcatagtctttatgaatttgaagaaggttgtttatctatacccggctttaatgagcttatttcgagacccgacaaaattgacttaaaatggcaagatttggatggaaatgagcataatgacaagccagagggccttttaactgtatgtattcagcatgaaattgatcatttagaagggaagcttatggttgattatattagctctttaaaaagagataggattagaaaaaagattataagagattttaacagaaaataag

SEQ ID NO: 265317 - DNA, 523 bp, Unknown
  Bacterial polypeptide expressing nucleotide sequence isolated from the Sargasso Sea
atgacaataaaaaccattataactgaacctaacgagattttaagacaagtctcaaaaccagtacaatcagtgggtaatgaagaaagaaagttaatggatgacatgttggaaacaatgtatgcagctaatggtattggattagcagcaattcaaattggtattcctaaaaggattatagtaatggatatttcaaaagatggggagaaaaatccaatgtactttgtaaatccaacaattaaaaacaaagataaagaaaaaacaacatatgaagagggatgtttatccgtcccagattatttcgctgaagttgatagacctaaatattgtgaggttgaatatttagattataatggaaaaaataaaattttagaagctgatgggctccttgcaacttgtatacagcacgaaatggatcatcttgaaggaattttatttatagactacttatcaaaattaaaaaaaacaatgattgttaaaaaattatcaaaaagaaaaaatcctcctgatagaattattgtttaat

SEQ ID NO: 265318 - DNA, 479 bp, Unknown
  Bacterial polypeptide expressing nucleotide sequence isolated from the Sargasso Sea
gaaagaaattttatctaaagatacaaagaaattaataaaaaaaatgtggaatattatggcagaagccggcggaataggattggcagctcctcaaattggagtcttaaaacaagtagctgtaataaaattggatagtgaatctaaaagatacgaaattcaagaagattcagatgaatttgtaattattaatccttcattagaaatattagataaaacaaagcagggtttctgggagggctgtcttagcgttcctggtttgagggggtttgttgagagacctagaaaactaagaataacttatttagatgaagaagcaattcaaaatgaaataatagttgaagattttctagctacagtttttcaacacgaattagatcatttattcggctacttgtatgtcgatagattaaattcggttaaagacttaatttttgaggacgatgctaatgatatttcggaagaaaaacttttagactaat

SEQ ID NO: 265319 - DNA, 526 bp, Unknown
  Bacterial polypeptide expressing nucleotide sequence isolated from the Sargasso Sea
tatggccattaagacaattattacagaaccgaataaaattttgagacaaaaatctaaaccagttgaaactgttggagaagaagagagaaatattatggatgatatgttggaaactatgtatcatgctaatggaataggattggctgctatacaaataggaattccaaaaagaataattgttatggatatttcaaaaaataaagaaaaaaaaaatcctatgtattttgttaatccaataattaagaataaaaattctgaaaaatctacttatgaagaaggctgtttatcagtaccaaactattttgcagaaattgatagaccaaaaaaatgcgaagttgattatttagattatgatggtaaaaaaaaaactttaagtgctgatggtcttttggccacatgtattcagcatgaaatagatcatttagaaggaatattatttattgattatttatcaaaattaaaaaaaacaatgattgtaaaaaaactatcaaaacaaaaaaaaagtccagatagaattattgtttaa

SEQ ID NO: 265320 - DNA, 544 bp, Unknown
  Bacterial polypeptide expressing nucleotide sequence isolated from the Sargasso Sea
atgagcatcaatgaaataagagtcataggggaccctgtgcttagggtcacggcaacagaaataacagaaataacagaaaatcttgctctcttgactcaaggcatgctttcaacaatgtatgcagctcccggaataggtttggcagcacctcagataggggttcaaaaaagacttttcgtctacgactggggttccggtccgggagtgttgataaatcctgaaataaaagatgctgacggagaatggacttttgaagaaggttgtttgtcaattccgggtctttcttgggagttattgaggcccaaacagattcacatagttgggctcgatatggaaggtaaagaagtttctatcgaggcggatgagttggaatctcgcttatttcaacatgaaatggatcacttaaatggagtgttacttgttgatcaccttgacgaagatcaaagacgtgaggctaataaaacattgatgggaattagcgaatcagtaggctatccactcccgatcgttaaagataatcttgggctcaaacaaagtgactgac

SEQ ID NO: 265321 - DNA, 511 bp, Unknown
  Bacterial polypeptide expressing nucleotide sequence isolated from the Sargasso Sea
atggcaacactgaatattttagaatttcctaaccctaatttaagaaaaattgctgtgcccgtcacaagttttgatagcgacttgaagtgccttatagacaatatgtttgagacaatgtacgaagcaaatggcataggcctagctgctactcaagtagatgttcacaaacgattattagtgctagatgtatctgaagagcgtaatgatcctcaagtatttgtaaatccaactatcgatgttattgagagtgaccttgctgattatgatgaaggctgcctttctgtccctggattctatgaaacagtgtcacgacccaagaaaataaaggtatcagcgcaagataaagaagggtctcagtttgaaatagaggcggatggagtcctttctgtttgtattcaacatgagatagaccatcttgatggcaaacttttcgtcgactacttaagttcacttaagagaaatcgtatcaaagataaactgcagaaagaacagaaatcgatctctagttaaa

SEQ ID NO: 265322 - DNA, 511 bp, Unknown
  Bacterial polypeptide expressing nucleotide sequence isolated from the Sargasso Sea
tatgtcagttttgcaagtgttacatattccggacgagcgccttcgcaaagtcgcaaaaccggtcgaagaagttaatgcagaaattcagcgcatcgttgatgatatgttcgagacgatgtatgccgaagaaggtatcggtctggcagcaacacaggtcgatattcatcagcgcatcatcgttattgatgtctctgaaaaccgcgacgagcagttggttctcattaacccagagctgctggaaaaagacggcgaaaccggtattgaagaaggctgcctgtcgattcctgaacagcgtgcgttagtaccacgcgcagagaaagtaaaaattcgtgcgctcgatcgcaacggcaaatcttttgagctggaagccgatggcctgctggctatctgcattcaacatgaaatggatcacctggtcggtaaactgtttatcgattatctgtctccgttgaagcaacaacgcattcgtcagagagttgaaaaactcgaccgcctgaacgcccgagcttaa

SEQ ID NO: 265323 - DNA, 487 bp, Unknown
  Bacterial polypeptide expressing nucleotide sequence isolated from the Sargasso Sea
ttgagatcaaaatgtaaaaaagttgataaggtagataatgaccttagattattgatggatgacatgttagaaacaatgtataaagctccaggtataggattagctgcaatacaaattggagttttaaaaagagtagttgtaatagacctagcaaaggatcatgataaaaaaaatcctttatacttaattaatccagaaataacttttaaatcaaaaacaaaagcagtttatgaggaaggctgcttgtcattgccagggcaatttgctgaaattgaaagacccgctgaatgtcatataaattatttagattatgaggggaaaaataaaaatttaaaagcagaaggtcttcttgcgacctgtattcagcatgaaatagaccatcttgatggcgtcttatttattgactatttatcgaagctaaaaaaaacaatgatcataaaaaaacttgaaaaacaaaaaaaatcattagaaagaatagtggtttaag

SEQ ID NO: 265324 - DNA, 322 bp, Unknown
  Bacterial polypeptide expressing nucleotide sequence isolated from the Sargasso Sea
aaaaaagagccaatttattttattaatccagaaattacttggaaatcagattttaaggaaagctacgaagaaggttgcttgtcgattcccgaccaatttgcaaaaatagaaagacccagcaaatgtattgtaaaatttttagattacaatggatctaaaaaagaattaaaagcggaaggtttgttagccacctgcattcagcatgagattgaccacttaaatgggatattgtttattgattacctgtcaaaactaaaaaaaaatattataataaaaaaactatcgaaaaataaaaaagaattagaaagaatagtagtttaat

SEQ ID NO: 265325 - DNA, 532 bp, Unknown
  Bacterial polypeptide expressing nucleotide sequence isolated from the Sargasso Sea
catgaccagcaccaccaatttgattcccatcgtgaaaatgcctgacccggttttgcggcaaatcgcccagccggttgccggcattaccgacggtgtgcgccagctgcttgatgatatggccgccaccatgtatgacgccccggggattggtcttgccgcaccccagatcaatatcagtcagcggcttgtggtgattgattgtggtagcgatgagacagccgaactgttcaaaatggtgaacccggaaatcatttcgctttctgacgagcgcgcagttttagaagaaggctgcctgtcgatccccgatcagaccgctgatgttgaacggccagccgaagtgtcggtgcgctatcttgatgaaaatggggccgcacagatgatgactgccgtcgggcttttggcggcctgtattcaacatgaaattgatcatttgaacggcgttttatttattgaccatatttcacgtctgaaacgcgatatgattacccgccgggtgatgaaagagttgcgtcagtcgacaggtgtaaaataa

SEQ ID NO: 265326 - DNA, 532 bp, Unknown
  Bacterial polypeptide expressing nucleotide sequence isolated from the Sargasso Sea
atgagaaaccttgaaatactaactttcccagatcctaggttaaggactaaggcttcttttgttgaagtttttgatgacgaattaagaattatggcggaaaacatgctccatacaatgtactctgcaaatgggataggtctagcagcaacccaagttgacttccacaaaaggctcatagtaattgatatctctgagaaccaagatgagccaatctttattgtaaatccttcatttcagatacttgataaaacaatagaagaatataaagaagggtgtctttctgttcctaaattttttgaggaaatatataggcctaagaaaataaaactttcttataaagaccttgatggtaatgataaagagttaattgcagagggagtcttaagtgtctgcatacagcatgaaattgaccatcttgatggaaagcttatggttgactatctatcgcccttaaaaagaggcagaataaaaggtaagcttcttaaatcaaaaacgaaacccaaacaacaaattcaacaaagaagttcttaat

SEQ ID NO: 265327 - DNA, 526 bp, Unknown
  Bacterial polypeptide expressing nucleotide sequence isolated from the Sargasso Sea
tatgtcaattagaaaaataataaccgaaccagatcccattcttagaaaaatatctgaacccgttaaagaggtcgataacacaataagaagtttgatggatgacatgttagaaactatgtataatgctccaggtataggtttagcagcaattcagattggagtacccaagagaattatagttttggatatatcaagagatgttgaaaaaaaagaaccaatgtactttgttaatcccgaaatagtattaaaatcaaaaactgactctagttatgaagaaggctgtctctctgtgccaggccagtttgcagaaatcaatcgtcctgataaatgtcatattaagtatttagattacaatggaaagaaaagagagttaaaggcagaaggattattagccacttgcattcagcatgaaatggatcatttggaagggattttatttattgattatttatccaaaataaaaaaaacaatgattgtaaaaaaactctcaaaacaaaaaaagaatttagaaagaattgtagtttaa

SEQ ID NO: 265328 - DNA, 494 bp, Unknown
  Bacterial polypeptide expressing nucleotide sequence isolated from the Sargasso Sea
aatggctattaaaaaaattgtaaccgttcctgactctattttaagaaaaaaatcattggttgttgaaaaggttgataaagagataaaaaatctgatggatgatatgttagagacaatgtataaagcacccggaattggtttggcggctgttcaaataggtattccaaaaaggattgttgtaattgatatatcaaaagatgagaacaagaaagaccccatttattttgtaaatccagagttaacttggaagtcaaaagaaaaagcaacttatgaggaaggctgtttatctataccagatcaattcgcaaagatagatagaccagaaaaatgtacagtaaaatttttagactataatggaaatcccaaagagattaaagccgagggacttttagctacttgtatccagcatgaaattgatcatttaaacggtatcttatttattgattatttatctaaacttaaaaaagatattatttataaaaaaattatcaaaa

SEQ ID NO: 265329 - DNA, 508 bp, Unknown
  Bacterial polypeptide expressing nucleotide sequence isolated from the Sargasso Sea
atgaagaaaattttatatgttcctcacgaaaaacttagacaaaaagctattgaaataaaaaaaattaataaagaagatcttcttttagcagaagaaatgatggaaataatggcaagttattctggagtaggtttagcagcaaatcaaattggggttttaaaaaaaatagttactatcaatatagaaaaaaatgaaaaaaattcaaaaaaaaaatacatattatttaatcctaaaattttatcattttcaaaggaaaaagtaataatggaggagggttgcctatctatacctcaacaatttgctgaaattgaaaggcctgaaaaaatatcagttcaatacttaaattataaaaatattttaataaagcaatcttttgatggtattgaagctagaattttacaacatgaaattgaccatttatttggtaagttatttgttgattatttgtcttctttaaaaagaaatataataataaaaaaagcagtcaaattattaaaaaataaatgaa

SEQ ID NO: 265330 - DNA, 499 bp, Unknown
  Bacterial polypeptide expressing nucleotide sequence isolated from the Sargasso Sea
cctaatccaatactttagagaaaaatctttacctgtaaaaaaagttgataaggatattaaaaaattaatggatgatatgcttgagacaatgtacgatgccccaggtataggattagcagctattcaaattggaattgcaaaaagagttgttgttatggatttatcaaaagatgaaaacaaaaaagaaccagtttattttgttaatcccgagattacttggaaatcaaatgtaaactctacatatgaagagggatgcctttctatacccaatcaatttgcaaaaattgataggtcagagcaatgtcatgttaaatatcttgattacgaaggtagggaaaatgaaattaaagcagagggtttgttatcaacttgtattcaacatgaagttgatcatttgaacggaattttatttattgattatctgtcaaaattaaaaaaagatatcattttaaaaaaaatttcaaagaataagaaagaattagaaagagtagtagtttaa

SEQ ID NO: 265331 - DNA, 379 bp, Unknown
  Bacterial polypeptide expressing nucleotide sequence isolated from the Sargasso Sea
atgtatcaagtaacgggcataggtttagcagcgactcaagtgaatgttcataaaagggtgatagttatagatgtgtcagatgataggacagatccaaagatatttattaatcctgaatttgaagtaaaagacaacaaaagtctattttcattctcagagggttgcttatcaatacctggatataatgaagaaatcacaagacctgacaagattctcttaaaatggcaagatgttaacggcaagtttcatgaagaagagccagaaggtattctaacagtttgcattcaacatgaaattgatcacctcgaaggaaaactgatggtcgattacatatcttcgctaaaacgtgaaagaattaggtcaaaacttagaaaataaa

SEQ ID NO: 265332 - DNA, 526 bp, Unknown
  Bacterial polypeptide expressing nucleotide sequence isolated from the Sargasso Sea
catggctataagaaaaattttaacaattccagacattattttaagagaaaaatctttaccggtagaaaaggtaaataaagaaatcaaaaatcttatggatgatatgttgaacacaatgtacgatgcacccggaattggtctagccgccatacaaattggtattccaaaaagaattgtagttatggacttatccaaagatcctgaaaagaaaaatccaatgtattttgtgaatccagaaatcacttggaagtctgatttaaaatcaacttatgaagaaggatgtctttcaataccaaatcaatttgcaaaaattgatagacctgagaaatgtaatgttaagtttctagactatgatggaaaccctaaagaaataaaagctgagggacttctatcaacttgcattcaacatgaaatcgatcatttgaatggtgtcttatttattgattatttgtcaaaacttaaaaaagatataattattaagaaagtgtcaaaagataaaaaagagacagaaagagtagtagtttaa

SEQ ID NO: 265333 - DNA, 464 bp, Unknown
  Bacterial polypeptide expressing nucleotide sequence isolated from the Sargasso Sea
gatgaatgatattttaataattcctaattcagttttaagacaaaaatcccttcctttgaaaaatattacaaaaaaagatatagatttatcattaaaaatgatgaaaattatgaataatgccccaggtataggtttggctgcacctcagataggtatactaaaaaaaatcataacaattaatataaaagaaacagaaaatgaaaaaaaaataaattacgctttgttcaatcctgaaataatatcttattctaaaaaaaaagttttaatcgaagaaggatgcttatctatacccgaacattttgcagaaatagaaagaccagaaaaaattcattttaaatattttaatgaaagtaatgaactaatagaaaaagaggctataggaaacgaatctagagttattcaacacgaaatagatcatttaaacggtaaattatttattgattacctttcttcactaaaaagaa

SEQ ID NO: 265334 - DNA, 511 bp, Unknown
  Bacterial polypeptide expressing nucleotide sequence isolated from the Sargasso Sea
aatggctaataaattaaatattttagtatttcctgaccctagattaagaaaagttgctgaaaaaatagttaaattcgacaaatgtctagaaaaattagcttctgatatgctttataccatgtatgaagctaatggaataggtttagctgcaactcaggttgatcatcacataagattaatagttatggatttatctgaagacagaaatgaaccaaaagtatttataaacccaagctacaagattcttgagggttacaagatgtttgagtatgaagaaggatgtctgtcaattcctggatttaacgaagtcatagcgcgacctgataaaatagagctttcatggcaagatttaaagggtaaaacacatatggatactcctgaaggcctattaactgtatgtattcagcatgaaattgatcatttggagggtaaattaatggttgactatgtcagtgctttaaaaagagatcgcgttagatctaaacttttaaaagaatttaaacgaaattag

SEQ ID NO: 265335 - DNA, 607 bp, Unknown
  Bacterial polypeptide expressing nucleotide sequence isolated from the Sargasso Sea
ttggcgggaagctttgcccagttggcccggaatgccgacaaggctcgggacaccatgctggttcccaagcaggcgctggaaacgcctccgctggagattcacacccttggcgatgaggtgttgcgacagcccgcccgtcgtatcggcaaggtggatgagcaggtgcgggagctggcccgcgacatgctgcgcagcatgtacaccgccaagggcatcggcctggctgctccccaggtcggcattcaccagcagctgctggtgatcgatctggatctggagaacgccgctaccccgccgctggtgctgatcaacccggagatctcggcctccagtgcctcgatcgacacctatgaggaaggctgcctcagcatcccgggcgtctatctggatgtggtccggccgacgtcgatcgagctcagttaccgcgacgagatggggcgtccccgcaagatgaaggcggatggtctgatggcgcgctgcatccagcatgagatggatcatctgaacggcgtgctgttcgtcgatctggtgaccgatgcctcaggtctggagaaggaactcaaggagaatggctttcagagccaacacgtgcggagcgtctcctgat

SEQ ID NO: 265336 - DNA, 373 bp, Unknown
  Bacterial polypeptide expressing nucleotide sequence isolated from the Sargasso Sea
atgactgtaagaaaaattttaactgttcccgatccaattttgcgaaccaaatctaattctgttaagaaagttgataaagacactaaaaatttaatgagagatatgctggaaactatgtatgatgcaccaggcataggattagctgcaattcaaattggtgttgctaaaagggtagtagtaatggatgtttcaaaagaaactgataaaaaagaaccaatgtattttgtaaatccagagataacatggaaatcaaacaccaacgcaacctacgaagaaggatgcttgtctataccaaatcagtttgcaaaaattgaaagaccagataagtgtaaagttaaatatttggacttcgatggagtagaaaaagaaataa

SEQ ID NO: 265337 - DNA, 526 bp, Unknown
  Bacterial polypeptide expressing nucleotide sequence isolated from the Sargasso Sea
atggctattaaaacaatcttaactgtacctgatccgattttgcggaaaaaatctttacaggtggacaaggtagataaggaaataaaaaaattaatggatgatatgttagaaactatgtacaaagcaccaggaattggcttggccgcagttcaaattggtgtactcaaaagagtcgtggttatggatgtttcaagagaaactgacaaaaaagaaccaatgtattttgtcaatccagaaattgtttggaagtcaaatgagaaagtaacctatgaagaaggttgtctttctataccaaaccaatttgcaaatattgaaaggtcagaaaaatgtacagttaaatatttagattattttggagcagaaaaagaaatacaagccgaaggtttattggcaacttgtattcaacatgaaatcgatcatttaaatggaattttgtttattgattatttatctaagctaaaaaaagatattatagtgaagaaacttttaaaaaacaaaaaagaattagaaagaatagtagtttaat

SEQ ID NO: 265338 - DNA, 488 bp, Unknown
  Bacterial polypeptide expressing nucleotide sequence isolated from the Sargasso Sea
catgtcagatttaaaaatccttatattcccagacccaaagctcagaaaagtagctaaaaagatagaaaatttcgacaaaagtttagaaatgcttgcccaaaaaatgcttcaaacaatgtatgaggctgaaggcataggccttgctgctacacaggttgatgttcacattaggttggttgttatggatttaagtgaagaaagaaacgaaccacgagtttttgtaaatccggaatatacaatactagacaaaagtccattaacttatgaggaaggttgcctatctattcctggtttcaacgaagaaatatctaggccatcgaaaattttacttaaatggcaagatcttcaaggcaatttccatgaggatcagcctgatggtatttttactgtatgtgcccaacatgaaatagatcatctagacggcaagctttttgttgactacttaagccccataaaaagggatagaattagaaaaaaacttgaaaata

SEQ ID NO: 265339 - DNA, 529 bp, Unknown
  Bacterial polypeptide expressing nucleotide sequence isolated from the Sargasso Sea
atgtcaaagagaaaaattataattgaaccagaccccatattaaggaaagtaagcgaaccattagaaaaagttgataatgaacttagaaaactaatggatgacatgctagaaacaatgtattctgctccaggtattggtttagcagcagttcaaataggtatattaaagcgattaattgtaatcgatatttctaaaggagaagaaaaaaaaaagaacccattatttttaattaacccaatcattacctctagatctaaagatacatctatttatgaggaaggatgcttatctatacctggtcattttgcagaaattgaaagaccagcacagtgtcatattaattttttagattacacaggtaagcaaaaacaattaaaagccgatggtttgttgtcaacatgtatacagcatgaaatagatcaccttgatggaaaattatttattgattatttatctaaacttaaaaaagatatgattattaaaaaattattaaaacaaaaaaaaacacaagataaaattgtattatagg

SEQ ID NO: 265340 - DNA, 517 bp, Unknown
  Bacterial polypeptide expressing nucleotide sequence isolated from the Sargasso Sea
atgcggaaaatactattagtacctcatcctatcttgaggcaaaaagctaaagatataaaagagattaaagaagaagacatctttattgctaaagagatgatgaaaataatgaataatgctcctggagtaggacttgcagctaatcaaattggcgtactaaaaaaaattataacaataaatattcaagatgaagaaaataatctaaaaaatcagtatattttatttaatccaagaataatttcttattcaaaaaatactaacattatggaagagggttgcttgtcaattcctgagcaatttgcagaaatagaaagatcagaagaaattataattgaatatattgatgaaaaaaagaagatattaaaaaaaagagtagcaggaattgaatctagagttttgcaacatgagatagaccacttatcaggaaagttatttatagattatttatcttctttaaaaagaaatattatgattaaaaaagttaaaaaattagtaaaagtaaaatcaggtaaatgat

SEQ ID NO: 265341 - DNA, 430 bp, Unknown
  Bacterial polypeptide expressing nucleotide sequence isolated from the Sargasso Sea
atgacagttaaaaaattaattacagttcctgatgagatattaagaaaaaattctcagcctatcgaaaaagtaagtaataatgaaaaaaaattaattaaagatttattagagaccatgtatcatcataaaggaataggattagcagctatccaagtaggcatacctaaaagaataatagtcttagatgttaatcagaaagatgacattaaaaagccattatgttttataaatcctgtaattaaagatgttagtaaagaaaaatctaaatatgaagaaggatgcttatcaattccaaacacatttattgagatagagcgaccaaaaacttgtttagttgaatatatagatattgagggtaaaaaaaaaagcatggagtgtgacgatcttctctcgacatgtattcagcatgagatcaatcatctagatgaaa

SEQ ID NO: 265342 - DNA, 485 bp, Unknown
  Bacterial polypeptide expressing nucleotide sequence isolated from the Sargasso Sea
tatggctaaactaaaagttttaacatttcctgatccaagattaagaaaagttgctgtaccagttaaaaaattcgacaaaagtttagaaaatataacttctgacatgcttgaaaccatgtatgcagaggggggaattggtcttgcagcaacacaggttgatattcatgaaagaattatagttatggatctttctgaagagcaaaatgatcctaaaatattcattaatcctgaatataagattttaaacgacaaaagtctactttcttttagtgaagggtgcttatctgtacctggagttaatgaagagattacaaggcctgatagtatttatctatcatggcaagatataaaaggtaatttccatgaagcagagccatctggattattaaccgtttgcatccagcatgagattgatcatcttgaaggaaagttaatggttgattatctatctcctttaaaagaggcaggatcaggaagaaagcttc

SEQ ID NO: 265343 - DNA, 451 bp, Unknown
  Bacterial polypeptide expressing nucleotide sequence isolated from the Sargasso Sea
atgattagacctattgttttacatcctgatgcgcggttgaaaaaaaaatctgttgaggtggaggggataacagatgctctgattgagttagcagaagatatgatggaaaccatgtacaatgcgccgggaattggtttggctgcacctcagatcggtgttttacaaagggtgattgtaatggattgcgccaaaaaagaggatgaagaacccgatcctattattatggttaatccattaataaaagcctcatcagaagaaaaaaatgtttatgaagaggggtgcctttctattcctgagcattttgcggaggtcactcggccagaaatcgttcaggtggaatggattgatttagaaggaaaacaacactcagaagagtttaatggtttaaagtctacttgtgtgcagcatgagattgatcatttgaatggtaagttatttattgactatttag

SEQ ID NO: 265344 - DNA, 412 bp, Unknown
  Bacterial polypeptide expressing nucleotide sequence isolated from the Sargasso Sea
catgtatgcagctaaaggaattggacttgccgcgcctcaaattggtatcaacaaagagcttcttgtcatagatgtaaattttgaagattcagcggcagaacctctaatattaatcaatccagaaattacagactttggaacaacccttaattcatacgaagaaggctgcttgagtatacctggcgtctatttgaatgtagtaagaccatcaactataaaattaaaatttagagatgaaatgggaagaccacgtaaaatgaaagcagatggacttctggcgaggtgtattcaacacgaaatggatcacttaaacggaatattatttgttgatagagttacatcaaaagatgatttgaacaaagaacttattaaggaagggtttaacgaaaaagacgtaatttctattgattaa

SEQ ID NO: 265345 - DNA, 466 bp, Unknown
  Bacterial polypeptide expressing nucleotide sequence isolated from the Sargasso Sea
atggctataaagaaaatccttactgctccagatccttttttaaagcaggtatcagctccagtgaaggaagtaacaaaagatatccaattattaatggatgatatgcttgatactatgtatgacgctcctggtattggcttagccgctgtacaaataggagttcctctaagagtaatagtgatggatatcagctggagaaatgaagatggaaagaaagaaccttatttttttgttaatcctgaaattaaagtaaagacaaagaatatgtcaacatatgaagagggttgcctctcagttcctgatcagtatgctgaaattgatagacctgaggaatgtgaggtaagctacctagattacaacggaaagaagacaaaattgcacgcagagggacttctcgctacctgtatccaacatgaaatggatcatcttgaaggcattctatttattgattatttatcaaattgaa

SEQ ID NO: 265346 - DNA, 322 bp, Unknown
  Bacterial polypeptide expressing nucleotide sequence isolated from the Sargasso Sea
aggtgaaaaaaaacccaaaattctaataaaccccgaaattatatggtcttctgaagatgtttctctttttgaggaaggttgtttgtccattcctgatgttcgtgaagaaataaaaaggccttcatctgttataattaaatttactgatataagaggagtattaaaagaggatttttttgaaggtctatgggctacttgtattcagcatgaaattgatcatctaaatggaaagttatttattgattacttaggacccataaaaaggtcatttattaccaaaaaaatgaaaaaatataaaaaagaaattaataaaaatatttga

SEQ ID NO: 265347 - DNA, 526 bp, Unknown
  Bacterial polypeptide expressing nucleotide sequence isolated from the Sargasso Sea
atgacaattagaaaaattttaactgaaccaaataaaattttacgccaggtttctttacctgttgaaaaagttggcaaagaagagcaagctttaatggatgatatgcttgaaactatgtatgatgcaaatggaattggtttggctgcaattcaaataggtgtcccaaagagaattatcgttatggacttatcaaaagaagaaggaaataaagaaccaagatattttgttaatccaattgttaaaaataaaaataaaaatttagctacttatgaagaaggctgcttgtcagttcctgggcaatttgctgaaatagatagaccaagcaaatgtgatttagaatatttagattactttggaaaaaagtgtttcgaaagcgtttctggattgttggcaacctgtatacaacatgagatagaccattgtgatggtcgactttttattgactatttatctaagcttaaaaaatctatgataattaaaaaactatctaaacaaaattctaaatcaaatcgcatagttgtttaat

SEQ ID NO: 265348 - DNA, 391 bp, Unknown
  Bacterial polypeptide expressing nucleotide sequence isolated from the Sargasso Sea
aatcgaaaccatgtaccacaccgacgacggtatcggtctggcctcgacccaagtgggcagcacatatgcggtgattgtgatcgatttatccgaaaatcgcgaccaacccttagtgctgattaatccagagattgttgaaaagtctggcgaatacgtaggtgaagaaggttgtctttctatcccaggttaccgcgcaaaagtcactcgttttgaaaaggtcaaagttaccgccttagatagacaaggcaaagcgattgaaatcgaaaccgatgactttttagccattgttttgcaacacgaaattgaccatttacacggtaaagtgtttatcgaacatttatcggcattaaagcagcaaatcgcgttgaaaaaagtgcgtaaatacgcctaa

SEQ ID NO: 265349 - DNA, 538 bp, Unknown
  Bacterial polypeptide expressing nucleotide sequence isolated from the Sargasso Sea
tatggctataaagaaaattcttactgctccagatccttttttaaagcaggtatcaacaccagtgaaggaagtaacaaaagatatccaattattaatggatgacatgcttgatactatgtatgacgctcctggcattggtttagctgctgtacaaataggagttcctttgagagtaatagtgatggatatcagctggagaaatgaggacggtaagaaagaaccctatttttttgtcaatcctgaaatcaaactaaagacaaagaatatgtcaacatacgaagaaggttgtctctcagttcctgatcagtatgctgaaattgatcggcctgaggaatgtgaggtaagctacttagattacaatggaaaaaaagcaacattgcacgcagaaggactactcgctacttgtatccaacatgaaatggatcatcttgaaggcgttttatttattgattatttatcaaatttgaaaaaaaatatgattgtaaaaaaattaatcaaatcaaaaaaacaatcaaataaagagcgcatcgtcgcttaa

SEQ ID NO: 265350 - DNA, 394 bp, Unknown
  Bacterial polypeptide expressing nucleotide sequence isolated from the Sargasso Sea
catgtacgacgaaaatggcattggtctagcagcaacacaagtaaatatccaccagcgtattgtggttattgatgtctctgaagagcgtgacgaaccactggtattaattaacccgcaaatcattaaaaaagatgggtcaacgattagcgaagaaggctgtttgtcagtgcctaactcttacgcaaaagtagaccgagcagaaacagtgactgtggctgcactaaacgaaaacggtgaagaatttgtgttagacgcagatgagctattagctatttgtattcaacacgaactagaccaccttcaaggcaagctatttattgattacttatctccattaaagcgccaacgtattcgtaaaaagcttgaaaaagaagctaagtttgcagcacagtaa

SEQ ID NO: 265351 - DNA, 508 bp, Unknown
  Bacterial polypeptide expressing nucleotide sequence isolated from the Sargasso Sea
tatggctaaaaatttaaaaatattaatctttccagacccaagattaagaaaagttgctgaaaaagttacaaaattcgacaaaagtctagaaaatttagcaaattctatgttaaaaacaatgtatgatgcaaatggcataggtctagcggctacacaagtagaccagcatataagacttattgttatggatttatcagaaaatagagatgatcctagaatatttataaatccaacatacaaaattcttgaaaatcatagtctatatgagtttgaggaaggttgtctttctattcccggttttaatgaggtcatagcccgtcctgacaagattgaattaagatggcaggatttagatggaaatgagcatattgaattgcctgaaggccttctaacagtatgtattcagcatgaaattgaccatttagaaggaaagctaatggttgattatgtaagcgctctgaaaagagatagggttagaaacaaacttttaaaagaatataaaagataa

SEQ ID NO: 265352 - DNA, 448 bp, Unknown
  Bacterial polypeptide expressing nucleotide sequence isolated from the Sargasso Sea
catgccagatttaaaaattcttatatttccagatccaaagcttagaaaagtggccaaaaagatagataaattcgacaaaagtttagaaatgctttccaaaaacatgcttaagacaatgtatgaagctgaaggtataggccttgctgcaacgcaggttgatattcacattagattggtcgttatggatttaagcgaagaaagaaatgagccccgggtgtttgtaaaccccgaatacacaatattagacaaaagtccatttacttatgaggaaggttgtctgtctattcctggttttaacgaagaaatatctagaccgtcaaagattctacttaaatggcaagatctgcaaggcaactttcatgaagaaaagccagacggtattttcactgtttgtgcacagcatgaaatagaccatctagacggaaagctttttgtagactacctaagc

SEQ ID NO: 265353 - DNA, 526 bp, Unknown
  Bacterial polypeptide expressing nucleotide sequence isolated from the Sargasso Sea
aatgccaattaaaaatataattactgttccaaatgaaatcttaagaaaaaaatctcaattagttgaaaaaataacaaatttagagaaaacattagtgaatgatatgtttgaaaccatgtataattctaatggtattggtttagctgctattcaaattggaattgcaaaaagaatagtagttttagatgtttcaggaaaagatgaagaaaaaaaaccaatgtgttttataaacccaaagataaaaaatactagtgatgaaagatcagtttatgaggaaggatgtttatcaattcctaatacatttattcaaattgaaagaccgaaaacttgtgttgtagaatatgtggacttaaatagtaaaaagaaagaaattaaatgcaatgatcttttgtctacttgtattcaacatgaatgcaatcatttagatggaaaattgataatagattttttgtcaaaatttaaaaaagatttaattataaaaaaaatttcaaaaaataaaagcagtccaaataaaatagttgtataa

SEQ ID NO: 265354 - DNA, 428 bp, Unknown
  Bacterial polypeptide expressing nucleotide sequence isolated from the Sargasso Sea
taaattcgacaaaagtctagaaattatcacctctaatatgcttgaaactatgtatgcagaggaaggcataggtcttgcagcaactcaggttgatattcacgagagaattatagtaatggatctatcagaggaaagaaatgatccaaaaatatttattaatcctgaatttaagattttaaatgacaaaagtctgctttcttttacagagggctgtctctcagtgccaggaataacagaagagataaccaggccagataacatacatttagtctggcaagatcttaaaggcgagaaacatgaagcagagccatcgggcttgcttactgtatgtattcagcatgaaatcgaccatttggagggaaaactgatggttgattatctctctcctctaaaaagagacagaattaggaagaaggcatctaaataga

SEQ ID NO: 265355 - DNA, 455 bp, Unknown
  Bacterial polypeptide expressing nucleotide sequence isolated from the Sargasso Sea
aatggcaaaaaaacaaatattgacaataccagatccattactaaggaaagtttctgagccggtaaattcagttaattcggaggttaaaaaattaatggatgatatgttggacactatgtatgcggcacctgggataggtttagcagcagttcaaattggagttttaatgagagtaattgtcattgatttatcaaaacaagatgaaaaaaaaaatcccttgtttatagtcaaccctgaaataacctctaaatcaaaagagttaatttcttacgaagaaggatgcttatctatacccaatcaatttgcagaggttaaaagacctagctcatgcaaaataaattttttggattacaatggaaaaaaaagtgaaattaatgccgacggtcttttggctacttgcattcagcatgaggttgatcatttaaatggaatattgttcatagatcacttgtcaa

SEQ ID NO: 265356 - DNA, 468 bp, Unknown
  Bacterial polypeptide expressing nucleotide sequence isolated from the Sargasso Sea
atgtatttgataataagttacagattctttgtgatgatttgatagaaaccatgtatgcagcacccggcataggtctggctgctccgcaaattgggattttaaagaaggtcattgttatggattgtgataaagagacacaagatcataaaccaattatattgattaacccaaaaattgtgtgggcgtcagaggaaaagcgatcttatgaagaaggctgcttgtctataccagaaacttacgcggaaatatctagagctgacaaagttaaagtgacgtacaatgatttattaggacaaagaaatgagactattttttcagatctttgggcaacttgcgtccagcatgagattgatcatttgaatggcaagttgtttattgattatttgggttcagtaaagaggggcgtcataatgcgaaaaatgatgaaaataaagagagagactctaaagatttctaaagacaagtaat

SEQ ID NO: 265357 - DNA, 469 bp, Unknown
  Bacterial polypeptide expressing nucleotide sequence isolated from the Sargasso Sea
atatgtactcaagtaactaatattgatgagagtatcaagaaactttgttcagatatgatagatactatgtataaacattctggtgtgggcctggctgctccacaagtaggtatattaaaaagagtagtggtcatggattgttcagaggaaggagaaaagaggccaataagtcttataaatcctgagatagtttggtcttctaaagaggattctaaatttgaggagggttgtttgtctattcctcacatacgtgaagaaattaaaagaccatcttcagttcaagttaaatttaatgatattagtgggatattaaaagagagttatttcaagggtttgtggtctacctgtattcagcacgaaattgaccatctcaatggcaagttatttatagattatttaggacctattaaaaggtcattcataactaaaaaaatgaaaaaatataaaaaagaaattattaaaaaatgat

SEQ ID NO: 265358 - DNA, 526 bp, Unknown
  Bacterial polypeptide expressing nucleotide sequence isolated from the Sargasso Sea
atggctattaaaaaaattgtaaccgttcctgactctattttaagaaaaaaatcattagttgttcaaaaggttgataaagaaataaaaaatctgatggatgatatgttggagacaatgtataaagcaccaggaattggtttagcggctattcaaataggtatcccaaaaaggattgtcgtaattgatatctcaaaagatgagaacaaaaaagatcctatttattttgtaaacccagagttaacttggcagtcaaaagaaaaagtaacttatgaagaaggctgtttatctataccagatcaatttgcaaagatagatagaccggaaaaatgtacagtaaaatttttggactataatggagatcataaagagttaagagctgagggacttttggctacttgtatacagcacgaaattgatcatctaaatggtatcttatttattgattatttatctaaacttaaaaaagatattattataaaaaagttatcaaaaaataaaaaagaattagaaagaatagtagtttaac

SEQ ID NO: 265359 - DNA, 340 bp, Unknown
  Bacterial polypeptide expressing nucleotide sequence isolated from the Sargasso Sea
atggctattcgtgaaatacttttgcatccggaccaaagactaaaaaagatctgtaaacctatacaggaaataaccgatttcgaaagaactttaatcaaagatatgttcgaaaccatgtataatgcgactggtattggacttgctgcgcctcaagttggggtattaaagagaatatttgttatggattgctcagataaggataacagctcagaacccatagttcttattaatccagaaatcctttgggcttcagatgagacaattctttatgaagagggctgtctgtcgattccggagttttttggtgaaataaaaagagccagccgaggaaagttcaaag

SEQ ID NO: 265360 - DNA, 428 bp, Unknown
  Bacterial polypeptide expressing nucleotide sequence isolated from the Sargasso Sea
tatggctaaaaaattaaaaattttgatatttcctgatccaagattaaggaaagtagctgaaaaagtcataaaattcgacaaaagtctacaaaaactagctgataatatgtttttaactatgtatgaggcaaatggaataggtttggctgctactcaagttgatgagcatattagattaatagttatggatctctcagaagaaagaaatgatcctagaatattcattaaccctgaatataaagtcctagagggtcatagtctctttgaatatgaagaaggctgtttatctataccaggcttcaacgaaaagatatctaggccagataagatagagcttaagtggcaagatataaatggcaaggagcatatttcagagcctgaagggcttttaacagtatgtattcaacatgaaattgaccatttggagg

SEQ ID NO: 265361 - DNA, 382 bp, Unknown
  Bacterial polypeptide expressing nucleotide sequence isolated from the Sargasso Sea
cgctcctcaataggcattaataaagaattacttgttattgatgtaaattttgaagattcagctgctgaacctttgatcttaataaacccagaaattactaattatggcacaactttaaattcatatgaagagggttgtttaagtatacctggagtttatttaaacgttgtaagaccatcaaccattaaattaaagttcagagatgaaatgggtagaccaagaaaaatgaaggctgatggacttttagcaagatgtattcaacatgaaatggatcacttaaatggagttttatttgttgatagagttacctcaaaagaagatttacataaggaactcatcaaagagggatttcatgaaaaagatgtaatgccaatcaaatgat

SEQ ID NO: 265362 - DNA, 475 bp, Unknown
  Bacterial polypeptide expressing nucleotide sequence isolated from the Sargasso Sea
atggctataaagaaaatactcactgctccagatccttttttaaagcagatatcaactccggtgaaggaagtgactaacgatatccaaatattaatggatgacatgctcgatactatgtatgacgctcctggcattggtttagccgctgtacaaattggagttcctttgagagtaatagtgatggatatcagctggagaaacgaagacggaaagaaagaaccgtatttttttgttaatcctgaaatcaaagtaaagacaaagattatgtcaacatatgaggaggggtgtctttcagttcctgatcagtatgcagaaattgatagaccagaggaatgtgaagtagactacttagactacaatgggcagaaatcaacattacatgctgaaggacttctcgctacctgtattcaacatgaaatggatcatcttgaaggcattctatttattgattatttatcaaatttgaaaaaaaata

SEQ ID NO: 265363 - DNA, 508 bp, Unknown
  Bacterial polypeptide expressing nucleotide sequence isolated from the Sargasso Sea
atgaataagttaaatatattaacatttcctgacccaaggttaagaaaaactgctgaaccagtcatagattttaacgatgaattaaaatctatggcatccgatatgctgtatacaatgtatgaagataaagggatagggctagcggcaactcaagtagacattcataaaagattaatcgtaattgatttatctgaggacaaaagtagtcctttatacataatcaatcctgattatgaaattttagatgatactcttgaattatcggaagaaggctgcttatccattccctcttttaggcaggaagttaagagagcaaaaaaaataaaattaaaatatcaagacttaaatggcttagataaagagttgactgcagagggtttattaggtttttgcatacagcatgaaattgatcatctaaacggaaaattattagtagattattcatcgtctttaaagaggaatagaattagagataagcttttgaagcttaaagatgaaaaaaaataga

SEQ ID NO: 265364 - DNA, 499 bp, Unknown
  Bacterial polypeptide expressing nucleotide sequence isolated from the Sargasso Sea
atgtcagatttaaaaatccttatatttcctgatccaaagcttagaaaagtggcaaaaaagatagataaattcaacaaaagtttagaaatgctttccaagaacatgcttaatacaatgtatgaagctgaaggtataggccttgctgcgacacaggttgatattcacattagattggtcgttatggatttaagcgaagaaaggaatgagccccgagtgttcgtaaacccagaatacacaatattagacaaaagtccatttacttatgaggaaggttgcctgtctattcctggttttaacgaagaaatatctaggccgtcaaagattctacttaaatggcaggatcttcaaggcaacttccatgaagaaaaaccagatggtattttcactgtatgtgcacagcatgaaatagatcatctagacggaaagctttttgtagactacctaagcccaataaaaagagacagaattagaaagaaactagaaaatagaagaaattaaa

SEQ ID NO: 265365 - DNA, 511 bp, Unknown
  Bacterial polypeptide expressing nucleotide sequence isolated from the Sargasso Sea
tatggctaaaaatttaaaaatattaatatttcctgatcccagattaaggaaagttgcaaaaaagattacaaaattcgacaaaagtctcgaaaaattggctaattctatgttaaaaactatgtatgatgctaatggaataggtttagctgctactcaagtaaatgaacatataagactaattgtcatggatttatcagaaaatcgtgataatccaatgatatttatcaacccaacctataagatccttgaaaatcatagcctttttgaatatgaagaaggctgtctttctattcctggttttaatgagctcattgcccgccctgataagatcgagctaaagtggcaggatattaaaggaaatgagcatattgatatccccgaagggcttctaacggtatgtattcaacatgaaattgatcatctagagggaaaactaatggttgactatgtaagtgcgcttaaaagagaccgggttagaaagagacttttaaaagaatataaaagaaaataa

SEQ ID NO: 265366 - DNA, 464 bp, Unknown
  Bacterial polypeptide expressing nucleotide sequence isolated from the Sargasso Sea
aatgaaaaagaggaaaattcttatagagcctgatccattattgagaaaaaaatgcgaaccattagaaaaagttgatgacgacttaagaaagtttatgaatgaaatgctagcaaccatgtacgatgctcctggtattggtttagcagctattcaagttggagttttaaaaagagttgttgtgattgatctttctaaagatgaaaaaaaaaatccactttttttaataaatcctgagattgtacataaatcaaaaaatacctctatatatgaagaagggtgtttgtcattaccaggtcaattcgcagaaatagaaagaccagcagaatgtgtccttcaatatgttgattataatggaaaaaaaaaggaattaaaagctaaaggtcttttagcaacatgcatccagcacgaggtagaccatctggatggaattttgtttattgattatttatctaagcttaaaaaag

SEQ ID NO: 265367 - DNA, 479 bp, Unknown
  Bacterial polypeptide expressing nucleotide sequence isolated from the Sargasso Sea
aatggctattaaaaaaattgtaacagttcctgactctgttttgagaaaaaaatcgttagttgttgaaagagtcgataaggaaataaaaaatctgatggatgatatgttagaaacaatgtataaggcaccaggaataggtttagcggctgttcaaataggaattccaaaaagggttgttgtaattgatatctcaaaagatgagaataaaaaagaccccatttattttgtaaatccagagttaacttggcaatcaaaagaaaaagcaacttatgaagaaggctgtttatctataccagatcaatttgcgaagatagatagaccaaaaaaatgtatagtaaaatttatggactataatggaaatcccaaagagataaaagccgagggacttttagctacttgtatccagcatgaaattgatcatttaaacggtatcttatttattgattatttatctaaacttaaaaaagatattattataa

SEQ ID NO: 265368 - DNA, 526 bp, Unknown
  Bacterial polypeptide expressing nucleotide sequence isolated from the Sargasso Sea
atgacaattaaaaaaattctaacaataccagatcctattctaagaaaaaaatctacacctgtaacgcaagttaataaagacactcaaagtcttatggatgatatgttagaaactatgtatgacgctccaggaataggtttggctgcaattcaaataggggtacccaaaagagtaattgtaatggacttatctaaagataatgacgaaaaaaaacctctatattttataaaccccgaaattatttggaaatcaaaattaaattcttcttacgaggagggttgtttatcaataccaaatcagttcgcaaaaatagaaaggcccgaaaagtgccatattaaatttctcgattataatggtgttcaaaaagaaataaaagcagatggcttactttcaacatgtatacaacatgaaatcgatcatttaaatggtgttttattcatcgattatttatcaaaactaaaaaaagatattattattaaaaaagtttcaaagaataaaaaagagttagaaagagtagtggtttaat

SEQ ID NO: 265369 - DNA, 511 bp, Unknown
  Bacterial polypeptide expressing nucleotide sequence isolated from the Sargasso Sea
catggcaatccttcccattctctgttacccggacccccggcttcacaaggtcgcccgccccgtccaggcggtggacgaccgcatccgcacgctggtggccgacatgctggccacgatgtacgacgcgcacggtattggcctggcggccacccaggtggacgtgcatgagcggctggtggtcatcgatgtgtcggaggagcgcgatcagcccctggtgctgatcaaccccgagctggtctggaccagcgccgaaaagcacctgaacgaagaaggctgcctgtcggtgcctggcatttatgacggggtggagcggtttgatgccgtgcatgtgcgggcgctggacgcccagggccagtcccgtgtgatcgaggccgatggactgctggcggtctgtattcagcacgagatggaccacctcatgggcaaggtgtttgtggaatacctctcccccctcaagcgcaaccgcatcaagaccaagatggtcaagcagcagcgggaggcgcgcgggtga

SEQ ID NO: 265370 - DNA, 529 bp, Unknown
  Bacterial polypeptide expressing nucleotide sequence isolated from the Sargasso Sea
catgcccgccgccaccaagcttatcccgattgtcacaattcctgatccggtcttgcgccagattgccaagcctgttgacgagatcaccgatggtgtgcgccagcttctagatgatatgacggcgactatgtataacgcgccggggattggccttgccgcaccacaaatcaatgtcagtcaacgcctggtggtgattgattgtggcaaggatgatgcgccggaactttttaaaatggtcaatccagaaatcattgccctgtccgaagaacaggccgttttggaagaaggctgtctttcaatcccggatcaaactgccgaagtgagacggccagccgaagtgtcaattagatatctagatgaaacaggcgccacgcaaacattagtagctgataggctattggccgcatgcatccagcatgaaattgatcatttaaatggtattttgtttattgatcacatctctcgcctgaaacgcgatatgatcacacgccgggtgatgaaagaattgcgccagacaagcgcttcatag

SEQ ID NO: 265371 - DNA, 370 bp, Unknown
  Bacterial polypeptide expressing nucleotide sequence isolated from the Sargasso Sea
ggtatcaacaaagagcttcttgtcatagatgtaaattttgaagattcagcagcagaacctctaatattaatcaatccagaaattacagactttggaacaacccttaattcatacgaagaaggctgcttgagtatacctggcatatatttgaatgtagtaagaccatcaactattaaattaaaatttagagatgaaatgggaagaccacgtaaaatgaaagcagatggacttctggcgaggtgcattcaacacgaaatggatcacttaaaaggaatattatttgttgatagagttacatcaaaagatgatttgaataaagaacttataaaggaaggctttaacgaaaaagacgtgatttctattaattaat

SEQ ID NO: 265372 - DNA, 514 bp, Unknown
  Bacterial polypeptide expressing nucleotide sequence isolated from the Sargasso Sea
atgaataggctaaatatattaacatttcctgacccaagattaagaaaaaaagcagtgccaataactacttttgataaagatcttgaaaaaaaagcagaagatatgctttttaccatgtatgaagatagaggtattggtcttgctgcaacccaagtaaatattcatgagcgtttgatagttatggacttaactgaggatagatcagaccctttggtgatagttaatccgagctatgagattttagatgattcccttgaaatatctaaagaaggctgtctatcaattccgacatttcaacaagaagttccgcgggcaaaagaaatagaactcacttaccaagacttgaagggccagaagcaaaaactcatagctgacggattattagggtattgtattcaacatgaaattgatcaccttaatggaaaactattagtagattatgcgtcatcattaaaaagaagccgtttaaaagaaaaactaatgaaatctaaggatggcaaaaacaaaaattaaa

SEQ ID NO: 265373 - DNA, 508 bp, Unknown
  Bacterial polypeptide expressing nucleotide sequence isolated from the Sargasso Sea
tatggcactattaaaagttttacgctttcccgatgaaagattgcgaactcaagcacaacctatcacagagtttactactgagttgcaaactcaaatcgatgatatgttcgaaaccatgtaccaagaaaaagggattggtttggccgcgacccaggttgattatcataaacaactgatcgtcatggatttacaagacgaggttgaacgtcctaaagtctttatcaatcccgagattattgccagtagcggtgatttctgtaacgaagaaggttgtctgtcagtccctggtatctatgccaaggttgaccgcgccgaatttgttaccgttaaagctctggatagacacggtaatgaattcaccgttgaagccgatgacctatttgcgatttgcattcagcatgaaatggatcacctgaaaggtaagttatttgtcgactacctgtcgccattgaagcgccaacggatcaaacagaaacttgaaaaagcggccaaacaagacgccaaataa

SEQ ID NO: 265374 - DNA, 508 bp, Unknown
  Bacterial polypeptide expressing nucleotide sequence isolated from the Sargasso Sea
catgacagtattaacagttttacattatccagacgaacgcttacgcacagtcgctcaagcagtgcctgcagttacggccgaaattaaacaactcgtaaaagacatgctggacaccatgtatgacgaaaatggcataggtttagcggcgactcaggtcaatgtgcacaagcgtgttgtcgtgatcgatatctccgaaaaccgtgatgaacccatggtttttattaacccggaaatcattgccaaaagtggtgacactgaatacgaagaaggctgtttgtcggtgccgcaaagctacgccaaagtagagcgcgccgcagctgtgacagtcaaagcgcaaaacgaaaaaggcgactggtttgaacttcaggctgaaggtttactggctatttgtttacagcatgagttggatcatttagtcggtaagttgtttatcgactatttatcgccactaaaacgtgaccgtattaagaaaaagctggaaaaagaagctcgcctcgcagcccgttaa

SEQ ID NO: 265375 - DNA, 511 bp, Unknown
  Bacterial polypeptide expressing nucleotide sequence isolated from the Sargasso Sea
atggctaaaaaattaaaaattttaatatttccagatccaagattaagaaaagtagctgaaaaagttacaaaattcgacaaaagtctacaaaaattagcagatgatatgtttttgactatgtatgatgctaatggtataggtttggctgctactcaggttaatgaacatattagattaatagttatggatctttcagaagaaagaaatgatcccaaaatattcatcaacccagaatataaggtgttagagggccatagcctctttgaatatgaggagggttgcttatccataccaggctttaatgaaaaaatatcaaggccagataaaatagagctcaaatggcaagatatcaatggaaaagaacatattacagagcctgaaggacttcttacagtttgtattcaacatgaaattgatcatttagaaggtaagctaatggtggattatgtaagcgctttaaagagagatagagtaagaaacaagcttttaaaagaatataacagaaaataaa

SEQ ID NO: 265376 - DNA, 505 bp, Unknown
  Bacterial polypeptide expressing nucleotide sequence isolated from the Sargasso Sea
atggctttactcaatattcttcattaccccgacaagcggctgcacaaggtcgcgaagcccgtcgacaaggtcgacgaccggatccgcaagctcgtcgccgacatggccgagaccatgtatgcggcgccgggcatcggccttgcggccacgcaggtcgacgtgcacgagcgcgtgatcgtgatcgacgtctccgaggagaagaacgagctgcgcgcgttcatcaaccccgagatcgtgtggtcgagcgatgcaaagcagatctatgaagagggctgcctgtcggtgcccggcatctacgacgaagtcgagcgtcccgaccatgtgcgcgtgcgtgcgctcaacgagcagggcgagactttcgagctcgactgcgagggcctgctggccgtgtgcgtccagcacgagatggatcacctgatggggcgcgtattcgtcgaatacctgtcgccgctcaagcagacgcgcatcaagacgaagatgaagaaactcgaacgcgcgatgtaac

SEQ ID NO: 265377 - DNA, 499 bp, Unknown
  Bacterial polypeptide expressing nucleotide sequence isolated from the Sargasso Sea
catgtcagatttaaaaatccttatatttccagatccaaagcttagaaaagtggccaaaaagataaataaattcgacaaaagtttagaaatactttccaaaaacatgcttaagacaatgtatgaagctgaaggtataggcctcgctgcgacacaggttaatattcacattagattggtcgtcatggatttaagcgaagaaaggaatgaaccccgtgtgtttgtaaaccccgaatacacaatattagacaaaagtccatttacttatgaggaaggttgtctgtctattcctggttttaacgaagaaatatctaggccgtcaaagatcctacttaaatggcaggatctccagggcaactttcatgaagaagagccagacggcattttcactgtgtgtgcacagcatgaaatagaccatctagacggaaaactgtttgtagattacctaagcccaataaaaagggacagaattagaaagaagctagaaaatagaagaaattaa

SEQ ID NO: 265378 - DNA, 487 bp, Unknown
  Bacterial polypeptide expressing nucleotide sequence isolated from the Sargasso Sea
catgacaataaaaactattataactgaacctaatgagattttaagacaagtctcaaaaccagtgttatctgtgggtaaagaagaaagaaagttaatggatgatatgttggatacaatgtatgcagctaatggtattggattagcagcaattcaaattggtattcccaaaaggattatagtaatggatatttcaaaagatggggagaaaaatccaatgtattttgtaaatccaacaattaaaaacaaagataaagaaaaaacaacatatgaagaaggttgtttatccgtcccagattatttcgcggaagttgatagacctaaatattgtgaggttgaatatttagattataatggagaaaataaaattttagaagccgacgggctccttgcaacttgtatacagcacgaaatggatcatcttgaaggaattttatttatagattacttatcaaaattgaaaaaaacaatgattgttaaaaattatcaa

SEQ ID NO: 265379 - DNA, 508 bp, Unknown
  Bacterial polypeptide expressing nucleotide sequence isolated from the Sargasso Sea
tatgaataagctggatattttaacatttcctgacccaaggttaagaaaaaaagcgcagccaattgaaagatttgatgaaaatcttaaagatatggctaaaaaaatgttgcatacaatgtatgccgacaaaggtattggtctagcagcaactcaagttaattatcatgagagattaattgttattgatgtttctgaaaatcaagatgagcccatatatatagtaaatccctcttatgaggttttagatagctctctagaatcatctaaagaaggctgcctttcgatacctacatttcaacaagaagtgttcagagcaaaaaaaattgagctatcgtatcaggaccttgatggtgaaccacagaaattaactgctgaaggtctttttggttactgtatacaacatgaaatcgaccatcttaatgggaagttaatagttgattatgcctcatcactaaaaagaagccgcatcaaagcaaaactactgaaaacaaaagatggcaaagcctga

SEQ ID NO: 265380 - DNA, 487 bp, Unknown
  Bacterial polypeptide expressing nucleotide sequence isolated from the Sargasso Sea
tccatgtttaagacaggtatctaaacctgttgatcaagttggcaaagaagaacaaacattaatggatgatatgttggagacaatgtatgacgcaccaggtatagggcttgcagcaattcaagttggtgttccaaaaaggataatagtgatggatattagtaaagaagaaggaaaaaaagaaccaaggtattttgtaaatcccgttatcaaaaataaagatccaataaaagcaacatatgaagaaggatgtttatctgttcctaaccagtttgcagaaatagatagaccaagtaaatgtgaggtagaatatttagattatcacggaaaaaagcagttattaaaagcagatggattgctagcaacctgtatacaacacgaaatggatcatttagagggtgtgctttttattgactatttatcaaaattaaaaaaatcaatgataattaaaaagttatcaaaattgaaatcaaatacagctgtactttaa

SEQ ID NO: 265381 - DNA, 505 bp, Unknown
  Bacterial polypeptide expressing nucleotide sequence isolated from the Sargasso Sea
aatggctaaaaaattagatattttaatatttcctgatccaagattaaggaaaattgcagagaaaattactaaattcgacaaaagtctagaaaatttatcaaatgatatgcttaaaaccatgtatgaagcaaatggcataggcttagcagctactcaagtagatcatcatgtaaggcttatagttatggatctatcagaacaaagaaatgatcccaaagtatttataaatccaacatttgaagtattaaaaggttataaaatgtatgagtttgaagaaggatgtctttcaatacctggatttaatgaaacccttgctaggccagataaaatagagcttacttggcaagatcttcggggtaaaattcacgttgataagccagaaggtcttcttacagtgtgcattcagcacgaaatcgatcatttagatggaaaactaatggttgactatattagtgctttgaaaagagatcgtgtaagaagcaagcttttaaaagattttaaatga

SEQ ID NO: 265382 - DNA, 464 bp, Unknown
  Bacterial polypeptide expressing nucleotide sequence isolated from the Sargasso Sea
taaagagatccaggatctcatggatgatatgttggataccatgtatgacgcacctgggataggtctagcagcggttcaaatcggagttcctttgcgtgtaattgtgatggatataagctggagaaatgaagagggcataaaagaacccctttattttgttaaccctgaaattacagtaaaaacaaaaaatctttcaacgtatgaagagggatgtttatcggtcccagatcaatacgcagaaattgatcgtccagaagaatgtgaaataaactttcttgattataatggaaaaaagtcgactctaaacgctaaaggattattagcgacctgtatccaacatgaaatggatcatcttgaaggaattctttttattgatcatttatcaaatatgaaacgcaacatgattgtaaagaagctcatcaaaacaagaaaacaatcaaaaaaagaacgaatcgtcgcttaga

SEQ ID NO: 265383 - DNA, 508 bp, Unknown
  Bacterial polypeptide expressing nucleotide sequence isolated from the Sargasso Sea
aatgaataagttaaatatattaacatttcctgacccaaggttaagaaaaactgctgaaccagtcatagattttaacgatgaattaaaatctatggcatccgatatgctgtatacaatgtatgaagataaagggatagggctagcggcaactcaagtagacattcataaaagattaatcgtaattgatttatctgaggacaaaagtagtcctttatacataatcaatcctgattatgaaattttagatgatactcttgaattatcggaagaaggctgcttatccattccctcttttaggcaggaagttaagagagcaaagaaaataaaattaaaatatcaagacttaaatggcttagataaagagttgactgcagagggtttattaggtttttgcatacagcatgaaattgatcatctaaacggaaaattattagtagattattcatcgtctttaaagaggaatagaattagagataagcttttgaagcttaaagatgaaaaaaaatag

SEQ ID NO: 265384 - DNA, 553 bp, Unknown
  Bacterial polypeptide expressing nucleotide sequence isolated from the Sargasso Sea
gatgttggttccgaagacggcgctctacaccccacccctggagattcacaccctcggtgctgaggtgttgcgtcagccggcccgacgcatcggcaaggtgacagagcagacccgcgagctggctcgggacatgctcagaagcatgtacaccgccaagggcatcgggctggcggctccgcaggtggggattcatcagcagctgctggtgattgacctcgacctggagaacgccgcgacacctccgctggtgttaatcaaccctgagatcagtgccgccagcgccagcatcgacacctacgaggaaggttgtctcagcatccccggtgtctacctcgatgtggtcaggccgacagccattgagctcagcttccgcgatgagatgggacggccgagaaagatgaaggccgatggcctgatggcccgctgcatccagcacgagatggatcatctcaatggtgtgttgtttgtggatcgcgtcaccgatgaagccggtcttcagaaggaattgatggatcatggttttcagcgccagcacgttcagagcgtgtcctga

SEQ ID NO: 265385 - DNA, 505 bp, Unknown
  Bacterial polypeptide expressing nucleotide sequence isolated from the Sargasso Sea
atggctaaaaaattgaaaattttaatatttcctgaccctagattacgaaaagttgcgaaaaaagtaacaaaattcgacaaaagtctagaaaatttagcaaacgatatgctagaaacaatgtatattgccaatggaataggtcttgctgcaactcaagttgatcgtcatattagactaattgtgatggatttatcagaagaacgagatgatcctagaatttttatcaatccaacattcaaaatacttaaaaatcataaattatttgagtttgaagagggttgcctttcaattcccggctttaatgaaaccattgctcgtcctgataaaatagagctgacatggcaagatattaagggcaatcagcatatagacaagcctgaggggcttttaactgtatgtattcaacacgaaatcgatcatttagatggaagattaatggttgactatattagctcacttaaaagagatcgaataagaagtaagcttttaaaagaacataaatgaa

SEQ ID NO: 265386 - DNA, 511 bp, Unknown
  Bacterial polypeptide expressing nucleotide sequence isolated from the Sargasso Sea
atggctaaaaaattaaaaattttaatatttccagatccaaggttaagaaaagtcgctaaaaaagtaataaaattcgacaaaagtctagaaattttagctaatgatatgcttaaaactatgtatgaagcaaatggcataggtttagctgccacgcaggttgatttccatgttcgtctagtagtcatggatgtttcagaggacaggaatgatcctaaaatatttgtaaatcctatgtatcgggtgcttgatgaccataagttgtttgaatttgaagaaggctgcctttcaataccaggttttaatgaaattatttcaagacctgacaaaattgaattaacttggcaagatttaaccgggaaggagcataaagattatcctgagggccttttaacagtatgtatacagcatgaaatagatcacctagaaggtaagttgatggttgattatgtaagtgcgttaaaaagagatagagtaagaaaaagacttttaaaagaatttaaaagaaaataaa

SEQ ID NO: 265387 - DNA, 502 bp, Unknown
  Bacterial polypeptide expressing nucleotide sequence isolated from the Sargasso Sea
atggcaatactcgaaattttaacggttcccgacccgcgattgggtaccaaagccgaaccggttgagaatattgcggccgtgcaaggcctgatcgatgacatgctggagaccctctatgccaccgacaatggtattggtctggcggccacgcaagtggggcgcaaggaggccatcgtcatcatcgacctatcagaaaaacgggatcagccgctggtgttgatcaatccgcaagtgacaagcggcaccgaacctgcgtttggccaagaggggtgtctctccgtgccggattattatgccgatgtcgagcgttacagctcggtggtggtgtcggcactggatcgccatggcgtgcctatcacggtaaagagcagcgattttctggccatcgtgatgcagcatgagatcgatcacctgcagggcaaggtgtttatcgattatctctcgccgctaaagcgcaagatggcgttgaagaaggtgaaaaagcatctcaaggcgacatgac

SEQ ID NO: 265388 - DNA, 448 bp, Unknown
  Bacterial polypeptide expressing nucleotide sequence isolated from the Sargasso Sea
tccattagaaaactatctagagaaatgcttcaaagcatgtatgcagcaaaagggattggacttgctgcgcctcaaattgggattaacaaagagcttcttgtgattgatgtaaattttgaagattcagcagcagagcctttaatcttaatcaatccagaaattacagattatggaacaactcttaattcatacgaagaaggctgtttgagtatacctggtgtctatttgaatgtcgtaagaccatcaactataaaattaaaatttagagatgaaatgggaaggcctcgtaaaatgaaagcagatggacttctagcaaggtgcattcaacacgaaatggatcacttaaatggaatattatttgttgatagagttacatcaaaagatgatttaaacaaagaacttataaaagaagggtttaaccaaaaagacgttatttctattaattaat

SEQ ID NO: 265389 - DNA, 526 bp, Unknown
  Bacterial polypeptide expressing nucleotide sequence isolated from the Sargasso Sea
atgattagacctattgttttacatccagatgcaaggctgaaaaaaaaatctgtggaagttgagagcataactgatgccttaataaaattggcagacgatatgatggagacgatgtatgatgcacctggaattggtttggctgccccccagattggtgtattagaaaggttaattgtaatggattgtgccaaaaaagagggtgaagatccggacccagttattatggttaaccccataataaccgcgtcttccgcagaaaaaagcgtgtatgaagaggggtgcctttctattccagaacattttgcagagatcaccagaccagagtttgtacaggtcgagtggatcgatttagatggaaagcaacattctgaggagtttaatggacttaagtcaacttgtgtacagcatgaaattgatcatttgaatggcaaattatttattgactatttaggacctatgaagcgacagctgataacgcgtaaaatgcaaaagtttaaacgagaaaaattgcgtggcgacgaataat

SEQ ID NO: 265390 - DNA, 508 bp, Unknown
  Bacterial polypeptide expressing nucleotide sequence isolated from the Sargasso Sea
atggcaatattagaaataattgaattcccacatcctaatctacgcaaaatagctgcgccggtcacagcttttgatgcaaatttacggcgtcttgtagatgatatgtttgagactatgtacgaggcgaatggtataggcttagcagctactcaggtcgatattcataaaaggcttttagtattggacacctcagaggaaagagataaaccacaagtatttgttaaccccattattgagattatcgaatctgacttatctgaatatgatgaaggttgcctgtcagtgcccgggttttatgaaacaatatctcgtcccaagaaaataaaagttgaggcacagaattgtgtgggcgaaaaattttcaattgaagccgaaggtatactgtcggtttgtattcagcacgaaattgatcacttagatggaaaactttttgtcgattacctgagttctctcaaacggaatcgaattcgagacaaactacagaaagatcatagatcttcctattaat

SEQ ID NO: 265391 - DNA, 358 bp, Unknown
  Bacterial polypeptide expressing nucleotide sequence isolated from the Sargasso Sea
gctgcaacgcaggttgatattcacattagattggtcgttatggatataagcgaagaaagaaatgagccccgggtgtttgtaaaccccgaatacacaatattagacaaaagtccatttacttatgaggaaggttgtctgtctattcctggttttaacgaagaaatatctagaccgtcaaagattctacttaaatggcaagatctgcaaggcaactttcatgaagaaaagccagacggtattttcactgtttgtgcacagcatgaaatagaccatctagacggaaagctttttgtagactacctaagcccaataaaaagggacagaattagaaagaaactagaaaatagaagaaattaat

SEQ ID NO: 265392 - DNA, 430 bp, Unknown
  Bacterial polypeptide expressing nucleotide sequence isolated from the Sargasso Sea
aatggatgatatgttggaaacaatgtatgcagctaatggtattggattagcagcaattcaaattggtattcccaaaaggattatagtaatggatatatcaaaagatggggagaaaaatccaatgtattttgtaaatccaacaattaaaaacaaagataaagaaaaaacaacatatgaagagggatgtttatccgtcccagattatttcgcggaagttgatagacctaaatattgtgaggttgaatatttagattataatggagaaaataaaattttagaagccgacgggctccttgcaacttgtatacagcacgaaatggatcatcttgaaggaattttatttatagattacttatcaaaattgaaaaaaacaatgattgttaaaaaattatcaaaaagaaaaaatcctcctgatagaattattgtttaa

SEQ ID NO: 265393 - DNA, 421 bp, Unknown
  Bacterial polypeptide expressing nucleotide sequence isolated from the Sargasso Sea
atggccctactccctattcttgagtttcccgacccgcgactgcgcacgcgcgcggtacctgttgtcgcggtcgatccaagaattcaacagcttgtcgatgacatgttcgagaccatgtatgcggcgcccggcatcggcctggcggccagtcaggtcgatgtccacgagcgcgtgattgtcatggatctcagtgaggatcattcggatcccagagtctttattaaccccgagatcaccgtcatcgatgagacgctgggttcctatgatgagggctgtttgtctgtgcccggattctacgagaccgttgagcggcccgagattgttgaggtcacggcactagaccgcgatggcgccgcatttcacagagcgactcgatggcctcatgggtatctgtctgcagcacgagatagaccatcttgaa

SEQ ID NO: 265394 - DNA, 511 bp, Unknown
  Bacterial polypeptide expressing nucleotide sequence isolated from the Sargasso Sea
atggctaaaaatttaaaaatattaatctttccagacccaagattaagaaaagttgctgaaaaaattacaaaattcgacaaaagtctagaaaatttagcaaattctatgttaaagacgatgtatgatgcaaatggcataggtctagcggctacccaggtagaccaacatataagacttattgttatggatttatcagaaaatagagatgatcccagaatatttataaatccaacttacaaaattcttgaaaatcatagcctatatgagtttgaggaaggctgtctttctattcctggttttaatgaggtaatagcccgccctgataaaattgaattaagatggcaagatttagatggaaatgagcatattgataagcctgaaggccttctaacagtatgtattcagcatgaaattgaccatttagaaggaaaactaatggttgattatgtaagcgctctaaagagagatagagtacgaagtagacttttaaaagaatataaaagaaaataac

SEQ ID NO: 265395 - DNA, 526 bp, Unknown
  Bacterial polypeptide expressing nucleotide sequence isolated from the Sargasso Sea
catgacagttaaaaaattaattacaattccagatgaagtgctaagaaaaaaatctcaaaacattcaaaaagttggtgaaaatgaaaaaaaattaattaaagatttatttgaaacaatgtatcatcataaaggaattggcttagctgctattcaagtaggtataccgcaaagaataattgtaatagatattacccaaaaaaataatcagaaaaacccattatgttttatcaacccggtaattaaacattcaagtaatgaaaaatctaaatatgaggaaggctgtctatctatacccaatacatttatagagattgagcgaccaaaaaaatgtcttgttgaatatgtagatatagagggtaaaaaaaatagcatggagtgtgatgaccttctctcgacatgtattcagcatgagatcaatcatttagatggaaaattaattatagattttttatcaaaattaaaaaaggatcttattataaaaaaactctcaaaaacaagacaaaatacagatagaattgtagtatag

SEQ ID NO: 265396 - DNA, 508 bp, Unknown
  Bacterial polypeptide expressing nucleotide sequence isolated from the Sargasso Sea
atggcactattgaaagttttacgctttcccgatgaaagattgcgaactcaagcgaccccgatcacagagtttactgctgagttgcaaacacaaatcgatgatatgttcgagaccatgtaccaagaaaaagggattggtctggcagcaacccaggtcgactatcataaacaactgatcgtgatggatttacaagacgaggtcgatcatcctaaagtctttatcaatcccgaaattattgccagtagcggtgatttctgtaacgaagagggttgtctgtcagtcccaggtatctatgccaaggtcgaccgcgccgagtttgttaccgtcaaggcactggatagacacggtaatgaattcaccgttgaagccgatgagctttttgctatttgtattcagcatgaaatggatcacctgaaaggtaagttatttgtcgattacctgtcgccattgaagcgccaacggatcaaacagaaacttgaaaaagcggccagacaggacgccaaataag

SEQ ID NO: 265397 - DNA, 511 bp, Unknown
  Bacterial polypeptide expressing nucleotide sequence isolated from the Sargasso Sea
aatggcaattttagacgtattaagttttcctgatgaacgtcttcgcacggtagctaagccggttgaagaggttaacgacgaaattaaacaattggtatcggacatgttcgaaaccatgaaagacgagaacggtattggccttgccgcaacgcaagttaaccgtcacgttcaagttgttgtaatggacgtatcggaagatcaaaacgagccacgcgtatttattaaccctgaaatcattcgtaaagatggctccacgattagcgaagaaggctgtttatcagtgccgggtaattacgcgaaagttgagcgcgccgaagcaattaccgtaaaagcgctagatcaaaacggcgaaagctttgagttggatgcagaaggtttgttagcgatttgtattcagcacgagctcgaccatttaaaaggtaaactgtttattgattacctttcaccacttaagcgccaacgtattcgtaaaaagcttgagaaagaagcgcgtcttgcggcaaaagcctaa

SEQ ID NO: 265398 - DNA, 505 bp, Unknown
  Bacterial polypeptide expressing nucleotide sequence isolated from the Sargasso Sea
atggctaaaaaattagatattttaatatttccggacccaagattaagaaaagtagctgaaaaagttactaaattcgacaaatgtctagaaaaattagcccaagatatgctccaaactatgtatgaagctaatggaataggtttagcagcaacgcaagtggacaaacatattaggcttgtagttatggatctttcagaggaaagaaatgatccaagaatatttgtaaacccagaatatgaaattcttgaaggatatgaaatgtttgaatttgaagaaggatgcctatcaatacccggatttaatgaaactatagccagaccagataaaatcaaacttatttggcaaaatttgagtggagaagctatggaggatacgccagagggcattctgacagtatgtattcaacatgaaatagatcacttagacggtaaattaatggttgattatgtaagtgctttaaagagagatcgcataagaaataagcttttaaaagattttagatgaa

SEQ ID NO: 265399 - DNA, 586 bp, Unknown
  Bacterial polypeptide expressing nucleotide sequence isolated from the Sargasso Sea
atggcgcgtcaattagaacggcagtcctccacagtgatggtccccaagggagaggaacagcctgaaagcccgctgatccacacgctgggatcaaatgaattgcgcaaacccgccaagcggatcagcaaggtgaatgaacaggtacgggagctggcgcgcgagatgctgcgcagcatgtacgcggctcgcggaatcggcctcgcagctccgcaggtcggcgtgcatcaacaactattggtgatcgatctggacccagaggaggcctctaaccatccgttggtgttgatcaatcccgaaattgtgtccaccagcggtgctttggacacctacgaggagggatgtctgagcattccgggtgtttatctcaacgtggttcgccccagtcaggtggaggtgaaatttcgcgacgagctggggcgaccacaacggcgcaaagccgatggcctgatggcccgctgcatcttgcatgaaatggatcacctcaatggggtgctcttcgttgatcgggtgagtgatgaactcagcctcaccgatgagcttcagcggctcggcttcgaccgcaatgatgtaaagcctgtcgcttgaa

SEQ ID NO: 265400 - DNA, 517 bp, Unknown
  Bacterial polypeptide expressing nucleotide sequence isolated from the Sargasso Sea
tatgacaaaattattatatgtaccaaatccattattacgtcaaaaagcagaaaaaataaatatagttggtcatgaagagttaaaaatagcaaaaaaaatgaaagaaattatgttaaaggcgcctggtgtaggtttagcagcaaatcaaattggcattcttaagcaaattgttacaattttctatgtggataaagaaacaaaaaaagaaatagaatacaatttatttaatcctcaaataatttcatattccgaagaaacaattataatggaggagggctgtttatcaattcctgaacaatttgcagaaatagagcggccaaaaataattaaacttcaatatttagatgatcacaataaattaatagaaagggaagttgatggagtagaggcaagaattctccagcatgaaatagaccatctttcaggaaaattatttgtagactatctttcttacctaaaaagaaatattatgattaaaaaggtacaaaaatatctaaaaataaaaaataatgcatag

SEQ ID NO: 265401 - DNA, 511 bp, Unknown
  Bacterial polypeptide expressing nucleotide sequence isolated from the Sargasso Sea
atgtctaaaaaattaaaaattctggtatttccagatccaaaactaagaactgtagccaaaaagattacaaaattcgacaaaagtctagaaaaattgtcagataacatgttgcatacaatgtataatgctaatggaattggtttagcggctacacaagtcgatgaacatataagactggtagtaatggatttgtctgaagacagaaatgaaccaatggtttttgtaaatcctgaatataaagtacaaaaagagcataaattagttgaatttgaggaagggtgcctatctatacctggttttaatcataatattgccagacctgacaatattgagcttaagtggcaagatttaaaagggaaagaacatgaaataaagcctgaaggcatgttatcaatttgcattcaacatgaaattgatcatttagagggcaaattaatggtagattatgtaagtgcactaaagagagatagagttagaaagagacttttaaaagaatttaagagaaaataac

SEQ ID NO: 265402 - DNA, 514 bp, Unknown
  Bacterial polypeptide expressing nucleotide sequence isolated from the Sargasso Sea
tatggccattctagatgtattgcgtttccccgatgagcgtctgcgtactgtcgcagcccctgtcgagacctttacacccgagttacaacacattgtagatgatatgttcgaaaccatgtacgcggaggaaggcatcggcctcgccgccactcaggtcgacattcatcagcgcatcatagtgatcgatgtctctgaaaaccgtgaagatcctctggtattgatcaaccccgagatcatcgagcaggccggcagcaccggcatcgaggaagggtgcctctccgtgcccggcagccgtgccctagtgccccgcgccgagtgggtcaaggtgcgtgccctggatcgccacggcaaggcattcgagctggaagcagacgatctgctcgccatctgcatccagcatgagatggaccatctggtcggcaagctgtttgtggattacctgtccccgctcaagcgccagcgcattcgccaaaagctggaaaagatggcccgtgaagatcgcaaagtcctctga

SEQ ID NO: 265403 - DNA, 538 bp, Unknown
  Bacterial polypeptide expressing nucleotide sequence isolated from the Sargasso Sea
tatgacaattaaaagaattttaacagctcctgatccttttttaaagcagatctctaagccagtagactctgtaacaaaggaaatacaggatcttatggatgatatgttagagaccatgtatgatgcaccgggtattggacttgcagctgtgcaaattggtgttccattaagagttatagttattgatattgcttggagaaacgaagatggaaaaaaagaaccaatgtattttgttaatcctgagatcatctccactgtagaaaatttagctacttatgaggaaggttgtctttcagttccggatcaatatgcagaaatagatagaccagaaaagtgcaaagtaaaatatttagattatgatggaaatgaacaaatcatgtcagcagaaggaatgttagcaacatgtatccagcatgagatggatcatcttgaaggtattctattcatagaccatttatcaaacttaaagaaaaatatgattgtcaaaaagcttatcaaatcaaaaaaaacttcaagtaaagaacgtattgtcgcttag

SEQ ID NO: 265404 - DNA, 499 bp, Unknown
  Bacterial polypeptide expressing nucleotide sequence isolated from the Sargasso Sea
atgtcagagttaaaaattcttatatttccagatccaaagcttagaaaagtggcaaaaaagatagataaattcgacaaaagtttagaaatgctttccaaaaatatgcttaacacaatgtatgaggcagaaggtataggccttgctgcaacccaggttgatattcacattaggttggtcgttatggatttaagcgaagaaaggaatgagccccgagtatttgtaaaccccgaatatacaatattagacaaaagtccatttacttatgaggaaggttgcctgtccattcctggtttcaacgaagaaatatctaggccgtcaaagattctacttaaatggcaggatcttcaaggcaacttccatgaagagaagccagacggcattttcactgtttgtgcacagcatgaaatagaccatctagacggaaagctttttgtagactacctaagcccaataaaaagggacagaattagaaagaaacttgaaaatagaagaaattaaa

SEQ ID NO: 265405 - DNA, 463 bp, Unknown
  Bacterial polypeptide expressing nucleotide sequence isolated from the Sargasso Sea
aaagttgctaaaaaagtattaaaattcgacaaaagtctagaaaatctagctaatgatatgcttaaaactatgtacgaagcaaatggtattggtttagctgccacacaggttgattttcatgttcgtcttgtggtcatggatgtttcagaggaaaggaatgatccaaaaatatttgtaaatccaatatataaagtacttgatggccataaattgtttgaatttgaagagggttgtctttcaattccaggatttaacgaaattatttcaagacctgacaaaattgagttaacttggcaagatttaagtggtaagcagcataaagattatcctgaaggccttttaacagtatgtatacagcatgaaatagatcacttagaaggtaaattaatggttgattatgtaagcgcattaagacgagacagagtaagaaaaagacttttaaaagaatttaagagaaaataac

SEQ ID NO: 265406 - DNA, 469 bp, Unknown
  Bacterial polypeptide expressing nucleotide sequence isolated from the Sargasso Sea
ttaagaaaaaaagcgcagccaattgaaagatttgatgaaaatcttaaagatatggctaaaaaaatgttgcatacaatgtatgccgacaaaggtattggtctagcagcaactcaagttaatcatcatgagagattaattgttattgatgtttctgaaaatcaagatgagcctatatatatagtaaatccctcttatgaggttttagacagttctcctgaaccatctaaagaaggctgcctttcgatacctacatttcagcaagaagtgctcagagcaaaaaaaattgagctgtcttatcaggatctagatggcaagccacacaaattaacagctgaaggtctttttgggtattgcatacagcatgaaatagatcatcttaatgggaaactgatagtagattatgcctcttcattaaagagaagtcgtatcaaagcaaaactacttaaaataaaagatggccaaggatgaa

SEQ ID NO: 265407 - DNA, 261 bp, Unknown
  Bacterial polypeptide expressing nucleotide sequence isolated from the Sargasso Sea
catacgaagaaggctgcttgagtatacccggcgtctatttgaatgtagtaagaccatcaactataaaattaaaatttagagatgaaatgggacgaccacgtaaaatgaaagcagatggacttctagcgaggtgtattcaacacgaaatggatcacttaaatggaatattatttgtagatagagttacatcaaaagatgatttgaacaaagaacttttaaaagaagggtttaacgaaaaagacgttatctcaattaattaat

SEQ ID NO: 265408 - DNA, 499 bp, Unknown
  Bacterial polypeptide expressing nucleotide sequence isolated from the Sargasso Sea
catgtcagatttaaaaattcttatatttccagatccaaagcttagaaaagtggccaaaaaaatagataaattcgacaaaagtttagaaatgctttccaaaaacatgcttaagacaatgtatgaagctgaaggtataggacttgctgcaacccaggttgatattcacattagattggtcgttatggatttaagcgaagaaaggaatgagcccagagtatttgtaaaccccgaatacacaatattagacaaaagtccatttacttatgaggaaggttgcctgtctattcctggttttaacgaagaaatatctaggccgtcaaagattcttcttaagtggcaggatcttcaaggtaacttccatgaagaaaagccagatggcattttcactgtttgtgcacagcatgaaatagaccatctagacggaaagctttttgtagactacctaagcccaataaaaagggacagaattagaaagaaactagaaaatagaagaaattaa

SEQ ID NO: 265409 - DNA, 514 bp, Unknown
  Bacterial polypeptide expressing nucleotide sequence isolated from the Sargasso Sea
atggctaaaaaattaaaaattttgatatttccagatccaaggttgagaaaagtcgctaaaaaagtaattaaattcgacaaaagtctagaaaatttagctaaagacatgcttgaaactatgtacgaagcaaatggtattggtttagcagccacacaagttgattttcatattcgtcttgttgtaatggatatttcagaagacagaaatgatccaaaaatatttgtaaatccaaaatataaagtgcttgatgaccataatctattagaatttgaagagggctgtctttcaattccaggctttaatgaagttatttcgagacctgataaaattgaactaacctggcaagatttaagcggaaaggagcataaagacacccctgaaggccttttgacagtatgtatacagcatgaaatagaccacttagaaggaaaattgatggttgattatgtaagtgcattgaaaagagatagagttagaaagaaacttttaaagaatttaacagaaaataactgat

SEQ ID NO: 265410 - DNA, 508 bp, Unknown
  Bacterial polypeptide expressing nucleotide sequence isolated from the Sargasso Sea
atgaataagctggatattttaacatttcctgacccaaggttaagaaaaaaagcacagccaattgaaagatttgatgaaaatcttaaagatatggctgaaaaaatgttgcatacaatgtatgccgacaaaggtattggtctagcagcaactcaagttaattatcatgagagattaattgttattgatgtttctgaaaatcaagatgagcctatatatatagttaatccctcttatgaggttttagacagttctcctgagccgtctaaagaaggctgcctttcgatacccacatttcagcaagaagtgctcagagcaaaaaaaattgagctgtcttatcaggatctagatggcaatccacacaaattaacagctgaaggtctttttgggtattgcatacagcatgaaatagatcatcttaatggaaaactgatagtagattatgcctcttcattaaagagaagtcgtatcaaagcaaaactacttaaaataaaagatggccaaggatgaa

SEQ ID NO: 265411 - DNA, 535 bp, Unknown
  Bacterial polypeptide expressing nucleotide sequence isolated from the Sargasso Sea
atgatccgcgaaattctcaagatgggcgatccgcgccttttgcaaattgccgatccggtcgatcacttcgacacccccgagctacatgagctcatcaaggacatgttcgagaccatgcacgacgcgaacggcgcggggctcgccgcgccgcagatcggcgtgaatctgcaggtggtgatcttcggcttcgggcacaacgaacgctatccggatgcgccgccggtgcctgagacggtgctgatcaacccgaccattacgccggtgtcgctcgacatggaagagggctgggagggctgtctgtccgtaccgggtttgcggggcgcggttagccggttttcgatgatcaagtatcacggcttcgaccagtacggcaaaccgatcgatcgcgtcgccgaaggttttcatgcgcgcgtcgtgcaacatgagtgcgatcacctgatcggcaagctgtacccgatgcgaatcaacgatttcgcgaagttcggcttcactgaggtcctgtttccggatatggacccgaatagcgacgactgac

SEQ ID NO: 265412 - DNA, 505 bp, Unknown
  Bacterial polypeptide expressing nucleotide sequence isolated from the Sargasso Sea
aatggctaaaaaattaaagattttaatatttcctgatcccagattaagaaaagttgctgaaatggtcactaaattcgacaaaagtctacaaattctcgctgaggacatgttagaaactatgtatgatgcaaatggcataggtcttgctgctacccaagtaaataaacatataagattaattgttatggacctgtcggaagaaaggaatgagcctaaaatttttataaatccgtcttttaagatattaaaagggcacaaaatgtatgaatttgaagaaggatgtctatcaattccaggtttcaatgaaacgatagctcgtcctgataaaattgaactaaaatggcaggatatcaatggaaaagtgcatacagacaaaccagaaggtctattaacggtatgcatacaacatgaaattgatcatttagagggtaagttaatggttgactatattagtgcgttgaagagagatagggtaagaagcaaacttttaaaagaatataactga

SEQ ID NO: 265413 - DNA, 493 bp, Unknown
  Bacterial polypeptide expressing nucleotide sequence isolated from the Sargasso Sea
catggctgtactcgatattctgacaattcccgatgaacgtctaaaacgcaaagcgcaacccgtaaaagatatagaagcaattcagggatttatcgatgacttaatcgaaaccatgtaccacactgacgatggtattggtctggcctcgacccaagtgggcagtacagatgcggtgattgtgatcgatttatccgaaacccgtgaccaacccttagtgctgattaatccagagattgttgaaaagtctggcgaatatgtgggtgaagaaggctgtctttcaatccctggctatcgcgcgaaagtgagccgtttcgaaaaggtcaaagtcaccgccttagacagacaaggcaaagcggttgaaatcgaaaccgacgactttttagccattgttttgcaacacgaaattgatcatttacacggtaaagtgtttatcgagcatttatcggcattgaagcaacaaatcgccttaaaaaaggtacgtaaatacgcctaa

SEQ ID NO: 265414 - DNA, 526 bp, Unknown
  Bacterial polypeptide expressing nucleotide sequence isolated from the Sargasso Sea
catggctataagaaaaattttaacaattccagattctattttaaggcaaaaatctttaccagtggataaagtaaatagagaaatcaaaactcttatggatgacatgttaaacacaatgtacgatgcacctggaattggtctagccgctatacaaattggtattccaaaaaggattgtagttatggacttatctaaagatcctgaaaaaaaaaatccaatgtattttgttaatcctgagatcacttggaagtctgatttaaaatcaacttatgaagagggatgtctttctattccaaatcaatttgcaaaaattgacagacctgaaaaatgtaatgttaaatttcttgattatgacggaaacctgaaagaaataaaagctgacggacttctatcaacctgtattcaacatgaaattgatcatctaaatggagtattattcattgattatttgtcaaaacttaaaaaagatataattattaagaaagtatcgaaagataaaaaagagacagaaagagtagtagtttaa

SEQ ID NO: 265415 - DNA, 505 bp, Unknown
  Bacterial polypeptide expressing nucleotide sequence isolated from the Sargasso Sea
aatggctaaaaaattagatattttaatatttccggacccaagattgagaaaagtagctgaaaaagttactaaattcgacaaatgtctagaaaaattagcccaagatatgcttaaaactatgtatgaagctaatggaataggtttagcagcaacacaagtagacaaacatataaggctagtagttatggatctttctgaggaaagaaatgatccaagaatatttgtaaacccagagtatgaaattcttgaaggatatgaaatgtttgaatttgaagaaggatgcttatcaatacccggatttaatgaaactatagccagaccagataaaatcaaacttatttggcaaaatttgagtggagaaactatgaaggatacgccagaaggcattctgacagtatgtattcagcatgaaatagatcacttagacggcaaattaatggttgattatgtaagtgctttaaagagagatcgcataagaaataagcttttaaaagattttagatga

SEQ ID NO: 265416 - DNA, 526 bp, Unknown
  Bacterial polypeptide expressing nucleotide sequence isolated from the Sargasso Sea
catggctacaagaaaaattttaacgattccagattctattttaaggcaaaaatctttaccagtagataaagtaaatagagaaatcaaaactcttatggatgacatgttaaacacaatgtatgatgcacctggaattggtctagctgctgtacaaattggtattccaaaaaggatcgtagttatggacttatctaaagatcctgaaaaaaaaaatccaatgtattttgttaatcctgagatcacgtggaagtctgatttaaaatcaacttatgaggagggatgtctatctattccaaatcaatttgcaaaaattgaaagacctgaaaagtgtaatgttaaatttttagactatgatggaaaccctaaagaaataaaagctgaaggacttctatcaacttgtattcaacatgaaattgatcatctaaatggagttttattcattgattatttgtcaaagcttaaaaaagatataattattaagaaagtatcaaaagataaaaaagagacagaaagagtagtagtttaa

SEQ ID NO: 265417 - DNA, 511 bp, Unknown
  Bacterial polypeptide expressing nucleotide sequence isolated from the Sargasso Sea
atggctaaaaaattaaaaattttaatatttccagatccaagattaagaaaagtcgcgaaaaaagtaacaaaattcgacaaaagtctagaaattttagcgaatgacatgcttaaaactatgtatgatgcaaatggcattggtttggctgcaacacaggttgatttccatgttcgacttgtagttatggatatttcagaggataggaatgatccaaaaatatttgtaaatccagtatatagggtgctcgatgatcataaattgttcgaatttgaagagggttgtctttcaataccaggatttaatgaaattatttcaagacctgacaaaattgaattgacttggcaagatttaagcggaaaggaacataaagattatcctgtaggcctcttaacagtatgtatacagcatgaaatagatcacttagaaggtaagttgatggttgattatgtaagtgcattaaaaagagatagagtaaaaaaaagacttttaaaagaatttaacagaaaataac

SEQ ID NO: 265418 - DNA, 610 bp, Unknown
  Bacterial polypeptide expressing nucleotide sequence isolated from the Sargasso Sea
ttgcctggcaattttgctcaacttgcaaaaaatgcagaaaaaaagaagcccttaatttcagtttcgaaagaacctgtcaagaatccccctttgaaggtatatcaactggggcacgaggctttaagaactccagctaatcgtatcgtcaaagttgatgattcaattagaaagttagtgaaagatatgctcataactatgtattcatcaaaaggtattggtttggcagcgcctcaagtaggaatacaaaagagattgttagttattgatttaaattttgaagatccaaatgccccaccgatggtatttataaatcctgaaataatttcatcaagtgcaagcttagatacatatgaagaaggttgtctaagtatccctggtgtttaccttaatgttttacgaccctcctcaatcaaattaagttttcgagatgaaatgggtagaccaaaaaaaatgaatgcagatggtctaatggcaagatgcattcagcacgaaatagatcacctaaatggtgtctgttttgttgataaagtatctgatgaagaagagctgaaaaaacaattaaatgaaaataacttcaatcatagcgatgtaataaaagaaactaattaaa

SEQ ID NO: 265419 - DNA, 493 bp, Unknown
  Bacterial polypeptide expressing nucleotide sequence isolated from the Sargasso Sea
atggctgtactcgatattctgacaattcccgatgagcgtctaaagcgcaaagcacaacccgtaaaagacattgaagcgattcagggatttatcgatgatttaatcgaaaccatgtaccacaccgacgacggtatcggtctggcctcgacccaagtgggcagcacagatgcggtgattgtgatcgatttatccgaaaatcgcgaccaacccttagtgctgattaatccagagattgttgaaaagtctggcgaatacgtaggtgaagaaggttgtctttctatcccaggttaccgcgcaaaagtcactcgttttgaaaaggtcaaagttaccgccttagatagacaaggcaaagcgattgaaatcgaaaccgatgactttttagccattgttttgcaacacgaaattgaccatttacacggtaaagtgtttatcgaacatttatcggcattaaagcagcaaatcgcgttgaaaaaagtgcgtaaatacgcctaag

SEQ ID NO: 265420 - DNA, 618 bp, Unknown
  Bacterial polypeptide expressing nucleotide sequence isolated from the Sargasso Sea
catgtacgacacgatcatccgcggcggccgcgtctcgaccgccagcgataccttcgacagcgacatcgcgatccgcgacggcaagatcgtggccctcggccatgatctgggcgaggcggaggaggtgatcgacgcctcgggcctttgggtgctgcccggcgggatcgacagccacgtgcatatctcccagccctcgggcgaagggatcgtcatggcggatgatttcgaaaccgccacccgctccgccgtgatcggcggcaacacgatgctcctgcccttctgcctgcaggaacgcggcgacagcctgcgacaggcggtcaccgactatcacgccaaggccgagggcgcctgctacaccgacgtctcgttccacctgatcatcaccgatcccacgccctccgttctggggcaggaactgcccgcgctcgtggcggacggctatacctccttcaaggtcttcatgacctacgaaggcatggccctgaccgacatggaaatgctcaaggtcatggccgtggcccgcgacaccggcgccctcgtcatggtccacgccgagaactacgacatgatccgcttcatgaccgagcagctggaggccgcggggaagaccgcgccgcg

SEQ ID NO: 265421 - DNA, 775 bp, Unknown
  Bacterial polypeptide expressing nucleotide sequence isolated from the Sargasso Sea
acttgggctgctgcggtgggggggacaaccatgttagtggatttttgtcttcctggtgaagatggtagtttagttaatgcagttaatgagtggcatagaaaatctaaaccacaaatttgttccgatattggttttcatatggcaataacaggttggaatgagcaaatatttaatgaaatgccaaaagttttagaaatgggtgtaaattcatttaaacattttatggcttataaaggggccttaatggtagaagatgatgaaatgtatgcatcttttcagagatgtgctgccataggtgctttaccaatggttcacgctgaaaatggggatattgttgctgaattgcaaaaaaaatatctagaacagggtataactggtccagaaggacactcattttctcgtccgcctgaggtagaaggagaagctactaatagagctattatgatagctgacgctgcaggtgtcccactttatgtagttcatgtatcttgtgaacaaagtcatgaggcaattagaagagctcgacaaaaaggaatgagagtttatggcgaaccattaatacaatttctaactcttgatgacagtgaatatctaaataaagactgggaatacgccgctagaagagtaatgtccccaccttttagaaacaagatccatcaagatggactttgggccgggttacaagctggttcgcttcaagtagtagcaacggatcatgctgcattcacaactgatcagaaaaaaatgggcgttgataattttactctcataccta

SEQ ID NO: 265422 - DNA, 889 bp, Unknown
  Bacterial polypeptide expressing nucleotide sequence isolated from the Sargasso Sea
catatggctataacaggtttgaatgagcaaatatttaatgaaatgccaaaagttttagagatgggtgtgaattcatttaaacattttatggcttataaaggcgcccttatggtcgaagatgatgaaatgtatgcttcatttcagagatgtgctgctataggagccttgccaatggttcatgctgaaaatggagatattgtagctgaattacaaaaaaaatatcttgatttaggtattactggtcctgaaggacattctttttcacgtcctccagaagtagaaggagaagccactaatagagctattatgatagcagatgctgctggtgtaccactttatgtagtgcatgtatcttgtgaacaaagccatgaggcaataagaagagccagacaaaaaggcatgagagtttatggagaaccattaattcagtttctcacacttgatgacagtgaatatcttaacaaagattgggaatacgctgcaagaagagtaatgtcaccaccttttagagataagatacatcaagatggtctttgggctggtttacaagctggttctcttcaggtagttgcaactgaccatgcggcattcacaactgatcagaaaaaaatgggtattgataattttactcttataccaaatggtactggtggtttggaagaaagaatgtctgttttatggactaaaggagttgaaacaggaagattaactaggaatgagtttgttgctgctacttcaactaatattgcaaaaattctcaacgtttatcctagaaaaggaagcctagttgaaggtgctgatgcagatattgttgtttgggatccaaaaatatcgaaaacaatatcagtggcgagtcataaatctgttcttgattataatgtttttgaag

SEQ ID NO: 265423 - DNA, 919 bp, Unknown
  Bacterial polypeptide expressing nucleotide sequence isolated from the Sargasso Sea
ggcgtataaaggtgcattgatggttgaagatgatgaaatgtacgcttcttttcagagatgtgcggctattggtgctttgccaatggtgcatgctgaaaatggtgatattgttgctgaacttcaaaaaaagtatttagaagaaggaataactgggcctgaggggcatgccttttcacgacctcctgaggtagaaggtgaagctactaatagagcaattatgatagctgatgctgcaggcgttcctctctatgtagttcatgtttcttgtgaacagagtcatgaagcaattagaagggcccgacaaaaaggaatgagagtatatggggaaccattaattcaatttcttacacttgatgatagtgagtatctaaataaagattgggaatatgctgctagacgagtaatgtcaccaccttttagagataagatccatcaagatggattgtgggctggattacaagctggttctcttcaggtagttgcaactgatcatgctgcatttacaaccgatcagaaaaaaatgggtattgataattttactcttatcccaaatggtacaggtggattggaagagagaatgtctgttttatggactaaaggagttgaaactgggagattaactagaaatgaatttgttgctgctacttcaactaacatagcaaaaattcttaatgtttatcctagaaaaggtagtttggtagaaggagctgatgcagacatcgttgtgtgggatccaaaaatatcaaagacaatatctgttgcgagtcataaatcagttcttgattataacgtttttgaaggatttcaagtaaatgctcagccaagatatacaatgtcaagaggcgaggttatttgggcttggggtaaaaattctatgccgaatcctggaagaggtaaatttattcctcgtcctggtttt

SEQ ID NO: 265424 - DNA, 1459 bp, Unknown
  Bacterial polypeptide expressing nucleotide sequence isolated from the Sargasso Sea
catggcaatcctgattcgtggcggcaccgtggtcgatgcggaccgttcctaccgcgcggacgtgctctgcgcagccccggaggacggcggcacgatcctgcagatcgccgggcagatcgatgcgccggccggcgcgaccgtcgtcgatgcgcacgaccagtacgtgatgccgggcggcatcgatccgcatacgcacatggaactgccgttcatgggcacgaccgcgagcgacgatttctactcgggtacggccgccgggctcgcgggcggcacgacgagcatcatcgacttcgtgatcccgagcccgaagcagccgctgatggacgcgttccatgcctggcgcggctgggccgagaaggcggcggccgactacggcttccacgtggccgtgacgtggtgggacgagagtgtgcaccgcgacatgggcacgctcgtgcgcgaacacggcgtgtcgagcttcaagcacttcatggcgtacaagaacgcgatcatggccgacgacgaggtgctcgtgaacagcttctcgcgttcgctcgaactcggcgcgttgccgaccgtgcatgcggagaacggcgagctcgtgttccagttgcagaaggcgctgctcgcgcgcgggatgacggggccggaggcgcatccgctgtcgcggccgccggaggtcgagggtgaggcggcgaatcgtgcgatccgcattgcgcaggtgctcggcgtgccggtgtatatcgtgcatgtgtccgcgaaggacgcggtcgatgcgatcacgaaggcgcgcagcgaagggctgcgcgtgttcggcgaggtgctgccgggccatctggtgatcgacgaggccgtctatcgcgatccggactggacacgtgcggccgcgcacgtgatgagcccgccgttccgctcggccgagcaccgcgaggcgctgtggcgcgggctgcaggcagggcagctgcatacgacggcaaccgaccactgcgtgttctgcgcgtcgcagaaggcgatgggccgcgaggatttcacgaagatcccgaacggctgcggcggtgtcgaggatcgcatgtcggtgctgtggcatcacggcgtgaatcatggccgcatcacgccgaacgagttcgtgcggatcacgtcgacgaacgccgcgcagatcttcaacctgtatccgcgcaagggcgccgtgcaggtgggcgccgatgccgacctcgtcgtgtgggacccggccgcgaccaggacgatctcggtgaagacgcatcaccagcaggtcgatttcaacgtgttcgaggggatgaccgtacaaggcgtcgcaacccacacgctcacgcgcggcgcgctcgcgtgggccgacggcgatctgcgtgccgtgcgcggcgcgggccgctatctgaagcgcccgccggcagccagctactacgaggccgcgcggatcgcgaaccggctgcgcgaaccgcatccggtcgagcgcgccggttga

SEQ ID NO: 265425 - DNA, 1456 bp, Unknown
  Bacterial polypeptide expressing nucleotide sequence isolated from the Sargasso Sea
aatgtcgaaggtaattaaaaatggaaccgttgtaactcatgatttgacttacaaagctgatattttgatcgaaggttcaaaaataagtgagatcggacaaaatctttcaggtgacactgaactggatgcaacagattgctatgttatgcctggcggtattgatccacacacccatttggaaatgccctttatgggaacgtattcaagcgatgatttcgaaagtggtactcgagcaggtttggccggcggaactacaatggtagtggattttgcttttccaaaccaaggagaaagtttgcttgatgctataaaacgctgggataataaatctacaagggcaaattgtgattactcttttcatatggccgttacctggtggggtgagcaggtattcaatgatatgaaaacggtaattgaagagcggggcatcagcacttttaagcacttccttgcctacaagggtgccttaatggtgaatgatgatgaattgtatgcatcattttcacggttggcagagcttggtgggattgccatggttcatgctgaaaatggcgatgtcgtagcagagctaagcgcaaaacttttggccgaaggtaataatggtcctgaagctcatgcttattcccgccccagccaggttgaaggtgaggcaacaaatcgcgctattatgattgctgatatggctggtgttccactttacgtcgttcatacctcttgtgaagagtctcatgaagcaattcgccgcgctaggcaggctgggaagcgagtttggggtgaacctttgatacaacatttaactcttgacgaaagtgagtattttaacaaggactgggatcacgctgctcgtcgggttatgtcccctccgtttagaaataaaatgcaccaagatagtttatgggctggtctacaagcaggatctttgagtgttgttgcaactgatcattgtgcttttacaaccgaacaaaaacgttttggcgtaggtgactttactaaaattccaaacggaacaggtgggcttgaagataggttaccgatgttgtggacccatggtgttagaactggccgacttaccatgaacgaatttgttgcagttacttccacaaacatagccaaaatattaaattgctatcccaaaaaaggagccatattagttggagcggacgcagatttgattgtctgggatcctgaaaagtcgaaaacgattaaggcatcgtctcaacaatcagcaattgactataatgtttttgagggtcacaaggtaaccggattgcccaggtacactttaaccagaggttatgtagcgatttctgatggcgaagttaatactaaagagggtcacggtgaatttgttgcgcgaaaaggtaacacaccaataaaccaagctctttcaaattggaaagatcttacatctccaactccggtgaagcgcactgggatacctgctacaggtgtttaa

SEQ ID NO: 265426 - DNA, 1459 bp, Unknown
  Bacterial polypeptide expressing nucleotide sequence isolated from the Sargasso Sea
aatgagtactgttataaaaggtggaacaattgttacatcagatttaacttttcaatccgatgttttaatagagaagggaaagatagcctcaattggtaaaaatctatcaggtgataaaatattagacgctaagggatgttatattatgcctggtggtattgatccacatacgcatatggagatgccttttatgggcacattttcagctgatgactttgagtctggaactaaagcagctgtttcaggtggaactacaatggtggttgacttttgtttaccatcaccagatcaatctcttttgagtgctttaaatggatggcacaataagtcaactaaagctgtttgtgattattcttatcatatggctataacttcatggagagaagaaatcttcaatgatatggaggaggttgttaaaaacaagggcattaatacttttaaacatttcatggcttataaaggtgctttaatggttgatgatgatgagatgtttgcttcatttcaaagatgtgctgagcttggagcaatgcctcttgttcacgctgaaaatggagatgtggttgcagcacttcaatcaaaacttttagccgaaggtaataatggaccagaaggacacgcttattcacgtccgcctgacgttgagggagaagcatgtaatagagcaataatgttagcagatatggcaggagttcccttatatattgttcacgtttcctgtgagcaagcacatgaagctataagaagagcacgtcaaaatggtaaaagagtttttggtgaaccattaatccaacatttagtattagatgaaggagagtatcaaaataaagattgggatcacgctgctagaagagttatgtcgcccccatttagaaataagttacaccaagattcactttggagtgggttagccgcaggaagtcttcaagttgtagctacagatcactgtgcttttacaacagaacaaaagcgaatgggtcttggcgactttacaaaaattccaaatggcacaggtggtttggaggatagaatgccagttttatggacttatggtgttgaaacaggaaggcttaccatgaatgaattcgtttcagtaacttcaacaaatattgcaaaaattcttaatatctatccacaaaaaggtgcaataagagagggttctgacgcagatataattatttgggatccaaagtctgagaaaacaattatgagttcaactcagcagtcagttattgattataatgtttttgaaggaataaaggttaaaggacttcctagatttactctttctagaggtagattagctgctgaagaaggtaaggtcttggccagtcctggagatggtgagtttatctctagagaacccttttcagatgtaaataaagctctctcaaaatggaaagaattaacatctccaagaaaagttgaaagaaaagctgaaaatatgccagctggtgtctaa

SEQ ID NO: 265427 - DNA, 853 bp, Unknown
  Bacterial polypeptide expressing nucleotide sequence isolated from the Sargasso Sea
aatgagtaaagtaattaaaggcggaacggtctgcactgccgacaggacctggaagactgatatactgatcgagggagaaacaattaaacaaattggggaaaaccttaaaggagaggaatatatagatgctgaaggcgcctatgttatcccgggcggtattgacccacatacacacctagagatgccatttatgggaacgactgctgcagaaacttttgaaacgggcacctgggcagcagccgctggtggaactactatgattgttgacttttgccttcctggagcagatggaagtataaaaaatgctataaacgagtggcatagaaaatcagccccacaaatatgctctgatgttggctaccacatggcaataaccgggtgggatgagaatgtatttaatgaaatgaatgatgctgtcaaaatgggagtcaacagctttaaacattttatggcctataaaggtgcgttaatgattgaagacgatgaaatgtttgcaagctttaaaagatgcgcagcgattggggctctccctatggttcatgcagagaatggtgacctcgtagcagaactgcagcaaaaatattttgatttgggaattactgggcctgaaggtcatgcttactctagacctccggaattggaaggtgaagcagcaaatagggctataaccattgctgatactgctggagttccactttatattgtacatgttagttgtgaacaaactcatgaagcgataaggcgtgcacgacagaaaggtatgcgcgtatatggggaaccattaatacaatttttgactttagatgaatcagaatattttaataaagactggaaccatgctgcaagaagagtg

SEQ ID NO: 265428 - DNA, 1096 bp, Unknown
  Bacterial polypeptide expressing nucleotide sequence isolated from the Sargasso Sea
aatgactaaagtaataaaaggtggaaccattgtaacagcggacagagagtggaaagccgatatattaatagaaaatgaaaagatcaagcagattggggaaaatctaaaaggggatgagaccattgacgccgaaggcgcttatgtgatacccggcggaatagacccgcatacgcaccttgagatgccatttatgggaactaccgccgccgagactttcgaaacaggtacctgggcagctgcagttggcggaacaacaatgttagtggacttctgtcttccaggtgaggatggaagtttggtaaatgccgttaaggagtggcatagaaagtcagagcctcaaatttgttctgacatcggttatcatatggcagttacaggttggtctgaacagatttttgatgatatgccaaaggtagttgagatgggagtaaattcattcaaacattttatggcttataaaggagccctaatgattgaagatgatgaaatgtttgcatcctttaaaagatgtgcagctatcggcgctctgcccatggttcacgccgaaaatggtgatattgttgcggagcttcaacaaaaataccttcaagaaggagtaactggtcctgaagggcatgcttactcaagacctccggaggtagagggcgaggctgctaatagagcgataatgatagccgatgccgcaggagtaccgctatatgttgttcatgtatcttgtgagcaggctcatgaggctattagaagagctaggcaaaaaggtatgagagtttttggtgaaccccttattcaatttctaacgctagatgagagcgaatactttaataaagattgggagcatgccgcaagacgggtcatgtcgcctccctttagagacaaatcgcatcaggacggattatgggctggtcttcagtctggatccctacaagttgtcgctacagaccatgccgcgttttcgacggagcaaaaaagaatgggagtaaatgacttcactaagattccaaatggtagcaacgggctggaggaaagggtatccgttctttggacagaaggcgtagaaacgggccgtttaactcgacaggagtttgtcgcaatactt

SEQ ID NO: 265429 - DNA, 891 bp, Unknown
  Bacterial polypeptide expressing nucleotide sequence isolated from the Sargasso Sea
gctaaagtagtggatatgggtgtaaattcattcaagcattttatggcttataaaggtgcattgatggtagatgatgatgaaatgtttgcatcatttaaacgatgtgccgctattggtgccctacccatggttcacgctgaaaatggtgatatcgtggctgagctgcagaaaaagtatttagagcagggaataacaggtcccgagggacatgcttattctcgacctccagaagtagaaggagaagctgccaacagagccattatgatagcggatgctgcaggggttccgttatatattgttcatgtatcttgcgaacaagctcatgaggcaattcgaagagcacgccaaaaaggtataagggtttatggtgagccattaatccaatttttaacgttggacgagagcgagtatttcaataaagattgggcgcatgctgcgcgacgggtcatgtctcctccttttagagccaaagagcatcaagatggactttgggcgggcttgcaagcgggatctttacaagtcgttgctactgaccatgcagcgtttacttctgatcagaaaaagatgggtgttgacgattttaccaaaatacccaatggaactggtgggctagaagaacgactggcggttttgtggactgagggtgttgaaactgggagattaactcgttcagaattcgttgcagcaacgtcaacaaatattgctaagattctgaatgtatatccaaaaaagggagccatagtagagggagcagacgctgatttggtggtttgggacccttccatatcgaagactctctcagcatccactcaaaaatctgttttggactataacgtttttgagggcttcgaagtaaaagctcaatcgagatttaccctttctaggggtgaa

SEQ ID NO: 265430 - DNA, 1408 bp, Unknown
  Bacterial polypeptide expressing nucleotide sequence isolated from the Sargasso Sea
atggcagaattagacacgataattgagaatgggttggttgtttcagaaaacgaaacaaagaaactaaatattggaataaaagaacaggaaatagcttatttaggtgatgaaaatttagaagcaaaaactaaaataaatgcagaaaatctttttgtactgcctgggggtgttgatcctcatgttcatgttgaccaaccatcaggaccggatgttgaaatggctgataattttcagtcagcaactaaatcagctgcagctggaggaaatacaacaatcataccttttgcgatgcaagtcaaaggagagtcattgagaaaatgtgttgaagattatcataaaaaagctaatggaaatttgtatgttgatacctcattccatttaataataagtgaccctacccctcaagtgttaggacaagaacttccagcactttcaaaagatggatatacatcttttaaagtttttatgacttatgatgaccttgttcttaatgacaaagaactattagaagtttttgaagttgcaaaacaacaaaaaactctagttatggttcatgctgaaggatatgatgcaataaaatatttaactaaaaaattagaagatgaaggtaaaactgctccctattatcatgaaatatctaggcctgaaattgtagaaagagaggctacccatagagccataagtcatgctcaaatcataaatattcctatcgtcattgttcatgtttctggttctgaagctctgaaccaaattagatgggctaaagagaaaggtctcaaggtttttgctgaaacctgtcctcaatatatttgtttgactagagataatttaaagggactaaatatggattttgagggagcaaaatatgtttgttcgcctccaccaagagataaacaaagtcaagaagcaatttggtcaggcattattgatggaacctttgagttgttttcctctgaccattcaccttttagatttaaagactcgaaaggaaaagatagacctggtgctagaacctcttttagatgggttccaaacggtatacctggcgtagaaacaagacttccaattttattttctgaaggtgtatccaaaaatagaatttcaattgagagatttgtagaattaacctcaaccaatcctgccaaaatgtatggtatgtatcctaaaaaaggtgtaataaaaattggttctgatgcagacttaacgatatgggatccaaatttgaaaaaaacgataaagcaagaattcttaaatcatggttcagactatactccttatgagggactggatattaccggatggccattacaaacttggttaagaggaaagtgtatttttaataatggtaccttttcaactactaaaaataatggtgaatatattaatagggactattgttctttgtaaa

SEQ ID NO: 265431 - DNA, 919 bp, Unknown
  Bacterial polypeptide expressing nucleotide sequence isolated from the Sargasso Sea
aatgttagatcttataattaaaaacggacaatgttacatcaatggtgaattaaaagatgttgatgttgctataaaagatggaaaaattcagctgattggtcaaatttcagaagaagcaaaagagataatcaacgcagaaggtcacacagtactacctggttgcatagatacccaaacacattttagagaaccaggatcaacagatactgaggatcttcattcaggaagtagagcagcaattgcagggggtattacaagtgtatttgaaatgcctaatacaaatccaccaacttctaatatgaaggaatttcaaagaaaattagatctcgctaaaaatagaatgtattgcaactatgctttttattttggagcaacagctgacaatgcggatgatttagcaaatctacagggtttagaagggtgctgtgggattaaactttttgcaggatcttctacaggaaatttgttggtcgcagaagaaaacgacatagataaggtttttcaaaatgcttcaaaagtagtagctgttcattctgaagatgaagcaattttaaaaataaacaagaagttaattaaagagggtgatgttcatacccatccagtttggagaagtgcagaatgtgcaatagcatccaccagaaggattgttcgaattgcagaaaagcataataaaaaagcccatgtacttcatattacaacaaaagaggaaattgattttctatcacaacacaaaggaaatattacatttgagattactccccagcatttaactctctatgctccagaatgttatgataagcttggtacttatgctcagatgaacccaccactaagagacaaatctcattatgatagattgtggtatggagtaagaaataactttaatgatactattgggtcagacccatgctcctcaatt

SEQ ID NO: 265432 - DNA, 788 bp, Unknown
  Bacterial polypeptide expressing nucleotide sequence isolated from the Sargasso Sea
aatgcccaataccaatccacctacgtcaactaaagtagagtttcaaaaaaaattagatcttgcaaaaaacagaatgtattgcaattacgctttttattttggtgcaacagctgacaatgcaaatgagttagcagatttagaaaatttagagggttgctgtggaattaaactttttgctggttcatcaactggcaatcttttagttgcagaagaaaaagacattgaaaaagtatttcaaagtagttcaaaagttgttgctgtgcactcagaggatgaagctattttgaatattaataaaaaattgattaaaaagggggatgttcattcacacccagtttggagaagtgtagagtgtgcaatctcatccactaggagaatagttagaattgcagagcgatataacaaaaaagctcacgttcttcacattacaactaaagaagaaatagactttttatcacaacataaaggcaatattacctttgagataactccacagcacttaacaatctatgcgccggattgttatgataaacttggaacttatgctcagatgaatccgcctttaagagataaatctcactatgatagattatggtatgcggtaaaaaataattttaatgatactattggatcggatcatgctcctcatttaaaagtaaataaagagaaagaatatccgaactcaccatctggaatgccaggagttcaaacattaatgccagtaatgcttaatcatgttaacgatggcaaattatctttaaatcatttaattaaacttgtatgtgaaa

SEQ ID NO: 265433 - DNA, 861 bp, Unknown
  Bacterial polypeptide expressing nucleotide sequence isolated from the Sargasso Sea
gaagctgaagaaatactaaacgcagaaggtcaaactgttctaccaggatgtatagatactcaaactcattttagagaaccaggttcaaccgatacagaagatcttcactccggaagtagagctgctattgcaggtggaatcactagtgtatttgaaatgccaaatactaatccaccaacatcaaccaaagtagaatttcaaaaaaaattagatctcgccaaaaatagaatgtattgcaattatgctttttattttggtgctacagctgataatgcaaatgaattagcagatttaaacaatctagaaggttgttgtggaattaaactttttgcaggctcttcaactggtaaccttttagtagcagatgaaaaggatattgaaactgtatttaaaaatagctcaaaagttgttgcggttcattcagaggatgaagaaattttaaatactaataaaaaattaattaaaaatggtgatgtacattcccatcctatttggagaagtgaagaatgtgcaatttcctctacaagaagaatagttagaattgcagagcgctataataaaaaagctcatgttctccatataacaacaaaacaagaaattgattttttatcacaacataaaggcaatattacttttgagataactccccagcatttaacgatttatgcaccagattgttatgacaaactaggtacctacgcgcagatgaatcctcctttgagagacaagtctcattacgatcgattatggtatgcggttaaaaataatattagtaacaccataggctctgaccacgctcctcatttaaaggcaaacaaggataaagaataccccaattcaccatcagggatgccaggcgtc

SEQ ID NO: 265434 - DNA, 196 bp, Unknown
  Bacterial polypeptide expressing nucleotide sequence isolated from the Sargasso Sea
atgagcgaaaaagagttcatcattagaaagcctgatgactggcatctccatcttcgggacggggaaatgcttgcttctgttatcaagcattcagcagctaatttcgagcgcgccatcatcatgccaaatctggtgccgccggttgtcatgacggacgatgcaatcgcctacaaagagcgtataaatcaggtcattc

SEQ ID NO: 265435 - DNA, 799 bp, Unknown
  Bacterial polypeptide expressing nucleotide sequence isolated from the Sargasso Sea
tttatttgagatgcccaacactaaccctccaacagcaaatttaatagagtttgaaaaaaaattacaagctgcaaaaaatagaatgcatagtaattatgcattttattttggagcaacccctcaaaatactgaacaacttgctcaacttaaaaatgttgaaggttgttgtggagttaaactttttgcaggatcatcaacaggtaatctgttggtggataaagaagcggatatcgaaaaagtgatttcaagtagtgacaggatagtttcaattcactctgaggatgaagatattattaaattaagaaaaaaatttatcagacaaggagatgttcactctcaccctgaatggagaaatgtggaatgtgcgatgtcctcaactcgtagagttgtaaaaattgcagaaagatatgataaaaaaattcatgtcttacatgttactactaaagaagaggtcgattttttagctatgcataaaaaaaatgttacgtttgaaacaactcctcaacatttaactttgtatgcaccagattgctacgacaaattaggcacttacgctcaaatgaacccacctttgagatcgaaagatcattacgatcgtctgtgggtagctataaaaaataatgttgtagatgttcttgggtcggatcacgctcctcacttaaaaattaataaagacaaagaatacccaaacactccttctgggatgccaggtgttcaaactatttttccagttatgattgatcatgtgaacaatggaaaacttgagttaaatcaactcataaatctgatgtgtgaaaac

SEQ ID NO: 265436 - DNA, 898 bp, Unknown
  Bacterial polypeptide expressing nucleotide sequence isolated from the Sargasso Sea
gatgttgaagggatgttgtggtgttaaattatttgcgggttcatcaacagggaacttattagtacataaagaggccgatatcgaaaaagtaatttccagtagtgatagaattgtttctattcactctgaagatgaagatattattaaacttagaaaaaaatttattaaaaaaggagacgttcattcacacgctgagtggagaaatgtagaagttgcaatgtcctctactcgaagggtggttaaaattgcagagcgatataataaaaaaattcacgtccttcatgttacgacgagagaagaagtagattttttagctatgcacaaaaaaaatgttactttcgaaaccacacctcagcatttaactatgtacgcgccagattgttacgacaaacttggaacttatgctcaaatgaatcctcctttaagaactaaagaacactatgatcgtttatgggtagcaattaagaataatgtagtcgatgtgctaggttccgaccatgctccacacttaaaagaaaataaagacaaagaatacccaaattctccttcaggtatgccaggagttcaaactatttttccagttatgttggatcatgtaaataatggaaaactaacactccaacaactgataaacttaatgtgtgaaaatccttgtaaaatttttggcattaaaaataagggctatctaaaagagggttatgacgcagatttaacagttgccgatatgaataaagagtttgttatcaaaaatgagatgatagcaagtaaatgtggatggacaccttttaacaatcataaagtaaaaggtttccctgtagctacaatcgtaaatggtcatttggtaatgtctaatggtaaagtggttgcggagtctaaaggaaaacctttaaagttttaa

SEQ ID NO: 265437 - DNA, 905 bp, Unknown
  Bacterial polypeptide expressing nucleotide sequence isolated from the Sargasso Sea
ggtaattagtaaggacagacctcgggtttatcagggaaaaaaaattaaaaaaattggtaaaattgaattaaatagttcaaaagtctttgatgcttcaaataaagtcattgttccaggtataattgatacccaagtgcattttcgtgaaccaggatcaacagacgcagaagatttagagagcggttctagagcagcagttctaggcggagttacttctttatttgaaatgcctaatacaaatccacctacttctaatttagtagagtttgaaaaaaaacttcaattagcaaaagatagaatgcatagtaattatgctttttattttggagcaactcctgaaaatacaaatcaattatcgcaactaaaaaatttaaaaggatgttgtggcgtaaagcttttcgcaggttcttctactggaaatttattagttgacaaggaggcagatattgaaaaagtaatttcaaatagcgatagaatagtttctattcactctgaagatgaggaaatattaaatttaagaaaaaaattcataaaaaaaggagatgtgcattcacacccggaatggagaaacgttgagacagcaatgtcctcaactcgtagagttgttaaaattgcagaacgatttaataaaagaattcatgtattacatgtaacaactaaagaagaagtagattttttagctatgcacaaaaaaaatgtgacttttgaaaccactcctcaacaccttacactgtttgccccagattgttatgataaattaggaacatacgctcaaatgaatcctcctttaagaacaaaggatcactatgataaattatggagtgctataagaaataatatcgtagacgttctaggttctgatcatgctccacatgttaaagctaataaacaaaaagaatacccta

SEQ ID NO: 265438 - DNA, 615 bp, Unknown
  Bacterial polypeptide expressing nucleotide sequence isolated from the Sargasso Sea
caactaaagaagaaattgattttttatctcaacataaaggaaatattacatttgagattactccacagcatttaactctttatgctccagattgttatgacaagcttggcacttatgctcagatgaacccacctttaagagataaatctcattatgatagattatggtatggagtgagaaacaacttcaatgatacgattgggtcagatcatgctcctcatttaaaggaaaacaaagacaaggtgtatccaaatacaccttctggaatgccaggagttcaaactttaatgcctgtaatgctaaatcacataaatgatggaaaattatctctaaaccaattgatgaactttgtttgtgaaaatccagtgaaaatttttggaattaaaaacaaaggatttatcaaagaaggttatgatgctgactttacaatagtagatatgaataaaataattgaaattaaaaatgaaaatattgagagcaaatgtaaatggtcaccgtttaatggatttaaatttaaaggaacaccaacccatacaattattgcaggaaaaattaaaatgcaggatgggaaaattttaggtgatcctgatggaaaacctttgcagtttagctaag

SEQ ID NO: 265439 - DNA, 376 bp, Unknown
  Bacterial polypeptide expressing nucleotide sequence isolated from the Sargasso Sea
aatggctcttcgttcagcagtttgttcgggaaacgagaagttcttcctcggtactgattcggcaccgcacctcgacggagcgaaggaaaatgcatgcggttgcgcgggcatatacacctcggttaacaccttaagctgccttgcgcatgtatttgaggatgagaatgcattggataagttagaaggctttgtgtcagttcatggaccatctttctacaaattaccggtcaacagtggcctgctgaaattcaggaaactcagcgagcctctttcttatcctgaaaagattcgtatcagaaatgatcaagtcaccgtgtttgatccaggttttccattgttatggtcttatgaaacagtaaacaaagaggacgattga

SEQ ID NO: 265440 - DNA, 646 bp, Unknown
  Bacterial polypeptide expressing nucleotide sequence isolated from the Sargasso Sea
tataataaaaaagctcatggttcttcatataacaactaagcaagagattgattttttatcacaacacaagggaaatattacttttgagattaccccgcaacatctaacaatttatgcaccagattgttatgacaaacttggaacctatgcgcagatgaatcctcctttaagagataaatcccattacgatagattgtggtatgcggttaaaaataatctcaatgataccataggatcagaccacgctcctcatttaaaaataaacaaagataaagaatatcccaattcaccttcaggtatgccgggagttcaaactttaatgccagttatgttaaatcatattaatgatggaaaactttcacttactcaattgataaatcttgtttgtgaaaatccagttaagatttttggaataaaaaataaaggatttattaaagaaggatttgatgctgacttcacaatagttgatatgaataaaaaaattgtaattaaaaatgaaaatattgagagcaaatgcggatggtctcctttcaatggttttgagttcaaaggaacacctgttttaacaattatagctggaaaaataaaaatgcaggatggcaagataattggtgatcctgatggtaaaccaatgaaatttaaataa

SEQ ID NO: 265441 - DNA, 173 bp, Unknown
  Bacterial polypeptide expressing nucleotide sequence isolated from the Sargasso Sea
tctgcaaaccccggacgactggcacttacattttcgcgatggcgatatgctgaaagaaacagtggcagctactgcccgttgttttaagcgcgctatagttatgcccaatcttgttcctcctgtcaccaatgcagcagaagctttagcttataaagaacgtattctggccgcac

SEQ ID NO: 265442 - DNA, 826 bp, Unknown
  Bacterial polypeptide expressing nucleotide sequence isolated from the Sargasso Sea
aaaaagtattttgagtatgcatcaaaagtagtctcagttcactcggaagatgaagagattttgaatttaagaaaaaaattaagagaaaaaaataatgttaatactcatccaatttggagaaacgaagaagttgcaatgtcttcgacaagaagaattgttaaaattgcaaataggctaaataaaaaagcacatattctacatgttaccacaaaagaggaagttgattttctatcacaacataagggaaatattacatttgaaattactccgcaacatttaactttacatgctcctgattgttatgacgaacttggaacctatgctcagatgaatccacctctaagagacaaatctcattatgatagattatggtatggagtaagaaataattttaacgatacaattggatctgatcatgctccacatttaaaagcaaataaagaaaaagaatatccaaattcaccatcagggatgcctggggtacaaactttaatgccagtaatgttaaaccatgtaaatgatggaaaattatcacttaatcaattaattaatcttgtttgtgaaaatcctgttaaaatttttggaattaaaaataaaggatttatcaaagagggatatgatgctgaccttacaattgttgatatgaacaaaacaattgagattaaaaattcaaatattgagagcaaatgtggctggtctccatttaatggatataaatttaagggaactccagttgcaactataattgatggaattgttaagatggaaaaaggaaaaattataggcgaccctgagggacaaccaattgtattcaaaaataaatagt

SEQ ID NO: 265443 - DNA, 834 bp, Unknown
  Bacterial polypeptide expressing nucleotide sequence isolated from the Sargasso Sea
tttagaaggttgttgtggtatcaaactttttgcaggatcttcatttggtaatttattggttgctgaagaagacgatatagataaggtttttcaaaatgcatcaaaagtagttgcagttcattctgaagacgaggcaattttaaatgtaaacaagaaattaataaaagagggcgatgttcatacgcaccctgtatggagaagtgtagaatgtgcaatagcatctacaagacgaattgttcgaattgcagaaaagcacaacaaaaaagctcatgtgcttcacattactacaaaagaagaaattgattttttatctcaacataaagggaatattacatttgaaattactcctcagcatttaactctttatgctccagattgttatgacaagcttggaacttacgctcagatgaacccaccattaagagataaatctcattatgacagattgtggtatggggtgcgaaataattttaacgatactataggatctgatcatgcacctcatttaaaagaaaataaagacaaggtatatccaaacacaccttcaggaatgccaggtgtacaaactttaatgcctgtaatgctaaatcatattaatgatggaaaattatctcttaaccaattgatgagctttgtttgtgaaaatccagttaagatttttggaattaaaaacaaagggtttattaaagaaggttatgatgcagactttacaattgtagatatgaacaaaacaattgagattaaaaacgaaaatattgaaagtaaatgcaaatggtcaccatttaatggttttaaatttaaaggaacaccaacacacacaattattgcaggaaa

SEQ ID NO: 265444 - DNA, 775 bp, Unknown
  Bacterial polypeptide expressing nucleotide sequence isolated from the Sargasso Sea
cattctgaagatgaggcaattttaaaagttaataaaaaattaattaaagatggtgatgttcactcacacccgttatggagaagtgtagaatgtgcaatagcgtctactagaagaattgtgcgaattgcagaaaagcataataaaaaagctcatgttcttcatatcactactaaagaggaaattgattttctatctcaacataagggaaacattacatttgagattactccacaacatttaactctttatgctccagattgctacgacaagcttggaacttatgctcaaatgaatccaccattaagagacaaatctcattatgatagattgtggtatggagtaagaaataatttcaatgatactattggatcagatcatgctcctcacttaaaagaaaacaaagacaaagtgtatccaaacacaccatctggaatgccaggagttcaaactttaatgcctgtaatgttaaatcatataaatgatggaaaattatccctaaatcaactgatgaactttgtttgtgaaaatccagttaagatttttggaattaaaaacaaaggatttattaaagaaggttatgatgcagactttaccattgtagatatgaacaaaactttagagattaaaaatgaaaatattgagagcaaatgtaaatggtcaccatttcatgggtttaaatttaaaggaacacctactcatacaattattgcaggaaaaaccaaaatgcaggatggaaaaattttaggtgaacctgatggaacccctttacagttta

SEQ ID NO: 265445 - DNA, 667 bp, Unknown
  Bacterial polypeptide expressing nucleotide sequence isolated from the Sargasso Sea
gattattaggattgcaaaaagacttaataaaaaagcacacatattacatgttacaacaaaagaagaagtagatttcctttctcaaaataaaggaaacataacttttgaaattactccacaacatctaacaatatatgcaccagattgttatgacaagcttgggacttttgcacagatgaatcctcctttgagagataagtctcattatgatagattgtggtacgctattcgaaataactataatgatactatcggttcagaccatgcaccgcacttaaaagaaaataaattaaaagaatatcctcaatcaccgtctggtatgccaggtgtgcaaacattattacccgtaatgctaaatcatgttaatgataaaaaacttactttagatcaactaattaaacttctttgtgaaaatccggtatctgtatttggtattaaaaataaaggatttatcaaaaaagattatgatgctgactttacaataatagatatgaaacgaacaattgaaataaaaaatgataatattcacagtaaatgtggatggagcccgtttgatggttataagtttaaaggttcacctgtttatacgattattaatggtgaaattaaaatgaaagatgatgaaattttgggagatccatctggtaaaccaattctttttgattga

SEQ ID NO: 265446 - DNA, 754 bp, Unknown
  Bacterial polypeptide expressing nucleotide sequence isolated from the Sargasso Sea
tacaaataaaaaacttattaaaaatggagatgttcatacacatccagtatggagaagtgttgagtgtgcattatcctctacaagaagaatagtaagaattgctgaaagatataataaaaaagcacatatccttcatataacaactaaagaggaagtagattttttatctcaacacaaaggcaatattacatttgaaattaccccccaacatttaacactttacgctcctgactgttatgacaaacttggcacctatgctcaaatgaaccctcctctaagagataaatcacattacgacagattgtggtatggggttagaaataattttaatgacaccattggatccgaccatgctccacatttaaaaacaaataaagataaagaatatccaaattcaccatcaggaatgccaggtgtacaaacattgttacctgtaatgttaaatcatgtaaatgatggaaaattatccttaaaccaacttattaatcttttgtgtgaaaacccagttaaaatttttggaattcaaaataaaggttttattagaaaagattatgacgctgattttacaattgtcgatatgaacaaaataattgaaatacaaaatgaaaaaattgaaagtaaatgtggttggtcaccatttaatggatacaaatttaaaggaacacctgttgcaacaattataaatggaaaaattaaaatgaaagatggcaatataattggtgatcctgagggagttccattaaaatttgaataa

SEQ ID NO: 265447 - DNA, 736 bp, Unknown
  Bacterial polypeptide expressing nucleotide sequence isolated from the Sargasso Sea
aaagggaatgttcactctcatccaatatggcgggatgaagagtgtgcaatttcatctacaagaaagattgtgaaaatcgcaaaaagattaggtaagaaagcccacattctacatattacaactaagcaggaaatagacttcctttctcagaataaaggtaatattacttttgagataacccctcaacatttaacgatatatgcacctgattgttatgataagcttggaacttatgcacaaatgaatccaccattaagagataaaagtcattatgatcgtttatggtatgcggtaagaaataattacaatgatacaattggctctgatcatgctccacatcttaaagtgaataaaaacaaagagtatcctgatacaccatcaggaatgccaggagttcaaactttaatgccagtaatgctaaatcatgtaaatgatggtaaattatctcttgaacaattaataaacctcgtttgtgagaatccagcaaaaatttttggcataataggcaagggatatattaaagaggactatgatgcagattttacaatcgtggatatgaacaaagttattgaaatcaaaaatgataaaattgaaagtaagtgtggatggtcaccttttgatggatataagtttaaaggaactccagtttacacaataataaatggagaggttaaaatgaaatatggagaaattattggtgaggcttcaggaaaaccgataagatttctggattaat

SEQ ID NO: 265448 - DNA, 851 bp, Unknown
  Bacterial polypeptide expressing nucleotide sequence isolated from the Sargasso Sea
ctacaagaagatttttgtacagcatctgaggccgcattgaatggtggagtgacccacacttgcgatatgccaaataacccaacgcctcctattgatgatgatagttatttaaaaaagctatcacttactttaaaggcgaactttcctttgtttttatatgcgggaataggtcccgaaacgaaacctttatcttttagggttccctataaagcttatatgggaccctctgttggtgaactattttttaaaaatgaacaggagttggatgattctctagaccgatacgtagggcagtatgttagttttcattgtgaagacccagagattctagaaaattgtaaggacctcccaactcatgagttgaggcggcctgttgaagcggagacggttgctacatctactgcgttgaggttaatagaaaaatacaaacttaaaggtaagctttgccactatagttctaaagatggtcttcctttaattttggaggcgaaaaataaggggttgcctgttgaatgcgaggtgacaccccagcatctttatttttcacaggaagagttttacgggagtcattatctttcatctgcagagcagaagaattggatgcaaatgaatccacctataaggtcaaaaaaagataaggaaggaatgcttgatgcttttcttcgaggcgatattgactacctggccactgatcatgcacctcactgccacaatgaaaaacaggaagggacaagtggtcttcctggattggatacttatggagcctttgtgacttggcttctcgtcgagaaaaaaatgaagcctgagcttgtttctcttgcttgtactgagaggccaggaaggttttgtaa

SEQ ID NO: 265449 - DNA, 738 bp, Unknown
  Bacterial polypeptide expressing nucleotide sequence isolated from the Sargasso Sea
ttattaaaaaaggagatgttcactcacatccagaatggagaaatgttgaatgcgctatgtcctcaacacgaagagtagtaaaaattgcagaaagatataataaaaaaattcatgtattgcatgttactactaaagatgaggtagactttttggcgatgcataaaaaaaatgtaacttttgaaacgactcctcaacacttaacgttatacgcacctgattgttacgataaattaggaacatatgctcaaatgaatccacctttaagatctaaagagcattacgatcgtttatgggtagcaataaaaaataatattgttgatgttcttggatcagaccatgccccacatttaaaggtaaataaagataaaacgtacccagaaactccctctggtatgcctggtgttcaaacaatatttccagttatgatagatcatgtaaacaatggaaaactaactctaaatcaactaattaatttaatgtgtgaaaatccctgcagaattttcggtattaaaaataaaggcttcataaaagagggttttgatgcagatttgacaatagttgatatgaataaagaggtcgttattaaaaatgaaatgatcgctagtaaatgtggctggacaccttttcataactacaaggtaaagggatttccagtaggaacaattgttaatggaattttagtaatgtctaacgggaaaatccttgttgagtctaaaggaaaacctttagagttttaat

SEQ ID NO: 265450 - DNA, 685 bp, Unknown
  Bacterial polypeptide expressing nucleotide sequence isolated from the Sargasso Sea
catagcatctactagaagaattgttcgaatagcagaaaaacacaacaaaaaagcccatgtgcttcatattactactaaagaagaaatagattttttatctcaacataaaggaaatattacatttgagattacgcctcagcatttaactctttatgctccagactgttatgacaagcttgggacttatgctcagatgaatccaccactaagagataaatcccattatgatagattgtggtatggagtgagaaataactttaatgatactatcgggtcagatcacgcccctcatttaaaagaaaataaagacaaggtatatccaaatactccctcagggatgccaggtgttcaaactttaatgcctgtaatgttaaatcacataaatgatggaaaactatctcttaaccaattgatgaactttgtttgtgaaaatccagtaaagatttttggaattaaaaataaaggatttattaaagagggctatgatgcagattttactattgttgatatgaacaaaacaattgagattaaaaatgaaaatatagaaagcaaatgtaaatggtcaccatttaatggtttcaaattcaaaggaagccctacccatacaattatttcaggaaaaattaaaatgcaggatggaaaaattttaggtgatcctgacggtacacctttacagtttagctaa

SEQ ID NO: 265451 - DNA, 403 bp, Unknown
  Bacterial polypeptide expressing nucleotide sequence isolated from the Sargasso Sea
catgacaaccctcactattcaaaccccggatgactggcatttgcattttcgtgacggcgatatgctgcgcgaaactgtaccggccacagcacgccagtttgcccgcgctattgtcatgcccaacctggtgccgccggttaccaccgctgccatggcagtggcttaccgtgagcgcattttggccgcccgcccaacaggcagcacctttcaacctctggttaccctatacctgaccgataaaaccagtgcccaggatattattgacgccaaagccgctggtgtggtggccgcgaagctatacccggccggtgccactaccaactccagccacggtgtcggcgcgttagacgccctatacccggtatttgaagtgatggccgagcaaggcatgctgctgttaatt

SEQ ID NO: 265452 - DNA, 902 bp, Unknown
  Bacterial polypeptide expressing nucleotide sequence isolated from the Sargasso Sea
attacaagcggcaaaaaatagaatgcatactaattatgcattttattttggagcaactccgcaaaatacagagcaacttgcgcaactaaaaaatgttgaaggttgttgtggagtaaagctttttgcaggttcatcaactggaaacttattggttgataaagaggcagatattgaaaaagtgatttctaatagtgacaggatagtttcaatccactctgaggacgaagatattattaaattaagaaaaaaatttatcagacaaggagatgttcactctcatcctgaatggagaaatgtagaatgcgcgatgtcctcaactcgtagagttgtaaaaattgcagagagatataataaaaaaattcatgtcttacatgttactactaaagaagaagtcgattttttagctatgcataaaaaaaatgttacctttgaaactaccccccaacatttaactttgtatgcaccagattgctacgacaaattaggaacttacgctcaaatgaaccctcccttaagatcaaaggatcattatgatcgtctttgggttgccattaaaaacaatgttgtggatgtacttgggtcagatcatgcccctcacttaaaaaaaaataaagataaagaatacccaaatactccctcgggaatgccaggtgttcaaactatttttccagttatgattgatcatgtgaacaatggaaaactagaattaagtcaactcataaatttaatgtgtgaaaatccatgtaaaatttttggaattaaaaataaaggctttataaaagagggttttgatgcagatttgacaatagttgatatggataaagaagttactataaagaacgaaatgatcgctagtaaatgcggatggacaccctttcataattataaagtaaaaggtttcc

SEQ ID NO: 265453 - DNA, 921 bp, Unknown
  Bacterial polypeptide expressing nucleotide sequence isolated from the Sargasso Sea
taaaaaaacagatattggtttatcaggtagtaagattaaaaagattggtaaaatcgaacataataactctaatgtttatgacgctaaaaataaagtagttctacctggcattatagatactcaagttcatttcagagagccaggatcaactgatgcagaagatttagaaagcggtagcagagcagcagtgttaggcggtgtaactgctttatttgaaatgcctaatactaaccctcctacatctaatttaattgagtttgataaaaagttaaaagcagctaaaaatagaatgcatagtaattatgctttttattttggagcaacatctgaaaataccaatcaacttgcaaatttaaagaatattgaagggtgttgtggtgtaaaattatttgcaggttcatctactggaaatttattagtagataaagaagctgacattgaaaaaataatctcaagcagcgatcgaatagtatctattcactccgaagatgaagaaataattaaacttagaaaaaaatttattcaaaaagggaacgtccattctcatcctgaatggagaaacgtagaatgcgcgatgtcctcaactcgcagagttgtaaaaattgcagaaagatatgataaaaagattcatgtcttacatgttactactaaagaagaggtcgattttttagctatgcataaaaaaaatgttacctttgaaactactccacaacatttaactttatatgcaccagattgttacgattcattaggcacatatgctcaaatgaacccacctttaagatctaaagatcattacgatcgtctttgggttgctatcaaaaataatgttgtagatgttcttgggtcggatcacgctcctcacttaaaaataaataaagacaaagaataccccgaatactccctcagggatgccaggtg

SEQ ID NO: 265454 - DNA, 787 bp, Unknown
  Bacterial polypeptide expressing nucleotide sequence isolated from the Sargasso Sea
tattgttggaggaattactagtgtatttgaaatgccaaatactaatccaccaacatcaactaaaatagaatttcaaaaaaaaatagatctcgctaaagatagaatgtattgcaattatgctttttattttggtgcaacagctgataatacaaatgaattagctgatttaaaaaatctagaaggctgttgtggaattaagctttttgcaggttcctcaaccggaaatctcttagttgcagatgaaaaagatattgaaaaggtttttcaaagtagctctaaagtagtggcagttcactcagaagatgaagcaattttaaatattaataaaaaattaattaaaaatggagatgttcactcgcatccaatttggagaagcgatgaatgtgcaatttcatcaacgagaagaatagttagaattgccgaactatataataaaaaagcacacattcttcacattacaacaaaacaagaaattgattttttatcacaacacaaaggtaatattacttttgagatcactcctcagcatttaactctctatgctccagattgctatgacaaacttggcaccttcgctcagatgaatcctcctttaagagacaaatctcattatgatagactgtggtatggagttaaaaataatttaaatgatacaatagggtcagatcatgctcctcatttaaaagaaaataaggaaaaagaatatccaaactcaccttcgggtatgccaggagttcaaactctaatgccagttatgctaaatcatgttaacgatggaaaattatct

SEQ ID NO: 265455 - DNA, 870 bp, Unknown
  Bacterial polypeptide expressing nucleotide sequence isolated from the Sargasso Sea
gatctaataatcaaaaatggacaatgttacatcgatggtgaattgaaaaatcttgatgttgctataaaagatggaaaaattcagcatataggtaaaatttcagaaaaagctaaagaagaaataagcgctaaagatcaaattattttaccaggatgtatagatacgcagacacattttagagaacctgggtcaactgatacagaagatcttcattcaggcagtagagcagcaattgtaggtggcataacaagtgtatttgagatgccaaatacaaatcctcctacatcaaacatgaaagagtttcaaaaaaaattagatctcgcaaaaaatagaatgtattgcaattatgctttttattttggagctacagctgataattctgaagatctagcgagtttgaaagatttagagggatgttgtggtatcaaattatttgcaggctcatcaactggcaatttactagttgctgaagagaatgatatcgataaagtttttcaaaatagttcaaaagttgttgcagtacattctgaagatgaagctattttaaatataaataaaaaattgatcaaaaaaggagatgttcatacccatccagtttggagaagtgtagaatgtgcaatttcatctacaagaagaattgtaaaaatagctgagcgttataacaaaaaagctcatgttcttcatattacaacgaaagaggaaattgattttttatcacaacataaaggaaatataacatttgagattactccccagcatttaactatgtattctcctgattgctacaatagacttggaacttacgctcaaatgaatccaccattaagggataaatcccattatgatagattatggtatgcagttagaaat

SEQ ID NO: 265456 - DNA, 476 bp, Unknown
  Bacterial polypeptide expressing nucleotide sequence isolated from the Sargasso Sea
aatgagagaattaggcatgcaaacgttaaccatcactactcctgacgattggcatcttcacttccgtgataatgagatgctagctgaaactgttcctgctacggcacgatgttttcagcgcgccattgtaatgcctaatttagtgcccccagtggttaatgctacaatggcgatggactacaaagcgcgtattgatgcagcgcgtcctgccggcagtagctttgaacctctaatgacactgtttctcactaacgaaacatcaccacaagatattgtcgatgcgaaaaatgcaggggtaactgcgtgtaagctttaccccgctggagccaccactaactccgatgctgcagtgaaagggattaaagccttgtatcccgtatttgaagccatgcaggagcaggggttactgctacttaatcacggagaagtgacagaaaatcacattgatatttttgaccgtgaaaaggtgtttatcg

SEQ ID NO: 265457 - DNA, 952 bp, Unknown
  Bacterial polypeptide expressing nucleotide sequence isolated from the Sargasso Sea
ataattgatacacaagttcactttcgtgaacctggatctacagatgcagaggatttagagagtggcagtagagcagcagtattagggggagtcacttctttatttgaaatgccaaatacgaatccacctacatctaatttaattgaatttgaaaaaaaacttctattagctaaagacagaatgcatagcaattatgctttttattttggagcaactcctgaaaatattaatcaattatctcaactaaaaaacttaaaaggatgttgtgggattaagctttttgccggttcttccacaggaaatttattagttgataaggaagcagatattgaaaaagtaatttcaaatgcagatagaatagtctcgatacactctgaagacgaagaaatattaaatttaagaaaaaaatttattagaaaaggagaagtacattcccatccggaatggagaaacagtgagactgcaatgtcatcaactcgtagagttgttaaaattgccgaacgatataataaaaagattcacgtattgcatgtaacaacaaaagaagaagtagattttctagcaatgcataaaaaaaatgtaacttttgaaaccacacctcaacatttaactttgtatgctccagattgctacgataaattaggaacgtatgctcaaatgaatcctcctttaagaacaaaagaccatttcgatagattatggacagcaattaaaaataacatcgtagatgtattaggctcagatcatgctcctcatacaaaagaaaacaaacaaaaagaatacccaaactcaccttctggaatgccaggagtacaaactatttttccagtgatgttagatcatgtaaacaataataagctttctttagaacaattaataaaattaatgtgtgaaaatccttgtaggatatttggaattaaaaacaagggatttattaaaccaggattttgac

SEQ ID NO: 265458 - DNA, 838 bp, Unknown
  Bacterial polypeptide expressing nucleotide sequence isolated from the Sargasso Sea
ggatcttgctatatagagggtaaatttaaaaatattgatttagctatatcaggaaataaaatcaaaaaaataggaaaaattgatctaaatagtagtaaagtttttgatgcatcaggcaaaattgttttgcccggcgcaattgatactcaagtccattttagagaacctggagctaatgatgcagaaaatttagaaagtgggagtagagcggccatagctggaggaataactgcagtatttgaaatgccaaatacaaatcctccgacatcaacctttaaagaatttaacaataaactcatagcagcaaaaaatagaatgttttgtaattatgcattttattttggtgctaccccaaataatatgaaagagttagcatcggtcaatactcttgaaggatgttgtggggtaaaactttttgctggctcttcaacaggaaacctattagtcagccaggaaaaagatatagagaaagtaatatccaacagcagcaagattatctctgttcattccgaagatgaaaatattctgttatctagaaaaaaatttattaaagaaggagatgttacttcgcaccctgtttggcgaaatgaggaatgtgcactcgagtccactaaaagagtagtaagattagctcaaaaacataaaaaaaaaattcatattcttcatgtttcaacaaaagaagaaattgatttcttttcagaaaagagggatggggtaacttttgaaattacaccacaacatttaactttgtatgcccctgattgttatgaaaatttaaaaacttttagtcaaatgaacccgcccttaagatctaaagaccactacgatagattatggg

SEQ ID NO: 265459 - DNA, 933 bp, Unknown
  Bacterial polypeptide expressing nucleotide sequence isolated from the Sargasso Sea
ccccggacaatatgaaagagttagcatcggtcaatactctcgaaggatgttgcggtgtaaaactttttgctggttcatcaacaggaaaccttttagtcagccaggaaaaagatatagagaaagtaatatctaacagcagcaagattatttctgtgcattcagaagacgaaaatattctgttatccagaaaaaaattcattaaagaaggagatgttacctcgcaccctgtttggcgaaatgaggaatgtgcactagagtccactaaaagagtagtaagattagctcaaaaacataaaaagaaaattcatattcttcatgtttcaacaaaagaagaaattgatttcttttcagaaaagagggatggggtaacttttgaaattacaccacaacacttaactttgtatgcccctgattgttatgaaaatttaaaaacttttagtcagatgaacccacctttaagatccaaagaccactatgatagattatgggatgctgtagacgaaactttagtgagcaccataggttctgatcatgccccgcatacaaaagaggaaaaaaatagaaaatatcctttgtccccatctggaatgccaggggtgcaaactttactacctgttatgcttgatcatgtaaataaaggaaaactaaaaatagaaaaattgattaaattagtttgtgaaaatccatgtaatttatttggaattaaaaacaaaggttatataaaagaaaattatgatgcagatttaactattgtggatatgagtaaagaagttgttattaaagataactggattgagagtaaatgtggatggacaccttttaataattacaaggtgaaaggattcccaatagctacaattgtaaacggggaaatagttatggaaaatagtaaaattatctcacccgccaaagggaaacctttagatttttaag

SEQ ID NO: 265460 - DNA, 917 bp, Unknown
  Bacterial polypeptide expressing nucleotide sequence isolated from the Sargasso Sea
aggcagtagagcggcaattgcaggaggaataacaagtgtattcgagatgcctaacacaaatcccccaacttctaatatgaaagagtttcaaagaaaattagatctagctaaaaatagaatgtattgtaattatgctttttatttcggcgcaacagctgacaattcagaagatttagcaagtttaaaagatttagtgggctgttgtggtatcaaattatttgcagggtcatcaactggtaatctactagttgctaaagaagacgacatcgataaggtttttcaaaatagctcaaaggttgtagcagtgcattctgaagatgaagcaattttaaatacaaataaaaaattaatcaaaaaaggagatgttcatacccatccagtttggagaagtgtagaatgtgcaatatcatctactagaagaattgttaaaattgcagaacgctataataaaaaagcacatattcttcacattacaacaaaagaagagattgattttttatctcaacacaaaggaaatattacatttgagattactcctcagcatttaactttgtttgctccggactgttataacaaacttggaacttacgcccaaatgaatccgcccttaagggataaatcgcattatgatagattatggtacgcagtaagaaataattttagtgacacaattggttccgatcatgctccgcatctaaaagcaaataaagataaagaatatcctaattcaccatctggtatgccgggtgtgcaaactttaattccagtaatgttaaatcatgtaaacgaaggaaaacttacactaaatcaattaattaatcttgtatgtgaaaatcctgtaaaaatttttggaatcaaaaataaaggatatatcaagaagaattttgatgctgatttttacattgtagatatgaaaa

SEQ ID NO: 265461 - DNA, 886 bp, Unknown
  Bacterial polypeptide expressing nucleotide sequence isolated from the Sargasso Sea
tatgcctttttactttggagctaccccagataacatgaaggagcttgcagcagtgaataccttggagggatgttgtggggttaaactttttgcaggatcatcaactggaaatcttcttgtaagtcaggaaaaagatatagagaaagttatatcaaatagtagcaaaattatttcagttcattctgaagatgaaaatatattgctatctagaaaaaaatttattaaagagggagatgtttcgtcacaccctgtatggagaaatgaggaatgcgcattagagtctaccaaaagagttgtaagaatagctcaaaaatataaaaagaaaattcatattcttcacatatcaactaaagaagaaattgatttttttgctgataaaaaagaaaatgtaacttttgaaatcacaccacaacatctaacgttatttgccccgaattgttatgaaaaattaaaaacttttagtcaaatgaacccaccattaagatcaaaagatcactatgacagattatgggatgcagtaaaagagtctttggtaagtaccataggatcagaccatgcccctcacactaaagaagataaaaataaaaaatatcctttatccccgtcgggtatgccaggcgttcaaaccttacttcccattatgttagatcatgttaacaagggtaaattaaaattagaacaattgattaaattagtttgtgaaaatccatctgatttatttggaattaaaaacaaaggttacataaaagaaaattatgatgcagatttaaccattgttgatatgaataaagacgttgtaataaaagataattggattgaaagtaaatgtggatggacgccttttaataattataaagtcaaaggctttcctgttgcgacattataa

SEQ ID NO: 265462 - DNA, 341 bp, Unknown
  Bacterial polypeptide expressing nucleotide sequence isolated from the Sargasso Sea
accagcggcaacgcccaaattcttcctcggcaccgactcggcgccgcacgtcaagcacgccaaggaagccgcctgcggctgcgccggctgctacaccgcctatgcggccatcgaactgtacgccgaggctttcgagcagcgcggcgccctggacaagctagaagccttcgccagcttccacggcccggacttctacggcatgccacgtaacagcgacagcatcaccctggtgcgcgaggagtggaccgtaccggccaccctgccgctgggcgacaacagcgtggtgccgctgcgcgccggcgaaaccctgcgctggaaattgctggaggctcaggcgtgag

SEQ ID NO: 265463 - DNA, 866 bp, Unknown
  Bacterial polypeptide expressing nucleotide sequence isolated from the Sargasso Sea
acctggtgtaattgatacacaggttcattttagagaaccaggtgcaaatgatgttgaaaatttagaaagcggaagtagggctgctgtagctggtggagttacttcagtgtttgaaatgccaaatacaaatccaccaacttcaacttttgatgagtttaataaaaaactcaaagcagcaaaaaatagaatgttttgtaattatgggttttattttggagcaacaccaaacaatatgaaggaacttaatgcagttgatacattagagggatgttgtggagtaaaactttttgctggatcatccactggaaacctcttggttagtcaagaaaaagatatagagaaagtaatttcgaatagtagtaagatcatctcagttcattctgaagatgaaaatattttattatcaaggaaaaagcatattaaagatggaaatgttcactcacatccggtttggagaaacgaagagtgtgctttagagtctacaaaaagagtagtaaggattgcacaaaaatacaaaaagaaaattcatattctccatgttaccactaaagaggaaatagattttttctcagaaaaaagagacaatgttacttttgaaataacaccacaacatctaactttgtatgcacctgattgttacgataaattaaaaactttaagccagatgaacccacctttaaggactaaagaccattacgatagattatgggatgctgttaaagatacactggtaactacaataggctctgaccatgcacctcacacaatcgaggaaaaaaatagaaaatatccattatctccctctggtatgccaggggttcaaacattgcttccaataatgttaaatcatgtaaatgatgggaaaa

SEQ ID NO: 265464 - DNA, 616 bp, Unknown
  Bacterial polypeptide expressing nucleotide sequence isolated from the Sargasso Sea
accgacgattaccgtcgatgcagaggtgtgatcagggtcaacccacctgtcagagagcctcatcataaggcatctttgtgggaggccttgttggatggcacgatagatatgattgctaccgatcacgcacctcatatccccgaagaaaaggaaagagagagcatttggacttgtgattgcggctttccgggcgttgaaactcagatgcctcttatgctgagcgaagttgccgccggtcgcattactatttgtgattatgtgaggtggaccgcatttaatcctgcccatcgctggggactgtatcctcggaaaggcaccctccaagttggaacagaagcggatattgtagtggttgatctcgatagagaggctattatttccgatgcatcacttcattctcgagcaaaaattacaccctgggatggtcgcccggtgaaaggtgtgcccgtgcacactctggttcgcggggagtttgtaatgcgggaccgggtgttgaacgatgctgcgcgagggaaagggagatcggtccactcgatacaagagatgccaccacctgtccctaaaaataccgatgcgagtattgagtttcaaacggggcccggcccattattttaaa

SEQ ID NO: 265465 - DNA, 864 bp, Unknown
  Bacterial polypeptide expressing nucleotide sequence isolated from the Sargasso Sea
gctaaaaatagaatgtattgtaattatgctttttattttggtgcaacagctgacaattcagaagatttagcaagtttaaaagatttagagggttgttgtggtatcaaattatttgcaggttcatcaactggcaatctattagttgctaaagaagacgatattgataaggtttttcaaaatagttcaaaggttgttgcagtgcactctgaagatgaagcaattttaaatataaacaaaaaattaattaaaaaaggagaagttcattcccatccagtttggagaagtgtagaatgcgcaatatcatctactagaagaattgttaagattgcagaacgttataacaaaaaagcacatatacttcatattacaacaaaagaagagattgattttttatctcaacacaaaggaaacattacatttgagattactcctcagcatttaactttatttgctccagactgttacaacaaacttggaacttacgctcaaatgaatccacccttaagggataaatctcattacgatagattgtggtatgcagtaagaaataattttaatgacacaattggttctgatcatgctccacatctaaaggtaaataaagataaagaataccctaattcaccatcaggtatgccaggtgtacaaactctaattccagtaatgttaaaccatgtaaacgatggaaagctcacactaaatcaattaattaatcttgtttgtgaaaatcctgtaaagatttttggaattaaaaataaaggatatattaaggagggtttcgatgctgattttactattatagatatgaaaaaaacaatagaaattaaaaatgaaaatatcgagagcaaatgtaaatggtcacca

SEQ ID NO: 265466 - DNA, 634 bp, Unknown
  Bacterial polypeptide expressing nucleotide sequence isolated from the Sargasso Sea
gcacatatattgcatgttacaacaaaagaagaggtagatttcctttctcaaaataaaggaaacataacttttgaaattactccacaacatctaacaatatatgcaccagattgttatgacaaacttggaacctttgcacagatgaaccctcctttgagagacaagtctcattatgatagattgtggtacgctattcgaaataattataacgatactattggttcagaccatgcacctcatttaaaagaaaacaaattaaaagaatatccccagtcaccatctggcatgccaggcgtacaaacattattaccagttatgctaaatcatgtgaatgataaaaaacttacgttagatcagttaattaaacttctttgcgaaaacccagtttctgtatttggtattaaaaataaaggttttatcaaaaaagattatgacgctgattttactataatagatatgaatagaacgattgaaattaaaaatgaaaatattcatagtaagtgtggatggagcccatttgatggctataaatttaaaggttcaccggtttacacaattattaatggagatattaaaatgaaagaagatgaaattttaggagatccatctggaaaaccaattctgtttgactgag

SEQ ID NO: 265467 - DNA, 928 bp, Unknown
  Bacterial polypeptide expressing nucleotide sequence isolated from the Sargasso Sea
gatctaataatcaaaaacggtaagtgttatattaataatgatcttaaagatgttgatataggcattcaaagcggaaagattgtaaagattggcaactttgaagaagaagcaaaacaaaccgtggatgctaaaggattgactgttttacctggttgtatagatacacaaacacattttagagaaccaggatcaacagatactgaggatttagcttcaggaagtagagcggcaatagttggcggtattacttcagtttttgaaatgccaaatactaatccagcaactacaaacagagaggaatttaatagaaaaatagatttagccaaaaacagaatgtattgtaatcatgcattttactttggtgctactcctgataaccaaaatgaattagcaaatcttaaagatttagaaggttgctgtggggtgaaattatttgcaggatcatctacaggaactctgttagttcacaaagaggaagacatagaaaaagtatttgaaaacacatctaaaatagttgcggtgcattcagaggatgaagatattttaaatcttagaaaaaaattaagagaaaatggaaatgttcattctcatccaatatggagaaacgaagagtgtgcaatttcatctactagaagaattgttaaaattgctaatagattaggtaagaaagcacatgttttacatattactacaaaagaggaagttgactttttatctcagaataaaggaaatataacttttgaaataacgccacaacatttaactctatatgctccagattgttatgataaattgggtacttatgcccaaatgaatccaccgctaagagacaaaagtcattatgatcgattatggtatgctgtgagaaacaattataacgatactattggatctgatcatgctccacatttaaaaaaaataaagacaa

SEQ ID NO: 265468 - DNA, 871 bp, Unknown
  Bacterial polypeptide expressing nucleotide sequence isolated from the Sargasso Sea
ttgctggttcttcacaggaaatttattagtagacaaggaagcagatattgtaaaagtaatttctaatagtgatagaatagtttcaattcattctgaagatgaagaaatattaaatttaagaaaaaaatttataaaaaaaggagacgttcattctcatcctgagtggagaaacaccgaatccgcaatgtcttctactcgtagagttgtaaaaattgctgaacgatataataaaaaaattcatgtattacatgtaacaacaaaagaagaggtagattttctagcaatgcataaaaagaatgtaacttttgaaactacgccgcaacacttaactttatatgcacctgattgttacgataaattaggcacgtatgctcaaatgaatcctcctttaagaacaaaagatcattatgataggttatggacagcaattaaaaataacatagtagatgtgctaggttcagaccatgctcctcatacaaaagaaaacaaacaaaaagaatatccaaattctccttctggaatgccaggagtacaaactatttttccagtaatgttagatcatgtaaacaataataagctttctttagaacaattagtaaaactaatgtgtgaaaatccttgtaggatatttggaattaaagataagggttttattaaagaggattttgatgctgatttgacaatagtagatatgcaaaaagaacaaactattaaaaatgaaatgatggcaagtaaatgtggatggacaccatttaataattataaagttaaaggatttcctattgcgacaattgttaacggttcaattgtaatggaaaatggtaaggttgtttctaatcaagtaggtaaaccgcttgattttaaactatga

SEQ ID NO: 265469 - DNA, 592 bp, Unknown
  Bacterial polypeptide expressing nucleotide sequence isolated from the Sargasso Sea
ttgtctcaacataaaggcaatatcacatttgaaatcactccacagcatttgacaatttttgcacctgaatgttatgacaaacttggaacctatgcgcaaatgaatcctccattaagagataaatcacattatgatagattatggtatgcagtaaaaaataactttaatgacactatcggatcagatcatgctccacatttgaaagttaacaaagataaagaatatccaaattcaccatcaggaatgccaggagttcaaactttaatgcctgttatgttaaatcatgtaaatgatggaaaactatctcttaatcaattaataaatttagtatgtgaaaatccagtaaaaatctttggaataaaaaacaaaggatttatcaaaaaaggttatgaagctgactttacaattgtagatatggataaaaagattgtaattaaagatgaagatatcgagagtaagtgtggctggtcaccttttaatggatttcaatttaaaggaactccagttttcacaataattaatggaaaagtgaaaatggaaaatggaaaaataattggtgaacctgagggtagtcctttagagtttatctaaa

SEQ ID NO: 265470 - DNA, 695 bp, Unknown
  Bacterial polypeptide expressing nucleotide sequence isolated from the Sargasso Sea
ggaatgtgcgcttgagtcaacaaaaagagtggtgagaatagctcaaaaatataaaaaaagaattcatattcttcatgtaagtactaaacaagaaatagattttttctctgaaaaaagagaaaatgtaacctttgaaatcacaccacaacatttaactttatttgccccagattgttatgaaaaattaaaaacctttagccaaatgaacccacctttaagatctaaagaccaccatgatagattatggcaagcggtaaaagaatctttagtaagcacaataggatcagatcacgcaccacatactaaagaagaaaaaaacagaaagtaccctttatcaccttcaggcatgccaggtgttcaaactctacttccagtcatgcttaatcatgtaaacaagggtaatttaaaaatggaacaattgatcaaattagtttgtgaaaacccttgcgatctatttggaatacaaaacaaaggttacattaaagagaattatgacgcagatttaactatagttgatatgaataaagagtttgtaattaaggatagttggatagagagtaagtgtggatggacaccttttaataattataaagttaaaggatttcctgttgcgacaattataaatggcgaagtagtaatggaaaatggtaaattaaaaaagcctatgggaaaaccattggtttttaatttatgaa

SEQ ID NO: 265471 - DNA, 859 bp, Unknown
  Bacterial polypeptide expressing nucleotide sequence isolated from the Sargasso Sea
atgtctgataataatagtctcattattaaaaatggttcatgttacatagaaggaaaacttgaaaatacagatattacggtatcgggagggaaaatagagtcaattggtaaagctgatttaaataatcataaagtttatgatgcaaaaaataaaattgttttaccgggtatcatagatactcaagttcactttagagagccaggttcaactgacgctgaagatttagaaagcggaagcagggcggcagtattaggaggtgttacttcattatttgaaatgcctaacactaaccctcccacagataatttaattgaatttgaaaaaaaactcaaagctgctgaaaatagaatgcacagtaactatgcattttactttggagctacaccaaaaaatactgagcaactggcacaattaaaaaatattgaaggttgttgtggagtaaaactttttgctggttcatcaacaggaaatttactggttgataaagaagcggatattgagaaagtaatatcaagtagtgacagaattgtttctattcattctgaggatgaagaaataataagattaagaaaaaagtttatcagagagggagatgtacattctcatccagagtggaggaatgaggaatgtgcaatgtcttctacacggagagttgtaaaaattgcagaaagattcaataaaaaaattcatgtacttcatgtcacaacaaaagaagaagttgattttttagcaatgcataaaaaaaatgttacttttgaaacaactcctcagcacttaacattgtatgcacccgattgttacaacaaattaggaacctacgctcaaatgaatcctcctttgcgaggaaaggaacattacg

SEQ ID NO: 265472 - DNA, 814 bp, Unknown
  Bacterial polypeptide expressing nucleotide sequence isolated from the Sargasso Sea
acacaaacagcctccctctctcacacatcccctcccgctccctctctttactacagcctaatcatcaagaactaccccgagttccgctgctaccgtgatgtcatctattatatgaagctcttctgccagccagacatccgacgcttccctggtaaggcgccatggacccaacggaacgcgcagttggagttctttgtgcagccgccacggtgcggtacgccatactccaccatcggcacaaaggcatacaatgacacggggctactctgcagaccaaaggtcaagcgaggcgagatgccgcccgtccatcgcttcgcgtctgcaagcaatccttccgagtacacacgccctcacatagtagagaatgaggatgatgtactacatatgtgggagctgccagactttgcggcgagaggtaatgcggaggcggggcgccacggtaccggtgcacttggtcagcatgattcggagttactcctctcctatctgaccgtaccgtacctacgcattccactcatcagtagcttctttgcctccgatgatcgaatccactcgttacaatcacgtaagctacagcggctattagatgcggcgctattcgagccgggcagccatctgccattagcatccgcagggttagagccagtcgatgtgcccacctccgcacctacgctgcttggcacgccgcatcacctgctactcaacgagttgagccgctcaccagagactctcgtcaatggcgtcctcaagctcgcaaagcaggcgtgtgatctcgatacagggaccctcttctcctctactgcgggagtgatac

SEQ ID NO: 265473 - DNA, 902 bp, Unknown
  Bacterial polypeptide expressing nucleotide sequence isolated from the Sargasso Sea
aaggaattagctgatttaaaaaatttagagggttgttgtggaattaaactatttgccggttcttcaactgggaatcttttagtagcagatgataaagatattgaaactgtatttcaaaatagttccaaggttgtagctgttcactctgaagatgaagctatcttaaatattaataaaaaattaattaaaagcggagatgtaaattcccatccaatttggagaagtgaggaatgtgcaatttcatctacaagaagaatagttcgaattgctgaacgctataataaaaaggctcatattctccatataacaactaagcaagagatagactttttatcacaacataagggcaacattacttttgagatcacaccacaacatttaacaatttatgctccagattgttatgataagcttggtacctatgcccagatgaatcctcccttaagagataaatctcactatgatagattatggtatgcagttaaaaataatcttaatgatacaatcggttcagaccacgctcctcatctaaaggttaataaagataaaaaatacccagatacaccatcgggaatgcctggagtgcaaacgttactacccgtgatgcttaatcacgtaaacaaaggtaaattaacaatagaacaacttataaatctagtttgtgaaaacccggtcaaaatctttggtataaaaaataaaggttatattaaaaaagattttgatgctgattttactattatagatatgaacaaagagattgaaataaagaacaaaaatattgagagcaaatgtaaatggtcgccatttaatggggaaaaatttttaggaacgcctgttgtaactataattaatggagaaattaagatgaaagacggtaaaatattgggacaaccctctggtaa

SEQ ID NO: 265474 - DNA, 931 bp, Unknown
  Bacterial polypeptide expressing nucleotide sequence isolated from the Sargasso Sea
atttcgaagaagcttgatattgtcattaggaataataaaattgaaaagctttcttctaatataaatcataaagaatactcatttgatgaaattattgatgcaaaaaacttggtcgtggctcctggttttgtcgacatccacgtacatttaagagacccaggatatactcacaaagaaactattgccactggttccaaagctgctgtagctggcggtttcacttcaattgcatgtatgccaaatactaaacctattaacgataatgcatcaataactgactacatattaaatgaagcaaaaaggatatcgatgttaaacatatttccaatcggtgctataaccaagtcttctaaaagccgtgaactcgcatcaatcaaatcaaatatcaagaaaggttgtgtcggggtatctgatgatggttttcctgttacaaattccgttttactttttaatgctatgcaaattgctaaacaaatttcagtacctgtcatatctcactgtgaagatttatcgttatcattaggcggtgttgcgaacgaagggaaattttcaaagaagtattcattaaaaggcattccaaatatttcagaagaattgggaatatttagagatatagtaatagctgaagcaaccggagcacatttacatgtatgtcacgttacagcaaaaggatctgtagacattatacgtgaagctaaaaaaagaggtgtaaatgtaacttgtgaagcaacaccacatcatttcactctttctgaagataatataaaaggttgtgatcctaattttaaaatgaatccaccattaagaagtaaagaagatgtcagatcaatagttaagggtataaaagaagatgtgatagacattatagcaactgatcatgcccctcatacggcaaaagagaagtcggcgggattcgaaaaagctcctttgg

SEQ ID NO: 265475 - DNA, 973 bp, Unknown
  Bacterial polypeptide expressing nucleotide sequence isolated from the Sargasso Sea
catggtaattcgtggtggacgagtagttgatccagatcaggggattgatcgagtagacgatctgctaattcgtgatggcttgataatgtctattggtcacgatggtagtcagccgcttgggaaagttgatgagacgattgatgcccatggtttcattgttacgccgggactggtcgacatgcacgtgcatcttcgtgaaccaggtcgtgaagaggatgaaactattgagacagggaccaaagcagccctggcgggtggctttacgagtgttgcctgtatccccaacaccgagccggcaattgatactcaggccaacgtagagtttattcgtcaaaaagcggcacgagcagatacctgcaatgtgtttgttgttgcatgtgtaagccatgagcgagaagggaaggaacttgccgaaatcggtcaattggttgaagctggggctgttgctttcagtgacgacggatcacctgtttacgatgccgagttgatgcgtcgggctttcgagtattgtcgaatgttcgataaaccaattctggcccacgaagaagtcctagagctttctcatggtggcgtaatgaatgaaggccttgtctccatgtcgcttggcctgaagggtatgccggcagcagcagaagaagtcatgatcgggcgagatattgcactcgcagatgtgactggcggtcgccttcatgtaatgcatgtttcaacagctcagggcgtcagtctcatccgtgaggcaaaagcacgtggcgttcgggtcactgcggaggcctgcccacaccattttacgctgacggatgaatctcttcgagggttcgattcaaactttaaaatgagcccaccgctacgaacagcaaaagatgtcgaaggtattcttgcagggcttgctgatggcgcaattgactgtattgcaacggatcacgctccacacgcaccagaaaaaaagctactcgaattagacagagcgcccttg

SEQ ID NO: 265476 - DNA, 793 bp, Unknown
  Bacterial polypeptide expressing nucleotide sequence isolated from the Sargasso Sea
aatggtgatatattttgctgcgaaactttatcctgctggcgcaacaacaaactctgaatcaggggtaagaaacataaagaaaatcttgcctgtcttagaaaaaatggcagagataaatatgcccttattaattcatggagaggttacagatcacaaaatagatatttttgacagagaaaaaatttttattgaaacaattttagattcgatttcaagaactttgccggaacttagaattacactcgaacacataactacagaggatgcaacaaaatatgttagtggtggaaatgagaatatttcagcctcaattactccacaccatttagctatgaataggaatgagattttttctggtggaataagaccgcatctatattgcttgccaattttaaaaggtgaaaaacataggaaagctctaattaaagtagcaacaagcggcaattctaaattttttttaggaacagacacagctcctcatttaactaacgataaagaaagcgaatgcggttgtgcaggtatatttaatgcaacttattgcatgtcagttttagctcaaatatttgatgatgagaacgcacttcttaatcttgaaaaatttacaagccttaatggagcaaaacattacaagttgaaagctaataaagaaaagattattttgaaaaagagatctgagccaaaagattttgcaagtaaattaatttttggttctaaaaatattacaatttttagccctaatttcaatgtttactgggatgttgtaaccaacgaaaaattacacaatgagaggtaa

SEQ ID NO: 265477 - DNA, 780 bp, Unknown
  Bacterial polypeptide expressing nucleotide sequence isolated from the Sargasso Sea
agcaaaacttaaaaatttagatggatgttgtggagtaaaactttttgcgggttcctcaactggaaatcttttagttgataaagaagaagatatcgaaaaagtctttcaaaatacctcaaaaatagttgcggtacattctgaagatgaagaaataataaatttaagaaaaaaattaattgaaaaaggcaatgttcatactcatcctgtatggaggaatgaagaatgtgcaatgtcatcgacaagaaggattgttaggattgcaaaaagacttaataaaaaagcacatatattgcatgttacaacaaaagaagaagtagatttcctttctcaaaataaaggaaacataacttttgaaattactccacaacatctaacaatatatgcaccagattgttatgaaaaacttggaacttttgcgcagatgaaccctcctttgagagacaagtctcattatgatagattgtggtacgctattcgaaataattataacgatactattggttcagaccatgcgccacatttaaaagaaaataaattaaaagaatatcctcagtcaccatctggaatgccaggtgtacaaacattattacccgttatgctaaatcatgtgaatgacaaaaaacttactttagatcagctaatcaaacttctttgtgaaaatccagttacagtatttggtattaaaaataagggatttatcaaaaaagattatgacgctgattttacaataatagatatgaataaaactatagaaattaaaaataaaaatattcacagtaa

SEQ ID NO: 265478 - DNA, 970 bp, Unknown
  Bacterial polypeptide expressing nucleotide sequence isolated from the Sargasso Sea
tcattatttgagatgcctaatactaacccaccaacagccaatttagttgagtttgataaaaaacttaaagctgccaaaaataggatgcatagtaattatgctttttatttcggtgctacgccatcaaatacagatcaacttgcacaattaaaaaatgttgaaggatgctgtggtgtaaaactttttgctggatcttcaacgggaaatttattagtagataaagaggcagatattgaaaaagtaatttcaagcagcgatagagttgtttctattcactctgaggatgaagatataattaaattgagaaaaaagtttataaggaaaggggatgttcattcacattacgagtggagaaatgttgaatgtgcaatgtcttctactcgaagagtagtaaaaattgctgaaagatataataagaaaattcatgtattgcacgtgactacaaaagatgaggtagattttttagcaatgcataaaaaaaatgttacttttgaaaccactcctcagcacttaacattgtacgcacctgattgttatgacaagttaggaacttatgctcaaatgaatcctcctttacgaggaaaagaacattatgaccgtctgtgggctgctataaagaataatattgtagatgttttaggatcagatcatgctccacatttaaaagctaataaagataaggaatatccagactctccgtcgggaatgccaggagttcaaactatttttccagttatgattgaccatgtaaacaatgggaaacttacattaaatcaacttattaatttgatgtgcgaaaatccttgtagaatatttggaattcagaacaaagggtttataaaagagggttttgatgcagatttgactatagtggatatgaagaaagaggtaactattaaagatgaaatgatagcgagtaaatgtggttggacgccttttaataattataaggttaaaggttttccagtcg

SEQ ID NO: 265479 - DNA, 525 bp, Unknown
  Bacterial polypeptide expressing nucleotide sequence isolated from the Sargasso Sea
tttgaaacagttatctatttgccgcccagatgactggcatctgcacctccgtgatgggaaaatgcttgcagcggtaatagatgataccgctcgccactttggccgggcgattattatgccaaatttgattccaccagttgtgactggtgctgatgcagtggcttatcgtgatcgcattctgtcctgtcttaaccccgaacatcattttaccccgctgatgacactatacctgaccgaaaccactcaacctcatgacgtggccgacgcggcgaagcgagggcttgttcacgcggtcaaattatatccggcgggggcaaccacaaattcagaatcaggtgtacgcgacctggaaaaggtgatgccggtccttgaaatgatggcaagcattggacttccgctttgtgtgcatggcgaggtaaccgacccgaaggttgatatttttgatcgggagttggtctttattgagacagttctcgacccattgcgtcgccgcattccagaattacgagttgtgatggaacatgt

SEQ ID NO: 265480 - DNA, 742 bp, Unknown
  Bacterial polypeptide expressing nucleotide sequence isolated from the Sargasso Sea
ctgattaaagagggtgatgttcatactcatccagtatggagaagtgtagaatgtgcgatagcatctacaagaagaattgttcgaattgctgaaaaacacaataaaaaagctcatgtgcttcatattacaacaaaagaagaaatagatttcttatctcaacataaaggaaacattacatttgagattactcctcagcatttaactctttatgctccagattgttatgacaagcttggaacatatgctcagatgaatccaccattaagagataaatctcattatgatagattatggtatggggtgagaaataactttaatgataccattggatctgatcatgctccacatttaaaacaaaataaagataaggtatatccaaacactccttcaggaatgccaggagttcaaactttgatgccagtaatgttaaatcatataaatgatggaaaattatctcttaaccaactgatgaactttgtttgtgaaaatccagtaaagatttttggaattaaaaataaaggttttattaaagaaggttatgatgcagactttacaattgttgacatgaataaaactattgaaataaagaacgtaaatattgaaagtaaatgtaaatggtcaccctttaatgggtttaaatttaaaggaacacctactcatacaattattgcaggaaagattaaaatgcaggatggaaaaattttaggtgaacctgatggaacaccattattgtttagctaag

SEQ ID NO: 265481 - DNA, 788 bp, Unknown
  Bacterial polypeptide expressing nucleotide sequence isolated from the Sargasso Sea
aaaaggctgttgtggagttaaactttttgcaggttcttccacaggtaatttattagttgataaagaaaaagatatagaaaaagttatttctaatagtgatagagtggtttcaattcactcagaggatgaagaaatattaaaattaaggaaaaagtttattaaaaaaggggatgttcattcacatccagaatggagaaacaccgagtccgcaatgtcatctactcgtagagtcgtaaaaattgctgagcgctataataaaaagattcatgttttacatgtcacgacaaaagaagaagtggattttttagcaatgcacaaaaaaaacgtaacttttgaaaccacacctcaacacctaactttatatgcgccagattgttacgataaattaggtacgtatgctcaaatgaatcctcctttaagaacaaaagatcactatgatagattatggacagcaattaaaaataatattgtggacgtgctaggctcagatcatgcgcctcatacaaaagaaaataagcaaaaagaatatccaaattcaccttcaggaatgccaggggttcaaaccatttttccagtgatgttagatcatgtaaataataataagctttctttagaacagttaataaaattaatgtgtgaaaatccttgtagaatatttggaattaaagataagggttttattaaagaggagtttgatgctgattttacaatagtagatatgcaaaaagaacaaactattaaagatgaaatgatcgcaagtaaatgtggatggacaccatttaataatt

SEQ ID NO: 265482 - DNA, 874 bp, Unknown
  Bacterial polypeptide expressing nucleotide sequence isolated from the Sargasso Sea
cgtcaagagtgaacagcaggccgacctgttaattgcggacggcaagattgccgacatcggtgatcctggagcttttaacggcaagggcctagaagtcgatgcctctgatgccctagttatgccaggttttgtcgacattcaagttcacttcagaactccgggcggtgaagagagtgaagacatttcatcaggggcggcgggagccgccttgggaggtgtgaccgcgtgtctgatgatgcccaacaccgttcccacaattgataatcccgacctcgtgtctgaagtccttcgactagggcgtgacacgccttgcgatgtatatacatcggctgctatcaccgtcgaccgggcaggggaaagcttggtcgacttcgttgcgctctacgaagcaggcgttcgagtattcacagatgatggcaccgttgttgatagcgaagacctgatgaggggggctttagaggccagctcgcaattcccggacgttgtgatcagtcaacacgcagagcactcggcgatggtcgaaggtggcgtcatcaaccaaggtgtcgtatcagaccgcctagggctaaaagggagaccttccgaagctgaggtaattatcgttgaacgcgatattgcactagctaagcaaaccggtggtcgctaccacgtacttcatatatctacggcagccgcaagtgatcgcgttcgcgatgccaaagtcgctggactccgtgtatctgcggaggtaaccccacaacatttgatcttgacagaagaggatgttgaacgtttggggacatccggaaaaatgaatccgcccttgcgtacctccgctgacgtcgaggggttaagggctgccttgttgacggaactatcgacgcaatcgccacag

SEQ ID NO: 265483 - DNA, 856 bp, Unknown
  Bacterial polypeptide expressing nucleotide sequence isolated from the Sargasso Sea
aggatgttgtggagtaaaatttttgctggttcttcaacaggaaatcttttagtcagtcatgaaaaggatattgagaaggtaatatcaagcagcagcaagattgtctcaatacattctgaagacgaaaacatcttattatccagaaaaaaatttattaaagatggagatgttacttcacatccaatttggaggaatgaggaatgtgcacttgaatctaccaaaagagtagtaagattagctcaaaaacataaaaagaaaattcatattcttcatgtatcaactaaagaagaaattgatttcttctcaaaaaaaagagatggagtaacttttgaaattacaccacaacatttaactttgtatgctcctgattgttataaaaatttaaaaactttaagtcaaatgaacccacctttaagatctaaagaccattatgatagattatgggatgcagttgaagaaactttagtgagcaccataggttctgatcatgcgcctcatacaaaagaggaaaaaaatagaaaatacccttcgtctccatctggaatgccaggtgttcaaactcttcttccagtaatgcttgatcacgtaaataaaggcaaactaaaattagaaaaattaattaaattagtaagtgaaaatccatgtgatttatttgggattaaaaacaaaggttatttaaaagaaaattatgatgcagattttactattgtggatacgaataaagaagttcttattaaagatgagtggattgagagtaaatgcggatggacacctttcaataattataaagtcaaaggatttcccgtagcaactatagtaaatggtgaaattgttatggaaaatagtaaaattattt

SEQ ID NO: 265484 - DNA, 945 bp, Unknown
  Bacterial polypeptide expressing nucleotide sequence isolated from the Sargasso Sea
gaattcaaaagaaattagatttagctaaaaatagaatgtattgtaattatgctttttattttggagcaacagctgataacgcagatgagttggcagatttaaataatttagagggttgctgtggaattaaacttttcgcaggttcttcaacaggcaaccttttagttgctgaagaaaaagatattgaaacagtatttaaaaatagttccaaagtagttgcagttcattcagaagatgaagaaattttaaatatcaataaaaaattaattaaaaaaggcgatgtacattcccatccaatatggcgaagtgatgaatgtgcaatatcttctaccagaagaatagttagaatcgcagagcgttataataaaaaagcccatgttcttcatataacaactaaacaagagattgattttttatcacaacacaagggaaatattacttttgagattaccccacaacatctaacaatttatgcaccagattgttatgataaacttggtacgtatgcgcagatgaatcctcctttaagagataaatctcattacgatagattgtggtatgcagttaaaaataatctaaatgataccatagggtcagaccacgctcctcatttaaaaataaacaaagataaagaatatcccaattcaccttcgggcatgccgggagttcaaactttaatgccagttatgttaaaccatattaatgatggaaaactttcacttactcaattaataaatcttgtttgtgaaaatccagttaagatttttggaataaaaaataaaggatttattaaagaaggatttgatgctgacttcacaatagttgatatgaataaaaaaattgtaattaaaaatgaaaatattgagagtaaatgtggatggtctccttttaatggttatgagttcaaaggaacacccgtttcaacaattatgaaggaaaaataaa

SEQ ID NO: 265485 - DNA, 563 bp, Unknown
  Bacterial polypeptide expressing nucleotide sequence isolated from the Sargasso Sea
ttttgaaaccactcctcagcacttaacattgtacgcacctgattgttatgacaaattaggaacttacgctcaaatgaatcctcctttacgaggaaaagaacactatgaccgtctttggactgctataaagaataatattgtagatgttttaggatcagatcatgctccacatttaaaagaaaataaagataaggaatatccgaattccccgtcaggaatgccaggagttcaaactatttttccagttatgattgatcatgtaaacaatggaaaacttacattaaatcaactaatcaatttaatgtgtgaaaatccttgtagaatatttggaattaagaataaagggtttataaaagaaggctttgatgcagatttgacgatagtagacatgaacaaagaggtaactataaaagatgaaatgatagcgagtaaatgtggctggacaccttttaacaactataaagtcaaaggatttccagtagggacaatagtaaatggaattttagtaatgtcggatggaaaaatattagttgagtctaaaggtaaacctttaagtttttaaa

SEQ ID NO: 265486 - DNA, 547 bp, Unknown
  Bacterial polypeptide expressing nucleotide sequence isolated from the Sargasso Sea
actctaaaagttattcttgaacacattacaactgaggatgcagttgaatatgtttcttcagcaaatgaaaacatagcggcaactattacaacacatcatcttgccattaatagaaatgacttgcttgttggtggtataaaacctcatttttactgcttgcctgtggtaaagcgtgaatctcataggcttgctttagtaaaagcggcaacctcaggatcccctaaattttttcttggaacagatagcgcaccccatttagatgatgacaaagaaagtgcatgtggatgtgctggctgctttactgctacaaattcattagaaattttggcacatatttttgaagagcaaaagtcattgaataaattagaattattcacatcgattaatggagccaatttttatggtaaaaaagccaacatgggaaaaatcaaacttatcaaaaatgatacacccacattatttcccaaaaaattggcaactccccgcggtaaactgactatatttaaaccaaactttgaaacttactgggaagtaaaaaatgaataat

SEQ ID NO: 265487 - DNA, 604 bp, Unknown
  Bacterial polypeptide expressing nucleotide sequence isolated from the Sargasso Sea
ttgttggttgctaaagaagacgatatagataaggtttttcaaaacgcgtcaaaagtagtggcggttcattctgaagacgaggcaattttaaatgtaaataagaaactaataaaagagggtgatgttcatacacatcctgtatggagaagtgcagaatgcgcaatagcatctactagaagaattgttcgaattgcagaaaagcataataaaaaagctcatgtgttacatatcacaacaaaagaagaaattgattttctttctcaacacaaaggaaatattacttttgagattactccacagcatttaactctttatgcaccagattgttatgacaagcttgggacttatgcccagatgaatccaccattaagagataaatctcattatgatagattatggtatggggttagaaataactttaatgatacgattggatctgatcacgctcctcatttaaaagaaaataaagacaagatatatcccaacactccttccggaatgcctggagttcagactttaatgccagtaatgttaaatcatattaatgatggaaaattatctcttaatcaattgatgaattttgtttgtgaaaaccctagttaaa

SEQ ID NO: 265488 - DNA, 588 bp, Unknown
  Bacterial polypeptide expressing nucleotide sequence isolated from the Sargasso Sea
ataaaggcaatattacattcgagattaccccccaacatttaacaatttatgctcctgattgttacgacaaactaggaacttatgctcaaatgaatccaccattaagagacaaatctcattatgataggttgtggtatgcagttaaaaataatctaaatgatactattggctcagatcacgcgcctcatttaaaagtaaataaagaaaaagaatatcctaactcaccatctggtatgccaggagtacaaactcttatgcctgttatgcttaatcatataaatgatggaaaattatctttaaatcagttgatgaatcttgtttgtgaaaacccagttaagatttttggaattaaaaacaaaggatttattaaagaaggatatgatgccgattttacaattgtcgatatgaataaaataattgagattaaaaatgtaaatattgaaagtaaatgtggctggtctccttttaatggaaacaaatttaaaggaactcctgttgtaacaataattaatggtaaaattaaaatgcaagatggaaaaataattggtgatccaacaggaaaacctttagaatttagcaattcctaaa

SEQ ID NO: 265489 - DNA, 202 bp, Unknown
  Bacterial polypeptide expressing nucleotide sequence isolated from the Sargasso Sea
atgcgagaaattacaatgacccgtcccgatgactggcatctgcatctacgtgacgaggcctatctcaaagacacggtcagagatgcggcccggtatttccatcgcgcgatcgtgatgcctaacctggatccaccagtgacgacggtggctgatgccactcgatatcggcaagaaattcttgaggtcgtaccatcaggtacac

SEQ ID NO: 265490 - DNA, 864 bp, Unknown
  Bacterial polypeptide expressing nucleotide sequence isolated from the Sargasso Sea
ggtcatcaactggtaatttattggttgccgaagaagacgatatagatagagtttttcaaaatgcctctaaagttgttgcagttcattctgaagatgaggcaattttaaatgtaaacaagaaattaataaaagagggcgatgttcatacgcatcctatttggagaagtgcagaatgtgcaatagcatctacaagaagaattgttcgaattgctgaaaagtacaataaaaaagctcatgtacttcatattactacgaaagaagaaatagattttttatctcagcacaaaggaaatattacatttgagataactccacagcatttaactctttatgcaccagattgttatgacaagcttggaacttatgctcaaatgaacccaccattaagagataaatctcattatgatagattgtggtatggagtaagaaataattttaatgatacaattggatcagatcatgctcctcatttaaaagaaaataaggacaaggtgtatccaaacactccctcaggaatgccaggagttcaaactttaatgcctgtaatgttgaatcatattaatgatggaaagttatcgcttaatcagctaatgaactttgtttgtgaaaatccagttaagatttttggaattaaaaataaaggatttattaaagaggactatgatgcagattttacaattgttgatatgaacaaagttattgagattaaaaatgaaaatattgagagtaaatgtaaatggtcaccatttaatggatttaaatttaaaggaacacctacccatacgattattgcaggaaaaattaaaatgaaggatgggaaaattttaggtgatcctgaaggaacacctttacagtttagctaag

SEQ ID NO: 265491 - DNA, 922 bp, Unknown
  Bacterial polypeptide expressing nucleotide sequence isolated from the Sargasso Sea
gttttcgatgcaacaggcaagattgttttgccaggtgcaatagatacccaggtacactttagagaaccaggagctaatgacgctgaaaatttagaaagtgggagtagggctgcggtagcagggggcataacctctgtatttgaaatgccgaatactaatccaccaacatcaacatttaaagaatttaataacaaacttagtgcagcgagaaatagaatgttttgtaattatgctttttattttggggctactccggacaatatgaaagagttagcatcggtcaatactcttgaaggatgttgtggagtaaaacttttcgctggttcatcaacaggaaacctattagtcagccaggaaaaagatatagagaaagtaatatctaatagcagcaagattatttctgtgcattcagaagatgaaaatattcttttatctagaaaaaaatttattaaagaaggtgatgttacttcgcaccctgtttggcggaatgaggaatgtgcactagagtccactaaaagagtagtaagattagctcaaaaacataaaaagaaaattcatattcttcatgtttcaacaaaagaagaaattgatttcttttcagaaaagagggatggggtaacttttgaaattacaccgcaacacttaaccttgtatgcccctgattgttatgaaaatttaaaaacttttagtcaaatgaacccacctctaagatccaaagaccactacgatagattatgggatgcggtaaacgaaactttagtgagcaccataggttctgaccatgccccacatacaaaagaggaaaaaaatagaaaataccctttgtccccatctggaatgccgggagtgcaaactttactacctgttatgcttgatcatgtaaatcaaggaaaactaaaaatagaaaaactaataaaattag

SEQ ID NO: 265492 - DNA, 628 bp, Unknown
  Bacterial polypeptide expressing nucleotide sequence isolated from the Sargasso Sea
catgtgttgcatgttactacaaaagatgaggtagactttttggcgatgcataaaaaaaatgtaacttttgaaaccactcctcaacatttaactttatatgcacctgactgttacgataaattaggtacatatgctcaaatgaatccaccgttgagatcaaaagaacattacgatcgattatgggtagcaataaaaaataatattgtcgatgttcttggatcagaccatgccccacatttaaaggcaaataaggataaagtatacccagaaactccttctggtatgcctggtgttcaaacaatttttccagttatgatcgatcacgtaaataatggaaaacttactttaacccaattaataaatttaatgtgtgaaaatccatgcagaatctttggtattaaaaataaaggctttattaaagaaggttttgatgcagaccttacaatcgtcgatatgaaaaaagaggtcattattaaaaatgaaatgatcgctagcaagtgtggctggacgccttttcataatcacaaagtcaagggttttccagtgggaactattgtcaatgggattttagtaatgtctaatgggaaaatcttgattgagtctaaaggaaaacctttagagttttaat

SEQ ID NO: 265493 - DNA, 913 bp, Unknown
  Bacterial polypeptide expressing nucleotide sequence isolated from the Sargasso Sea
gatactcctattacgaatatttctttagctgacaactattatagtgagatctgtaaacagattccgaagggcgtaaagtttatcccaaatatgacactctatttgaccaattatttgagcaaagatgaaatcaaaaaagttagcactcacaaatatatcaaggccattaagatgtacccaaaaggagcgacgaccaattcagattccgggatatccgattttaaaaatttctatcatttgtttgaagcaatggaagaaagtggcgttatactatctatacatggtgaggttacagatgagaaggttgatgtatttgagcgagagagcgtctttattgaaaaagttttggcaaaaataatcaagcaatttccaagtttaaaaatagttttagagcatatcacttcatcggatgcagtgaatttcataaacgaacaaagtatggttgcagcaacaatcaccattcatcacttgatggtaaatagaaacataatgctatcgaaaggaataagaccagatttttactgtgcaccaatattaaaaacagaatatgatcgtcgtgctctggtgcaagctgcaatatcaggtaatcgtaaattttttcttggtacagacagcgctcctcatgtcgagggtaaaaaaatagcttcctgtggatgtgctggaatatttagcagtcctcttgcaattccacttttgatacaattattcgaagaacatagcgctctggagaaaattgaaccctttgtgtctaaaaatggtcgagcgttttatggcttcaggcaacataaagatagggtaagatatgttaaaaggcgcaaatcgatagaagtcataaaagatatcaagaccagtgacggaaaaataacggtatttaacccttataatgaaatctattgggaaaaagaaaattaat

SEQ ID NO: 265494 - DNA, 676 bp, Unknown
  Bacterial polypeptide expressing nucleotide sequence isolated from the Sargasso Sea
acaagaagaattgttaggattgcaaaaagacttaataaaaaagcacatatattgcatgttacaacaaaagaagaagttgattttctttctcaaaataaaggaaacataacttttgaaataaccccacaacatctaacaatgtatgcaccagattgttacgacaaacttggaacctttgctcagatgaacccacctttaagagataagtctcattatgatagattgtggtacgctattagaaataattataatgatactatcggttcagaccatgcacctcatttaaaagaaaataaattaaaagaatatcctcagtcgccatctggcatgccaggtgtacaaacattattacccgttatgctaaatcatgttaatgataataaacttactttagatcagctaatcaaacttctttgtgaaaatccagtttctgtatttggtattaaaaataaaggttttatcaaaaaagattatgatgctgattttacaataatagatatgaacagaattatagaaattaaaaataaaaatattcatagtaagtgtggatggagcccatttgatggctataaatttaaaggttcaccagtttatacaattattaatggggatattaaaatgaaagatgatgaaattttaggagatccaactggtaaaccaattctttttgattgag

SEQ ID NO: 265495 - DNA, 819 bp, Unknown
  Bacterial polypeptide expressing nucleotide sequence isolated from the Sargasso Sea
ggagcacagcagacaatggcggatgatttagcaagtttaaaaaatttagaagggtgctgtggaattaagctttttgcaggatcttccacaggcaatttgttggttgctgaggaggatgatatagataaggtttttcaaaatgcctcaaaagtagtagcggtccattctgaggatgaagcaattttaaaagtaaacaagaaattaataaaagagggcgatgttcatacccatccagtatggagaagtgcagaatgtgcaatagcatctactagaagaattgttcgaatagcagaaaagcacaataaaaaagctcatgtacttcatattacaacaaaagaagaaattgattttctatcacaacacaaaggaaacattacatttgagattacccctcaacatttaactctttatgcaccagattgttatgacaagcttggaacgtatgctcagatgaatccaccattaagggataaatctcattatgatagattatggtatggagtaagaaataactttaatgataccatcggatcagatcacgctcctcatttaaaagaaaataaagacaaggtatatcccaacactccttctggaatgccgggagttcagactttaatgcctgtaatgttaaatcacataaatgatggaaaattatctcttaaacaattgatgaactttgtttgtgaaaatccagttaagatttttggaattaaaaacaaaggatttattaaagagggttatgatgcagactttactattgttgatatgaacaaaactattgagattaaaaatgaaaatatcgagagtaaatgtaaatgg

SEQ ID NO: 265496 - DNA, 766 bp, Unknown
  Bacterial polypeptide expressing nucleotide sequence isolated from the Sargasso Sea
ctgttgttgccgtaaatattatcccgcaggcgcgacaacgaactccgatacaggagtaactaatataaaaaacgtttatcggatcattgagaagatggctgagctcggtgtgccgttactcctgcatggcgaagtcacggagaatcatattgatatatttgaccgagaaaaggtctttatcgagaccatcttagcccccctgatcgagagctatccagaccttaaggtaatattagaacacatcacgacaaaagactcagttgaatttattgagagtcagtcttcgagggttgcgggtacgatcactattcatcaccttctctataatcggaatgatatgctcgttggtggaatcaaacctcatctctactgtcttccggtacttaaacgaaatattcatcagacctcactgattcgagctgcattggggggtaacccaaagtttttccttggaactgattctgctcctcacgcgagacctgagaaagaaactagctgcggatgtgcgggcgtattctcagcgccggccgctatcgagctgtatgcgcaattttttgctgaacataatagtctttctaagcttgaagggtttgccagtttttttggcgccgacttttacggacaaccaagaaataaggaaaaaattactcttgaatttaaaccttggcggatgccgcagcaatatcaactaggggatgtgccgaccgtcccgattatggctggagaaacaataaactggcgattgaaagatagtccagaaaaatga

SEQ ID NO: 265497 - DNA, 593 bp, Unknown
  Bacterial polypeptide expressing nucleotide sequence isolated from the Sargasso Sea
aatgcctgatcagatcacactcgccgcatccgatgactggcatgtccatcttcgggatggcgagatgctcgagcgggtggtgggccacacggccagggccttccggcgcgccatcgtgatgccgaatctgcggccgccggtgacgaccgtggcggctgctgctgcctaccgcgacagaattctggcggcctgttccgacagcactggtttcaggcccctgatgacggcctacctcaccgatgattgcgaccctgctgagctggagcaggggttccgatccggggtgttcaccgccgcgaagctctaccccgccaatgcgaccaccaattccgctgccggggtgaccgatctggaccgcatcgcagctgtgctgagctgcatgcagcgcatcggcatgcccctgctgattcacggggaagtcaccgatcccgatgtggatgtcttcgatcgtgaggcggtgttcatcgaacgccatctgaaggggctgcggcagcgttatcccgagctgcgcattgtgctggagcacatcacgaccgagcaggccgttgatttcgttggatcagccgaccgtcacctcgccgccacgatcaccc

SEQ ID NO: 265498 - DNA, 580 bp, Unknown
  Bacterial polypeptide expressing nucleotide sequence isolated from the Sargasso Sea
aagggaaacattacatttgagattaccccacagcacttaactctttatgctccagattgctacgacaagcttggaacttatgctcaaatgaatccaccattaagagacaaatctcattatgacagattgtggtatggagtaagaaataatttcaatgatactattggatcagatcatgctcctcatttaaaagaaaataaagataaggtatatccaaataccccttctggcatgccaggagttcaaacgttaatgcctgtaatgttaaatcatattaataatggaaaattatcccttaaccaattgatgaactttgtttgtgaaaatccagtaaagatttttggaataaaaaacaaaggatttattaaaaaaggctatgatgcagacttaaccatagtagatatgaacaaaatcatagagattaaaaacgaaaatattgagagtaaatgtaaatggtcaccatttaatggatttaaatttaaaggaacacctacccatacaattattgcagggaaaatcaaaatgcagtatggaaagattttaggtgatcctgatggaacccctttacagtttagctaag

SEQ ID NO: 265499 - DNA, 649 bp, Unknown
  Bacterial polypeptide expressing nucleotide sequence isolated from the Sargasso Sea
aagcacaataaaaaagctcatgtacttcatattacaacaaaagaagaaattgattttctatcacaacataaaggaaacattacatttgagattacccctcaacatttaactctttatgcgccagattgttatgacaagcttggaacgtatgctcagatgaatccaccattaagagataaatctcattatgatagattatggtatggggtaagaaataacttcaatgatactattggatctgatcatgctccacatttaaaagaaaataaagataaggtatatcccaacactccttcaggaatgccaggggttcaaaccttaatgcctgtgatgttaaatcacataaatgatggaaaattatcacttaatcaattgatgaattttgtttgtgaaaatccagttaagatttttggtattaaaaataaaggatttattaaagaaggttatgatgcagactttactattgttgatatgaataaaactattgagattaaaaatgaaaatatcgagagtaaatgtaaatggtctccatttaatggatttaaatttaagggaacacctacccatacgattattgctggaaaaattaaaatgcaggatggaaaaattttaggtgatcctgacggtacacctttacagtttagctaag

SEQ ID NO: 265500 - DNA, 868 bp, Unknown
  Bacterial polypeptide expressing nucleotide sequence isolated from the Sargasso Sea
aaaataggtaaaattgatcttaatagcagcaaggttattgatgcatccggcaaaatagttttgcctggggtaatagatacacaggttcacttcagagaacctggcgcaaatgatgccgaaaatttagagagtggaagcagagcagccgttgcgggtggtgttacctcagtttttgaaatgccaaataccaatcctcctacatctacttttaatgaatttaataacaaactaagtgcagcaaaaaatagaatgttttgtaattatgctttctactttggtgctacaccaaataatatgaaagaattggcatcggttaacactctaaaggggtgttgtggtgttaaactttttgcaggatcttctacaggaaatcttttagtgagtcaggaaaaagatatagagaaagttatatctaacagtagcaaaattatttcggtgcattctgaagatgaaaatattcttttatctagaaaaaaatttataaaagaaggagatgtttcttcacacccggtttggagaaatgaagaatgtgcactagaatccacaaaaagagtagttagactagcccaaaaacataaaaagaaaattcatatcttgcatgtaactaccaaacaagaaatagattttttttcagaaaaaagagacggtgtaacttttgaaattacacctcaacatctaactttatttgctccagattgttatgaaaagcttaaaactttcagccaaatgaatccccctttaagatccaaagatcaccatgatagattgtgggatgcagtaaaagaatctttggtaagcactattggatcagatcacgcaccacatacgaaagaagaaaaaaatagaaaatatcctttatcaccatcag

SEQ ID NO: 265501 - DNA, 655 bp, Unknown
  Bacterial polypeptide expressing nucleotide sequence isolated from the Sargasso Sea
tcggcctgccgctctgcaccccatggtgaggtcaccgaccccgacatcgacatctttgatcgcgaggcggtgtttatcgaccgagttctggacccaatccgtcaggcgacaccgggcctgcgtatggtgatggaacatatcaccaccaaggatgctgccgactacgtgcggtcgcaggataagaatctgggcgcgaccatcaccacgcaccacctgatcatcaaccgcaaccatatcctcgtcggtggcatcaaaccgcattactactgcctgccggttgccaagcgcgaagaacaccgtatcgccctgcgcgcagccgccacctcgggcgatcatcggttcttcctcggcaccgactcagccccgcatacggatgccaacaagctgcaagcctgcggctgtgcgggctgtttcaccgccaccaacaccatggcgctgctggcccatgtgtttgaagaagacggcgcgctggaccagctcgaaggctttgcctccaagaacggtcccgccttctaccaactgccggaaaaccccggccagatcacgctggtgaaacaggacgcccccgtcgcgttcccggaacaaatcgacacgccggacggccccgtgaccgtttttgcccccggattcccggtgcattggaccgtcgcctgac

SEQ ID NO: 265502 - DNA, 757 bp, Unknown
  Bacterial polypeptide expressing nucleotide sequence isolated from the Sargasso Sea
taaagtaaacaaaaaactaatcaaaaacggagatgttcatacacatccaattcggagaagtgtagagtgtgcaatatcatctactagaagaatagttaggattgctgaaaaacataaaaaaaaggcccacatacttcatgtaacaacaaaagaggaagttgattttctttctcgttataaaggaaatatcacatttgagattacccctcagcatttgactctttatgctccagactgttatgacaaacttggaacttacgctcaaatgaatccacctttgagagacaaaagccattatgatagattgtggtatgctgttaaaaataactttaatgataccattggttcagatcatgctccacatttgagagtaaataaagataaagtatatccaaacacaccctctggtatgccaggagtacagactttaatgccagtaatgctaaatcatgtaaataatgataggttaacattaaaacaattgattaactttgtttgtgaaaatcctgtaaaaatttttggtataaaagataaaggatttataaaagaaggttatgatgcagactttacaatagttgatatgaataaaataattgagattaaaaatgagaatattgaaagtaaatgtggctggtctccttttaatggttttaagtttcaagggacaccagtttcaaccgttgttggtggaaaaataaaaatgaaagatggtaaaataatgggtgagccagagggaaaaccattaaaatttttataa

SEQ ID NO: 265503 - DNA, 934 bp, Unknown
  Bacterial polypeptide expressing nucleotide sequence isolated from the Sargasso Sea
attgatgcgagcaatttgctagttttacctggttgcatggatacccaagttcactttagagagcctggatcaacaaatgcagaagacttacatactggaagtaaagcagctattgctggtggtatttcaagtgtatttgagatgccaaatacaaatccaccaacagcaaatatgaaagaatttaataataagctaaatcttgcaaaaaataggatgtattcaaattatgctttttactttggagcaactccagataattccactgatttagcaaagcttaaaggtttagatggatgttgtggagtaaaactttttgcaggatcttcaactggaaaccttttagttgataaagaagaagatattgaaaaagtctttcaaaatacctcaaaaatagttgcagttcattctgaagatgaagaaataattaatttaagaaaaaaattaattgaaaaaggcaatgttcatactcatcctgtatggaggaatgaagaatgtgcaatgtcatctacaagaaggattgttaggattgctaaaagacttaataaaaaagcacacatattacacgttacaacaaaagaagaggtagatttcctttctcaaaataaaggaaatataacttttgaaattactccacaacacctaacaatatatgcaccagattgttacgataagctcgggacctttgcacagatgaatcctcctttgagagacaagtctcattatgatagattgtggtacgctattagaaataactataatgatactatcggttcagaccatgcacctcatttaaaagaaaataaattaaaagaatatcctcagtcaccatctggtatgcctggagtgcaaacattattacctgttatgctaaatcatgtaaatgacaaaaaacttacattagatcagctaattaaacttctttgtgaaaatcctg

SEQ ID NO: 265504 - DNA, 808 bp, Unknown
  Bacterial polypeptide expressing nucleotide sequence isolated from the Sargasso Sea
atcaaacagcagtaagattatttctgttcattcagaagatgaaaacattcttctatcaagaaaaaaatacattaaggagggagatgttcattcgcacccaatttggagaaatgaagaatgtgcacttgagtctactaaaagagtagtaagaattgcccaaaaatataaaaagaaaattcatattttgcatgtgacaactaaagaagaaatagattttttttctgaaaaaagagaaaatgtaacatttgagataacaccacaacatttaactttatttgcgcctgattgttacgataaattaaaaacttttagtcaaatgaatccacctttaagatcaaaagatcactatgacaggctatgggatgctgtaaaagactctttggtaagcacaattggatctgatcatgctccccacacaaaagaggaaaaaaatagaaaataccctttgtctccatctggaatgccaggagtacaaactttactccctgttatgcttgaccatgtaaataaaggaaaactaaaaatagaaaaattaataaaattagtttctgagaatccttgtgatttatttggtattaaaaataaaggatacattaaagaaaactttgatgctgatctaacgatcattgatatgaataaagaggttgttattaaggacaattggattgaaagcaaatgtggatggacaccatttaataattataaagtaaaaggttttcctgtagcgacaatagttaatggagaaattgtgatggaaaataataagattttatcacctgccaaaggcaagccattaaattttaattaa

SEQ ID NO: 265505 - DNA, 604 bp, Unknown
  Bacterial polypeptide expressing nucleotide sequence isolated from the Sargasso Sea
gaagaaatagactttttatcacaacacaaagggaatattacctttgagataactccacaacacttaacaatctatgctccagattgttatgataaacttggaacttatgctcagatgaatccacctttaagagataaatctcactacgatagattatggtatgcagtaaaaaataattttaatgatacaattggttcagatcacgcccctcatttaaaaataaataaagagaaagaatatccaaactcaccatctggaatgccaggggtacaaacattaatgcctgttatgcttaatcatgttaatgatggtaaattatctttaaatcaattaatgaaacttgtgtgcgaaaacccaattaagatttttggaattaaaaacaaaggatttattaaagagggatttgatgctgattttacaattgttgatatgaataaaaaaattgaaattaaaaatgaaaatattgaaagtaaatgtggctggtcccctttcgatggatttaaatttaaaggtatacctacggcaacaattattggtggaaaaattaaaatgcaagatggtaaaattctaggtgatccagaaggtaaacctttagtcttttagg

SEQ ID NO: 265506 - DNA, 596 bp, Unknown
  Bacterial polypeptide expressing nucleotide sequence isolated from the Sargasso Sea
aagggttctcgaccccctcagaaaacgcattcctgaactgcggatcgtcatggagcacatcaccaccaaagatgccgtggattatgtcatccaaggtggtccgaatatcgctgcaaccgtcacaacccaccatctgatcattaatcgcaatgcttaccttgccggaggtataaggccacattattactgcctgccagtggcaaaacgtgaaatccatcgaatggctcttcgttcagcagtttgttcaggaaacgaaaagttcttcctcggtactgattcggcaccgcacctcgacggagtgaaggaaaatgcatgcggttgcgcgggcatatacacctcggttaacaccctaagctgcattgctcatgtctttgaggatgagaatgcattggacaagttagaaggctttgtgtcggttcacggaccatctttctacaagttacccgtcaacagtggcctgctgaaattcagaaaactcagcgagcctctttcttatcctgaaaagattcgtatcagaaatgatcaagtcaccgtgtttgatccaggttttcccttgttctggtcttatgaaacagtagacaaagaggaagtttgaa

SEQ ID NO: 265507 - DNA, 885 bp, Unknown
  Bacterial polypeptide expressing nucleotide sequence isolated from the Sargasso Sea
gccatacagtattacctgggttgcatagatacccaaacacattttagagaaccaggatcaacagatacagaggatcttcattcaggaagtagagcagcaattgcaggtggaataactagtgtattcgaaatgcccaatacaaatccgccaacttcaaatatgaaagagtttcaaagaaaactagatcttgctaaaaacagaatgtattccaattatgctttttattttggggcaacagcagataatgcagacgatctggcaagtttggaaggtttagagggatgttgtggaattaagctttttgcaggatcttcaactggtaatttattagttgctgaagaggatgatatagacaaagtttttcaaaatgcttcaaaagtagtcgcagttcactctgaagatgaagcaattttaaaagttaataaaaaattgattaaagaaggtgatgttcatacgcatcctatatggagaagtgcagaatgtgcaatagcatctactagaagaattgttcgtattgcagaaaagcataataaaaaagctcatgtacttcatatcacaacaaaagaagaaattgattttctttcacaacataaaggaaacatcacatttgaaatcacaccgcagcatttaactctctatgcgccggattgttataataagcttggaacatatgctcagatgaacccaccactaagagataaatctcattatgatagactatggtatggtgtaagaaataacttcaatgacactattggatctgatcacgctccacatttaaaagaaaataaagataaggtatatccaaatactccatcaggaatgccaggagttcaaactttattgcctgtaatgttaaatcatattaatgatggaaaattatct

SEQ ID NO: 265508 - DNA, 842 bp, Unknown
  Bacterial polypeptide expressing nucleotide sequence isolated from the Sargasso Sea
tactgaacaacttgctcaacttaaaaatgttgaaggctgttgtggagttaaactttttgcaggatcttcgacaggtaatctgttggtagacaaagaagcggatatcgaaaaagtgatttctagtagtgacaggatagtttcaattcactctgaggatgaagatattattaaattaagaaaaaaatttatcagacaaggagatgttcactctcatcccgaatggagaaatgtagaatgcgcgatgtcctcaactcgtagagttgtaaaaattgcagaaagatataataaaaaaattcatgtcttacatgttactactaaagaagaggtcgattttttagctatgcataaaaaaaatgttacgtttgaaacaactcctcaacatttaactttgtatgcaccagattgctacgacaaattaggaacttacgctcaaatgaaccctcccttaagatcaaaagatcattatgatcgtctttgggttgctattaaaaataatgttgtagatgtacttggttcagatcacgctcctcacttaaagacaaataaagacaaagaatacccgaataccccctcaggaatgccaggtgttcaaactatttttccagttatgattgatcatgtgaacaatggaaaactagaattaaatcaacttataaatttgatgtgtgagaatccatgtaaaatttttggaattaaaaataaaggttttataaaagaaggttttgatgcagatttgacgatagttgatatggataaagaagttactattaagaatgaaatgatcgctagcaaatgtggatggacaccttttcataattatagagtaaaaggtttccctgtag

SEQ ID NO: 265509 - DNA, 995 bp, Unknown
  Bacterial polypeptide expressing nucleotide sequence isolated from the Sargasso Sea
agcaaaagaaattattgatgcaagtaatttactagtactacctggttgcatggatactcaagttcatttccgtgaacctggatcaactaacgcagaggacttacacactggtagtaaagcagctattgctggaggcattacaagtgtttttgagatgccaaatacaaatccgcccaccgcagatatgaaggaatttaataataagttaaatcttgctaaaaacaggatgtattcgaattatgctttttattttggagcaactccagataattcatctgatttagcaaaacttaaagctttagatggttgttgcggagtaaaactttttgcaggttcctcaactggaaatttgttagttgataaagaagaagatatcgaaaaagtctttaagaatacttcaaaaatagttgcggttcattctgaagatgaagaaataattaatttaagaaaaaaattagttgaaaaaggtaatgttcatactcatcctgtatggaggaatgaagaatgtgcaatgtcgtcaacaagaagaattgttaggattgcaaagagacttaataaaaaagctcatatattgcatgttacaacaaaagaagaagttgattttctttctcaaaataaaggaaacataacttttgaaattacgcctcagcatttaacaatatatgcgccggactgttatgataaacttggaacctttgctcagatgaacccacctttaagagataagtctcattatgatagattatggtacgctattagaaataattataatgatactatcggctcagaccatgcaccgcatttaaaagaaaataaattaaaagaatatccacagtcaccatctggtatgccaggagtgcaaacattgttacctgttatgctaaatcatgtgaatgacaaaaaacttacattagatcaactaatcaaacttctctgtgaaacccagcctcagtttttggtattaaaaataaaggtttcattaaaaaagattatga

SEQ ID NO: 265510 - DNA, 598 bp, Unknown
  Bacterial polypeptide expressing nucleotide sequence isolated from the Sargasso Sea
ttttatctcagcataaagggaacattactttttgagattactcctcagcatttaacattttacgctcccgattgttacgataaacttggtacatatgcacaaatgaatcctccactaagagaaaaatctcactacgatagattatggtatgcagtaagaaataactttaatgatacaatcgggtctgatcacgctcctcatttgaaagtaaataaagataaagtgtatcccaattctccatctggaatgcctggtgtacaaactcttatgccggtgatgctaaatcatgtgaacgaaggaaaattatcattatatcaattaattaatcttgtttgtgaaaatcctgttaaaatttttggtatccaaaacaaaggatttattaaagtgggatacgatgctgattttacaataattgacatgaataaaacgatagaaattaaaaacgaaaatattgagagcaaatgtgcatggtcaccgtttgatggttacaaatttaaaggtacacctactcacacaattattgctggtaaaattaaaatgcgaaagggaaaaattttaggtgacccagaaggtaaacctctttcttttaataaataat

SEQ ID NO: 265511 - DNA, 595 bp, Unknown
  Bacterial polypeptide expressing nucleotide sequence isolated from the Sargasso Sea
ttttctatcacaacacaaaggaaacattacatttgagattactccccagcatttaactctttatgcaccagattgttatgacaagcttggaacatatgctcagatgaacccaccattaagagataaatctcattatgatagattatggcacggggtgagaaataattttaatgacactatcggatcagatcacgctcctcatttaaaagaaaataaagataaggtttatccaaacacaccttcaggaatgccaggagttcaaactttgatgcctgtaatgttaaatcacataaatgatggaaaattatctcttaatcaattgatgaactttgtttgtgaaaatccagtaaagatttttggaattaaaaataaaggatttatcaaagaaggttatgatgcagactttacaattgtagatatgaacaaaacaattgaaattaaaaatgataatattgagagtaaatgtaaatggtcaccgtttaatggatttaaatttaagggaacacctacacacactattattgcaggaaaaattaaaatgcagaatggaaaaattttaggtgatcctgatggaacccctttacagtttagctga

SEQ ID NO: 265512 - DNA, 811 bp, Unknown
  Bacterial polypeptide expressing nucleotide sequence isolated from the Sargasso Sea
agttatttctaatagtagcaagattatttcagtccattctgaagatgaaaatatcttattatctagaaaaaaatttattaaggagggagatgttacttcacatccaatttggagaaatgaagaatgtgcacttgagtctacaaaaagagtagtaagaatagctcaaaaatataaaaagaaaattcatattcttcatgtaacgactaaacaagaaattgattttttctcagagaaaagagaaaacgtaacttttgaaatcacaccacaacatctgactttattcgctccagattgttatgaaaaactaaaaacttttagtcaaatgaatccacctttaagatcaaaagatcaccatgatagattatgggaagcagtaaaaaactctttggtaagcacaataggttccgatcatgctcctcataccaaagaagagaagaatagaaaatatcctttatcaccatctggcatgccaggcgttcaaaccttacttccagttatgcttgaccatgtgaataaaggtaaattaaaaatagaacaattgatcaaattagtttgtgaaaatccatgtcatttatttggaattaaaaacaaaggttacatcaaagaaaattatgatgctgatttaactatagtagatatgaataaagattttgtcataaaagatagttggatagaaagtaaatgtggatggactccttttaataattataaagtcaaagggtttccagtagctaccattgttaatggtgaaatagttatggaaaatggaaaaattatatcaaccccaaaaggcaagccattaaccttttaa

SEQ ID NO: 265513 - DNA, 628 bp, Unknown
  Bacterial polypeptide expressing nucleotide sequence isolated from the Sargasso Sea
tttgactacagaaggtgaatgtaattttcttaggaatttgtctaaagaaaattttgttagtgctgaagtttgtcctcaacatttaactttaactgttccagagtgttatcaaaaactcgggacattagctcagatgaatccaccgttacgcacaaagcgtcatgcagatgctttatggaggggacttaaagatggagtgattgattgcattgcaactgaccatgcacctcatactttaaatgaaaaacttaggccctatggtgaatcgccatcagggatgccaggggttgaaacttctttagctataatgctggataaagttaatcgtaatgaatgtacgttgaatgaagttgtatactggatgtctgcttcacctgccaaactatataaaatggttaggaaagggagtatagaagttggtaatgatgctgatctggttttaattgatatgaaaatgaagaaaaaggtgaaaaatggtcaattacaaactaaggttaattggtctccttatcatggaatggaattgcaggggtggcctgttagaactattgtaaatggacaaactgtttttttaaatggtgaagttgataaaaatgttcgtggaaaggaaatcacttttgcttcctaa

SEQ ID NO: 265514 - DNA, 931 bp, Unknown
  Bacterial polypeptide expressing nucleotide sequence isolated from the Sargasso Sea
tgcagtattagggggagtcacctctttatttgaaatgccaaatacaaatccacctacttctaatttagttgagtttgaaaaaaaacttcaattagccaaaaatagaatgcatagtaattatgccttttattttggtgccacacccgaaaatacagaacaactatcacagctcaaaaatttaaaaggctgctgtggtattaagctttttgctggatcatctacaggtaatttgttagttgacaaggaagctgatatcgaaaaagtaatttcaaaagcagatagaatagtttcaattcattccgaagacgaagaaatcttaaaattaagaaaaaaatttattaaaaagggagatgttcactcacacccagaatggagaaatagtgaaaccgcaatgtcttcgactcgcagagtggtaaaaattgctgaaagatataataagaagatccacgtgctacatgttacaacaaaagaagaagtagattttttagctatgcataaaaaaaatgtaacttttgaaacaacacctcaacacttaactttattcgctccagattgttacaataaattagggacatatgctcaaatgaaccctcctttgagaacaaaagaacactacgataggttatggatagcaataaaaaacaatattgttgatgttttaggttcagatcatgctccacatacaaaagaaaataaacaaaaagaatatcctaattcaccatctggaatgccaggcgtccaaactatattccctgtgatgctagatcatgtaaataatggtaaattaacattggaacaattgattaaactcatgtgtgaaaatccgtgcaaaatttttggaataaaagacaaaggctttatcaaagaagattttgatgctgatctaacgattgtagatatgaaccaagaacaattattaaagatgaaatga

SEQ ID NO: 265515 - DNA, 856 bp, Unknown
  Bacterial polypeptide expressing nucleotide sequence isolated from the Sargasso Sea
tagagagcctggctcaacagattcagaggacttagagagtggaagcagagcagcagttttagggggagttacatctttatttgaaatgccaaatactaatccaccaactgcaaatttagaggaatttcaaaaaaaactcaaagcagcaaaaaatagaatgcatagcaattatgcattttattttggggcaactcctcaaaatactaaacaacttgctcaacttaaaaatgttgaaggttgttgtggagttaagctttttgcaggatcttcaaccggaaatctgttggtagacaaagaagcggatatcgaaaaagtgatttctagtagtgacaggatagtttcgatacactctgaggatgaggatataattaaattaagaaaaaaatttattagacagggagatgttcactctcatcctgaatggagaaatgtagaatgcgcaatgtcctcaactcgtagagttgtaaaaattgcagaaaggtacgataaaaaaattcatgttttacacgttacaaccaaagaagaggtagattttttagctatgcacaaaaaaaatgttacatttgaaactactcctcaacatttaactttttatgcaccagattgttacgataaattaggtacttacgctcaaatgaacccacctttaagatcgaaagatcattacgatcgattatgggttgctataaaaaataatgttgtagatgttcttgggtcggatcatgctcctcacttaaaaataaataaagacaaagaatacccgaatactccctcagggatgccaggtgttcaaactattttcccagttatgattgatcatgtaaacaatggaaaactagagttaaatcaactcata

SEQ ID NO: 265516 - DNA, 679 bp, Unknown
  Bacterial polypeptide expressing nucleotide sequence isolated from the Sargasso Sea
cttaaaggcttagatggttgttgtggcgtaaaactttttgctggatcgtcaactggaaatcttttggttgataaagaagaagatattgaaacagtctttcagaatacttcaaaaatagttgcagttcattctgaagatgaagaaataattaacttgagaaaaaaattaattgaaaaaggtaacgttcatactcatcctgtatggaggaatgaagaatgtgctatgtcatctacaagaaggattgttaggattgcaaaaagacttaataaaaaagcacatatattacatgtgacaacaaaagaagaagtagatttcttatctcaaaataaaggaaacataacttttgaaattaccccccagcatttaacaatatatgcaccagattgttatgacaaacttggtaccttcgctcagatgaaccctcctttaagagacaagtctcattatgacagactgtggtatgctattagaaataactataatgatactataggttcagaccatgcacctcatttaaaagaaaataaattaaaagaatatcctcagtcgccgtctggtatgccaggtgtacaaacattattaccggttatgctaaatcatgtgaatgacaaaaaacttacattagatcaactaattaaacttctttgtgaaaaccccagtttctgtatttggtattaaa

SEQ ID NO: 265517 - DNA, 855 bp, Unknown
  Bacterial polypeptide expressing nucleotide sequence isolated from the Sargasso Sea
ttattcgaaatgcctaatacaaatccaccaacttctaatttagtagagtttgaaaaaaaacttcaattagcgaaggacagaatgcatagcaattatgctttttattttggagcaacgcccgagaatatagaacaactttctaaactaaaaaatttaaaagggtgttgtggaattaagcttttcgcagggtcatcaacaggaaatttattggtcgacaaagaagtagacattgaaaaagtaatttcaaaagctgatagaatagtttcaatacattcagaggatgaagaaatattaaatttaagaaaaaaatttattaaaaaaggaaatgttcattcgcaccctgaatggagaaatagcgagacagctatgtcttcaactcgaagagtagttaaaattgcagaacggtataataaaaagattcacgtgttacacgtaacgaccaaagaagaagtagatttcttagcaatgcataaaaaaaatgtaacctttgaaacaacacctcaacatctaactctttatgcaccagactgttatgataaattaggaacatatgcccaaatgaaccctcctttaagaactaaggaccattatgatagattatggactgctatcaaaaatgatattgtagatgttttaggctcagatcatgctcctcatactaaggaaaataaacaaaaagaatatcctaattcaccttcaggaatgccaggagtgcagactatttttccagtaatgttaaatcatgtaaacaataacaaactttctttagaacaacttattaaattaatgtgcgaaaatccttgtaggatatttggaattaaagacaaaggctttattaaagaaaactttgatgct

SEQ ID NO: 265518 - DNA, 895 bp, Unknown
  Bacterial polypeptide expressing nucleotide sequence isolated from the Sargasso Sea
gaagggtgctgtggaattaagctttttgcaggatcttccacaggcaatttgttggtcgctgaggaggatgatatagataaggtttttcaaaatgcttcaaaagtagtagctgtccattctgaggatgaagcaattttgaaagtaaacaagaaattaataaaagagggtgatgttcatacccatccattatggagaagtgcagagtgtgcaatagcatctactagaagaattgttcgaatagcagaaaagcacaataaaaaagctcatgtacttcatattacaacaaaagaagaaatagatttcttatctcaacataaaggaaacattacatttgagattactccccagcatctaactctttatgctccagattgttataacaaacttggaacctatgctcagatgaacccacctttaagagacaagtctcattatgatagattatggtatggagtaagaaataattttaatgatacgattggatcagatcatgctccacacttaaaagaaaacaaaaataaagtttatccgaatacaccttcaggaatgccaggagttcaaactttgatgcctgtaatgttaaatcacataaatgatggaaaattgtccttaaatcaattaatgaactttgtttgcgaaaatccagttaaaatatttggaattaagaataagggtttcattaaagaaggttatgatgccgactttacaattgttgatatgaacaaaactattgagattaaaaatgaaaatattgaaagcaaatgtaaatggtcgccctttaatggtttcaaatttaaaggaacaccaacacatactattattgctggaaaaattaaaatgcaggatggcaatattttaggtgatcctgatggaacacctttgcagtttaactaag

SEQ ID NO: 265519 - DNA, 691 bp, Unknown
  Bacterial polypeptide expressing nucleotide sequence isolated from the Sargasso Sea
atgaaaaaaattcaaataatcaaacctgatgattggcatgtccattttagagataataatattttaaaagcagtcatacctgaaacctcaagacatttttctcgcgcaatagtgatgcctaacttgactcctcctatactgactggcattgatgctagtgaatataaagaaaggataataaacgcaatacctaaaaaagataatttttttcctttgatgaccttatacttgactgaaaacacagataaaaaagaattaaaacaatcatatgaaaacggatcagtgtttgcagctaaactttatcccgctggagcaacaacaaattctgagtccggtgttcaaaatatacaaaatattattcctctacttgaaacaatgtcagaaattggaatgcctttattaatacacggtgaagttacagataagaatattgatatttttgacagagaaaaaatttttattgataaaacacttgatatgatttgtagaaaatttcctgaacttagaattacacttgaacatataactactgatgatgctgtaaaatatgttaaagaaggaaatataaatttatcagcaacaataacaccccatcatttagcgctaaatcgaaattctgtgtttgaaggagggataagaccacatttttattgtctgccaattcttaaaaaagaaaaacataggaaaagcc

SEQ ID NO: 265520 - DNA, 694 bp, Unknown
  Bacterial polypeptide expressing nucleotide sequence isolated from the Sargasso Sea
tcttctactagacgaattgtcagaattgcagagaaatataataaaaaagctcatgttcttcatataacaacaaaagaagaaattgattttttatcacaacataagggtaatattacgttcgagattactcctcagcatttaactttatatgctcctgattgttatgacaaacttggaacttatgctcaaatgaacccaccattaagagacaaatctaattatgataggttgtggtatgcagttaaaaataatctaaatgataccattggttcagatcacgctcctcatttaaaagtaaataaagaaaaagaatatcctaactcaccatctggtatgccaggagtgcaaactcttatacctgttatgcttaatcatataaatgatggaaaattatctttaaatcagttgatgaatcttgtgtgtgaaaatccagttaagatttttggaattaaaaataaaggatttattaaagaaggatatgatgctgactttacaattgtggatatgaataaaacaattgagattagaaatgaaaatattgaaagcaaatgtggctggtctccatttcatggaaataagtttagaggaagccctattgtaacaataattaatggaaaagttaaaatgaaagatggaaaaattttagataaacctgaaggcgagccacttgtattcaaagatgaatttatataaa

SEQ ID NO: 265521 - DNA, 847 bp, Unknown
  Bacterial polypeptide expressing nucleotide sequence isolated from the Sargasso Sea
ttttattttggagccacaccatataacactgaacaattagctgaattgaaaaatgttgaaggttgctgtggagttaaactctttgcaggctcatcaactggaaatttattagttgataaagaagctgatattgaaaaagtaatttcaagtagtgatagaatagtttcaattcactctgaggatgaggatataattaaattaagaaagaaatttataaaaaaaggaaatgttcattcgcatcctgaatggagaaacgttgaatgtgctatgtcttctactcgaagagtagtcaaaattgcaaataggtataataaaagaattcatgtattacatgttacgactaaggaagaagtagattttttggcaatgcataaaaaaaatgttacttttgaaacaacacctcagcatttatctttgtatgcgccacattgctatgataaattaggtacatatgctcaaatgaatcctccactcagatcaaaagagcactatgatcgtctttggatagctataaagaataatatagtcgacgttttaggatcagatcatgcacctcatttaaaagtcaataaagataaagagtatccaaatactccttctggaatgcctggcgttcagactatttttccagttatgattgaccatgtaaataatggtaaactcacattgagccagcttattaatttgatgtgtgaaaatccctgtaaaatatttggaattaaaaataagggttttataaaagaaggctttgaagcagattttacaattgttgatatgaataaagaagttactattaaaaatgaaatgatcgccagtaaatgtggatggactccttttcacaactata

SEQ ID NO: 265522 - DNA, 792 bp, Unknown
  Bacterial polypeptide expressing nucleotide sequence isolated from the Sargasso Sea
tatgagtataaaaaatataagaattatacaaccagacgattggcatgttcatttaagagaaggatctatgcttgaagtagtgtctaaacaatcttcaagagttaataagagatgtattgctatgccaaatttaaatactccaataactttaatggaaattgccacaaaatatatatctacgataaaatcatttgttaatgaaaaagactttacgccattaataccttgttttttgactgctgacctagatttaaataattttgaagaaggtttgagaaaagaagtttttataggagcaaaactatatcctaataaagctactacaaattcaaatttaggcatttcaaatattgaaagtatttttccttctttagaaattttagagaaaaataataaacccctattagttcatggagaaaaagtaagcgaaacagttgatatttttgatagagaaaaatattttatagatgatgagttgcaagttataataaaaaagttccctaatttaaaagttgttttagagcatgtttcatcaaagtatggcgctgactttgtaaatcaaaataataatatagcagcgacaataacacctcaacatcttacattaacaaaaaaagatgtttttttaaaagattctataaatccccatcatttttgtatgccagtggtaaaagaagaagaagatcttattgctttaagagcatatgctacttcaggaaatagtaaattttttgttggcactgattcggcacctcatcatgttgataaaaaacaccccaatctttcttctat

SEQ ID NO: 265523 - DNA, 925 bp, Unknown
  Bacterial polypeptide expressing nucleotide sequence isolated from the Sargasso Sea
ccttgcgaccagctacaccaatgcggaacccatcttggaggtgtttcgaagtggtattgccgatcgccttatcggcgcgtgcccgctggcaccggaacgcatttacgaggaccttttctctctgacggcaaggcgtctcgcccatgaaaagggatgggggcgtgaagcgttggttcgaatttcagccgctgtcgatgtcgcgtgttgggacatcattgggaagatggcgggcctgcccctttaccagttgttcggaggttatcgtgaccaggtcccttattacgtcacctgcgcctattaccgtgatggcaaagatctgattgaacttcgcgatgagataactgaactgaaggagcagggtcatagagggttcaaggcaaaggtcggtgggttgaccctggctgaggacattgagcgtcttagcgtcgttcgggacgttatcggtgatcactgtgacctcatggttgacgttaaccgagcctggagcctggaaacggcaacaaaggcggtcgaggctctcatacccctaaaaccaagatggctagaagaaccgcttcgctggtgggatgaccgccgagagttgaagcttttatctcagcgaacacaaattcctctgtcggccggagaaagcgaattgaccagctacggctgccgcgctgtcattgaggaacaggctattcaaattctgcagttcgacgtgaccatgttcgggggcttcaccgagggcaggaagatggcggcgttgtgtgaactcaaccatgtcgaggtcacgccgcaccacgactgcttcatccacgcccagcttgtcgcctccaccccggccggcgggttcgtcgaggctttcaccaacccagagcgtgacccgctccaggccgaattgtttcaaaatccaccaacccttcgcggagggggtggcttacccctt

SEQ ID NO: 265524 - DNA, 670 bp, Unknown
  Bacterial polypeptide expressing nucleotide sequence isolated from the Sargasso Sea
aagaatgttaaaattgctgaacgctacaataaaaaagctcatattcttcacattaccactaaagaagaagttgattttctttcgcaacataaaggcaatattacgtttgaaattacccctcagcatttaacattatttgctcctgattgttataataaacttggaacttatgctcaaatgaatcctcctttaagggataaatctcactatgatagattatggtatgcagtaagaaataatttaaatgatactattggttctgatcatgctccacatttaaaaattaataaagataaagaataccctaattcaccatcaggtatgccaggtgtgcaaactttaatgcccgtaatgttaaatcatgtaaacaatgggaagcttacattaaatcaattaatcaattttgtatgtgaaaatcctgtaaaaattttcggaattaaaaataagggatttataaaagagggttatgatgctgattttacaattattgatatgaacaaaataatagaaataaaaaacgaaaatatagaaagtaaatgtaaatggtcgccatttaacaaagatatgtttaaaggtgctcctgtagcaacaataattaatggtgaattaaaaatgaaggatggaaaaataattgaaggtccttccggtaaacctttaaaatttaattaat

SEQ ID NO: 265525 - DNA, 871 bp, Unknown
  Bacterial polypeptide expressing nucleotide sequence isolated from the Sargasso Sea
tttgctggatcttcccacgggaaatttattagttgctgaagaagatgatatagataaagtttttcaaaatgcttccaaagtcgttgcagttcactctgaagacgaagcaatattaaagattaataaaaaattaattaaagaaggagacgtacatacacatccagtgtggaggagcgcagagtgtgcaatagcttcgactagaagaattgttagaattgcagagaaacataagaaaaaagctcatgttcttcatataacaactaaagaagaaattgattttctttctcagcacaagggcaacattacttttgagataactcctcagcatttaactctttatgctccagattgttatgacaaacttggaacatatgctcaaatgaatccaccattaagggataaatctcattatgatagattatggtatggggtcagaaataattttaatgatacaattggttcagatcatgcgcctcatttaaaagaaaataaagataaagtttaccccaatactccttcagggatgccaggtgttcaaactttaatgccagtgatgttaaatcatgtcaatgatggaaagcttagtttaaatcagttgatcaattttgtttgtgaaaatccagttaaaatttttggtataaaaaataaaggatttattaaagaaggatatgatgctgactttactattgtaaatataaacaaaacaattgagattaaaaatgaaaatattgagagtaaatgtaaatggtctccatttaatggatttaaatttaagggaacacccactcacactataattgcaggaaaaattaaaatgcaagatgagaaaattttaggagatccagagggaactcctttacaatttagttaa

SEQ ID NO: 265526 - DNA, 847 bp, Unknown
  Bacterial polypeptide expressing nucleotide sequence isolated from the Sargasso Sea
ttcagaagaggcaaaagagacaatcaatgcagaaggtcatacagtattacctggttgcatagatacccaaactcattttagagaaccaggatcaacagatactgaggatcttcattcaggaagtagagcagcaattgcaggaggtattacaagtgtatttgaaatgcccaatacaaatccaccaacttctaatatgaaggaatttcaaagaaaattagatctcgctaaaaatagaatgtattgcaactatgctttttattttggagcaacagcagacaatgcagatgacctagcaagtctagagggtttggaaggttgttgtggaattaagctttttgcaggatcctcaactggaaatttattagttgctgaggaggatgacatagataaggtttttcaaaatgcttcaaaagttgtggcagttcattctgaggatgaagcaattttaaaagttaataagaaattgattaaagaaggtgatgttcatactcatccagtatggagaagtgcagaatgtgcaatagcatctactagaagaattgttcgaattgcagaaaagcacaacaaaaaagctcatgtacttcatattactacaaaagaagagattgattttctatctcaacacaaaggtaacattacatttgaaatcactcctcagcatttaacgctttatgctccagattgttatgacaagcttggaacatacgctcaaatgaacccgccattaagagataaatctcattatgatagattatggtttggggtgagaaataattttaatgatactattggatctgatcatgcccctcacttaaaagaaaataaagacaaggtatatccaaacacg

SEQ ID NO: 265527 - DNA, 886 bp, Unknown
  Bacterial polypeptide expressing nucleotide sequence isolated from the Sargasso Sea
aatgacattttttccaataggatcagtttctaaaggtcagaagggtgaagatttaacagaaatgttattaatgcaaaaaaacggtgctattgcttttagcgatgatggtattccaattcagaatgctcaatttatgaaacttgctcttacttatgccaaaatgttaaatgtaccaatcatgaatcatgctgaagacattcatcttagaaataatggagttatgaatgcttcttcaacatccaataatcttggtttaaaaggtaattcaagcttggcagaagctgtaatggtttatagagacttattgttagctgagtctttaagctcaaaattacacttattacatatttcaactaaggaaacagtcgaattattaaaaaaattcaaaaagaagaataaaccaatttcagcagaggtttcccctcatcatttatattttattgatgaagatatagatgaatttaatacaaatttaaaggttgcacctccagtacgaagcaaagaagatagaaaagcattaattgaaggcataaagtctggcctaattgactgtattgcaactgatcatgcgcctcatactattgaagataaagaaactacatttaatgatgccgaatttggaatgattggtcttgaatcatgctttggcgcagtgaataaagttcttgtaaaagaaaatggtatgagtttaaaatctctaattgaaaaactcactgtgaaccctagaaaaataatgaatttggaggcagatttattctctgttggctgtaaagcccaaataacaatttttgatcctaatgaaaaatgggtatttgaaaataaacatattttatcaaaatcatctaactctccatttataggaaaagatcttattggaagagttaaa

SEQ ID NO: 265528 - DNA, 607 bp, Unknown
  Bacterial polypeptide expressing nucleotide sequence isolated from the Sargasso Sea
aagaagaggtagatttcctttctcaaataaaggaaacataacttttgaaattactccacaacatctaacaatatatgcaccagattgttatgacaaacttggaacctttgcgcagatgaaccctcctttgagagacaagtctcattatgatagattgtggtacgctattcgaaataactataatgatactatcggttcagaccatgcaccgcacttaaaagaaaacaaattaaaagaatatcctcaatcaccatctggtatgccaggtgtacaaacattattacccgtaatgctaaatcatgtgaatgacaaaaaacttactttagatcagctgatcaaacttctttgtgaaaatccagtttcagtatttggtattaaaaataagggatttatcaaaaaagattatgatgcagattttacaataatagatatgaatagaacaattgaaataaaaaacaaaaatattcacagtaaatgtggatggagcccgtttgacggctataaatttaaaggttcacctgtttatacaattattaatggggatattaaaatgaaagaagatgaaattttaggagacccatctggcaaaccaattctttttgattga

SEQ ID NO: 265529 - DNA, 367 bp, Unknown
  Bacterial polypeptide expressing nucleotide sequence isolated from the Sargasso Sea
cttttaaatgctgcttttaatgataatcaaaagttttttttgggaacagattctgctccacataatattgatgacaaagagagtgcctgtggttgtgctggtgtttttaatacaattaattcagttcaaatcttagctcaactttttgataatcataagaaattagaaaaacttgaaaatttcattagtgttaatggtgcaaatcattatgaagttaaaaaaaatattcaaaaaattaaactttttaagatggataaaccaataaaatttagggattttttagaaacaaaaaattttaaaataaaaatttttaaacctcattttgatgttttttgggaaatagattacaagaaaggaaataaatgaa

SEQ ID NO: 265530 - DNA, 910 bp, Unknown
  Bacterial polypeptide expressing nucleotide sequence isolated from the Sargasso Sea
gcagcgatagctggaggaattactagtgtatttgaaatgccaaatactaatccaccaacatcaaacatgaaagagtttcaaagaaaattagatctcgctaaaaatagaatgtattgcaactatgctttttattttggtgcaacagctgataatgcagatgatctagcaaggctaaagggtttagaagggtgctgtggaattaagctttttgcaggatcttcaaccggtaatttattagttgctgaagaagatgatatagacagggtttttcaaaatgcgtcaaaagttgtagctgttcattctgaagacgaggaaattttaaaagttaataaaaaattaattaaagacggagatgttcatacacatccattgtggagaagtgtagaatgcgcaatagcatctacaagaagaattgttcgaattgcagaaaaacataataaaaaagctcatgtactacatattactacaaaagaagaaattgactttctttctcaacataagggaaatattacatttgagattacaccacagcatttaactctttatgctccagattgttatgacaagcttggaacttacgctcaaatgaacccaccattaagagataaatctcattatgatagactatggtatggggtgagaaataacttcaatgatactattggatcagatcatgctccacatttaaaagagaataaagacaaggagtatccaaacacaccttcaggaatgccaggtgttcaaactttaatgcccgtaatgttaaatcatataaatgatggaaaattatcacttaaacaattgatgaattttgtttctgaaaatccagttaagatttttggaattaaaaataaaggatttattagagaaggttatgatgctgactttactattgttgatatgaacaaaa

SEQ ID NO: 265531 - DNA, 514 bp, Unknown
  Bacterial polypeptide expressing nucleotide sequence isolated from the Sargasso Sea
gagcacatcaccaccgagcaggccgttgattacgtgggttcatccgatcgcaatctggcggccacgatcaccccccatcacctgcaaatcaatcgcaacgccatgttccttggcggcttgcgcagtgacttctactgcctgccggtggccaaacgggagcgccatcgtcttgctctgcggcgggccgccaccagcggagatcaacggtttttcctgggcactgattccgctcctcaccccagagccggtaaagaaacctcctgcggctgtgccggcatcttcaatgctccccatgcgcttgagagctacgcccaggtttttgcagaggaagaggccatgcatcacctcgagggtttcgcctccctgcacggtccagccttctacggcctgccggtaaacaacgacacggtcacccttgaaaaggttgctgttgacgtgcccgagctggtgaacgggttggttcccttccatgctggggagacgctgccctggaggcttcagccatgcatgtgat

SEQ ID NO: 265532 - DNA, 847 bp, Unknown
  Bacterial polypeptide expressing nucleotide sequence isolated from the Sargasso Sea
tttattagttgctgaagaggaggatattgataaggtttttcaaaatgcctcaaaagttgtagcagttcattctgaagatgaggcaattttaaaagttaataagaaattgataaaagagggagatgttcatactcatccagtatggagaagtgcagaatgtgcaatagcatctactagaagaattgttcgaattgcagaaaagcataacaaaaaagctcatgtacttcatattacaacaaaagaagaaattgattttctatcacaacacaaaggaaacataacatttgagattactccccagcatttaactctttatgctccagattgctatgacaaactcggaacttatgctcagatgaacccgccattaagagataaatctcattatgagagattatggtatggagtgagaaataactttaatgataccattggatctgatcatgctcctcatttaaaagaaaataaagataaggtatatccaaatactccttcagggatgccaggagttcaaactttaatgcctgtaatgttaaatcacataaatgatggaaaattatctcttaaccaattgatgaactttgtttgtgaaaatccagtgaaaatctttggaataaaaaataaaggatttattaaagaaggttatgatgcagactttacaattgtagatatgaacaaaactactgaaattaagaatgaaaatattgagagtaaatgtaaatggtcaccatttaatggatttaaatttaagggaacacctacacatacgattattgcaggaaaaataaaaatgcaggatggaaaaattttaggtgatcctgatggaacacccttgcagtttagctaa

SEQ ID NO: 265533 - DNA, 1156 bp, Unknown
  Bacterial polypeptide expressing nucleotide sequence isolated from the Sargasso Sea
tttaccaggatgtatagatactcaaactcattttagagaacctggatcaaccgatacagaagaccttcattcaggaagcaaggcagcaattgtcggaggaattaccagcgtttttgagatgccaaatacgaatccaccaacatctaataaggtggaatttcaaaaaaaattagatttagccaagaatagaatgtattgcaattatgcattttattttggtgcaacagctgataacgcaaatgatttatctgatttaaaaaatttggagggttgttgtggaattaaactttttgcaggatcttcgactggtaatttattagtcgctgatgaaaaagatattgaaaaagtctttcaaaacagttcaaaagttgttgcagttcattctgaagatgaggcaattttaaacgctaataaaaaattaattataaagggcgatgttcatactcatccaatttggagaagtgttgagtgcgcaatgtcatctacaagaaggattgtaagaattgctgagaagtatgagaaaaaagcacatattcttcatgttacaacaaaagaagaagttgattttttatcgcaacataaaggaaatattacatttgaaattactccacagcatttaacattatatgctcctgattgttatgataaattaggaacctatgcacagatgaatccacctttaagagacaaatctcattatgatagattatggtatggagtaagaaacaattttaatgatacaattggatcagatcatgctccacatttaaaagcaaataaagaaaaagaatatccaaattcaccatcagggatgccaggggtacaaactttaatgccagtaatgttaaaccatgtaaatgatggaaaattatcacttaatcagttaattaatcttgtttgtgaaaaccctgttaaaatttttggaataaagaacaaaggttatattaaaaaagattttgatgccgatttaactatagtagatatgaataaaaaacatataattaaaaatcaagaaatcgaaagtaaatgtaaatggtctccttttaatgaatatgagcttaaaggtaaaccagtgattacaatagttaatggaaaaacaaaaatgaaaaatggtaaaatattaggagaccccgagggcttaccattgattttttaa

SEQ ID NO: 265534 - DNA, 1116 bp, Unknown
  Bacterial polypeptide expressing nucleotide sequence isolated from the Sargasso Sea
attggacaaatttcagaagaagcaaaagatacaattaatgcagaaggccatacagtgttacctggttgcatagatacccaaacacattttagagaaccaggatcaacagatactgaggatcttcattcaggaagtagagcagcgatagcaggaggtattacaagtgtatttgaaatgccaaacaccaatcccccaacttccaatatgaaagagtttcaaagaaaattagatctcgctaaaaatagaatgtattgcaactatgctttttattttggagcaacagctgacaatgcggatgatttatcaagtctagagggtttggaagggtgctgtggaattaagctttttgcaggttcttcgactggtaatttattagttgctgaagaggatgatatagataaagtttttcaaaatgcttcaaaagtagtagcagttcattctgaggacgaggcaattttaaatgtaaataagaaattaattaaagagggtgatgttcatactcatccagtatggaggagcgtagaatgtgcgatagcatcaacaagacggattgttcgaattgcagaaaagcacaacaaaaaagctcatgtacttcatattacaacaaaagaagaaattgattttctatctcaacacaaaggaaacattacttttgagattactcctcaacatctaactctttatgctccagattgttatgacaagcttggaacttatgctcagatgaacccaccattaagagataaatctcattatgacaaattatggtatggagtgagaaataacttcaatgatacaattggatctgatcacgctcctcatttaaaagaaaataaagacaagatatatccaaacactccttcaggaatgccaggcgtccaaactttaatgccagtaatgctaaatcatatcaatgatggaaaattatcacttaatcaattgatgaattttgtttgtgaaaatccagttaagatttttggtattaaaaataaaggatttattaaagaaggctatgatgctgactttacaatagttgatatgaataaaacaattgagattaaaaatgagaatattgaaagtaaatgtaaatggtccccgtttaatggatttaaattt

SEQ ID NO: 265535 - DNA, 1309 bp, Unknown
  Bacterial polypeptide expressing nucleotide sequence isolated from the Sargasso Sea
atgttagatcttataattagaaatggacaatgttacatcgatggtgagttaaaagatgttgatgttgctttaaaagatggaaaaattgaacagattggacaaatttcagaaaaagcaaaagagacgattaatgcagaaggccttacagtattgcctggttgcatagatacccaaacacattttagagaaccaggatcaacagatactgaggatcttcattcagggagtagagcagcaatagtcggaggtataaccagtgtatttgaaatgcctaatactaatccgccaacttcaaatatgaaagagtttcaaagaaaattagatcttgctaaaaacagaatgtattccaattatgctttttattttggagcaacagcagataatgctgatgatttagcaagtctagagggtttagaaggctgttgtggtattaaactttttgcaggatcttcaactggtaatttattagttgctgaggaagatgatatagataaggtttttcaaaatgcttcaaaagtagtagcggttcattccgaggatgaggcaattttaaaagtaaataagaaactaataaaagagggcgatgttcatactcatccagtatggagaagtgcagaatgtgcaatagcatctactagaagaattgttcgaattgcagaaaagcataacaaaaaagctcatgtacttcatattacaacaaaagaagaaattgattttctatcacaacacaaaggaaatattacatttgagataactccacagcatttaactctttatgctccagactgttatgacaagcttgggacttatgctcagatgaacccaccactaagagacaaatctcattatgatagattgtggtatggagtgagaaacaacttcaatgatactattgggtctgatcatgcccctcatttaaaagaaaataaggataaggtgtacccaaatactccttcagggatgccaggagttcaaactttaatgcctgtaatgttaaatcacatcaatgatggaaaattatctcttaaccaattgatgaactttgtttgtgaaaatccagtgagaatctttggaataaaaaacaaaggatttattaaagaaggttatgatgcagactttacaatcgttgatatgaataaaacaattgaaattaaaaatgaaaatatagagagcaaatgtaaatggtcaccgtttaatggtttcaaatttaaaggaacacctacccatacaattattgcaggcaaaatcaaaatgcaggatggaaaaattttaggtgatcctgacggaacccctttacagtttaattaag

SEQ ID NO: 265536 - DNA, 1141 bp, Unknown
  Bacterial polypeptide expressing nucleotide sequence isolated from the Sargasso Sea
atgttagatcttattattaaaaatggaaaatgctatattgataaagatctaaaagatgttgatataggcattcaaaatagcaaaattagtaaaattggaaaaatagaagaagaagcaagtcagataattgatgcgagtgggcttacagttctgccaggttgtattgacacacaaacacattttagagaaccaggatcaacagatactgaggatttacatactggtagtagagcagcaatagttggaggtataacctcagtttttgaaatgcctaatactaatccagcaaccactaatcaaaaagaatttcagagaaaaattgatttagcaaaaaatcgaatgtattgtaatcatgcattttattttggcgccactcctactaatcaaagtgaattagcaagtcttaaaggcttagaagggtgttgtggtgttaaattatttgcaggctcatcaacaggaactttgttagtgcataaagaggaagatatagaaaaagtctttgagagcacgtctaaaattgttgcagttcattcagaggatgaagatattttaaatttaagaaaaaaattaagagaaaaaggaaatgtacattctcatccaatatggagagatgaagaatgcgcaatttcatcgacaagaaaaattgttaaaattgcaaaaagattaggtaagaaagctcatattttacatattaccactaaacaggaaatagattttttatctcagaacaaaggaaatattacttttgagataactccacagcatttaaccatgtatgcacctgactgctatgataaacttggaacgtacgctcaaatgaacccgccattaagagataaaagtcattatgatcgtttgtggtacgcggtaagaaataattacaacgatacaattggctctgatcatgctccacatctaaaagtgaataaggacaaagagtatcctgatacgccatctggaatgccaggagttcaaaccctgatgcctgtgatgcttaatcatgtaaatgatggtaaattatctctagaacagctaatgaaccttgtttgtgagaatccagctaaaatatttggaattataggtaaaggttttataaaagaaaagtatgatgcagactttacaattgtagatatgaataaag

SEQ ID NO: 265537 - DNA, 1042 bp, Unknown
  Bacterial polypeptide expressing nucleotide sequence isolated from the Sargasso Sea
atgttagatcttataattaaaaatggacaatgttatataaatggtaaattagaagatcttgatgttgctattaaaaatggaaagatagaagagataggccaaatatcagataaagcaaaagaaactatagaagctaaaggtttaatagttttaccgggatgtatagatacccaaacccattttagagaaccaggctctactgatacagaggatcttcattcggggagtaaagcagcaatagtgggaggaattacttctgtatttgaaatgccaaatactaatccaccaacatcgactaaaaaagaatttcaaaaaaaattagatctagctaaaaatagaatgtactgcaattatgctttttattttggtgcaactgcagataatgcaaatgaattagcagatttaaaaaatttagaaggctgttgtggaattaaactttttgctggctcctcaactggaaatcttttggttgctgatgagaaagatattgaaactgtatttcaaaatagttcaaaagttgtagcagtgcattccgaggatgaaaagattctaaatatcaataaaaagttaattaaaaaaggtgatgtacattcacatcctatttggaggagtgaggaatgtgcaatttcttctactagaagaatagttagaattgcagaacgttataataaaaaagctcatgtacttcacataacaactaagcaagaaattgattttttatctcaacataaaggtaacattacttttgagattactccacagcatttaacaatttatgcacccgaatgttatgataaacttggtacatatgcacagatgaacccccctttaagagacaaatctcattatgatagattatggtatgctgtgaaaaataatcttaatgatactataggatctgatcacgctcctcatttaaaagtaaacaaagataaagagtatcctaattctccatctggtatgccaggtgtgcaaactttgatgcctgcaatgttgaatcatgttaatgatggaaagttatcactaaaccaattaatcaatt

SEQ ID NO: 265538 - DNA, 782 bp, Unknown
  Bacterial polypeptide expressing nucleotide sequence isolated from the Sargasso Sea
tcactctgaagatgaagaaataattaacttgagaaaaaaattaattgaaaaaggtaatgttcatactcatcctgtatggaggaatgaagaatgtgcaatgtcgtctacaagaaggattgttaggattgcaaaaagacttaataaaaaagcacatatattgcatgttacaactaaagaagaggtagattttttatcacaaaataaaggaaatataacttttgaaattacgcctcagcatttaacaatatatgcgccggactgttatgacaaactcggaacctttgctcagatgaaccctcctttgagagacaagtctcattatgatagattgtggtacgctattcgaaataactataatgatactattggttcagaccatgcaccgcatttaaaagaaaacaaattaaaagattatcctcagtcaccatctggcatgcctggtgtgcaaacattgttacccgttatgctaaatcatgtgaacgataaaaaacttacattagatcagctaattaaacttctttgtgaaaacccagtttctgtatttggtattaaaaataagggtttcattaaaaaagattatgatgcagactttacaataatagatatgaatcgaacaattgaaattaaaaacgaaaatattcatagtaagtgtggatggagcccatttgatggctataaatttaaaggttcaccagtttttacaattattaatggggatattaaaatgaaagaagatgaaattttaggagatccaactggcaaaccaattcttttcgattaat

SEQ ID NO: 265539 - DNA, 876 bp, Unknown
  Bacterial polypeptide expressing nucleotide sequence isolated from the Sargasso Sea
aatgttagatctaataataaaaaatggacaatgttacattaatggtgaactaaaagatgttgatgttgctattaaagatggaaaaattcaacagattggtcaaatttcagacgaagcaaaagaaatagtagatgctgaaggacaaactgttttaccgggatgtatagatactcaaactcattttagagaacctggatcaaccgatacagaagatcttcattcaggaagtaaggcagcaattgttggaggaattaccagcgtgtttgagatgccaaatactaatccacctacgtctaacaaggtagaatttcaaaaaaaattagatcttgctaagaatagaatgtattgcaattatgcattttattttggtgcaacagctgataacgcgaatgagttatcaaatttaaaagatttggaaggttgttgtggaattaaactttttgcaggatcctcaacaggtaatttattagttgcagatgaagcagatattgagaaggtattccaaagtagttcaaaagtagttgctgttcattcggaagatgaggcaattttaaatgttaataaaaaattaattaaaaaaggcgatgttcatactcatccagtttggagaagtgtagagtgtgcaatgtcatccacaagaagaattgtaagaattgccgaaaagtacaaaaaaaaagcacacgttcttcatgtaacaacaaaagaagaagttgactttttatcacaacacaaaggaaatattacatttgagattaccccgcagcatttaaccttatatgccccagagtgttatgacaaacttgggacttatgctcagatgaatccacctttgagagataaatctcattacgacagactatggtatggagtaaaaaa

SEQ ID NO: 265540 - DNA, 1309 bp, Unknown
  Bacterial polypeptide expressing nucleotide sequence isolated from the Sargasso Sea
aatgttagatcttataattaaaaacggtcaatgttacatcgatggtgaattaaaagatgttgatgttgctataaaagatggaaaaattaagcagattggacaaatttcagaggaagcaaaagaaacaataaatgcagaaagtcacacaatattgcctggctgcatagatacccaaacacattttagagaaccaggatcaacaaatactgaggatcttcattcagggagtagagcagcaatagcaggtgggattacaagcgtgttcgaaatgcctaatactaatccgccaacttcaaatatgaaagagtttcaaaggaaattagatctcgcaaaaaatagaatgtattgcaattatgctttttattttggagcaacagcagataatgcagaagatctagcaagtttagaaggtttgaaagggtgttgtggaattaaactttttgcaggatcatcaacaggcaatttattagttgctgaagaagacgatatagataaggtttttcaaaatgcttcaaaagtagtagcggttcactctgaggatgaagcaattttaaaagtaaacaaaaaattaataaaagagggcgatgttcatactcatcctgtatggagaagtgctgaatgcgcaatagcatctacaagaagaattgttcgaattgcagaaaaatataataaaaaagcacatgtccttcatataacaactaaagaagaaattgattttctatcacaacacaaaggaaacattacatttgaaattactccccagcatttaactctctatgctccagattgttatgataagcttggaacatatgctcaaatgaacccaccattaagagataaatctcattatgacagattgtggtatggagttaaaaataactttaatgatacaattggatctgatcatgctcctcatttaaaagaaaataaagataaggtgtatccaaatacaccttcaggaatgccaggagttcaaactttaatgcccgtaatgttaaatcatattaatgacggcaagcttagtttaaaccagttgataaattttgtttgtgaaaatccagtaaagatttttggaataaaaaacaaaggatttattaaagaaggctacgatgcagactttactatagtagatatgaataaaactatagagattaaaaatgaaaatatagagagtaaatgcaagtggtcaccatttaatggatttaaatttaaaggaacaccaacacacactattattgctggaaaaattaaaatgcaggatggtaatattttaggtgatcctgatggaacacctttacagtttagctaa

SEQ ID NO: 265541 - DNA, 1309 bp, Unknown
  Bacterial polypeptide expressing nucleotide sequence isolated from the Sargasso Sea
atgttagatcttataattaaaaacggacaatgttacatcgatggtgagttaaaagatgtagatgttgctataaaagatggaaaaattcaaaagattggacaaatttcagaagaagcaaaagatacaattaatgcggaaggccatacagtattacctggttgcatagatacccaaacacattttagagagccaggatcaacagatactgaggatcttcactcaggtagtagagcagcaatagcaggaggtattacaagtgtattcgaaatgcccaacactaatccaccaacttctaatatgaaggaatttcaaaggaaattagatctcgctaaaaatagaatgtattctaattatgctttttattttggagcaacagcagataatgcagatgatttagcaagtttagaaggtttagaaggatgttgtggaattaaactttttgccggatcctcaacaggtaatttattagttgctgaagaagacgatatagataaagtttttaaaaatgcttcaaaagtagtagctgtccattctgaggatgaagcaattttaaaagtaaacaagaaattaataaaagagggcgatgttcatacccatccagtatggagaagtgcagaatgtgcaatagcatctactagaagaattgttcgaatagcagaaaagcataataaaaaagctcatgtacttcatattacaacaaaagaagaaattgattttctttctcaacataaaggaaacattacttttgaaattactccccagcatttaactctttatgctccagactgttatgacaagcttggaacatacgctcaaatgaacccaccattaagagataaatctcattatgatagattatggtacggggtgagaaataactttaatgatacaattgggtcagatcatgctcctcatttaaaagagaataaagacaaagtgtatccaaacacaccctcaggaatgccaggtgttcaaactttaatgcctgtgatgttaaatcacataaatgatggaaaattatctcttaatcaactgatgaactttgtttgtgaaaatccagttaagattttcggaattaaaaataaaggatttattaaagaaagttatgatgctgactttacaattgtagatatgaacaaaactattgagattaaaaatgaaaatattgaaagtaaatgtaagtggtcaccgtttaatggatttaaatttaaaggaacacccacacacacaattattgctggaaaaattaaaatgcagaatggaaaaattttaggagagcctgatggaacacctttacaatttagctaag

SEQ ID NO: 265542 - DNA, 1232 bp, Unknown
  Bacterial polypeptide expressing nucleotide sequence isolated from the Sargasso Sea
aatgttagatcttataattaaaaacggcaaatgttatattgatagtgaattaaaggatgttgatgttgccattaaagacaaaaaaattcataagattggtcaaatttcagaagaagctaaagaaataattgatgcaagcaatcatacagttttaccaggatgcatagatactcaaactcattttagagaacctggatcaactgacactgaagatcttcactctggaagtcgagcagcaattgcaggagggatcactagtgtttttgaaatgcctaacactaacccaccaacttctaataaaaaagagtttcaaagaaaattagatcttgctaaaaacagaatgtattgcaattatgcattttattttggtgcaacagctgacaatgcagatgatttagcaagtttaaaagacttagagggttgttgtggaattaaactttttgcaggatcttcgactggaaatttattagtcgctgaagaagatgatatagataaggtttttcaaaatagttcaaaagttgttgcagttcactcagaagatgaagccatattaaaagtaaataaaaaactaattaagcagggagacgttcacacccacccagtttggagaagtgcagaatgtgcaatttcatctaccagaagaatagttaggattgctgagaaatataataaaaaagcacatgttcttcatataacaacaaaagaggaaatcgacttcttatcacaacataagggaaacattacatttgagattactccacagcatttaacactatatgcacccgattgttacaataaacttggaacttatgctcaaatgaaccctcctttaagagataaatctcattttgacagattatggtatgcagtaagaaataattataatgacacaattggttcagatcatgcacctcatttaaaaataaataaagataaagaatatccgaatactccatcgggtatgccaggtgttcaaactttaatgccagtaatgttaaaccatgtgaatgaagggaaattatctttaacacaattaataaatcttgtttgtgaaaaccccgttaaaatttttggtatccaaagtaaaggatttatcaaagaaggatatgatgctgactttacaatagtagatatgaataaaactattgaaattaaaaatgaaaatattgagagtaaatgtgcatggtctccatttaatggatacaaatttagaggaacacctacccatacaa

SEQ ID NO: 265543 - DNA, 1318 bp, Unknown
  Bacterial polypeptide expressing nucleotide sequence isolated from the Sargasso Sea
atgtctgacaactatagtctcataattaaaaatggatcatgttatattgatgggaaatttcaaaatatcgatttagcacttacaggcaacaaaataaaaaaaattggaaaaattgacccaaataactctaagatttttgatgctagtaataaaattgttttacctggcgttatagatactcaagttcatttcagagagccaggagcaaataatgctgaaaacttagaaagcggaagtagagcagcagtagctggcggtgtaacctctgtgtttgaaatgccaaatacaaatccacctacttcaacttttgatgaatttaataaaaaactagatgctgctaaaaatagaatgttttgtaattatgcattttatttcggagcgaccccaaataatatgaaagagcttgctgcggttgatactttaaagggatgctgtggggtgaaactttttgccggttcctctacagggaatcttttagtaagccaagaaaaagatattgagaaagttatatcaaatagtagcaaaattatctccgtacattctgaagatgaaaatattcttttatctagaaaaaaatatattaaagatggtgatgttcactcacatccaatttggagaaacgaggaatgtgcactagagtcaacaaaaagggtagtaagaattgcgcaaaagtataaaaagaaaatccatatacttcatgtaacaaccaaacaggagatagatttttttaaagaaaaaagagacaacgtaacttttgaaataacacctcaacacctaactatatatgcgcctgattgttatgatagtttgaaaacttttagtcaaatgaatccacctttaagatcaaaggatcactacgatagattgtggaatgctgttgacgaatctttagtaagtacaatcggatctgatcatgcacctcatacaaaagaagaaaaaaataggaaatatcctttatcaccatctggaatgccaggagtgcaaactttacttcctgttatgcttgatcatgtaaataaaggtaaactaaaaatagaaaaattaataaaattggtttgtgagaatccttgtgatttatttggtattaaaaacaaaggatacattaaagaaaactttgatgctgatctgacagttattgatatgaataaagaggttgttattaaggacaattggattgaaagtaaatgtggatggacaccctttaataattttaaagtaaaaggttttcctgtagcgacaataattaatggagaaattgtgatggaaaataacaagattgcatcacctgccaaaggcaaaccattaaattttaattaaa

SEQ ID NO: 265544 - DNA, 1312 bp, Unknown
  Bacterial polypeptide expressing nucleotide sequence isolated from the Sargasso Sea
atgttagatttaataataaaaaatgggtcctgctatattgatggaaatctaactaaaacaaatattggtatatcaaatagcaaaatctctcatattggaaatcttgaaaatgagaaaagcaagaacatttatgatgcaaacaatttaattgttttacctggttgtttagatacccaagtgcattttagagagccaggatctacagatacggaggatcttcattcaggtagtagagcagcaattgtaggaggtattactggtgtatttgaaatgccaaatacaaacccgccaacctcaaataaaaaagaatttcaaagaaagctagatcttgcaaaaaatagaatgtactgcaactatgctttttattttggcgcaacagctgataatgcaaatgatttagcaagtttaaaaacattagaaggatgttgtgggataaaattatttgcaggatcttcaactggaaatttattagttgctaaagaagatgacattgacaaggtttttcaaaatagttctaaagttgttgcagttcattccgaagatgaggcaatattaaatacaaataaaaaacttattaaaaatggagatgttcatacacatccagtatggagaagtgtggagtgtgcattatcatcaacaagaagaattgtaagaattgccgaaagatataacaaaaaggcacacattcttcatataacaactaaggaggaagtagattttttatctcaacacaaaggcaatattacatttgaaattaccccccaacatttaacactttacgctcctgactgttatgacaaacttggtacttatgctcaaatgaaccctcctttaagagataaatcacattacgacagattgtggtatggggttagaaacaattttaatgacaccataggatccgaccatgctccacatctaaaaacaaataaaaataaagaatatccaaattcaccatcaggaatgccaggtgtacaaacactgttacctgtaatgctaaatcatgtaaatgatggaaaattatccttaaatcaacttatgaattttttgtgtgaaaatcctgtaaaaatttttggaattcaaaataaaggttttattagaaaagattatgacgcagattttacaattgttgatatgaacaaaataattgaaataaaaaatgaaaagattgaaagtaagtgtggttggtcaccatttaatggatacaaatttaaaggaacacctgttgcaacaattataaacggaaaaattaaaatgaaagacggcaatataattggtgatcctgagggagttcctttaaaatttgaataaa

SEQ ID NO: 265545 - DNA, 1312 bp, Unknown
  Bacterial polypeptide expressing nucleotide sequence isolated from the Sargasso Sea
aatgttagatcttattattaaaaatggaaaatgctatattgataaagatctgaaagatgttgatataggcattcaaaatagcaagattacaaaaattggaaaaatagcagaaaaggctagtcaaacaatagatgcaaatggacttacagttctacctggttgcatagatactcaaacacattttagagaaccaggttcaacagataccgaggatttacacacaggcagtagggcagcaatagttggcggtatcacttcagtttttgaaatgccaaacactaatccagcaactacaaatcagaaagaatttcagagaaaaatagatctagcaaaaaatagaatgtattgtaatcacgcattttattttggcgccactcctaccaatcaaagtgaattagcgagtcttaaaggattagaagggtgttgtggagttaagttatttgcaggttcttcaacaggtacccttttagttcataaagaagaagatatagaaaaagtatttgaaagcacgtcaaaaattgttgcagtccattcagaagatgaagatattttaaacttaagaaaaaaattaagagaaaaagggaacgttcattctcatcctatatggagggatgaagaatgtgcaatttcatcgacaagaaaaattgttaaaattgcaaaaagattaggtaaaaaagctcacatcttacatattactactaaacaagaaatagattttttatctcagaataaaggcaatattacttttgagataactccacaacatttaaccatatatgcacctgactgctatgataaacttggaacttacgctcaaatgaatccgcccttaagagataaaagtcattatgatcgtttatggtatgcagtaagaaataattataatgatacaattggctctgatcatgctccacatctaaaagagaataaagacaaagagtatcctgacacgccgtctggaatgccaggagttcaaactttaatgcctgtaatgcttaatcatgtaaatgatggtaaattatcgcttgaacaattaatgaatcttgtatgtgagaaccctgcaaaaatttttggaattataggaaaaggtttcataaaggaagagtatgatgcagactttacaattgtggatatgaataaaattattgagattaaaaatgataaaatagaaagtaagtgcggttggtcgccttttaatggatataagtttaagggaaccccagtttatacaattataaacggagagattaaaatgaaggatggcgagatcattggagaaccatctggaaaaccaattagatttgaggattag

SEQ ID NO: 265546 - DNA, 1097 bp, Unknown
  Bacterial polypeptide expressing nucleotide sequence isolated from the Sargasso Sea
aagtaaggcagcaattgtcggaggaattacaagtgtgtttgagatgccaaatactaacccaccaacatctaataagatagaatttcaaaaaaaattagatctcgctaagaatagaatgtattgcaattatgcattttattttggtgcaacagctgacaacgcgaatgatttatcaaatttaaaagacttggaaggttgttgtggaattaaactttttgcaggatcttcaacaggtaatttattagttgcagatgaagcagatattgaaaaggtatttcaaagtagttcaaaagttgttgctgttcattcagaagatgaggcaattttaaatgttaacaaaaaattaattaaaaaaggtgatgttcacacccatccagtctggagaagcgtagagtgcgcaatgtcgtccacaagaagaattgtaagaattgccgaaaaatacaataaaaaagcacatgttcttcatgttacaacaaaagaagaagttgattttttatcacaacataaaggaaatattacatttgagattactccgcagcatttaactttatatgctcctgagtgttacgataaactcggaacctatgctcaaatgaatccacctttaagagataaatctcattatgatagattatggtatggagtaaaaaataattataatgatacaattggatcagatcatgcaccacatttaaaagtaaataaagaaaaagaatatccaaattcaccatcgggaatgccaggtgtgcaaactttaatgccagtaatgctaaatcatgtaaatgatggaaaattatcacttaatcaattaattaatcttgtttgcgaaaatcctgtaaaaatttttggaataaaaaacaaaggatttattaaagaagggtatgatgctgattttacgattgttgatatgaataaaataattgagattaaaaatgaaaatattgaaagtaaatgtggctggtctccatttcatagatataaatttaaaggaagtcctgttgcaactataattaacggaattgttaaaatgaaaaatggaaaaattctaggaagccccaaaggtaaaccacttttattcaaaaatgaatttaaataaa

SEQ ID NO: 265547 - DNA, 907 bp, Unknown
  Bacterial polypeptide expressing nucleotide sequence isolated from the Sargasso Sea
ttaaaagatttagagggttgttgtggaattaaactttttgcaggatcttcaactggtaatttattagttgcagatgaagtagatatcgagaaggtttttcaaagtagttcaaaagttgttgctgttcattcagaagatgaggcaattttaaatgttaacaaaaaattaataaaaaaaggggatgttcatacacatccagtttggagaagtgtagagtgtgcaatgtcgtctacaagaaggattgtaagaattgcagagaaatataagaaaaaagcgcacgttcttcatgttacaacaaaagatgaagttgattttttatcacaacataaaggaaatattacatttgaaattacaccgcagcatttaacactttacgctcctgattgttatgaaaaacttggaacctttgcccagatgaatccacctttaagagataaacctcattatgatagattatggtatgcaataaaaaataattttaatgacacaattgggtcagatcacgccccacacttaaaagtaaataaagaaaaagaatatccaaattcaccatcaggaatgcctggagtgcaaactttaatgcctgtaatgttaaaccatgtaaatgatggaaaattatcacttaatcaattaattaatcttgtttgcgaaaatcctattaaaatttttggaattaaaaataaaggatttattaaagaaggatatgatgctgactttacaattgttgatatgaacaaaacaattgagattaaaaatgaaaatattgaaagcaaatgtggctggtctccatttgatgggtataaatttaaaggaactcctgttgcaacaataattaatggtaaagttaaaatgaaagacggaaagataattggggagccagatggaataccaatgaaatttaaataac

SEQ ID NO: 265548 - DNA, 1297 bp, Unknown
  Bacterial polypeptide expressing nucleotide sequence isolated from the Sargasso Sea
tatgatttcaggaaagagtaccaaaaaagttttattaaagtcaggaagaataattgatccattttcaaagaaaacattcaatggagatattttaattgaaaatggaaaaatttcaaaaattggcgaatctatttcttcaaaaggtaaagattataaaattgttgactgtaaaggattagtagtaacacatggtttttgcgatatgcatgtacattttagagagcccggtagggaagataaagaaactttagagtcaggatctttcgcagcgcttggaggagggtttactcaagtctgtacaatggctaacacaaaccctattatagattcccctgagcatattcactatatagttagcaaaagttcaaaactaccaattgacatttttccaataggttcagtctctaaaggtcagaagggtgaagatttaacagaaatgttattaatgcaaaaaaatggtgctattgcttttagcgatgatggtattccaattcagaatgctcaatttatgaaacttgctctaacttatgcgaaaatgttagatgtaccaattatgaatcatgctgaagatatttatcttagaaataatggagttatgaatgcttcttcaacttccaataatcttggattaaaaggtaattcaagcttaggggaagctgtaatggtttacagagacttattattagctgattctttaagctcaaaactacatttactacatatttcagcaaaggaaacagtcgaactattaaaaaaattcaaaaagaaaaataaacctatctcagcagaggtatctccacatcatttatatttcattgatgaagatataaatgaatttaatactaatttgaaggttgcgcctcctgttcgaagcagagaagatagaaaagcactaattgaaggaataaagtctggcctaattgattgtattgcaaccgatcatgcacctcatacaattgaagataaagaaactacatttaatgatgctgaatttggaatgattggacttgaatcatgttttggtgtagtgaataaagttcttgttaaagaaaatggtatgagtttaaaatctcttattgaaaaactcactgtaaatcctagaaagataatgaatttggaagcagatttattctccgttggttgtaaagcccaaataacaatatttgatcctaatgaaaaatgggtatttgaaaataaacatattttatcaaaatcgtcgaactctccgtttatcggagaagatcttgttggaagagttaaatatgttatttcaaaaaatcagtttttcacattataa

SEQ ID NO: 265549 - DNA, 1135 bp, Unknown
  Bacterial polypeptide expressing nucleotide sequence isolated from the Sargasso Sea
atgttagatctaataataaaaaatggacaatgttacattaatggtgaactaaaaaatgttgatgttgctattaaagatggaaaaattcataagatcggtcaaatttcagacgaaacaaaagaaatagtagatgctgaaggacaaactgttttaccgggatgcatagatactcaaactcattttagagaacctggatcaaccgatacagaagatcttcattcaggaagcaaggcagcaattgttggaggaattacaagtgtgtttgagatgccaaatactaacccaccaacatctaataagatagaatttcaaaaaaaattagatcttgccaagaatagaatgtattgcaattatgcattttattttggcgcaacagctgataacgcgaatgatttatcaaatttaaaagacttggaaggttgttgtggaattaaactttttgctggatcttcaacaggtaatttattagttgcagatgaagcagatattgagaaggtgtttcaaagtagttcaaaagtagttgctgttcattctgaagatgaggcaattttaaatgttaataaaaaattaattaaaaaaggcgatgttcacacccatccagtttggagaagtgtagagtgtgcaatgtcatccacaagaagaattgtaagaattgctgaaaaatataaaaaaaaagcacatgttcttcatgtaacaacaaaagaagaagttgattttttatcacaacacaaaggaaatattacatttgagattactccacagcatttaactttatatgctccagagtgttatgaaaaacttggaacctatgctcagatgaatccacctttaagagacaaatcccattacgatagactgtggtatggaataaaaaatagccttaatgacacaattggttcagatcatgctccacatttaaaagaaaataaagaaaaagaatatccaaattcaccatcagggatgccgggagtacaaactttaatgccagtaatgttaaatcatgtaaatgatggaaaattatcacttaatcaattaatcaatcttgtttgtgaaaatcctattaaaatttttggaattaaaaacaaaggatttattaaagagggatatgatgctgactttacaattgttgatatga

SEQ ID NO: 265550 - DNA, 1177 bp, Unknown
  Bacterial polypeptide expressing nucleotide sequence isolated from the Sargasso Sea
gatgcagaaaataaaattgttttaccccggtataatagatacgcaagttcactttagagagcctggttcaactgatgctgaagatttagaaagtggaagtagagcagctgtattaggcggagtaacatcattatttgagatgcctaacactaacccaccaacagccaatttagttgaatttgaaaaaaaacttaaagctgccaaaaataggatgcatagtaattatgctttttattttggtgccacgccatcaaatactgatcaacttgcacatttaaaaaatgttgaaggatgctgtggtgtaaaactttttgctgggtcttcaacgggaaacttattagtagataaagaggcagatattgaaaaagtaatttcaagcagcgatagagttgtttctattcactctgaggacgaagacataattaaacttagaaaaaagtttataaggaaaggggatgttcattcacatcacgagtggagaaatgttgaatgtgcaatgtcctctactcgaagagtagtaaaaattgctgaaagatataataagaaaattcatgtattgcacgtaactacaaaagaagaggtagattttttagcaatgcataaaaaaaatgttacttttgaaaccactcctcagcacttaacattgtacgcacctgattgttatgacaagttaggaacttatgctcaaatgaatcctcctttacgaggaaaagaacattatgaccgtctgtggactgcaataaagaataatattgtagatgttttaggatcagatcatgctccacatttaaaagtaaataaaaataaggaatatccggattctccatcgggaatgccaggagttcagactatttttccagttatgatcgaccatgttaacaatggaaaacttacattaaatcaacttattaatttgatgtgcgaaaatccatgtagaatatttggaattaagaacaaggggtttataaaagagggctttgatgcagatttgactatagtagatatgaagaaagaggtgataattaaagatgaaatgatagcgagcaaatgtggttggacaccttttaataattataaggttaaaggttttccagtcggaactattgtaaacggaatattagtaatgtctgatggtaaaatattagtcgaatcaaaaggcaaacctctaagcttttag

SEQ ID NO: 265551 - DNA, 589 bp, Unknown
  Bacterial polypeptide expressing nucleotide sequence isolated from the Sargasso Sea
gataacgttctgagtaaaatccgtactgataacccagctttaaagattatcatggaacatattaccactaaagacgcagtagattatgttttttcagaaaacgaaaatttagcagcaacagttactgcccatcacctttccataaatagaaacgatttattagccggcggcataaggcctcatttttattgtctaccagtggtaaaacgagaaactcatcgacttgcactggtagaggcggttgtttcggggtcgccaaaattttttctaggaacagatagcgcgccacatttagaccgggataaggaaagttcctgcgggtgcgctggctgttttactgccacaaattcattggaaattttagcacatatttttgaagagcaaaacgccttgaataaattagagttatttacatccatcaacggagctaaattttatggaaagaatattaacagtgataaaataaggattgtaaagaaagataaacccatttcttttccagaaaaaatatctactcctagtggagaaataacagtctttaaacctaactttaaaacaaaatggcaagtacaaattcaatttaaataaa

SEQ ID NO: 265552 - DNA, 1006 bp, Unknown
  Bacterial polypeptide expressing nucleotide sequence isolated from the Sargasso Sea
atgttagatctaataataaaaaatggacaatgttatattaatggtgaactgaaaaatgttgatgttgctattaaaaatggaaaaattcagcagattggtcaaatttcagatgagacaaaagaaatagtaaatgctgaaaaaaaaattgttttaccaggttgtatagatacccaaacacattttagagaacctggatcaaccgacacagaagatcttaattcaggaagtaaggcagcaattgttggaggaattaccagtgtttttgagatgccaaatactaatccgccaacatctaataaggtagaattccaaaaaaaattggatctcgcaaacaatagaatgtattgcaattatgcattttattttggtgcgacagctgataatgcaaatgagctatcagatttaaataatttggaaggttgttgtggtattaaacttttcgcaggatcttcaactggtaatttattagttgcagatgaagcggatattgagaaggtgtttcaaagtagttcaaaagttgtagctgttcattcggaagatgaagcaattttaaacttaaataaaaaattaattaaaaaaggtgatgttcatactcatccggtttggagaagcgtagagtgtgcaatgtcatctacaagaaggattgtaagaattgctgaaaaatataaaaaaaaagctcacattcttcatgttacaacaaaagaggaagttgattttttatcacaacacaaaggaaatattacatttgaaattactccacagcatttaactttatatgctcctgattgttattataagcttggaacctatgctcagatgaatccacctttaagagataaatcacattttgatagattatggtatggagtaaaaaataattttaatgatacaattggatcagatcatgctccacatttaaaaataaataaagaaaaagaatatccaaattcaccatcaggaatgccaggggtacaaactctattgccggtaatgctaaaccatgtaa

SEQ ID NO: 265553 - DNA, 310 bp, Unknown
  Bacterial polypeptide expressing nucleotide sequence isolated from the Sargasso Sea
catgcaaacgctcaccattactacgccagacgattggcaccttcactttcgcgataacgaaatgctagctgaaacagtgcctgcaaccgcacgttgtttccagcgtgctattgttatgccaaaccttgtaccaccggtggttaatgctgaaatggccatggcgtacaaagggcgaattgaagctgcgcgacctaaaggcagtagctttgagccattaatgaccttattccttactaatcaaactacacctcaagacattatcgatgcaaaacaagcgggcgtaactgcgtgtaagctatatcctgcaggg

SEQ ID NO: 265554 - DNA, 1315 bp, Unknown
  Bacterial polypeptide expressing nucleotide sequence isolated from the Sargasso Sea
atgtctgataattttagtctcattattaaaaatggatcttgctatattgatggcaagcttacaaaaacagatattggtttatcaggcaacaagattaaaaagattggcaaaatcgaacttaatagctctaaagtttatgatgctacagataaagttgttttgccaggtatcattgatactcaagttcattttagagagccaggatcaactgatgcagaggatttagaaagtggaagtagagccgcggtattaggtggagtaaccgctttatttgaaatgcctaacactaaccctcctacttctaatttggttgagtttgataaaaagttacaagcagctaaaaatagaatgcatagtaattatgctttttattttggagcaacacctgacaatactaatcaacttgctgaactaaaagatgttgaaggatgttgtggtgtaaaattatttgcgggctcatcaacagggaatttattagtagataaagaggccgatatcgaaaaagtaatttccagtagtgatagagttgtttctattcactctgaagatgaagatattattaaacttagaaaaaaatttattaaaaaaggagacgttcattcacacgctgagtggagaaatgtagaagttgcaatgtcctctactcgtagagtagttaaaattgcagagcgatataataaaaaaattcacgtacttcatgttacgacgagagaagaggtagactttttagcaatgcacaaaaaaaatgttactttcgaaactacacctcagcatttaactatgtatgcaccagattgttacgacaaacttggaacttatgctcaaatgaatcctcctttaagaactaaagaacactatgatcgtttatgggtagcaattaagaataatatagtcgatgtgctaggttccgaccatgctccgcacttaaaaaaaaataaagacaaagaatatccaaattctccttcaggtatgccaggagttcaaactatttttccagttatgctggatcatgtaaataatggaaaactaacactccaacaactgataaacttaatgtgtgaaaatccttgtaaaatattcgggattaaaaataagggatatctaaaagagggttacgacgcagatttaacgattgctgatatgaataaagaggttgttatcaaaaatgagatgatagcaagtaaatgtggatggacacctttcaacaatcataaagtaaaaggtttccctgtagctacaatcgtaaatggtcatttggtaatgtctgatggtaaagtggttgcagagtctaaaggaacaccgttaaagttttaaa

SEQ ID NO: 265555 - DNA, 676 bp, Unknown
  Bacterial polypeptide expressing nucleotide sequence isolated from the Sargasso Sea
tctactagaagaattgttagaattgcagaaaagtacggtaaaaaagctcacgttcttcatattacaactaaagaagaaattgattttttatcacaacataaaggtaatattacttttgagattacaccacagcatttaactctatatgctccagactgttatgacaaactcggaacttatgcgcagatgaatccaccattaagggacaaatctcattatgatagattatggtatgcagttaagaacaatttaaatgacacaataggttctgatcatgctccacatttaaaagtaaataaagataaggtatatcctaatacaccatctggtatgccaggagttcaaacattaatgccagttatgctaaatcatgtgaacgatggaaagctttctcttaagcaattgataagtcttgtatgtgaaaacccaattaagatttttggaattaaaaacaaaggatttattaaagaaggatttgatgctgattttactattgtagatatgaacaaaacaattgagattaaaaatgaaaatattgagagtaaatgtggctggtctccttttaatggatttaaatttaaaggtacgccaactcatacaattattgctggaaaaattaaaatgcaagatggtaaaattataggagagccagaaggtaaacctttagtcttttagt

SEQ ID NO: 265556 - DNA, 300 bp, Unknown
  Bacterial polypeptide expressing nucleotide sequence isolated from the Sargasso Sea
atgccaagcataaaaaagaaaatgcgtgcggctgcgcgggttgttatagcgcatggtctgcaattgagctttatgccgaagtgttcgagcagctaggcgcaatagataggcttgaaggatttgctagccattacggtgcagatttttatgatttaccacgaaatacgactacaatgacattagtgaaagagtcgtggacggtgccagaacaagtaaccctagctgatggcaccgatatggttccattttatgcggggcaaacgttgcagtggaaattagaaaaggcatttcaagcgtagt

SEQ ID NO: 265557 - DNA, 1315 bp, Unknown
  Bacterial polypeptide expressing nucleotide sequence isolated from the Sargasso Sea
catgtctgataattatagtcttattattaaaaatggttcctgttatatcgatgggaaaataattaaatctgatatcggtttacatgaaaataagattaaaaaaataggaaatatagaggaaaataattctaaagtttacgacgcaactggcaaagtagttttgccagggatcattgacacccaagtacattttagagaacctggatctactgatgcagaagatttagaaagcggaagtagagcagctgttcttggcggcgtaacctctttgtttgaaatgccaaataccaatcctccaacagcaaatttagtagagtttgaaaaaaaattaaaagccgcaaaaaatagaatgcatagtaattatgcattttattttggagcaactccgcaaaatactgaacaacttgcacaacttaaaaacgttgaaggttgttgtggagttaaactttttgcaggatcttcgacaggcaacctgttagtagacaaagaggcggatatcgaaaaagtgatttctagtagtgacaggatagtttcaattcattctgaagatgaagatattattaaacttagaaaaaaatttattagacaaggagatgttcactctcatcctgaatggagaaatgtagaatgcgcaatgtcctcaactcgtagggttgtaaaaattgcagagagatataataaaaaaattcatgtcttacatgtcactaccaaagaagaggtggattttttagctatgcataaaaaaaatgttacctttgaaactactcctcaacatttaactttgtatgccccagattgttacgataaattaggcacttacgctcaaatgaacccgcccttaagatcaaaagatcattacgatcgcttgtgggttgctataaaaaataatgttgtagatgtccttgggtcagatcatgctccgcatttaaaaataaataaagataaagaatacccaaatactccatcaggaatgccaggtgttcaaacaattttcccagttatgattgatcatgttaacaatggaaaactttcattaaatcagctaataaatttgatgtgtgaaaatccgtgtaaaatctttggaattaaaaataaaggatttataaaagagggttttgatgctgatttgacaatagttaatatggataaagaagttactataaagaatgaaatgattgctagcaaatgcggatggacaccatttcataattataaagtaaaaggttttcccgtaggtacaattgtaaatggtattttagtaatgtccgatggaaaaattttagttgagtctaaaggacagcctttaaagttttag

SEQ ID NO: 265558 - DNA, 772 bp, Unknown
  Bacterial polypeptide expressing nucleotide sequence isolated from the Sargasso Sea
agatgaaaatattctgttatctagaaaaaaatttattaaagaaggtgatgttacctcgcaccctgtttggcggaatgaggaatgtgcactagagtccactaaaagagtagtaagattagctcaaaaacataaaaagaaaattcatattcttcatgtttcaacaaaagaagaaattgatttcttttcagaaaagagggatggggtaacttttgaaattacaccacaacacttaaccttgtatgcccctgattgttatgaaaatttaaaaacttttagtcaaatgaacccacctttaagatccaaagaccactatgatagattatgggatgcagtagacgaaactttagtgagcaccataggttctgaccatgccccacatacaaaagaggaaaaaaatagaaaataccctttgtccccatctggaatgccaggagtgcaaactttacttcctgttatgcttgatcatgtaaataaaggaaaactaaaaatagaaaaactaataaaattagtttctgagaatccttgtgatttatttggtattaaaaataaaggatatataaaagaaaactttgatgctgatctgacagttattgatatgaataaagaagttattattaaggacgattggattgaaagcaaatgtggatggacaccttttaataattataaagtaaaaggttttcctgtagcgacaatagttaatggagaaattgtgatggaaaataataagattatatcacctgctaaaggcaagccattaaattttaattaa

SEQ ID NO: 265559 - DNA, 1306 bp, Unknown
  Bacterial polypeptide expressing nucleotide sequence isolated from the Sargasso Sea
aatgttagatcttataattaaaaatggaagatgttacatcaatggagaattaaaagatgtagatgtagctgttaaagatggaaaaattcataaaattggtcaaatttcagaagaagccaaagaaacattaaatgcagaaagccaaactgttttacctggatgtatagatacccaaactcattttagagaaccaggctcaacagatactgaggatcttcactctgggagtagagctgcaatagtaggaggtattaccagtgtatttgaaatgcctaacactaatccaccaacatcaactaaaatagagtttcagaaaaaattacatcttgccaaaaatagaatgtattgcaattatgctttttattttggcgcaacagctgataacgcaaatgagttagcagatttagaaaatttagaaggttgttgtggaattaaactttttgcaggttcatcaactggtaatctcttagttgcagaagaaaaagacattgaaaaggtatttcaaagtagctcaaaagttgttgctgtccactcagaagatgaagcgattttaaatgttaataaaaaattgattaaaaaaggtgatgttaattctcacccggtttggagaagtgttgagtgtgcaatctcatctactaggagaattgttagaatagcagagcgatataagaaaaaagcacacattcttcacatcacaactaaagaagaaatagattttttatcacaacacaaagggaatattacctttgagataactccacagcacttaacaatctatgctccagattgttatgataaacttggaacttatgctcagatgaatccacctttaagagataaatctcactacgatagattatggtatgcagtaaaaaataattttaatgatacaattggttcagatcacgctcctcatttaaaaataaataaagagaaagaatatccaaactcaccatctggaatgccaggagtacaaacattaatgccagttatgcttaatcatgttaatgatggcaaattatctttaaatcaattaatgaaacttgtgtgtgaaaatccaattaaaatttttggaattaaaaacaaaggatttattaaagaaggatttgatgctgattttacaattgttgatatgaataaaaaaattgaaattaaaaatgaaaatattgaaagtaaatgtggctggtcccctttcgatggatttaaatttaaaggcatacctacggcaacaattattggtggaaaaattaaaatgcaagatggtaaaattctaggtgatccagaaggtaaacctttagtcttttag

SEQ ID NO: 265560 - DNA, 1063 bp, Unknown
  Bacterial polypeptide expressing nucleotide sequence isolated from the Sargasso Sea
aggtggagtgacatcattatttgaaatgcctaatactaccccacctacagccaacttagttgagtttgaaaaaaaacttaaagctgcaaaaaataggatgcatagcaattatgctttttattttggagctacgccgtcaaatactgatcaacttgcacaattaaaaaatgttgaaggatgctgcggtgtaaaactttttgctgggtcttcgacgggaaatttattagtagataaagaggcagacattgaaaaagtaatttcaagcagtgatagagttgtctctattcattctgaggatgaagatataattaaactaagaaaaaagtttataaggaaaggtgatgttcactcacatcacgagtggagaaatgttgaatgcgcaatgtcttctactcgcagagtggtaaaaattgccgaaagatataataaaaaaattcatgtgttgcacgtaactactaaagaagaagtagattttttagcaatgcataaaaaaaatgttacttttgaaactactcctcaacacttaacattgttcgctccagattgttatgacaagttaggcacttatgctcaaatgaatcctcctttaagaggtaaagagcactatgaccgtctgtggactgctataaagaataatattgtagatgttttaggatcagatcatgctcctcatttaaaagaaaataaagataaagagtatccgaattctccatcaggaatgccgggagttcaaactatttttccagttatgattgatcatgtaaacaatggaaaacttactttaaatcaacttattaatttaatgtgcgaaaatccttgtagaatattcggaattaagaacaaaggttttataaaagaaggcttcgatgcagatttgacgatagtggatatgaataaagaggtaactattaaagatgaaatgattgcgagtaaatgtggttggacaccatttaacaattataaagtcaaaggttttccagtcggaacaatcgtaaacggaatattagtaatgtctaatggaaaaatattagttgagtctaaaggcaaacctttaagcttttag

SEQ ID NO: 265561 - DNA, 1309 bp, Unknown
  Bacterial polypeptide expressing nucleotide sequence isolated from the Sargasso Sea
aatgttagatcttataatcaaaaatggacaatgttacattgacggtgagttaaaaaatgtggatgttgctataaaagatggaaaaattcaacatattggccaaatttcagaagaaactaatgaaacaataaatgttgagggtcaaactgttttaccaggatgtatagacactcaaacacattttagagaacctggatcaactgatactgaagatcttcattcaggaagtagagctgcaattgcaggaggtattactagtgtatttgaaatgcctaatacaaatccaccaacctctaacatgaaagaatttcaaaggaagctagatcttgctaaaaatagaatgtattgcaattacgctttttattttggtgcaacagcagataatgctgatgatttagcaagtttaaaaggattggaggggtgttgtggaattaaactttttgctggatcttcgactggtaatttattggtcgctgaagaggatgatatagataaagtttttcaaaatagctcaaaagttgtcgcagttcattctgaggatgaggcaattttaaaattaaataaaaaattagttaaagagggagatgttcatacccatccagtttggagaagtgtagagtgtgcaatgtcatctactaggagaattgttagaattgcagaaaagtataataaaagagctcacgttcttcatattacaacaaaagaagaaattgattttttatcccaacataaaggcaatattacttttgagattacaccacagcatttaaccctatatgctccagactgttatgatgaacttggaacttatgcacagatgaatccaccattaagggacaaatctcattatgatagattatggtatgcggttaaaaacaatttaaatgatacaataggatctgatcacgctccacatttaaaagtaaataaagacaagatatatcctaattcaccatctggtatgccaggagttcaaacattaatgccagttatgctaaatcatgtgaacgatggaaagctttctcttaagcaattaatgaatcttgtatgtgaaaacccaattaagatttttggaattaaaaacaaaggatttattaaagaaggatatgatgctgattttacaattgtagatatgaacaaaacaattgagattaaaaatgaaaatattgaaagtaaatgtgcttggtctccttttaatggatttaaatttaaaggcaccccaactcacacaattattgctggtaaaataaaaatgaacaatggatcattaattggagaccctgaaggaaagccattagaatttatttaa

SEQ ID NO: 265562 - DNA, 1309 bp, Unknown
  Bacterial polypeptide expressing nucleotide sequence isolated from the Sargasso Sea
aatgttagatctattaattaaaaacggttcttgttacatcgataaagatcttaaaagctacgatatagctatcaatgatggtaaaatcatcgaaattggaaaaattaataatgaggcgaaagaaatatatgatgcaagtaatctaacagttttaccaggttgtatagatacacaaacacattttagagaacctggttctactgatacagaagacctacattcaggtagtagagctgcaattgtaggaggaataacaagtgtatttgaaatgccaaatacaaatccaccaacttctaacaaaactgagtttcaaagaaaattagacctagctaaaaatagaatgtattgtaactatgctttttattttggtgccacagctgataacgcaaaagatttagcaagtttaaaaaatttagttggctgttgtggaattaaactttttgcaggttcttcaactggcaatttgttagttgcagcagaagaagatattgataaagtttttcaaaatagctctaaagttgttgctgttcattctgaagatgaagagattttaaatactaacaaaaaacttataaaaaagggggatgtacattcgcatccagtatggagaagtgtcgaatgtgcaatgtcatctacaaggaggatcgttagaattgcagagcggtataataaaaaagctcacatacttcatgttaccacaaaggaagaaattgatttcttatcacaacataagggtaacatcacatttgaaattactcctcagcatttaacactgtatgctcccgactgttacaacaaattaggaagttatgctcaaatgaatccacctttaagagacaaatctcattatgacagattatggtatggagtgaaaaataattttaatgatacaatcggatcagatcatgctccacatctaaaaataaataaagataaagaatatccaaattctccatcaggtatgcctggagtacaaactttgatgccagttatgttaaaccatatcaataatgaaaaattaagtttagaacaattgataaactcagtgtgtgaaaacccagtaaaaatttttggaattaaaaataaaggttttataaaagaaggatatgacgctgattttacaatagtggatatgaataaagttattgaaattaaaaatgaaaaaattgagagtaaatgtggttggtctccatttcatgggtacaaattcaaaggtacgccagtttcaactataatagctggtgaaataaaaatgagagaaggaaaaatcttaggaaagccatctggtttacctatggaatttatttag

SEQ ID NO: 265563 - DNA, 1015 bp, Unknown
  Bacterial polypeptide expressing nucleotide sequence isolated from the Sargasso Sea
catgtccgataattttagtctcattataaaaaatggagcttgttacatagacggcaagcttacaaaaacagatattggtttatcaggtaacaaaataaaaaaaatcggtaaaatcgaactcaatagctccaaagtctatgatgctacaggtaaagttgttttgccgggcattatagatacccaagtacattttagggagccaggatcaactgatgcagaagatttagaaagcggcagtagagcagcggtgttaggcggtgtaactgctttattcgaaatgcccaatactaatcctcctacatctaatttggttgagtttgataaaaaattgcaagcaggtagaaacagaatgcatagtaattatgctttttatttcggagcaacacctaacaatatagatcaacttgctcatctaaaagatgttgaaggatgttgtggcgttaaattattcgcgggctcatcaacagggaacttattagtagacaaagaggccgatatagaaaaagtaatttccagtagcgatagaattgtttctattcactctgaagatgaagaaattatcaaactaagaaaaaaatttattaaaaaaggagacgttcattcacaccctgagtggagaaatgtagaatcagcaatgtcatctactcgaagagtagttaaaattgctgagcgatataataaaaaaattcacgtccttcatgtcacaaccagagaagaagtagattttttagccatgcacaaaaaaaatgttactttcgaaactacaccccaacatttaactatgtacgcaccggattgttatgacaaactaggaacttatgcgcaaatgaaccctccgctaagaaccaaagaacattatgaccgcctttgggtagcaattaaaaataatattgtagatgtattaggttctgaccatgctccacatttaaaagaaaataaagataaagaatatccaaatacaccttctggtatgccaggagttcagactatttttccagtaatgcttgatcatgta

SEQ ID NO: 265564 - DNA, 1045 bp, Unknown
  Bacterial polypeptide expressing nucleotide sequence isolated from the Sargasso Sea
atgttagacctcataattaaaaatggcacctgttttattgatggaaatttaaaaaaagctgatattggcataactaacagcaaaataaccaccattaatgattcaatacaagatgcttccaaggaaatatataatgcagaaaatttaattgtacttccaggatgtatagatacccaaacacatttcagagaacctggatcaactgatacagaagatcttcattcaggcagtagagctgcaatcgtaggaggcataacaagtgtatttgaaatgcccaacacaaatcccccaacttctaatatgaaagagtttcaaagaaaattagatctcgctaaaaatagaatgtattgcaattatgccttttattttggagcaacagctgaaaattcacaagatttagcaagtttaaaagatttggaaggctgttgtggtatcaaattatttgcagggtcatcaactggaaatttattagttgctaaagaagacgacatcgataatgtttttcaaaatagctcaaaggttgtagcagtacattctgaagatgagtcgattttaaacataaataaaaaattaatcaaaaaaggagatgttcacactcatccaatttggagaagtgtagagtgcgcaatatcatctactagaagaattgttaaaattgcagagcgctataataaaaaagcacatatccttcatattacaacaaaagaagagattgattttttatctcaacataaaggaaacattacatttgagattactccccagcatttaactttgtttgctccagactgttataacaaactcggaacttacgctcaaatgaatccacccttaagagataaatctcattatgatagattatggtatgcagtgagaaataattttaatgacacaattggttctgatcatgctccacatctaaaagtaaataaagataaagaatatcctaattcaccatctggtatgccgggtgtgcaaactttaattccagtaatgttaaaccacgtaaacgacgggaagcttacgctaaatcaattaattaatc

SEQ ID NO: 265565 - DNA, 897 bp, Unknown
  Bacterial polypeptide expressing nucleotide sequence isolated from the Sargasso Sea
aacggatgatgcaatcgcctacaaagagcgcataaatcaggtaattccccatgagatatcctttcaaccgttgatgaccctttatctgacggaagcaaccaagacttcagacatcaagcggggcgttgatcttggagtggttacagcgctcaaactctatcccgcaggtgcaaccaccaactcagagaacggagtcaaagaatttgggaacgtttattcaatcctggaattcatggctgaggttgatattccgttgcttgtccatggagaggtcacggatccggagattgatatctttgaccgagaagcagttttcatcgaaagggttcttgaccccctcagaaaacgcattcctgaactgcggatcgtcatggagcacatcaccaccaaagatgccgtggattatgtcatccaaggtggtccgaatatcgctgcaaccgtcacaacccaccatctgatcattaatcgcaacgcttaccttgccggaggtataaggccacattattactgcctgccagtggcaaaacatgaaacccatcgaatggctcttcgttcagcagtttgttcaggaaacgagaagttcttcctcggtactgattcggcaccgcacctcgacggagcgaaggaaaatgcatgcggttgcgcgggcatatacacttcggttaacaccttaagctgcattgctcatgtctttgaggatgagaacgcattggacaagttagaaggctttgtatcggttcacggaccatctttctacaagttaccggtcaacagtggcctgctgaaattcagaaaactcagcgagcctctttcttatcctgaaaagattcctatcagaaatgatcaagtcaccgtgtttgatccaggttttcccttgttctggtcttatgaaacagt

SEQ ID NO: 265566 - DNA, 865 bp, Unknown
  Bacterial polypeptide expressing nucleotide sequence isolated from the Sargasso Sea
aatggcattgatgtttaaagaaggtgctgttgcatttagtgatgatggcttacccatccaggatggtgcagtaatgaggatagccttagaatattcgactcttattgatgtcccagttattaaccatgctgaagatgaatgtttgcgttcagaaggtgttatgcatgaaggcattatttcaacgcatttaggtttacctggtaaccctgacctggcagaatctgcaatggtacaccgagacttagagcttgctgaatttacaggagcgaggctacatgtaccccatgtaagttcagctaaagccgtaaaacacattcaacaaatgaaacgaaaaaataataatattaccgctgaagtaactccacatcatcttttttttaatgatcaagctctgagatcatatgatactaatttaaaagtagcacccccaatacgaacagaatccgatcgtacagctctaattaaagcagttaaagatggcactattgattgtattgcaacagatcatgcgccacatacatcagaagataaagaaactacttttgactgtgcatcatttggaatgattggtttagaatctgcttttggcgttgtaaataaggttctagttaaggaatcagaaatggaattaattgatttgatttctcttttaactgtaaatcctagaaaaataatgggatttgattccaacctttttagtaagggcgcaatggcggaaataactgttatcgatccagaccatgaatggatctttggcaaagatcatatctattctaaatcggggaactcaccttttattggtgaaagtttagaaggcaaagttgaattaacgatttcaacaaattcactatacaaaggacaataa

SEQ ID NO: 265567 - DNA, 398 bp, Unknown
  Bacterial polypeptide expressing nucleotide sequence isolated from the Sargasso Sea
gttgcgtaggcccgatgactggcatctgcatctgcgcgatggcgacatgctcaagcgggtgctgccggccacggcccgtcagttcgctcgagccatcgtgatgccgaacttgcgtccgccggtcaccaccgtggatgcggcgatcgcttatcgccaacgcattgggtcggccttgccagaggggatggccttcaccccgctgatgacggcctacctcaccgacaccatcagccctgatgagctggaacgtggtcacaaggagggtgtcttcaccgccgccaagctctaccccgccaatgccaccaccaattccgcagcgggtgtcagtgaactgagctgcatcactgcggtgctggagcggatgcaggctatcgatatgccgttgctcatccacggtg

SEQ ID NO: 265568 - DNA, 772 bp, Unknown
  Bacterial polypeptide expressing nucleotide sequence isolated from the Sargasso Sea
atgaagattttaataaaaaatggattaatagttgatccttctcaaaagattaaaaaaattatgaatttagaaattaataatggtgttatttctaacctacatattcgaaaaaatgttaattatgagaaatttgatgaagtaattgatgcaaaaggatttattgttgcaccaggattagttgatattcatgttcatttaagagacccaggacttaaacataaagaaacaatttcttcaggatctagggcagccgctgctggaggttttacatcaattgcatgtatgccaaatacatctcctgctaatgataaacctcaaataactaaatatattatggacaaatcaaataaagctggaatggtaaatatttttccaatcggtgctattactcaaggtttaaacaatcttaagctagcaaaaatagtggaaaatatagaagcaggttgtgttggaatttctgatgatggatttcctgtcacaaactcaaagttactttttaacgccatgaatcttgctaaaaagaactcttttcctgtgatttctcactgtgaagattgttccttctctgaaggcggagtagctaatgaaggaaaattctctagaaaatatcgtttaataggcatacctaacatatcagaggagctgggaatcataaaagatattgctgttgctgaatatacaaatgcacatttacatgtatgtcatgtatcaaccctgaattctgtaaaaattataaaagaagctaaagcaaggggggttgttgtcacctgcg

SEQ ID NO: 265569 - DNA, 424 bp, Unknown
  Bacterial polypeptide expressing nucleotide sequence isolated from the Sargasso Sea
catgactccggctcccgatcagctggtgctgcgcaggcccgacgattggcatgtgcatctgcgtgacgacgtcatgctcgagcaggtgctgccggcaacagcgcggcagttcgcccgggcgatcgtgatgccaaatctgcggccgcctgtgaccacagttgatgcggccatcgcctaccgacaacggattgaggcggccttgcctgaggggatgtcgttcacccccttgatgacggcgtacctcaccaatgacatcagcccggacgagctggagctggggcaccgcgagggtgtcttcactgccgccaagctttatccagctaatgccaccaccaattcagcggcaggggtgagcgatctgagctgcatctcggcggtgctggagcggatgcaggccatcgacatgccgctattgattcacgga

SEQ ID NO: 265570 - DNA, 516 bp, Unknown
  Bacterial polypeptide expressing nucleotide sequence isolated from the Sargasso Sea
tatgacaacactcactattactcgtcctgacgactggcacattcacctaagagacggcgcacaattaaaagacacggttcgtgatatcagccgctatatgggccgcgctatcgtcatgcctaacttggttcctcccgctatcgataccgaaaccgccttggcttattacgatcgtatcaaggcgcaagtgccagctggctcgcaatttgaacccttaatggtgttgtatctcaccgacaaaaccagccctgaagaaatccgtaaagccaaagcctcgggcaaaatcgttgccgctaaactctacccagcaggcgcaaccacaaactcggattcaggcgtgaccgatttgaagaacatctaccccgccctcgaagcgatgcaggaagtgggcatgttgttcctagtgcatggtgaagtgactgattcatcgattgatattttcgaccgtgagcgcgtatttattgagaatatcctcagcaagatcgtggccgatttccctaagcttaaaatcgttct

SEQ ID NO: 265571 - DNA, 322 bp, Unknown
  Bacterial polypeptide expressing nucleotide sequence isolated from the Sargasso Sea
atgacccgacagataaccatcacacgcccggacgactggcacctgcacgtgcgcgacggcgacattctgaacgatgtggtgcccgccaccgccgcctgcttcggccgcgctatcatcatgcctaacctggtaccgccggtaaccgatgccagcgcagccatggcgtacagggatcgcattctggccgcggcccggggaacggacttccagcccctgatgaccctgtatctgaccgagagcaccaccgccgagaccattcgtgaagccaaagccgccggcgtagtggcagcgaaactgtacccggctggcgccaccaccaact

SEQ ID NO: 265572 - DNA, 580 bp, Unknown
  Bacterial polypeptide expressing nucleotide sequence isolated from the Sargasso Sea
gctgcttagagacatagagcttgtagcaaaatatggtactagatatcatgctcaacacatatcctcaaaaaaatgcgttgatttaattaaagaagctaaagaaaacaacttaccaataacaagcgaggtcacaccacaccatatattagaaaataacgaaaatttagatactaccaatggtttattcaagatgtatcccccaataagaacagaagaagatcgcctttctttaatagatggtttattaagtaatgttattgatgcaatagctactgaccacgctccccatccagaaaatacaaaaacagtagattttaaaagcgcggcaagaggggttgttggtcttgagtctgctttcccaatgctctattcatcaggaatattatcgcttgaggaaataaagaaattcatgattgaaaaccctagaaaaatattatccgaagctggatacaaagtggaaaagtctcaggttaatgtatggcagctctgtgataaagaatttacaacaaaatcaaaatttaataattctatttttgaaaaaagaaacaccaaaattgaaaaggtttctcaaaatgtataa

SEQ ID NO: 265573 - DNA, 768 bp, Unknown
  Bacterial polypeptide expressing nucleotide sequence isolated from the Sargasso Sea
agatgttaaatgtaccggtaatcaatcatgcagaagatgattgtttacgatgcaatggagtcatgaatgaaggaatggtatctaatcgacttggactaccagggaatccaagtattgctgaatctacgatggtgtttagagatcttaaattagctgatatgaccggtgcgaagttacatgtaccgcatgtaagtacagctgcttcagttgagtatatcaaagaaatgaaaaggtctaatgataaagttactgctgaggtaacaccgcatcatttattttttaatgatgaagcccttttgaattatgacacaaacttaaaggttgcgcctccaattagaaatgatatatctagagaagcattgattagggggattaaggaaggggtcattgactgtatagcaacagaccatgctcctcacagtttacatgaaaaacaaacaacctttgattgtgcttcatttggtatgattggcttagaatcatgtttcggtgtcgtaaaaagattgcttgtggatgaagaaggattaaacttaatcagctttataaaattattaactactgcaccaagaaagataatgggctttaactcagatttgtttcaaattggtacagaagcagaactcgtattatttgatcccattgaaaaatggatttttaaagagagcaatgttttttctaaatctacaaactcccctttttatggtcaggagttatttgggaaggttagatatactatctcaaaaggtaaaatcgcggaaataatataat

SEQ ID NO: 265574 - DNA, 700 bp, Unknown
  Bacterial polypeptide expressing nucleotide sequence isolated from the Sargasso Sea
atgactgaccagatctcgatcatcgctccagatgattggcacgtgcatctccgtgatgccgagatgctccagcaggtcgtggcccatacagcccgtcgctttcgtcgggcgatcgtgatgcccaatctgcgtcctccggtgacaaccgttgctgcagcacgggcataccgcgagcgcatcaaggccgcgtgccccgctgatctggagttcacgccgttgatgacggcctacctcacggactcgattgaaccttctgagctcgagactggattcgacgagggagtgtttgctgcggccaagctgtatccagccaacgccaccaccaattcgtcagcaggggtgacggatctgctgcagattgatccagtgctggagacgatggcccggatcggaatgccgttgctgatccacggagaggtcacggatgccgagatcgatattttcgaccgtgaggcggtgttcatcgaacgccatttggcaccgctgcgggatcgtcatcctgcgctgaaggttgtgttcgagcacatcaccactgagcaggcggtgcagtacgtcagctccgcggatcaccacctagcggccaccatcaccccccaccacctgcacatcaaccgcaatgcaatgtttgccggggggttgcgcagcgatttctactgccttcctgtcgccaagcgggaatgtcaccgtcaggccctacgcc

SEQ ID NO: 265575 - DNA, 934 bp, Unknown
  Bacterial polypeptide expressing nucleotide sequence isolated from the Sargasso Sea
catgttcattttcgtgataacgaaatgttaaaattagttgtgcctgaaacagataaaatttataaaaactgcattgtaatgcctaatactgtaccaccaataacaaatagtaaaatggctaaagactataaattaagaataaataaatatattgaaaatgatttaaatccattaatgactctttatttgactgaaaatactgatatcgatgatatgattcaagcatttaaaaataaaaccatatttgctgtcaaattgtaccctcaaggagcgacaactaattctgacaaaggagttaaaaatttacaaaatatatttccattattaaaccaaatggagattaatgaaatacctttattaattcatggagaagatacagataaaaacattgatatttttgacagagaaaaaagctttattgatagatatttaacaacaattgtaagtacattccctaaactaaaaataacacttgagcatattacaacatacgatgctgttcaatttgtaaaagaaaatcataatttaggtgcatcaataacacctcatcatttagcttcaaatagaaatgacatgttagtaggtggaataaggccacatttatattgtttaccaattctaaaaagaaaaaaacatcaagaagaacttattaaaattgccacttcaggaaatagaaaattttttttaggaactgattcagctcctcacgaaattaaacttaaagaaaatatctgtggatgtgctggtgtatttaataccataaattctcttgaaattattacgcaaattttcgattcagcaaattcactttctaatctagaatcttttgtaagtaaaaacagtgcattattctacaaaataccttttaacgaaaaaaaattagagcttataaaattagatgaccctattttatttccagatgaattaaattgaa

SEQ ID NO: 265576 - DNA, 617 bp, Unknown
  Bacterial polypeptide expressing nucleotide sequence isolated from the Sargasso Sea
ggcagatatgacaggtgcgaagttacatgtgccacatgttagtacagctgcttcagttgagcatatcaaagaaataaagagtactaatgataaaatcactgctgaggtaacaccacaccatttattttttaatgatgaagatcttttaaattataacactaacttaaaagttgcacccccaatacgaaatgatttatcaagaaaagcattaataaagggtgtcaaacaaggtgttattgactgtatagcaacagatcatgctcctcatagtttacatgaaaaagaaactaccttcgattgtgcatcatttggtatgattggtttggaatcatgtttcggtatagtaaaaagattacttgtagatgaagagggattaagcttagttaacttgataaaactattgactattacgccaagaaagataatgggcctcaattctgatttattaaaggtaggcgtggaagcggaactagtcctatttaatcctgttgaaaaatggaaattcaagaagagcaatatttattcaaaatccataaattcccccttttatggtcaagagcttattggaaaagttagatataccatatcaaaaggaaaaatcgctgagatattataat

SEQ ID NO: 265577 - DNA, 784 bp, Unknown
  Bacterial polypeptide expressing nucleotide sequence isolated from the Sargasso Sea
aatggaaaggatataacagaaatggcattgatgtttaaagaaggcgccgttgcatttagtgatgatgggttacctatccaagatggtgcagtgatgaggatagccttagaatattcaactcttgttggtgttccagttattaaccatgctgaagatgaatgtttacgttcagaaggtcttatgcacgaaggaattatttcaacacatttaggtttgcctggcaatccagatctggcggagtcagcaatggttcatcgagatcttgaacttgctgatttcactggagcaaagctccatgtcccacatgtaagttcagctaaagccgtgcaacacattcaaaaaatgaaacgaaaaaataataaaattacctctgaagtaactccacaccatctttattttaatgatcaagccttaaggtcttatgatactaatttaaaagtagcaccgccaatacgaacagagtctgatcgtgaagcattgattaaagcagttaaagatggaaccattgattgtattgcaacagatcatgcgccccatacatcagaagataaggaaacgacttttgactgtgcatcatttgggatgattggtttagaatctgcttttggtgttgtgaataaggtccttgtccaggaatcaggaatggaattgattgatttgatatctcttttaactgtaaaccctagaaaaataatgggctttgactctgacttgtttactgagggtgcaatggcggagataactgtgctcgacccagactgtgactggacctttgataaagatc

SEQ ID NO: 265578 - DNA, 832 bp, Unknown
  Bacterial polypeptide expressing nucleotide sequence isolated from the Sargasso Sea
taccaaaagagaataaaaaaatatgtaaaaaaaagcctaaaaacctatttaacaatatatttaacagaaaatactgatgaagataatcttctgactgcttttaaagaaaaaaatgtttttgccgttaaactttatcctttaggagcaacaactaattcaaattttggtataaaaaatcttgaaagtataatgtcagttctttcaactatggaaacaaacgatatacccctgctaatacatggagaagatacagatccaaaaattgatatttttgaccgtgaaaaatattttattgatagaacattatctaaaattgttgatcgttttccatcattaagaataactctagaacatataactacttttgatgcaattgactacatcaaattaaataaaaacattgttggttctattacaccacaccacttggcttcaaatagaaatgatatgttggttggaggaataaaaccacacctttactgtttaccaattttgaaaagaaaaacccaccaagaagaattaataaaagttgcagtttcaggtaatgaaaaattttttcttggaactgattctgcgcctcacgaaatagccctaaaagaaaaccactgtggttgtgcaggagtctttaatacaccctatacaattcaaattttggctcaaatttttgaaaataataatgcactcaataattttgaaaaatttgttagtattcatggatcaaaacattacaaacttccaattaataaaaataaaataaatttaattaaaaaggatattcctattaaattcgtcaataaactaaaaatcaatgatactgaaataaaaatttata

SEQ ID NO: 265579 - DNA, 730 bp, Unknown
  Bacterial polypeptide expressing nucleotide sequence isolated from the Sargasso Sea
atgagcgaaaaagagttcatcattagaaagcctgatgactggcatctccatcttcgggacggggaaatgcttgcttctgttatcaagcattcagcagctaatttcgagcgcgccatcatcatgccaaatctggtgccaccggttgtcacaacggatgatgcaatcgcctacaaagagcgcataaatcaggtcattccccctgggatgtcctttcaaccgttgatgacactttatcttacggaagcaaccaagacttcagacatcaagcggggggttgatcttggagtggttacagcgctcaaactctatcccgcaggtgcaactaccaactcagagaacggtgtcaaagaatttgggaacgtttattcaatcctggaattcatggctgaggttgatattccgttgcttatccatggagaggtcacggattcggaaattgatatctttgaccgagaagcagtttttatcgaaagggttcttgaccccctcagaaaacgaattcctgaactgcggatcgtcatggagcacatcaccaccaaagatgccgtggattatgtcatccaaggtggtccgaatatcgctgcaaccgtcacaacccaccatctgatcattaatcgcaacgcttaccttgccggaggtataaggccacattattactgcctgccagtggcaaaacgtgaaacccatcgaatggctcttcgttcagcagtttgttcaggaaacgagaagt

SEQ ID NO: 265580 - DNA, 811 bp, Unknown
  Bacterial polypeptide expressing nucleotide sequence isolated from the Sargasso Sea
aatgaacataaaaaagataaataaggatatagttttaaagaatggattaataattgatcctttcagacagaaaactttccaaggaagtatatgggttaaaaatggacgcattgctggggtaggtgactttgaaattcctgattcagatgatgtccatctaatagattgtactaaaaagattattacccatgggttttgtgatttacacgttcattttcgtgagccaggtgaagacgataaagaagacctggaaagcgggtcgagatcagctttggcaggtggatttactagagtgtgtcttatgccaaatactaagccacctatagactctccggagctggttaactttatcaatcagatgggtgaaaagttgcctgtccatattcatccgataggggcagtaactaaaaatcagaatgggaaaattttaacagagatgagcctaatgcatcgagaaggagctgtagcttttagcgatgatggtttgcctatccaaaatggcggtgtaatgcgttcagcattagaatattcaaagctattaaatgttccagtaatcaatcatgcagaggatgaatgcattagaggtgatggcctagtaaatgaaggtaaaatatctacacacctaggattaccgggcaatccggatatagctgaatcagttatggttttgagggatttagaattagccttttatacaggggctactttacatgtgccacatgttagctctagaaaggcggttgaacatattaggagaatgaaatcaagagataataagataactgcagaagttactcctcatcatttattt

SEQ ID NO: 265581 - DNA, 783 bp, Unknown
  Bacterial polypeptide expressing nucleotide sequence isolated from the Sargasso Sea
ctttggaatattcaaagatgttaaatgtcccggtaattaatcatgcggaagatgattgtttgcgatgcgatggggtcatgaatgaaggaattgtatccaaccgacttgggctaccaggaaatccaagtatttctgaatctacgatggtttttagagatcttaagttagcagagatgacagatgcgaaattacatgttccacatgtaagtacagcggcttcagttaagtatatcaaagaaatgaagagatctaatgacaaggttactgctgaggtaacaccgcatcatttattttttaatgatgaagcccttttagattatgacacaaacttaaaggttgctcctccaattcgaaataatgtatctagacaggcattaataaacggtcttaaagaaggcactatcgattgcatagcaacagaccatgctccgcatagtttacatgaaaaacaaacaacctttgactgtgcatcatttggtatgattggtttagaatcatgttttggtgtagtaaaaagattacttgtagatgaagaaggattaagtttaatcaatctgattaaattattgactactgcaccaagaaatataatgggaattaactctaatttattgaaggttggtacagaggcagagttagtgttatttgacccagctgaaaaatggatgttcaaagaaagcaatgttttttctaaatcgataaactctcctttttatgatcaaaagctaattggtaaagttagatatacgatatcaaaaggtaaaatagcagaattattataaa

SEQ ID NO: 265582 - DNA, 562 bp, Unknown
  Bacterial polypeptide expressing nucleotide sequence isolated from the Sargasso Sea
tatgactaaagaactagtaatagtgcgtccagacgattggcatctccatttgagagatgaagactttttacccattaccgtaaatgagtcagcgaaatcttttgcaagagcgataataatgcctaatttagttccgccaattacaaagttagttgatgcagaaaattacaaacgacgcatattgaatgccctgaaacctaatttgtcttttgaccctttgatgactctttacttaacagaagaaacagatcctaaagaagtgaaagaaggctttctaagtggccaaatttcagcggtaaaattatatccagcaggagcaacaacgaactctcaatctggtgtccataactttgaaaaaataaaacctgttctggaaattatggcagaaattggatgcccactttgcattcatggagaggtaaccgaaaaaaatattgatatttttgatcgagaaaaggcttttatcgataacgttctgaataaaatccgcactgataacccaactttaaaagttatcatggaacatattaccactaaagacgcagtagattatgttttttca

SEQ ID NO: 265583 - DNA, 812 bp, Unknown
  Bacterial polypeptide expressing nucleotide sequence isolated from the Sargasso Sea
ttttataggaagaaaaggaaagcaactcagtgaaatgtcagaacttgccgaccttggggtcatagggtttagtgatgacggagatcccgtagaagaccccaatataatgcgacaggcccttagctatagcgcaggcttgaaactccctataatcaatcattgcgaggtacccagcctagcggacggagcgtccatgaatgaaggttgggtatccaatagactaggactaaaaggcatgccttcctcagctgaggaagttatggtggcgagagatatttccctggccgaattaacgggaggccatatccatatagcccatgccagtacaaggggaaccatcgacttaattagatcagccaaggcaaacgggacaaaagtgacatgtgaagttactccgcatcatcttaccttgactgaaaataccgtcatgggccatgggaaggatgactttcagccgttgggaaccaatgcatacgatactaacgcaaaagtgaaccctcctcttcggagtaaatcggacgttgcctcgatgattgaatcgttaaatacaggaacaatcgattttatagctactgaccatgctcctcacagcgaagtagacaaaatgacaacatttcaggattcctcatttggaataagtgtgttggagactgctcttggctcccttatgacattagttgatcaagggcaaatgaacgtaaatactctaataaagaaacttacaaatgatccagcaacatttttgggcaaagatataggaaatctaaaaactggaactagtggagatataactattattgacccaaacgaaa

SEQ ID NO: 265584 - DNA, 556 bp, Unknown
  Bacterial polypeptide expressing nucleotide sequence isolated from the Sargasso Sea
atgctgcgagtagttatggagcatatcaccactctggatagtattaattttgtcaagaatgccggaaagaacttgtttggcactatcacagctcaccatctggcactaaacaggaacgatttatttaggaatggaatcaatccacacaattattgtttgccaatcctaaaaagggaagaacatcggctcgcattgctgtctgccgcggtatctggtgatgaaaagttctttttaggtactgactcagcgcctcatcttacggagacaaaagagagtgcctgcggttgtgcgggaatttttagttccataaatgctctgggcgtgcttgcgactcttttcgaaaaagagcagtcattagcaaatctggagaaattcatttccttaaatggttgcagattttatggtttggaaccaaacaaaaaacgtatatcgttcacaaaaagaaataaacctgtaaaatttccacgctatgttaaggttggtgcaagcacggtatcggtttttaatccaggttttgacgtgtactggtatgtcgaagctttaagtcaaaattagt

SEQ ID NO: 265585 - DNA, 853 bp, Unknown
  Bacterial polypeptide expressing nucleotide sequence isolated from the Sargasso Sea
gacgcaagttttaatcctctaatgaccctctttttaaccgacaaccttgatccagttgaagtggttcgactttccgaagaagaatctgtggttgcattaaagtattatccgtccggcgcgaccacgaattcagatactggagtcaccgaaataaagaacgtctatcctgtcatagaaaagatggcggagctcggcataccccttcttcttcacggagaagttacggacgatcatatagatatcttcgatcgagaaaaggtatttattgataccattctggcccctctaatacaaagatatcccgaacttaaggtaatcttagaacacataacaacgaaagactcagttgaatttgttaaaagccagtcaaataaggttgccgccacaattaccattcatcatctcttgtataatcgaaatgatatgctggtaggtggaattagaccgcatctatactgtctaccggtcctcaagcgagatacccatcaagcttcacttattgacgcagcacttagcggtaatccaaagtttttcctagggactgactcggcgcctcactcaaaacctgaaaaagaaactagctgcgggtgtgcgggggttttctctgcgccagctgctattgaactgtacacacaattttttgcagaacaaaactgcttatctaaacttgagggttttgcaagcttctatggtgccgacttttacggacaatcaaggaaccaggagaaaattacccttgagaaaaaaccgtggcagatgccggagcattatctactaggcgatgtgcaaacaatcccgatttttgccggccaaacaataaactggcggttacaagttgatagcgaaaaatgac

SEQ ID NO: 265586 - DNA, 557 bp, Unknown
  Bacterial polypeptide expressing nucleotide sequence isolated from the Sargasso Sea
tatgaccaaagaactagtaatagtgcgtccagacgattggcacctgcatttaagagataaagactttctgccaactaccgtaaatgagtccgcaaaatcttttgcaagagcgataataatgcctaatttagttccgccaattactaagctaattgatgcagaaaattacaagcgacgtatattgagcgccctgaaacccaatttgtcttttgatcctttgatgaccctttacttgacagaagaaacagatcctaaagaagtgaaacaaggctttgtaagtggccaaatttcagcagtcaaattatatccagctggagcaacaacgaattctcagtctggtgtccaaaactatgaaaaaattaaaccaatcttagaaatcatggcagaaattggatgtccactctgtattcatggagaagtaaccgataataatattgatatttttgatcgagaaaaggcatttatcgatagtgttctgaataaaatccgcactgataacccaactttaaaagttatcatggaacatattaccactaaagacgcggtagattatgttg

SEQ ID NO: 265587 - DNA, 487 bp, Unknown
  Bacterial polypeptide expressing nucleotide sequence isolated from the Sargasso Sea
cctgcggaaaaatattgctgctactgtaactcctcatcacttagtgattaatcgcaatgatctattggcgggcggaattaggcctcatctttactgcttaccgattgcgaagagagataaacatcgtaaagccctaagaagtgccgttacttcaggaaatagatcattttttttgggaactgattcggctccgcatacaattagcagtaaagaatctgattgtggttgtgcaggaattttcaacgctcaaaatgctattgaaatttatgcgagtgtttttgaggagatgagtgccctcgaggaatttgaaaaatttgcatccctaaacgggccaaatttctatggtttagagcccaatcgggaatacttggttcttgaaaagaaaaaccatagaatagatgaagaaatagagttgcctgatgatcaagatactattcgaccgtttctttttggtgaagagctcaattggtgtgtggttgatagttga

SEQ ID NO: 265588 - DNA, 603 bp, Unknown
  Bacterial polypeptide expressing nucleotide sequence isolated from the Sargasso Sea
catgcaaaccctcaccattactacgccagatgactggcaccttcactttcgcgataacgaaatgctggcagagacggtccctgcgactgcgcgttgttttcagcgcgctattgttatgccaaaccttgtaccgcctgtggtcaatgccgaaatggcaatggcttataagtcgcgtattgaagcggctcgtccaaacgggagcagctttgagccacttatgacgctgtttcttacgaatcaaaccacgccgcaggatattattgatgcaaaacaggcaggcgttaccgcgtgtaagctttatccagcaggcgccaccacaaactcagatgccgctgtaaaaggtattcaggctttataccctgtgtttcaagccatgcaagaacaaggcttgttgttacttattcacggtgaagtgaccgaacatcacattgatatttttgaccgtgagaaagtgtttatcgatacgcatttagcgcctattgttgaggcattcccgaagctgaaagtggtgtttgagcatattacaacggctgacgcagcaggctttgtggcgggtgcgagcgagtatgtgggggcaaccattacaccacagcatttgctttt

SEQ ID NO: 265589 - DNA, 672 bp, Unknown
  Bacterial polypeptide expressing nucleotide sequence isolated from the Sargasso Sea
tatgcaaacattaactatttcaaagcctgatgacttccatctccatcttcgtgatggagaagctatgtctagtgttgttaattatagcgccgcccaattttctagagcaattgtaatgccaaatttgaaaccacctatcacgaccgttgatatggccgtctcctattacaatcgtattctagataatgtcaacgaagaatataattttgagcctttaatgaccttgtatctaactgacaatatgtctcccagtgaaatagataaagctgcggaaacaaaatcaattacagctttaaaatactatcccgcgggagcaacaacaaattctgattctggtgttacagatattaaaaagatttattcagttttggaagcaatgatgaagaatggattgcctttactgctacacggagaggttaatgatattgaagttaatgtttttgatagagaaaaaatattcattgatagagtattaacacccctagttgatgatttttccgagttaaaaatagttttggagcatattagtactaaagaggctgtagattttattttaaatgctagtgataatttagctgcaactattaccccgcagcatgtactcttaaaccgtagcgatttttttgacgtatcatttcagccgcacaattattgtttacctgttttaaaaga

SEQ ID NO: 265590 - DNA, 565 bp, Unknown
  Bacterial polypeptide expressing nucleotide sequence isolated from the Sargasso Sea
catgcaaacgctcaccatcactacgccagacgattggcaccttcactttcgcgataacgaaatgctagctgaaacagtgcctgcaaccgcacgttgtttccagcgcgctattgttatgccaaaccttgtaccaccggtggttaatgcagatatggccatggcgtacaaagagcgaattgaagctgcgcgacctaaaggcagtagctttgagccattaatgaccttattccttactaaccaaaccacgcctcaagatattgttgatgcgaagcaagcgggcgttacagcgtgtaagttatatcctgcaggggccactactaactcagatgcggctgtaaaaggcattcaggctttataccctgtatttcaagccatgcaagagcaaggcttattgctgctaattcatggtgaagtgaccgaacatcacattgatatttttgaccgcgaaaaagtatttattgatacccatttagggcctatcgttgacgcattccctaagctgaaagtggtgttcgagcatattacgacagcagatgcggcaagcttcgtagcgggcgccagcgaa

SEQ ID NO: 265591 - DNA, 807 bp, Unknown
  Bacterial polypeptide expressing nucleotide sequence isolated from the Sargasso Sea
taacagaaaatactgatgtagaagatttagtggccgcttttaaagaaaaaaatgtttttgctgtaaaactatatcctttaggagccacaacaaattcaaattttggtataaaaaatcttaaaaatataatgtcagttcttgcgactatggaaaaaaacaatattcctctattaatacatggtgaagaaacagatcctaaaatcgatatttttgaccgtgagaaatattttatcgatagaacattatctaaaattgttcgtaactttcctatgttaagaattactcttgaacatataacaactattgatgcgatagactatatcaattcaaatgaaaacattgtaggctctattacacctcaccacttggcttctaatagaaatgatatgttggttggaggaataagacctcacttatattgtttaccaatattaaaaagaaaaacccatcaagaagagttaataagagttgctatttcaggaaacgaaaagttttttcttggaactgactctgcacctcatgaaatagcacttaaagaaaatcattgtggttgcgcaggagtctttaatactacttatacaattcaaattctgactcaaatttttgataatcataatgctctaaaagaattagaaaagtttgtaagtattaatgggtcaaaacactataaattgccaattaatagacgcaagatatctttatttaaacaagaaaaacctataaaatttcaacagaagttacgtaatggtgatatagaagttaaaatttacaaaccaaactttgatattttttgggatatcaaatgaa

SEQ ID NO: 265592 - DNA, 391 bp, Unknown
  Bacterial polypeptide expressing nucleotide sequence isolated from the Sargasso Sea
aatgcctgaccgtctcaccctgatcgctccggacgactggcacgttcacttgagggatggggtgatgctggacaaggttgtggcccacaccgcccgtttgtttcgtcgggcgatcgtgatgccaaatctcaagccgccggtgacaaccacagcagcggccgatgcatatcgcgagcggattcgatcggcctgcccagacgatctggacttcgagccgctgatgacggcatatctcacagattccaccgacccagccgatctcgaacagggttttctcagtggtgtgttcacggcggcgaagctgtatcccgccaacgccacaacgaattccgctgctggtgtaactgacctgcagacgatcaacgagttctctcctgcatgcagcgcatcg

SEQ ID NO: 265593 - DNA, 736 bp, Unknown
  Bacterial polypeptide expressing nucleotide sequence isolated from the Sargasso Sea
tatgactaaagaactagtaatagtgcgtccagacgattggcatctgcatttgagagatgaagactttttgcccattactgtaaatgagtcagcaaaatcttttgcaagagcgataataatgcctaatttagttccgccaattacaaaattaactgatgcagaaaattacaaacgacgcatattgagtgcccttaaacccaatttgtcttttgatcctttaatgaccctttacttaacagaagaaacagaccctaaagaagtgaaagaaggctttctaagtggccaaatttcagcagtaaagttatatccagctggagcgacaacgaactctcaatctggtgtccgtaactttgaaaaaattaaacctgttctagaaattatggcagaaattggatgcccactgtgcattcatggagaggtaaccgataacaatattgatatttttgatcgagaaaaggcatttatcgatagcgttctgaccaaaatccgcactgataacccaactttaaaagttatcatggaacatattaccactaaagacgcagtagattatgttttatcaggaaacgagaatttagcagcgacagttactacccatcacctttctctaaatagaaacgatttattggttagcggcataaagcctcatttttattgtctaccagtggtaaaacgagaaactcatcgattggcactggtagaggcggttgttgcggggtcgccaaattttttctag

SEQ ID NO: 265594 - DNA, 1294 bp, Unknown
  Bacterial polypeptide expressing nucleotide sequence isolated from the Sargasso Sea
atgcctttaaaaaaactatctaaacatacggttctaaaagcaggaacaatcatagacccattaaataaacaaacatataaagctgacctatggataaaagatggatttattgaagggataggtgaatttgaggctcctagatcagcagagattattgactgtaaagatagaataattacccatgggttttgtgatctacatgtacattttcgggagcctggtagagaggacaaagaaactttagacacaggttctctttctgctatggctgggggattcactagggtatgtgtaatgcctaatactaatccaccattagattctccagaactaatcaacttcattaaagaaaaagcagaaaaatgtccaatccatatacatcctattggtgctgttaccaaagcgcagaatggaaaagatataacagaaatggcattgatgtttaaagaaggtgctgttgcatttagtgatgacgggttaccaatccaggatggtgcagtgatgaggttagccttagaatattcaactcttattgatgttccagttattaaccatgctgaagatgaatgtttgcgttcagaaggtgttatgcatgaaggaattatttcaacacatttaggtttacctggcaaccctgacctggcagaatctgcgatggtacaccgtgatctagagcttgctgaattcacaggagctaagttacatgtacctcatgtaagttcagctaaagccgtgcaacacattcaaaaaatgaaacgaaaaaataataatatcactgctgaagtaactccacatcatcttttttttaatgatcaagctttgaggtcttatgatactaatttaaaagtagcacccccaatacgaacagagttcgatcgtaaagctttgattaaggcagttaaagatggaactattgattgtattgcaacggatcatgcaccccatacaatagaagataaagaaactacttttgactgtgcttcatttggtatgattggtttagaatcagcttttggtgtagtgaacagggtactagtcaaggaatcaggaatggaattaatagatttgatctcacttttaactacaaaccctagaaaaataatgggctttgatgccaatttgtttagtaagggcgcaatggcggaaatagctgtgattgacccggaccatgaatggatttttgataaagatcatatccattctaaatcggggaactcaccctttattggtaaaagtttaaaaggcaaggttgaattaacgatttcaactaataatatttataaaagacaataaa

SEQ ID NO: 265595 - DNA, 1033 bp, Unknown
  Bacterial polypeptide expressing nucleotide sequence isolated from the Sargasso Sea
catggctgaccagctcacgatcaccgctccggacgactggcatgtccacctcagggatgaggagatgctggagaaggttgtgatgcacacagcccgttgttttcgtcgggccatcgtgatgcccaacctgcggccgcctgtcacatcggtggatgcggcgcgccgctaccgcgaacggatcctttcggcctgtcctgaggggatggccttcacgccgttgatgaccgcttatctcaccgacaacacagatccggatgatctggagaggggcttccaggaggggatttacaccgcagccaagctgtaccccgccaacgccaccaccaattccgctgcgggtgtgaccgacctggctcagatcacacgtgttctgagccgaatggagtccatcggcatgcctttactgatccatggggaagtgacggatgccgatatcgatgtgttcgaccgggaagcggtgttcatcgagcggcatctgaggtctttgcggacccgtcatcccgagctcaaggtggtgttcgagcacatcaccactgaagaggccgtcgattacgtgggctctgcagatcgcaatctggcggccacgatcaccccccatcacctgcagatcaacaggaacgccatgttcctcggtggtttgcgcagcgacttctactgcctgcccgtggtcaaacgggagcagcatcgccttgccctgcgacgggcggccaccagcggagatccgcgctttttcctcggcactgattccgccccgcatcccagagccggcaaggagacctcctgcggttgtgctggcatcttcaatgctccccatgcgctggagagctatgcccagatttttgcagaggaagaggcgatgcatcacctcgaagcgttcgcttccctgaacggcccggccttctacggcctgccggtgaacaaggacacggtcacccttgaaaagattgctgttcacgtgccccagctggtgaacggactggttcccttccatgctggggagacgctgccctggaggcttcagccatgcacgtga

SEQ ID NO: 265596 - DNA, 1033 bp, Unknown
  Bacterial polypeptide expressing nucleotide sequence isolated from the Sargasso Sea
atggctgaacagctcacgatcaccgctccggacgattggcacgttcacctcagggatgaggagatgctggaacgggttgtggcctacacagcccgttgcttccggcgagccatcgtgatgcccaacctgcgaccgccggtcacgacggtggatgcggcgcgtttgtaccgcgaccgcatcctgtcggcctgtcctgaaggggtggcattcaccccgttgatgaccgcttatctcacggacaactccgatccaggtgatctggagcggggtttccaggagggggtctacaccgctgccaagctgtatcccgcgaacgccacgaccaattcagccgctggtgtgacggatctcgatcagatcggcaatgtcttgagccggatggaggccatcggcatgcctctgctcattcatggggaagtgacggatgcggatgtcgatgtgttcgaccgggaatcggtgttcatcgagcggcatctgaaggtcctgcgcacccgtcaccctgagctcaaggtggttttcgagcacatcaccaccgagcaggccgttgattacgtgggttcgtccgatcgcaatctggcggccacgatcaccccccatcacctgcagatcaatcgcaacgccatgttccttggcggcttgcgcagtgacttctactgcctgccggtggccaaacgggagcgccatcgtcttgctctgcggcgggccgccaccagcggagatcaacggtttttcctcggcactgattccgctcctcaccccagagccggtaaggaaacctcctgcggctgtgccggcatcttcaatgctccctttgcgctggagagctacgcccaggtttttgcagaggaaaaggccatgcatcacctcgatggtttcgcctccctgcacggtccagccttctacggcctgccggtgaacaacgacacggtgacccttgaaaaggttgctgttgacgtgcccgagctggtgaacgggctggttcccttccatgctggggaaacgctgccctggaggcttcagccatgcatgtgat

SEQ ID NO: 265597 - DNA, 867 bp, Unknown
  Bacterial polypeptide expressing nucleotide sequence isolated from the Sargasso Sea
aaataaagaatcttccaaaaagattaatcttacagcatgttgaaatactagatcctttaaaagaaaaagtttttaaaggtaatgttctattagttaatggaaaaatcgcagaggtgggaaaatttgatcagccagctgatgtaaaatctattgattgtaaaggtttaactttgacgcatgggttttgtgatttacatgttcattttagagaacccggagatgaagataaagaaacactagaatctgggtcaatggcagcattgtctggtgggtttactagagtttgtacaatgcctaatacaagtcctcctattgattcgcctgaatcagttaatttcattattgaaaaatcaaaagaatatccaattcatattcatccaattggagcagtaacaaaaggccaaaaaggtaaagaaatcagtgaaatgggtttaatgaatcaagctggagcagtcgcatttagtgatgatgggcttcctatacaaaatggtcttattatgcgcaaggctttggaatattctaaaatgttaaatgtaccagtaatcaatcatgctgaagatgattgtttgcgatgtgatggggtcatgaatgagggagtaatatctaatcgacttgggctcccaggcaatccaagcgtttctgaatctactatggtgtttagagatcttaaattagcagacatgacaggtgcgaagttacatgtaccccatgttagtacagctgcttcagtagagcacatcaaagaaatgaagggttcttatgataagatttctgctgaggtaacaccacatcatttatttttcaatgatgaagctttactaaattataacacgaacttaaaggttgcacctccaatacgaaaataat

SEQ ID NO: 265598 - DNA, 1267 bp, Unknown
  Bacterial polypeptide expressing nucleotide sequence isolated from the Sargasso Sea
atgccaaaaaaactattgctgcaggggggggcagtttatgacccatttctagataagtccaaaaaggctaatatattaatagaaaacaataaaatcagtgcaatgggctcaaaaattaaagataatgatgcaactaaaattaattgtaagggtttagttattacacatggtttttgcgatttacacgttcattttagagaaccaggtcaagaacataaggaaaccttaaaaactggatctctagctgcattagcaggtgggtttactagagtatgtgtaatgcctaatacaaccccaccattagattcaccagaatcaatcaaatttattactgataagtctgctaattgtccaatatttattcatcctataggtgcggtttctaaatctcaaaaaggtgaagaattaactgaggtgcaaggtatggttaaggaaggcgctgttgccatcagtgacgatggtcttccaatagctgattctcaagtgatgagattggctttagaatatgcctctatgtttaatattccagtaattaatcatgcagaggatgaatgtttgcgaaatgatggagttatgaatgaaggagaagcctcgactaggcttgggctttcaggaaacccatcattatctgaatcaattatgattcaaagagatcttgagcttgcaaatctaattaagactaaaatacacgttccgcatgtttcttcaagtagtggtgtatcccatataaaaagaatgaaaaaaattaaccctaaaatatctgctgaagtaacaccgcatcatttatattttaatgacaatgctctatctggatataatacaaatttcaaagttggcccaccaattcgctctgaaaaagatagaaaagcattgataaaagggttaaaagatggcaccatagattgtattgcaacagatcatgcccctcacacaatagaagaaaaagaagcttcatttgatatggcaccttttggtatgataggcttagaaagttgctttggagttgtgaataaggtattggatttacctcttaaagaaataattaaacttctcactataaatcctagaaatattatgaattttaatactaatttatttaaaagaggtgcttcagcagaaataacgataattgaccctgatcatgaatggatattctctgaggagaatatttattcaaaatcaaaaaattcaccgtttattggtgaaaaattaaagggtaaaattcattatacattatcaaaaggttttttagccaattttcattaaa

SEQ ID NO: 265599 - DNA, 831 bp, Unknown
  Bacterial polypeptide expressing nucleotide sequence isolated from the Sargasso Sea
tatgattgaaattcctggatttatcgatctacatactcacacaagatatccggacaatgataaatttcctttcatcgatatcgatgattcagcaattaatggtggcttctcaacaatactcgcaatgccaaattctgaaatacctattgactcgattaaaaacctaagaattgctcaggaaatagataaaaaattaaaaacaaaggtacatcgtgttggctcattaacaaaaaatttagaaggaaaggagcttgtaaattataaagaattcgttgaaaacggtatcacaattttttcagatgatggaaaatctttgattaatgaccatcttgctgatgaggcatttaaacaaatcagcaaacttggtggtgcagtctttcaacattgtgaaaaaagttgtcactcaaagcctggtgacattgctcctccaaatagtaatagtgacttgattctgataaataatgacgaggagttggaagttcttgaaagagacttaagtttatctgaaaaatatgggacaagataccatgctcagcacctttcaacttttgaaagtgttgagctgataaaaaaagcaaaacaagaaggtcttcctgtcactgcagaagtaacaccacatcacatacttctaaataatgaaaatttagacacaaataatggactatttaaaatgtacccacccctcagaactgaaaaagacagagaaggattggtcgaagggttacagtctgaaattatagatgtcattgctacagatcacgcacctcataaagcagaaactaaaaatgtgccttttaaagatgctaatcgtggggttgttggtctgaatca

SEQ ID NO: 265600 - DNA, 1060 bp, Unknown
  Bacterial polypeptide expressing nucleotide sequence isolated from the Sargasso Sea
tatgattgaaatagaaagctttatagatcttcatacccatactagatatccagataataataattttccagcagtagatatagaatttgcagcaataaatggtggctacagcgatatcttagctatgcctaattcagaaatagttattgataatattaagaatcttaataaggcaagagcaatggataataaattaaacataaatgttcatagagttggtgctttaacaaaaaatctggaaggaaaggaattagttaactataaagagtttattgaaaatggggtttttattttttctgatgatggtaaatcactgatagataacaatttagctgatgaagcgtttaaattaataagttctctaaatgcagcaatatttcaacattgtgaaagtagttgtcactcagaacctggtgatatagcagccccaaatgatgatgaaactttaataacaatagatgaagcggaagagtcagaggtgctgcttagagatatagaactcgtagctaaatatggtactagataccatgcacaacacttatcctcaaaaaaatgcgtagatttaattaaagaagctaaagaaaacaacttaccaataacaagcgaggtaacaccacaccatatattagaaaataatgaaaatttagatactaccaatggtttattcaagatgtatcccccaataagaacagaagaagatcgcctttctttaatagatggattattaagtaatgttattgatgcaatagctactgaccacgctccccatccagaaaatacaaaaacagtagattttaaaagcgcagcaagaggagtggttggtcttgagtctgctttcccaatgctctactcatctggaatattatctcttgaggaaataaagagattcatgattgaaaaccctagaaaaatactatctgaagctggatacgaagtaaaaaagtctcagattaatatatggcagccttgtgataaagaatttacaacaaaatcaaaatttaataattctatttttgaaaaaagaaacacaaaaattgaaaaggtctcacaaaatgtataa

SEQ ID NO: 265601 - DNA, 867 bp, Unknown
  Bacterial polypeptide expressing nucleotide sequence isolated from the Sargasso Sea
gaggccgacgcctaccgccagcgcattctggccgcacgcccggccggcagccgtttcgagccgttgatggtgctctacctcaccgacaacaccagccccgaagacgtgcgcgcggccaaggccagcgggttcgtgcatgcggccaagctctacccggccggcgccaccaccaactccgactcgggcgtgaccagcatcgacaagatcttcccggccctggaagccatggccgaagtcggcatgctgctgctggtgcacggcgaagtgacccgcgccgagatcgacgtgttcgaccgcgagaagatcttcatcgacgagcacctgagccgcgtggtcgagcgcttcccgacgctcaaggtggtgttcgagcacatcaccacccgtgacgccgtgcagttcgtcgaggccgcctcggccaacgtcggcgccaccatcaccgcgcaccacctgctgtacaaccgcaaccacatgctggtcggtggcattcgcccgcacttctattgcctgccgatcctcaagcgcaacgtacaccaggaagccctgctcgacgccgccaccggtggcaacgccaagttcttcctcggcaccgactcggcgccgcacgccaagcatgccaaggaagccgcctgcggctgtgccggctgctacaccgcctacgccgccatcgagctgtatgccgaggccttcgaacagcgtggcgcgctggacaagctggaggcgttcgccagcttccacggcccagacttctacggcatgccgcgcaacagcgacagcatcaccctggtgcgcgaggaatggaccgtaccggccagcctgccgctcggcgagaacagcgtagtgcccctgcgcgccggcgaaaccctgcgc

SEQ ID NO: 265602 - DNA, 934 bp, Unknown
  Bacterial polypeptide expressing nucleotide sequence isolated from the Sargasso Sea
gcgtccagacgattggcatctccatttgagagatgaagactttttacccattaccgtaaatgagtcagcgaaatcttttgcaagagcgataataatgcctaatttagttccgccaattacaaagttagttgatgcagaaaattacaaacgacgcatattgaatgccctgaaacctaatttgtcttttgaccctttgatgactctttacttaacagaagaaacagaccctaaagaagtgaaagaaggctttctaagtggccaaatttcagcagtaaaattatatccagcaggagcaacaacgaactctcaatctggtgtccgtaactttgaaaaaattaaacctgttctggaaattatggcagaaattggatgcccactttgcattcatggagaggtaaccgaaaaagatattgatatttttgatcgagaaaaggcttttatcgataacgttctgaataaaattcgcactgataacccaactttaaaggttatcatggaacatattaccactaaagacgcagtggattatgttttttcagaaaacgagaatttagcagcaacagttactacccatcacctttccataaatagaaacgatttattggctggcggcataaggcctcatttttattgtctaccagtggtaaaacgagaaactcatcgattggcactggtagaggcggttgtttcggggtcgccaaaattttttctaggaacagatagcgcaccccatttagaccgagataaggaaagttcctgcgggtgcgctggctgttttactgccacgaattcattggaaattttagcacatatttttgaagaacaaaacgccttgaataaattagagttatttacatcgatcaacggagctaaattttatggcaagaatattaacaaggataaaattaggattgtaaagaaagataaacctacc

SEQ ID NO: 265603 - DNA, 653 bp, Unknown
  Bacterial polypeptide expressing nucleotide sequence isolated from the Sargasso Sea
catgtccgaccgcctgactctcctgcgtcccgatgactggcacattcacctgcgcgatggcgcggtgctgccacacaccgtcggcgatgccgcgcgcactttcggccgcgccatcatcatgcccaacctggtaccgccggtgcgtaatgccgccgaggccgatgcctatcgccagcgcattctcgcggcgcgccccgccggcagccgcttcgagccactgatggtgctctatctcaccgacaacaccagtcccgaggacgtgtgtgcagccaaggccagtggcttcgtgcatgccgccaaactctacccggccggcgctaccaccaactccgactcgggcgtgaccagcatcgacaagatcttcccggcgctggaagccatggcagaagtcggcatgctgctgctggtgcatggcgaagtgacccgcgccgagatcgacgtgttcgaccgcgaaaaagccttcatcgacgagcacctcacccgcgtggtcgagcgcttccccacactgaaagtggtgttcgagcacatcaccacccgtgacgcggtgcagttcgtcgaggccgcctcggccaacgtcggcgccaccatcaccgcgcatcacctgctgtacaaccgcaaccacatgctggttggcggcattcgcccgcacttct

SEQ ID NO: 265604 - DNA, 640 bp, Unknown
  Bacterial polypeptide expressing nucleotide sequence isolated from the Sargasso Sea
atgactcagaccatcacgattacccgccccgatgattggcacttgcatgtgcgcgatggcgatgccatgcgctgcgtggtgccgcacacggctcgccagatgggccgtgccatcatcatgcccaacctcaagcccccggtcaccacggcggagatggcagcggactaccgcgcccgcattctgtcggccgtgcctgcaggcagccggttccagccgctgatgacgctgtatctgacggacaacctgggccccgaggaaatcgtgcgagccaaggcggccggcgtggtggcctgcaagctgtaccccgcaggtgccacgaccaattccgaccatggcgtgaccgatctgcgcaagatctacccgacgctgcaggccatgcagcgcgaaggcctggtgctgctggtgcacggtgaagtgaccgatcagagcatcgacctgttcgaccgcgaggccgtgttcatcgagcagcagctcaagcctctgcgcaaggatttccccgagctcaggatcgtcatggagcatgtgacgaccaaggaagccgccgagtacgtggccgcagccgatgatttcctggcggccaccatcacgccccagcatttgctgttcaaccgcaatgccatcttcctgggcggcgtgcgac

SEQ ID NO: 265605 - DNA, 599 bp, Unknown
  Bacterial polypeptide expressing nucleotide sequence isolated from the Sargasso Sea
agaaaaagtctttatcgaccagcatttaactcaactgataaacactattgctggctttaaagtggtgtttgaacatatcactacggctgacgcggttgagtttgtcaaagccgcaccagagcgtgttgcagccaccatcacaccacagcatttattattgaaccgcaacgatatgttagtcggtggtgtacggccacataactactgcctgccggtgctcaaacgccgcacgcatcaggaagcgctgcgtgctgtagtggccagcggcaataccaagtttttcttaggcacagattcagcgccacacgctaaacaccgtaaagaagcagcttgtggttgcgccggttgttacagtgcctggagcgctattgagctgtacgctcaggtatttgaagacttaggttgcttagacaagttagaaggtttcgccagccactatggcccggacttctacaacctgccacgcaacagcggcaccatcaccttagtgaaacaagactggactgtaccagcagagatcactttgcctgatggcagccctatagtgccatttttcgctgagcagcaattaagctggcagttaaagcaaggtttataag

SEQ ID NO: 265606 - DNA, 824 bp, Unknown
  Bacterial polypeptide expressing nucleotide sequence isolated from the Sargasso Sea
tctgcgcgacggtcagatgctgaatcacgtggtgaggcacaccgcccgcgtgtttcggcgggcgattgtgatgcccaaccttcggcctcccgtcaccacggcgtcacaagcgagggcctaccgccagagaattcttgaagcgtgccttgagcagcctgcgttcacaccgttgatgacggcgtacctcacggacaccacggatgcggctgatcttgaagacggttttcgtgccggtgtgttcacggcggccaagctctatccggccaacgccaccaccaactcctcagctggggtgacggatctcgccaagatcggatctgtgctggcctgcatgcagagaatcgggatgccgcttctcatccatggcgaggtcaccgattcggatgtggatgtgtttgatcgcgaagcggaattcatcacgaggcatctgaaacccttgcgtcggaactaccccgagttgcggattgtgttcgaacacatcacaacggagcaggcggttgattttgtgggctcgtcagaacgcaacctggccgccacgatcaccccgcatcatctccacatcaaccgaaattcaatgtttgctggcgggtttcgcagtgacttttactgcctgcccgtcgcgaagcgcgaacaacatcgtctggccctgcgaaaggcagccacgagtggggatccccgcttttttctgggcacggactccgctccccatagccgtgcttccaaggagaccgcctgcggatgtgccggcatcttcaatgcgccccatgctctcgagagctacgcgcaggtgttcgatcaggagggagctctggatcgactggagg

SEQ ID NO: 265607 - DNA, 1117 bp, Unknown
  Bacterial polypeptide expressing nucleotide sequence isolated from the Sargasso Sea
gcgctccgccgggccgcgccgtgcgcgactcgccgcgcgctcgggcgcatccacgcgaccgtctccgcgaccgccggctccgataggctgacaatcaccgccccggacgactggcacctgcacgtgagggacgacgcgaagatcgccagcgtggtgcccttcaccgcgcgggtcttccgccgcgcgctcatcatgccgaacctcgtcccgcccgtccgcaccacgcacgaggcgggcacgtacagggaaaagatcctcgcggcggtccccgagggcgtgtcgttcgagccgcagatgaccctctacctcaccgacaacacctcgcccgccgagatcgaggcggccgccgcgtccgggttcgtgcgcggttgcaagctctaccctgcgggcgccaccacaaactccgacgcgggggtcacggacgtgaacaagtgcatgcccgcgctggagaagatggccgagctcggcctggtgctggaggttcacggcgaggtgacgcacgggagcgtggacatgttcgatcgcgagcgcgtcttcctcgacgaggtgctctccaagctcgtggacaaggtgcccgggctgaagatcgtgatggagcacatcacgacggaggacgcggtggaattttgcaaggcgcagggagacaacgtcgcggcgaccatcacgccccagcacattctgctaaacaggaacgccatgctgatcggcgggataaggccccacctctactgccttcccatcctgaagcgcgagtcgcatcgcgtcgccgtcaccgcggcggcgacggggggcgacaaaaagttcttcctcggtacggacagcgcgccccaccccaagggcgccaaggaaagcgcgtgcggatgcgccggagtgttctccgcgcacgcggcgctccctttttacgccatggcgttcgagaaggagggcaagctggagaacctcgaggcgtttgcgtcgcacaacggggcggatttctacggcgtgcccaggaacgaggggacggtcacgctggtccgcgaggggtgggagtgcccgggggagtacgagttcggcggtgacgtggtggtgcccttcatggccggtcaggagattccctggcgcgtggtggaggcgtgac

SEQ ID NO: 265608 - DNA, 1066 bp, Unknown
  Bacterial polypeptide expressing nucleotide sequence isolated from the Sargasso Sea
tatgactgcctcgaacgcttcctccccggcgacgctctcgctcgcccgtcccgacgactggcacctgcacctccgagatggcgacatgctcgccgccgtgctgccgcacaccgcgcgccagttcggccgcgccatcgtcatgccgaacctgaagccgccggtgacgaccaccgcgcaggcgcaggcctatcgcgagcgcatcctcgcggcgctgccggccgggatgacgttcgaaccgctgatgacgctgtacctgaccgacaacacgccgcccgacgagattcgccgcgcgcgcgaaagcggcttcgtgcacggcgtgaagctgtatccggcaggcgcgacgacgaattccgaccacggcgtcaccgatctcgcgaaatgtgcgaagacgctcgaggcgatgcaggaaaccggcatgccgctgctcgtgcacggcgaggtgaccgatgcgtcgatcgacctgttcgaccgcgagaaggtcttcatcgaccgcgtgatgacgccgctgcgccgcgatttcccgggcctgaaggtcgtgttcgaacacatcacgacgaaggacgcggccgactacgtgcgcgacgcggacgcggcgcccggcctgctcggcgcgacgatcaccgcgcatcacctgctttacaaccgcaacgcgctgttcgtcggcgggattcgcccgcactactactgcctgccggtgctgaagcgcgagacgcatcgcgttgcactggtcgaggccgcgacgtcgggcaacccgcgcttcttcctgggcaccgacagcgcaccgcatgcgcgcgacgcgaaggaaaccgcgtgcggctgcgcgggctgctacacggcgctgcacgcgctcgagctgtatgcggaagcgttcgatcatgccggcgcgctcgacaagctggaaggcttcgcgagcttcttcggcgccgatttctacgggctgccgcgcagcgccgagacggtcacgctgcgtcgcgaggcatgggaactgccacgcgagatcttcgcgggcgatacgcccgtcgtgccgctgcgaggcggcgagacgatcggctggaaactggcgtga

SEQ ID NO: 265609 - DNA, 784 bp, Unknown
  Bacterial polypeptide expressing nucleotide sequence isolated from the Sargasso Sea
tctgcaaaccccggacgactggcacttacattttcgcgatggcgatatgctcaaagaaacagtggcagccactgcccgttgctttaaacgcgctatcgttatgcccaatcttgttcctcctgtgaccaatgcagcagaagctttagcttacaaagaacgtattctggccgcccgtcctgcaggcagctgttttgaacctctgatggtgttgtacctgacagacaaaaccacagctgaagacattaaagccgccaaagccgctggcgtagtagcagccaaattgtatccggcaggcgcgaccaccaactctcattccggtgtcagtagcttaagtaagctttatcctgtgctggaagtgatggcagagcagcagatgctgttgttggtgcacggtgaagtgaccgacagccatattgatatttttgatcgggaaaaagtctttatcgatcagcatttaactcagctgataaacaccattcaaggcctgaaagtggtgtttgaacatatcaccacagcggacgctgttgagtttgtcaaagctgcgccagaccgcgttgcagccaccattacacctcagcacttattgttgaaccgtaacgatatgttagtcggcggtgtacgccctcataactactgcctgccagtattaaaacgccgtacgcatcaggaagctttacgtgctgtggttgccactggcaataagaaattcttccttggcacagattcagcaccacacgctaaacaccgtaaagaggcagcttgtggttgtgccggttgttacagc

SEQ ID NO: 265610 - DNA, 1033 bp, Unknown
  Bacterial polypeptide expressing nucleotide sequence isolated from the Sargasso Sea
atgaaaacactcactattacgcgtcctgacgactggcatattcacctaagagatggcgcccaattaacagatacggttcgcgatatcagccgctatatgggccgcgctatcgtcatgcctaacctggttcctcccgctatcgataccgaaaccgccttggcttattacgatcgcatcaaggcgcaagtgcccgcaggctcgcaattcgaacccttaatggtgttgtatctcaccgacaaaaccagcccagaggaaatccgtaaagctaaagcctcgggcaaaatcgttgcagctaagctctatcccgcaggcgcgaccaccaactcggattctggcgtcaccgatttgaagaacatctacccagccctcgaagcgatgcaagaagtgggcatgttgttcctagtgcatggtgaagtgactgattcatcgattgatattttcgaccgtgagcgcgtgtttattgagaatatcctcagcaagatcgtggccgatttcccgaagcttaaaatcgttctcgagcatatcaccactaaggatgcggtcgattttgtgactcaagcgtctgacaacgtggccgccacaatcaccgcgcaccatttactttataaccgcaaccatatgttggctggcggtattcgtccgcacttctattgcctgccgattttaaagcgcaatacccatcagcaagcactgttagcggctgcggcgagtggcaataagaagttcttcctcggtactgactcggcgccacacgcaaaagaccgtaaagaagccgcctgtggctgcgcgggttcttatactgcccatgccgccatagagctttacgccgaagcctttgaatcggttaatgcactggataaattagaagcctttgccagcttcaatggcccagatttttacaatctgccccgcaacagcgataccatcaccctagtgaaaaaatcttgggatgtgcccgtcagttacccacttggcgacaacaacgttgtgccaattcgcgctggcgaacaaatcgattggcaggttgaataac

SEQ ID NO: 265611 - DNA, 1357 bp, Unknown
  Bacterial polypeptide expressing nucleotide sequence isolated from the Sargasso Sea
atgactaagtctagcattgggattaaaaatgttcggataatagatccatataataatatagataatgtgttagatatacttattgaaaatgggaaaataactaacattgcagaaggtatattttctcaatctggaaacagtaaccttgttgtgatagatggaactgataaaattctaagccctggttttattgacttacatacacaccttagagatccaggtgaagaacataaagaaactatagaaaccggaatgagagctgctgccaagggcggttttacaacaatatgttcgatgccaaatactaaccctccagttgataattctactactgttaaatatatattagatgaatctaataaatttgaattaatacaagttcttcctattggatgtgttacaaaaggaagaaaaggtatgcaaatttctgaaatgtgggatttgaaaaatgcaggctgtgttggttttagtgatgacggagatcctatctataattctgagattatgcaaacagcattacaatatagtgaacatcttggattgccggttataaatcattgtgaagatactcaattatcaaaacattctgcagtgaatgagggaaaaatttctaatagattaggattatctggttggcccaatcaagcagaagacattatgattgcacgagatatagagttagcaaagaaatatggaggtcatttgcatatagctcacgcaagcacttctcgttcagttgaacttataaatgatgctaaaaatcttggagttaatattactgctgaagttacgcctcaccatctaactatgactgatagttggttattagggcatcaaaaagacactgatgtttttgcaagtcttggaagtgaggcatatgactcaaatttaaaggttaatccaccattaagaaccaagacagatatatattcattgttgactggcttaaaagaaggaataattgatgctatagcaactgatcatgcaccgcatgcactacaggataaaataaccacattagatgatgctgcctatggaatcaatgggctagaaacagcttttacacttttagcaagtttatatcatcaaaatatgttagatattgtggatataataaatcgtttaacactaggtgcagcaaatgttatatccaactcaatagaaaggcctaaaggtattaaaaaaggagaattagcagatattgtacttttagatttaaatagtgattttactattataggaaaggattttatatcaaagagtaagcttactccattagagggtatgacgttaaaaggtaaagtaattttaactttagctaaggggtctatagtttatgaagagaataataattagt

SEQ ID NO: 265612 - DNA, 973 bp, Unknown
  Bacterial polypeptide expressing nucleotide sequence isolated from the Sargasso Sea
atgagtgaaaaagagttcataattagaaagcctgatgactggcatctccatcttcgggacggggaaatgcttgcatctgttatccagcattcagcagctaatttcgagcgcgccatcatcatgccaaatctggtgcctccgattctcacaacggatgatgcaatcgcctataaagagcatataaatcaggtcattccccatggaatgtcctttcaaccgttgatgacactttacctgacggaagcaaccaagacttcagacatcaagcaggggtttgatcttggagtggttacagcgctcaaactttatcccgcaggtgcaactaccaactcagagaacggtgtcaaagaatttgagaacgtttattcaatcctggaattcatggctgaggctgatattccgttactagtccatggagaagtcacggatccggaaattgatatctttgaccgagaagcagttttcatcgaacgggttcttgaccccctcagaaaacgcattcctgaactgcggatcgtcatggagcacatcaccaccaaagatgccgtggattatgtcatccaaggtggtccgaatatcgctgcaaccgtcacaacccatcatctgatcattaatcgcaacgcttaccttgccggaggtataaggccacattattactgcctgcctgtggcaaaacgtgaaacccatcgaatggctcttcgttcagcagtttgttcgggaaacgagaagttcttccttggaacagattcggcaccgcacctcgacggagcgaaggaaaatgcatgcggttgcgcgggcatatacacctcggttaacaccttaagctgtcttgcgcatgtatttgaggatgaggatgcattggataagttagaaggctttgtgtcagttcacggaccatctttctacaagttaccggtcaacagtggcctgctgaaatttcagaaaactcagcgatcctctttcttatcctgaa

SEQ ID NO: 265613 - DNA, 1033 bp, Unknown
  Bacterial polypeptide expressing nucleotide sequence isolated from the Sargasso Sea
tatgacaacactcactattactcgtcctgacgactggcacattcacctaagagacggcgcacaattaaaagacacggttcgtgatatcagccgctatatgggccgcgctatcgtcatgcctaacttggttcctcccgctatcgataccgaaaccgccttggcttattacgatcgtatcaaggcgcaagtgccagctggctcgcaatttgaacccttaatggtgttgtatctcaccgacaaaaccagccctgaagaaatccgtaaagccaaagcctcgggcaaaatcgttgccgctaaactctacccagcaggcgcaaccacaaactcggattcaggcgtgaccgatttgaagaacatctaccccgccctcgaagcgatgcaggaagtgggcatgttgttcctagtgcatggtgaagtgactgattcatcgattgatattttcgaccgtgagcgcgtatttattgagaatatcctcagcaagatcgtggccgatttccctaagcttaaaatcgttctcgagcatatcaccactaaggatgcggtcgatttcgtgactcaagcctctgacaacgttgctgccacgatcaccgcgcaccacttactctataaccgtaaccatatgttagctggcggtattcgtccgcacttctattgcctgccgattttaaagcgcaatacccaccagcaagcgctgttaggcgccgcggccagtggcaataagaagttcttcctcggtaccgactctgcaccacacgctaaagatcgtaaagaagccgcctgtggctgcgcgggttcttatactgcccatgcggccattgagctgtacgccgaagcctttgaatcggttaatgcgctagataaattagaagcctttgccagcttcaacggcccagatttttacaatctgccccgcaacagcgataccatcaccctagtgaaaaaatcttgggatgtgcccgtcagttacccacttggcgacaacaatgttgtgccaattcgcgctggcgaacaaatcgattggcaggtcgaataa

SEQ ID NO: 265614 - DNA, 799 bp, Unknown
  Bacterial polypeptide expressing nucleotide sequence isolated from the Sargasso Sea
tatgcgtgcattagccttatcggctgtgttgttagtggcatcgattatcggaatgcctgcggaagcaaaagagtggcaagaaactcagagttggaatactcactttacagaacataaaacccaaggcgtggttgtgctctggaacgagaataaacagcagggttataccaacgatcttaaacgggcgaaccaagcatttttacccgcatcgacctttaaaattcccaatagcttgattgcactcgatttaggtgtggttaaggatgagcaccaagtctttaaatgggatggacagacgcgagatatcgccgcctggaaccgcgaccatgacttaattaccgcgatgaaatattcggttgtgcctgtgtatcaagaatttgctcgcaaaatcggccaagcacgtatgaataagatgctgcatgccttcgattacggcaatgaggatatttctggcaatttagacagcttttggctcgatggtggcattcggatttcggccatccagcaaatcgaatttttgcgcaagctgtaccacaataagttgcatgtctcggagcgtagtcagcgtatcgttaaacaagccatgctgaccgaggcgaatgccgattatattattcgggctaaaaccggttattcggtcagaattgagccgaaaatcggttggtgggtgggttgggtcgaactcgatgataatgtgtggttcttcgcgactaacatggatatgccaacctcggatggtttagggctgcgccaaaccattactaaagaagtgctgaaacaggaaaaaattattccctag

SEQ ID NO: 265615 - DNA, 799 bp, Unknown
  Bacterial polypeptide expressing nucleotide sequence isolated from the Sargasso Sea
tatgcgtgcattagccttatcggctgtgttggtagtggcatcgattatcggaatgcctgcggaagcaaaggagtggcaagaaactcagagttggaatactcactttacagaaaataaaacccaaggcgtggttgtactctggaacgagaataaacagcagggttataccaacgatcttaaacgggcgaaccaagcatttttacccgcatcgacatttaaaattcccaatagcttgattgcactcgatttaggtgtggttaaggatgagcaccaagtctttaaatgggatggacagacgcgggatatcgccgcctggaaccgcgaccatgacttaattaccgcaatgaaatattcggttgtgcctgtttatcaagaatttgctcgcaaaatcggccaagcacgtatgaataagatgttgcatgccttcgattatggcaatgaggatatttcgggcaatttagacagcttttggctcgatggcggcattcggatttcggccatccagcaaatcgaatttttacgcaagctgtaccacaacaagttgcatgtctcggagcgtagtcagcgcatcgttaaacaagccatgctgaccgaggcgaatgccgattatattattcgggcgaaaaccggttattcggtcagaattgagccgaaaatcggttggtgggtgggttgggtcgaacttgatgataatgtgtggttcttcgcgactaatatggatatgccaacctcggatggtttagggttgcgccaaaccattactaaagaagtgctgaagcaggaaaaaattattccctag

SEQ ID NO: 265616 - DNA, 799 bp, Unknown
  Bacterial polypeptide expressing nucleotide sequence isolated from the Sargasso Sea
atgcgtgtattagccttatcggctgtgtttttggtggcatcgattatcggaatgcctgcggtagcaaaggaatggcaagaaaacaaaagttggaatgctcactttactgaacataaatcacagggcgtagttgcgctctggaatgagaataagcagcaaggatttaccaataatcttaaacgggcgaaccaagcatttttacccgcatctacctttaaaattcccaatagcttgatcgccctcgatttgggcgtggttaaggatgaacaccaagtctttaagtgggatggacagacgcgcgatatcgccacttggaatcgcgatcataatctaatcaccgcgatgaaatattcagttgtgcctgtttatcaagaatttgcccgccaaattggcgaggcacgtatgagcaagatgctacatgctttcgattatggtaatgaggacatttcgggcaatgtagacagtttctggctcgacggtggtattcgaatttcggccactgagcaaatcagctttttaagaaagctgtatcacaataagttacacgtatcggagcgcagccagcgtatcgttaaacaagccatgctgaccgaagccaatggcgactatattattcgggctaaaacgggatactcgactagaatcgaacctaagattggctggtgggtcggttgggttgaacttgatgataatgtgtggttttttgcgatgaatatggatatgcccacatcggatggtttagggctgcgccaagccatcacaaaagaagtgctcaaacaggaaaaaattattccctaga

SEQ ID NO: 265617 - DNA, 940 bp, Unknown
  Bacterial polypeptide expressing nucleotide sequence isolated from the Sargasso Sea
catgacctactcatcgaaacgtcgaaccctgttgctggccgctgcgacggcgccgcttgcgttgagcgttgccgcgtgcgcgtcgcggcaggccgcggcgccggacgacgcaactgccgccgccgcagccgcggctgcggccgtgacgcccgctgccgccgggcaggtgctggccgagctcgaacgcagcgcgggcggccgcctcggcgtatgcgcgatcgacatcgcgaccgggcggcgcgcggaacatcgcgcggacgagcgcttcccgttctgcagcacgttcaaggcgatgctgagcgcggcggtgctcgcgcagagcgtcgatcgaccggcgttgctgcaacagcgtgtgacgtacaccaaggctgacctcgtcaactattcgccggtgtcggggaagcatgtcgacgacggcatgacggtcgccgcgctgtgcgaggccgcgatccagtacagcgacaactcggccgcgaacctgctgatgaagctgctcggcggcccgtcggcggtgacggcctacgcgcgctcgatcggcgacgacgcgttccggctcgatcgatgggagaccgaactgaataccgcgctgccgggcgacccgcgcgacacgacgacgccggccgcgatggccgcgagcatgcgcgcgctgatgctcggcgatgcgttgccggccgcgcagcgtgcgcagctcgttacctggatgcgcggcaacaaggtcggcgacaagcggctccgtgcgggcgtgccggccgggtggacggtcggcgacaagacgggcaccggcgactacgggacgaccaacgacgcgggtgtcatgtggtcgccgtcgggtgcgccgatcgcgctggtcgtgtactacacgcagacgcgtgccgatgcgcgcgcgaaggacgacgtgattgcgtcggtcgcacgcatcgtggtccgggcattcggttga

SEQ ID NO: 265618 - DNA, 955 bp, Unknown
  Bacterial polypeptide expressing nucleotide sequence isolated from the Sargasso Sea
gttggggacaaaaaaaactggccaatccagcgaggatttgaccggttctacgggacgattcatggtgccggaagtttctttgatcccaatactcttgtcagggataacaccttcatttcgccctacgctgacccctcctacaaaccagattcatactattacacagatgcgattgccgatcatgctgtccgttttattcatgagcacgatacgaaaaaaccattttttatgtatgtcgcttttactgcagctcactggccaatgcatgcaaaagaaaaagatcttgaaaaatataacgggcattacaaagagggttactcaacggttcgagcaactcgttatcagaagatgctccagcacggtcttgtgacaaaggattccacaacactctggcccctcgaagagcaatggggtgagcacggtgagtactggccgtgggatgaaagaaatatggaggtctatgccgccatggttgactcgatggatcaaggcattggcaaaatcgtacaagcccttgaagctacgaatcaattcaacaacacactggtctgctacatgcaagataatggcggctgcgcagaggggatgggccgacggaacattggaaaaccaagagcgtcaacaccaccactccctcccatgaaagctgacacactgcaggtggacatgattccaaaacagacccgtgacgggtatccggttcgacaaggcaaaggtgtcttggcaggtcccgctgatacctacattggatatggtcaggcttgggcaactgtctccaatacaccatttcggaaatataagcactgggtccacgaaggcggtattgcgacgcctctgatcgttcactggcctagcggcattgttgaccctggtcggatggaagaaacaccaagtcatctcattgacattatggccaccgccattgatgttgctgatgcagactatccaaagaata

SEQ ID NO: 265619 - DNA, 508 bp, Unknown
  Bacterial polypeptide expressing nucleotide sequence isolated from the Sargasso Sea
gatgacaccttcacaaaactgggacctgctctggcattctgtaaagcttgcctgcatgaataaggggggagccgcgtatggtctgatcgaagacggggcaatcgccgttcaggacggaacaattgcctggaccggatctgcttccgagcttccggggcctatggaaaccctggcccgtgaggtccgggatggagagggaatgtgcatcaccccgggactggtcgacagccatactcatctggtttatgcggggaaccgtgcgcgtgaatttgaaatgcggctcgaaggagcaagttacgaggagttggccaaagccgggggagggatcctttcaaccgtccaggccacccgaaatgccacggaggaagcattgtttgaagcctccaaaccccggttgatgtccctgctcgaggaaggagtgaccaccgtcgaaatcaaatcaggatacgggttggaaaccgaaaccgaatgccgcatgctcagggtcgcacggaagctggaaagtgaa

SEQ ID NO: 265620 - DNA, 295 bp, Unknown
  Bacterial polypeptide expressing nucleotide sequence isolated from the Sargasso Sea
atgcattccacctcgaaacagctctggcgcgatgtgcaggtcttcgatggcctggcgcagctggacgaggcgatgaacctgctggtcgaggacggttgcatcgccggcctgtggccgtcgcgcactttcgacgaggcgctggcgcaaggcgcagtcgaagctgggcgtggcggcgtgatgactccggggctggtcgattgccacacccacctggtgtacgccggtgatcgcgctggtgagttcgagcagcgcctggaaggcgtcagctacgaaaccatcgcccgcaacggcggtg

SEQ ID NO: 265621 - DNA, 730 bp, Unknown
  Bacterial polypeptide expressing nucleotide sequence isolated from the Sargasso Sea
tatgggtacgttaaaattattcaatattggcaacatggtgacctacagtgttaatgaaaattcaatgatatcttctaaagggatggagatattgatttcagatggtaaaattattgaggttggatcaaaggtgagtaatgctgatcaattaattgattgtgaaaataaattagttacacccggatttgtggactgccatacgcacccagttttccttgatggaagagaaaatgagtttgaaatgagattaaaagggctcagctacgaggaaattgctaaaaatggtggtggcataaataatagcgtaagcagtgttcgtaattcatctgaagccgaattatataatcaagtaatatcaagaatggataaattcctaaaactaggtactacaactattgaagcaaaaagtggatatggtttaaatactgaatcagaattaaaatcacttaaagtattgcatgaagtaaaattaaatcaccaaattgatatagtaccaacgttcatgggtgctcatgcagttccaaaagaatataacggtgatgtagattcatatgttgatttgatatgtgattcaatgatacctcaggtagccgaacagggtatagctatttttaatgatgtattttgtgagaaaggatattttaatcttgatcaatcgaaaagaattttaaaaaaagggttagaatatgggttgcttcctagaattcattctgatgaattcaataatctt

SEQ ID NO: 265622 - DNA, 493 bp, Unknown
  Bacterial polypeptide expressing nucleotide sequence isolated from the Sargasso Sea
aatgggaaattcaaaaaccaatcaaacaatttttactaacggtaaaattgttccaatgtcgggtaatagtgatgactttgaaatcattgaagatgctgtaatagtatctgatggcgatatcattgcttgggttggaccagaaaaaaatatcccccaaaaatttaaaaactttgaagaattcaatgtaaaaggaaagttaataaccccagggtttattgattgccatacccatctagtttttggtggcaacagatccacagaatttaatatgcgattgaacggaaaatcttatgaagagattgctaaagcagggggtggtatagcctcaacaatgaaatccacaagaagcgctacttttgatgaactgctgaaatcatctctaacgcgtttagatgatatgatcagaaatggcgttacaactgtagagattaaatctggttacggtttagatattgaaaccagaatgtttgatgcttcgtgtgcaagaaggtga

SEQ ID NO: 265623 - DNA, 830 bp, Unknown
  Bacterial polypeptide expressing nucleotide sequence isolated from the Sargasso Sea
aatgcagcaattcttccctgatgatgttatctggcgcaatgttcgtctggcgactatggatcctgaacgtggtaccccatatgggctggtggatggtcacgcgctgatcgtccgccagggcaagattcgcgatatcgtcccggaatcatcgttatatctcacacatgacaatacttttgatatgcagggccggctgattacgcctggcctgattgattgccatacgcatctcgtctttggcggaaaccgcgcaggtgaatgggagcagcggttaaatggtgtctcctaccagcagataagcgctcagggtggggggatcaatgccaccgtatcggcgacccgcagcgccacggatgaacaactcttacacgtagctcatcagcggatggaacagctgatcaaagaaggtgttacgctgttggaaataaaatccggctacggcctggatttgccgacagaagagaaaatattgcgcgtggtggcagcgctggcggcagagaatatcgttgaaatcagcccgacgctgttggctgcgcatgcgacgccaacggaattcagggatgatcctgacggctatattacgctggtgtgcgagaccattttgccgcagctgtgggaacaagggctgtttgagaccgttgatctgttctgtgaaagcgttggtttttcgttggcgcagagtgagcgggtgtttcaggctgcgcaggcgctgggcatcccgattaaaggccatgtcgaacaactgtcattgcttggcggcgcacagttggtaagccgctaccacgggctatccgccgatcatattgaatacctcgatgaagcaggcgtgg

SEQ ID NO: 265624 - DNA, 640 bp, Unknown
  Bacterial polypeptide expressing nucleotide sequence isolated from the Sargasso Sea
atggtattagaggaaggtttagaaattatagttaggcatgggaaaattattgaaataggaaaaaatcttaattatgcagatcaaatttatgattgtgaaaatagtttagttaccccaggatttgttgactgtcatactcacccagtatttttcaatgaccgatcgaacgaatttgaaatgagagcagctgggattatatatgagcaaatagcagctaatggtggtggaataaacaatagtgtaaaaagtttaagagattcagattataatgaattaaaacaaagagtcatccatagaatgaataactttttaaaattgggtactactacattagaggcaaaaagtggctacggtttagatttatatagcgaacttaaatctttggcgattttagatgaggttaactctgaacatagagtcgacattattcctaccttcatgggtgcgcatgctgttccaaaagagtatgataacaaaccggatgattatgttgatcatttatgcaaggtaatcatccctgcagtagcaaagcaaggtattgcaaaatataatgatgtgttttgtgaaaaaaggatacttcgatttacatcaatcagaaaagattttattgactggtttagattatgggctgattcctaga

SEQ ID NO: 265625 - DNA, 395 bp, Unknown
  Bacterial polypeptide expressing nucleotide sequence isolated from the Sargasso Sea
attttatacaattttggctgatggtgatgataataatgatccagttgttgataccgcaagagctatacttgacggtcatattgtcttaagtaggttaaatgctcagatgggtatctaccctgctgtagatattcctcattcaataagcagggtaatggatgatttgatttcagcagaccatcttgaagcttcaaaactatttagaaaacacataagtagttatattgagaataaagatttattattaatgggaggttatacccaagggcaagataaagatcttgatgacgctataagcatgtggccaaaattaatagagttcatatctcaagctaacattaaaaaagcaagttatgacagtgctaaaactgaattattaaagttatatcaatagg

SEQ ID NO: 265626 - DNA, 526 bp, Unknown
  Bacterial polypeptide expressing nucleotide sequence isolated from the Sargasso Sea
ttgcaatgtgacttactaattagtgatataaatattgcttcaatgatcagtaattccagctatggaatcattgagaatggagcaatagcagtcacagactcaaccatcgtctggattggaaaaggagatctagtcccagaactaaacgcaaagaaaacactatctttaccaggaaaatgggccagtccagcgctaatcgattgtcatacacatattgtgtttgctgggaatcgtgcttgggaatttgaagatcgattaaagggaaaaagttaccaagaaatttctaaatctggtggaggtataatatccacagtcaaccaaacaagaaaaagttcgagtaaagacctcctaaagcttgctaaaaatagattaaatgaattgcaatcagagggagtaggcactgtagaaattaaatcaggatatgggctggatcttgcaactgagaagaagatgcttgaggttgcaaaaaagttagaaaatgagcagatatccataaaaaaaacgtttcttggtgctcacgctttac

SEQ ID NO: 265627 - DNA, 793 bp, Unknown
  Bacterial polypeptide expressing nucleotide sequence isolated from the Sargasso Sea
atctggttacggtttagatatcgaaactgaatgtttgatgcttcgtgttgcaagaaggttagaaacaataaggccgatacgagtgaaaacgagttttctaggttcacatggcatctctcctgaatataagagtaaccccaataaatatatagaagatatttgtcttccagctttaaataaagctcatgaagagggattggttgatgctgttgatggattttgtgagacagttgcattaaatacagaacaattaaaattagtttttgaattagccaagaagttaaacctccctgtaaaattacatgctgagcaacttagtcattcaggcggagttaagctagcgacttcttataatgcaatttcagtggatcatcttgagtacgcaaatgaggatgatgttaagttaatgtctggtgctggaagtatagctgtaattcttccaggggcttattatactctaaatgaaacacaaaagcctccaatcgaattatttagaaagtataatgtgcctatggcaattgcaacagactgcaatccaggatcgtcacctcttacatcaattctacttacaatgaatatgtcatctacactttttaaagtaacaccactagaggccttatctggtgtgacaaaaaatgccgcaaaagctttatctcttaatgacagaggtcagattaaggaaggcatgatctcagattttgtaatatgggatttagagcacccagctgagttttcatatcgaattggatttaatccaatatataaaagaatttttggaggatcatttgactga

SEQ ID NO: 265628 - DNA, 455 bp, Unknown
  Bacterial polypeptide expressing nucleotide sequence isolated from the Sargasso Sea
ggctaagtcggttgatcatattgaatatttggatgaggctggcgttaaagcccttagtgaaagtggcacatgcgccgtgctgttacctggcgcgttttactttttgcgggaaacccaaaaaccgcctatcgacttattgcgtcaatacggtgtgcctatggtgctcgccagcgactttaaccccggctcatcgcccatctgctcgaccctgctgatgctgaacatgggttgcaccctattccgcttaaccccagaggaagcgctcgcaggtttaacattgaatgccgctaaggcgctagggattgaagagagtgtcggcagcttagtggtcggcaaacaggcggatttctgtctgtgggatatcgccactccagcgcaactcgcctatagctacggcgtgaatccctgcaaggatgtggtaaaaaacggtaagttagttcatcaacacacctaac

SEQ ID NO: 265629 - DNA, 786 bp, Unknown
  Bacterial polypeptide expressing nucleotide sequence isolated from the Sargasso Sea
tataaatagtacaaatggtgtaaggagatctacagaaactgagttgatatctagagtcagggatcgaatggataaatttttagccctaggaacaacgaccattgaatgtaagagcggatatggcttagatcaagaatcagaggtgaagtcacttaaagtaatacatgaggttaataagagccacagtattgatatggttgctacattcatgggtgctcatgcatttcccgaggagtttaagaatgaacatgactcatatgttgatttaatttgtgaagagattattcctgcagtagcaaaacagggtatagctgaattcaatgatgttttttgtgaggatggttattttaatgaagaacagactagaaagataattctaagaggcaaggaatatggcctaataccgagaatgcatgctgatgaatttacagattcaggttcagcggttatagctggagatgttagagctatttcagcagatcatctaatggctgttagcaatgaggggattgaagcactcagtgaaaacaatgttatagctacactattaccaggaacaacattttttttaggtaagaaagaatatgcaccatataaaaaactgaagaatgcggggatagatgttgcgcttgcaacagactacaaccctggtagctctaatatccaatcaatgtcattcatagtttctcttgcatgtatatatttgaaaatgaatattctcgatgcaattaaggctagcacctacattgctgcaaaatcactaatgcgtgataaagatataggttc

SEQ ID NO: 265630 - DNA, 355 bp, Unknown
  Bacterial polypeptide expressing nucleotide sequence isolated from the Sargasso Sea
ttgcgcccgaaggatgtgccttgcctacatacttgtactgtaccatgctgtgccgcaactcctcctacttaccctcaggacgtgccttgctgtgcgcagggtggggcgtgggtgacgcccggactgatcgactgccacacccatctgatctacgctggtcaacgagccagcgaatggacaatgaagctggagggagccacttgggagcagctcattgagcgcgggggcggcatagtcagcacggtgcagacgacccgtgccgcaagccgcgaggcgctgctgcgagagtgcgggccgaggctggagcagctgatggctgagggcgtgaccacgatgagatcaagtgagggccatt

SEQ ID NO: 265631 - DNA, 946 bp, Unknown
  Bacterial polypeptide expressing nucleotide sequence isolated from the Sargasso Sea
aatgcttgggttgtatattaaagatggtaaaattacttcctatggatctatgcctgttgcacaagatattattaaaaaaaatattttacttcatgatgtcggcaacagactagttatgcctggttttgttgattgtcacactcatcttatttatgcaggacaaagagataaagaatttataaggcgtctaagtggatatagttatgaagatatagctaaaatgggtggggggatacagtcaacagttaaacaaacaaaattagcttgtgacaatgatttgcttagtcttgctactgcaaggcttgatgaattgttatctcagggtataacaagtttagaagttaaaactggttacggtgtttatgtcaaagaagaaattaggcatttaaatttactaaatatcatttctcaacaaagccctcaggagatagtaaaaacatgtttagctttgcacgctcaacctaaggatataaaggtatctgattatattagtcaggtaacatctgagctagttcctgaagttgcaaaattaaatttagcttcctatgttgatatgtttcttgaaaaaaattatttctcctatgaaagctgcaataaagtggctcaaaaagcagatgaacttggattgtctattagggtgcatgcagatgagtttagccattctggaggagcacagttagcagctaagtggaaagctgcaagtgctgatcacctgcagtatacaagtgagtgtgattttaagctgcttgcaaagaatcaaacaactgctgttttgttgccaggaacttccttatttactaacataccttacacaaatgctagtccaataagaaaagctcgatgcgctattgctgtagcttctgatcataatcctggtagcagtcctttcacaaatatctcacaacttgcatcacttgcttctctttattgtggtctaacttatcct

SEQ ID NO: 265632 - DNA, 561 bp, Unknown
  Bacterial polypeptide expressing nucleotide sequence isolated from the Sargasso Sea
aatggacccttccatatcagcaccttacggcgcaattaccaatgcggctatcgcagttaaagacggtaaaattgcctggttaggcccacgcagcgagctgcccgccttcgatgtgttgtccattcctgtttacaggggcaagggcggttggatcactccaggactgattgatgcccacacccatttggtctttgctggtaatcgtgccaacgaattcgagctacgcctaaagggcgccacctacgaggaaattgcccgtgccggcggcggcattatttccacagttaacgcctgccgtgaggccgacgaagccgaactatttgacctcgggcgccagcgtttaaatgccttggcgaaggaaggcgttaccacggttgagattaaatctggctatggcctagataccgaaaccgaactcaaaatcctgcgcgtagcccgcgaactcggccaacatcaccatgtggatgtgaagaccaccttcctcggtgcccatgcggtaccgcccgagtttaaagacaatagcgacggctatgtcgacctaattatcaataagatgctgcc

SEQ ID NO: 265633 - DNA, 853 bp, Unknown
  Bacterial polypeptide expressing nucleotide sequence isolated from the Sargasso Sea
ttgattgacgcctgtaacggttttttattaaatcagtttggccgcagttttggtttatctgccttgtataaagtgctgatgttggttctgatgcttgtgtcattaagttggcgcagcggtaaaacctttgtactctttcctgcactttttatcctgttattacccggagctttttatagttggttgcaccttggaggatccttagccccagaccttgggctgatcctgaaactcatttcgcctctgattgcgttttattatttgttgagtctttctcaattagataaacactttgcactgaaatttctgcatcaggtttttgtggtcaactacctgattgtgctggtgaattttatttttggcgctttaggctatggctacacttcttatttaccgcaacagcatttatctcaggtcgatttaggcagcaaaggattttttaacgccgccaacgagctttccgtggtattgctggtgttatccgcctggttgttgcagtactactggcaacagcacaagctgatttttctggctgtagctgctacttcaatctggtgtgccagcttaatgctcaccaaaaccggtatgctggggactctgatcctggtgctgtttattccgctgatgccctggtttatccgtttaaactggaaccgtcttgctctggcgaccttactgctagtggttgttgcggcactggtgatttggcaagcgccgttgttgttaggtcagctaggtctggcggaaaaattacagcatgtttatcagcaacaaggtctattgggcgtcctgctgtcatcgcgcgataaatatgcagccgaaatctggcaactggttagttttactacagcga

SEQ ID NO: 265634 - DNA, 1255 bp, Unknown
  Bacterial polypeptide expressing nucleotide sequence isolated from the Sargasso Sea
tatggttctaccaagtggggcatttaccctaaaaaatgttacagtgccggctgcaatatttggccaaagaggggacctgatatctaccgatattggtattgttgatgggcagataagtgcaccgggtggcaaggtaattgaaatggctgaggctatggtccttccagcctttgtagattgtcatactcatttagataaaggacatatattaccacgtgcccaaaacccggatggtacgtttgtaggtgcgctaaccagtgtgcgggaggatcatttaaactggacttcaaaagatgttcgcacaagagcagatttttctatccgttgcgcatatgcgcacggcactcgggcaatacgcactcatgtggactcaatgaatggtcaatataaacgcagctggcctgtttttgctggattacgcgaaaagtgggctaataaagtcgaattgcaaatgacaagccttataacttgcgaaagttatggcatgcccgaatatgccgagatcgccgctacggtggcacattttgacggggtgcttgggatggtgtcttttccaatgcctgatttaaaaaaagttttgcttagccacttcgaaacagctgggaatttggggctggccttagattttcataccgatgagaccatggacccaagctcagaaactctacgcgtaatagcagaatgcgtaatggaaactggtttttgcgggcgtgttttagtgggtcattgctgctctctttctcagcaagaagaaaatcttgccatggatacacttgatttagttgctaaagcaaaaatagacgtggttagtcttccaatgtgtaatctttacctacaggaccggcatgctggtcgaactccgcgagggcgaggggtaaccttagttcacgagatgaaagctcgaggaatcaatgtgagctttgcttctgacaatacacgcgaccctttctacgcctatggcgatatggatatgctagaagttatgcgtatggcaacccgaatagctcatctcgatcattctgatttcgattgggtgaagagtttttctcaaacgccagcagaagtgtgtgattttcccgatttaagtcttgcgcacggaaccaccgctgaccttgttatctttaacgcaagaaattggaatgaactttattcgcgaccacagtcggaccgtattgtccttagaaatggtattgcaatagaccgtaaattaccaagctactctgagcttgatgcacttttggaggcttataaatga

SEQ ID NO: 265635 - DNA, 943 bp, Unknown
  Bacterial polypeptide expressing nucleotide sequence isolated from the Sargasso Sea
atgggtacgttaaaattattcaatattggtaatatggtgacctatagtatgaatgaaagttcaatgatatcctctaaaggtatggagatattgatttcagacggtaaaattattgagattggacctaaggttggtgatgctgaccagctatttgattgtgaaaacaaactagttacaccaggatttgtggactgccatacacacccagtttttcttgacggacgtgaaaatgagtttgagatgagattaaaagggttcagctacgaagaaattgctaatgagggtggtggcataaaaaatagtgtaaaaagtgttcgtaattcatctgaagtcgaattatataatagagtaatatcaagaatggataagttcttaaaattaggcacgacaactatagaagcaaagagtggttatggcctggatataaattcagagttgaagtcacttaaagtaatacatgaagtaaatctagctcatcaaatcgatattttaccaacgtttatgggggcccacgcagttccaaatgaatatgctgatgatatagattcttatgttgatttgatatgtgattctatgatacctcaggtggctgaacagggtatagccatttttaatgatgtattctgtgaaaaaggatattttaatcttaagcaatcggaaagaattttaaaaaaaggattagactatgggttgctaccgaggattcattcagacgaattcaataatctaggagcgtctaagctagctggtaaattaaatttaatttctgctgatcatctaatgaaaattgaaaaagatgacatagagattatggctgattcaaacacaaaagctgttctgcttccagggactacattttttcttggtcattcgaattatgcaccctaccataagctaaaagaggctggtatagaggtagctattgcaagtgattataatcctg

SEQ ID NO: 265636 - DNA, 541 bp, Unknown
  Bacterial polypeptide expressing nucleotide sequence isolated from the Sargasso Sea
aatgggacgtctttttgagagagcgcggcagcttgatattcctgtcaaactacacgctgagcagctttccaatattggtggtaccaagctggcggcaagttacaatgcgctatctgtagatcacgttgagtatgcagacaaaacggatattgccgccatggcaaaggcgggtagcgtggctgttttattgcctggtgcattctataccttgcacgaaacgcaaaaacccttagttgaggcttttcgctctgagagcgtgccaatggctgtcgccactgactggaacccgggctcttccccaatggggtccttactcctggccatgaacatgtcctgcacgctgtttggcttgaccccggtagaagccctcgcgggaacaacccgcaatgcggcacgagcgcttggacttaaagattgtggcattgtcgccccaggaaaacgtgccgatctggcaatatgggatgtgcttgaacctgcagaactaagttatcgttttggcgtaaatccattaaataggcgtatttttggaggtaggctttga

SEQ ID NO: 265637 - DNA, 538 bp, Unknown
  Bacterial polypeptide expressing nucleotide sequence isolated from the Sargasso Sea
ttgctcacagatgccaacattgcgaccatggatagcaatattgatgcgccttatggggcgatagaaaatgcggcgctagctattaaaaatggcaaaatagtgtggctaggtaaacaagctgatttacctaattttgatgtgttagccaccccgatattaagtgtaaaaggacaatggttaaccccaggcttaattgattgccatacacatttagtgtttgccggttctcgtgcgcaagagtttgagcagcgtttgcagggcgtgagctatcagcaaatagcagcgcagggagggggaatagcaagtacagttaaagcaacccgagaggctgaccacgaacagttatttgtagcagcaaaagagcgtttaaatgcattgttagctgaaggggtgacgacggttgaaattaagtcagggtatgggcttgatatagacaatgagaaaaaaatattggaggtggctaggctgttaaatcaacatcaccccattgaagtggttaacacctttttaggggcacatgcgctaccttggagttaaa

SEQ ID NO: 265638 - DNA, 421 bp, Unknown
  Bacterial polypeptide expressing nucleotide sequence isolated from the Sargasso Sea
gaagagaacggagtaacagccatggcagaatctgggacggttgccaatctccttccaggagccttctattttctcctggaaacaaagcttcctccgctggatctgttccggaagcacgacatccctgtcgcacttgccacggactgcaatcccgggagttcacctgccgagtcgctgcttctgatgatgaacatgggctgtaccttgttccgtatgactcccgaagaagcactggacggggtaactcggaatgcagcaaaagccctcggacttgatgaccgcggggttctcgaaacagggaaaaaagccgatctggtcatttgggatgtcgaacatcctgccgaattgagttaccgattcggagtcaatccatgtaacaccgtggttcagtcaggaaaaattgtcaggcaaatcagctaat

SEQ ID NO: 265639 - DNA, 809 bp, Unknown
  Bacterial polypeptide expressing nucleotide sequence isolated from the Sargasso Sea
aagcgctacttttgatgaactgctgaaatcatccctaacgcgtttagatgatatgatcagaaacggtgttacaactgtagaaattaaatctggatacggtttagatattgaaactgaatgtttgatgcttcgtgttgcaagaaggttggaaacaataaggccgatacgagtgaaaactagttttctaggttcacatggcatctcttctgaatataagagtaaaccagataaatatatagaagatatttgccttccagctttaactaaagctcatgaagagggactggttgatgctgttgatggattttgtgagacagttgcattaaatacagaacaattaaaattagtttttgaattagccaagaagttagaccttcctgtaaaattgcatgccgagcaacttagtcattcaggtggagttaagttagcgacttcttataatgcaatttcagttgatcatcttgagtatgcaaatgaggatgatgttaagttaatgtctggtgctggaagtatagctgtaattcttccaggggcttattatactctaaatgaaacacaaaagcctccaatagaattatttagaaagtataatgtgcctatggcaattgcaacagactgtaatccaggatcatcacctcttacatcaattctacttacaatgaatatgtcgtctacactttttaaagtaacaccactagaggctttatctggtgtgacaaaaaatgccgcgaaagctttatctctgaatgacagaggtcagattaaggaaggcatgatctcagattttgtaatatgggatttagagcacc

SEQ ID NO: 265640 - DNA, 799 bp, Unknown
  Bacterial polypeptide expressing nucleotide sequence isolated from the Sargasso Sea
ggcgtgacaacgcttgaggtgaaaagcggctacgggctttgtgttgaggatgaggagaaaatgcttttggcagcacgttcattgtgtgagaggctgccggtgtccgtccatacgacattcctgggagcgcatgcgattccggaagactttcacgaaaggagtgacgattacattcagttggtctgcgaggaaatgttgccctcggttgcaagacagggcctggcagacagcgttgatgccttctgcgaaaacattgcatttagctgtcagcaagtccgtcgggtttttgaaaaagcacgtgaactgggcctcccggtccgtcttcatgccgatcaattgactaatggtggaggggcggcgctggctgcagagttcggggctctgtctgcagaccacctggagtacaccgacgaagcaggagttaaggcgctcgcagaatcaggtaccgttgcggtactgctcccgggagcgttttattttctgaaagaaaaacaatgcccgcctgtggagctgtttcgtaaacatcaggtcccgatggccctcgcgacggactacaaccccggcagttctcccgttgattcgcttctgctggtgctcaacatggcctgtgtcatgtttggattaacgccgcgcgaggcggttgccggtgtcactattcatgcagcgaaagccctgggtttgtctgatcgtggcgtgctgaagcccggctatcaggccgattttgcggtttttgatgttgagaccttggcacatctttgctatcccatcggggtggcgccagcacggctggtggtccagg

SEQ ID NO: 265641 - DNA, 1261 bp, Unknown
  Bacterial polypeptide expressing nucleotide sequence isolated from the Sargasso Sea
atgggttatcagtacgacacgcttatttacaatgttcgcattgcgtctatgcaagacaacaagttgccctatggcgaattaccgccacacgccattgccataaaagacggcaaaattgctgcgttacttccttgcgatgactcactagacgacgtgtttgagcaagccaaaagcgtaatagatgccactaccctaattccccaaaatgaaggttcaacgcccaaacccccgtggctattgcctggtttcatcgattgtcatacgcatctagtgtatggcggcaatcgcgccgaagaattcgaaatgcgattgcaaggcgcaagttatgtagacattgcgcagcgcggcggtggtattaaagggacggttgaaaaaactcgatgctctgacgaaaacaccctgcttcacactgcgataaaacgcgcaaagcgactgtgcgaagaaggtgttaccaccattgaagtcaaatcaggttacgggctggatttagacactgaagtgcgcatgttacgcgtggctaaatcccttgagcagcatcttcctgtgagtattaaaactacctatttaggcgctcacgccctgcccaatgaatttgctgacgactcagaaggatatatcgatttcatttgcaacgaggcacttcctcacattgcttcgcaaaacttggctgacgccgttgatgtattttgtgaaactatcggtttttcaacttcacaaacagaacgggtgtttagctgcgcacagcagcacggtttacccattaaagctcatgtagaacagcttagcgacagcaaaggcgcagtgctagcagctaagtacggcgcactatcggtagaccacatcgaatatttagctgacagcgatattcccttacttgcccaaagtggcaccgttgccgtgcttttaccaggcgctttttattacctaagtgaagttcaaaagccgccggtagacgccctaagggcgcacaatgtgcccatggccttagccactgactttaatccaggtagttcgccgttagcctcaatccttaccgcgataaatatggggtgtgtgctgtttcaacttacgccagaagaagcgctacgcggcgccactgcacacgcggctagcgcacttgggctgcacgaccgaggtgttattgaagcaggtaagcttgctgacttaacactgtgggatatcgaaacaccggcagagcttgcctattgtattaatggccaccgccccattgcggtgtttaaggaaggtaaacatgtttaag

SEQ ID NO: 265642 - DNA, 907 bp, Unknown
  Bacterial polypeptide expressing nucleotide sequence isolated from the Sargasso Sea
catgcccaccgtatcggcgacccgcagcgccacggatgaacaactcttacacgtagctcatcagcggatggaacagctgatcaaagaaggtgttacgctgttggaaataaaatccggctacggcctggatttgccgacagaagagaaaatattgcgcgtggtggcagcgctggcggcagagaatatcgttgaaatcagcccgacgctgttggctgcgcatgcgacgccaacggaattcagggatgatcctgacggctatattacgctggtgtgcgagaccattttgccgcagctgtgggaacaagggctgtttgagaccgttgatctgttctgtgaaagcgtcggatttaacctcgcgcagagcgaacgggtatttcaagccgcccaggcgctgggcattccgattaaagggcatgtcgaacaactgtcattgcttggcggcgcgcagttggtaagccgctaccacggactatccgccgatcatattgaatacctcgatgaagcgggcgtggcggcaatgagccaaagcggtacggtcggcgtgctgctgcccggcgcattctatttcctcaaagagcagcagcgcccaccggtagcgttgctgcgtcaatatcaggtaccgatggcggtagcgacagattttaaccccggtaccagcccgtttatcagcctgcactgggcgatgaatatggcctgcgttcagtttggcttaacgccggaagaagcatgggcgggcgtaacccgtcatgcggcccgggcgctggggcgtcacgccacccacggtcaattgaaggccgggtttgtggccgattttgtggtgtgggatgccacacttcctgttgagatcctgtatgaacccgggcgcaacccgctctaccaacgcgtattcaaaggacaaatagcatga

SEQ ID NO: 265643 - DNA, 643 bp, Unknown
  Bacterial polypeptide expressing nucleotide sequence isolated from the Sargasso Sea
ctgcctgccgaccctgcgggctgcatatgcagagggactggtggatgcggtggatggcttttgcgagggcatcgctttttccgccgaacagatggcgcgtgtctttgatgttgcagccgagctgggtctgccggtgaagctccacgctgagcagctgtcccatcaagggggcagcaagctggcggcagaacgcggcgcattgtctgttgatcacgtggaatacgcgaccgaggaagacgcccgcgcgatggcggcctccgggtctgttgccgtgctcttgcccggtgctttctacacgatccgggaaacgcaattgccgccgatggagcatttccgcgcccatggcgtgcccatggctttggcgaccgattgtaaccccggttcctcaccgctgacctcgttgctcctgacgctcaacatgggctgcaccctgttccggctgacacccgaagaggcattggccgggataacgacacatgcggcccgcgcgctgggcctctcggatcggggacgtatcgcgcccggtctgcgcgcagatcttgtggtctgggacgtcgcccgcccggcagagctagcctatcgcattggatttaacccgctgcatgcccgcgtcatgggcggcaaactggaggttcgcacatga

SEQ ID NO: 265644 - DNA, 607 bp, Unknown
  Bacterial polypeptide expressing nucleotide sequence isolated from the Sargasso Sea
aggtctcgtcgatgcggttgatgccttctgcgaaaccattggtttcacgcccgctcagacggcgcgcatgttcgaggcggcgcagcgccacggcctgccggtcaagctgcacgccgaacagctctccgaccagggtggcgcggcgctggtggctcgctacggcggtctttcagcggatcatctcgaatgcctgaccgatgcaggcgtagccgccatggcgcaagccggcacggtcgccgtgctgctgcccggcgcgttctactgcctgcgcgaaacgcgcctgccgccgatggccgccctgcgcgccgccggtgtgcccatggccgtgtcgacggactgcaaccccggcacatcgccgatgtcgtcgctgctgctggcgatgaacatggcatgcacgctgttccgcctgacgccgctggaagcgctgaccggcgccacgcgtcatgctgccgcagcgctgggcctgtccggcacgtgtggcgtgctggccccgggctgcgcggccgatttcgctctgtggcgcatcgaccggcccgccgatctggcgtacgcgatggggcttaacccgtgtgtgggtgtggtcaaggacggcgccgtggcggcgtaa

SEQ ID NO: 265645 - DNA, 865 bp, Unknown
  Bacterial polypeptide expressing nucleotide sequence isolated from the Sargasso Sea
gatgaagccttcacaaaactgggacctgctctggcattcggtaaagcttgcctgcatgaataaggggggggccgcgtatggtttgatcgaagacggggtaattgccgttcaagacggaaaaattgcctggaccggatccgcttccgagcttccgggacctgcggaaatcctagcccgtgaggtccgggatggacagggaatgtgcatcaccccgggactgatcgacagccatactcatctggtttatgcggggaaccgtgcacgggaatttgaaatgcggctcgaaggagcaagttacgaggagttggccaaagccgggggagggatcctttcaaccgtccaggccacccgaagtgcttcggaggaagcattgtttgaagcctctaaaccccggttgatgtccctgctcgaggaaggcgtgaccaccgtcgaaatcaaatcgggatacgggttggaaaccgaaaccgaatgtcgcatgctcagggtcgcacggaagctggaaagtgaactgccggtcagtatttccaccagttttctcggcgcccatgcccttccagcggagttccagggtaaaagcgatgattacatcgacctggtctgcgaggaaatgatcagcgaagttgcacaacagggacttgccgacaccgtcgatgccttctgcgagggaatcgggttcgatttggcccagacggaacgggtgttccaggcggcaagaaaacacggacttccggtgaaactccatgcggaacagttgagcgacctcaaaggggcacgccttgctgcagaatatggggcagtttctgcggatcatctggaatacatcgaagaggacggtgtaacagccatggcagaatccggaacggta

SEQ ID NO: 265646 - DNA, 706 bp, Unknown
  Bacterial polypeptide expressing nucleotide sequence isolated from the Sargasso Sea
catgagaaccctctggcagcattgccatgttgcaaccatggccgatggccgttactcggccatcgaggacgcggcgatcgtcaccagcgccgggctgatcgagtggataggcccacgcgccgagctggcaccggtcgaagctgaccgcacggttgacctggggggtgcctgggtcacccccggcctgatcgactgccacacccatgcggtgttcggtggcaaccgcagcggcgagttcgagcagcgcctgcagggcgtgagctatgccgaaatcgccgcacagggcggcggtatcgccagcactgtgcgggctacccgtgcggccagcgaagacgagttgttcgccagtgctcgccagcgcgttcaggcactgatgcgcgatggcgtgaccaccctcgaggtcaagtccggctacggcctggacttggccaatgagcgcaagatgctgcgagtggcccggcgcctggctgacgagctgccgctgacggtgcgtgccacctgcctggcggcgcacgctttgcccccggagtacgcaggccgggccgatgactacatcgcgcacatctgcgatgaaatgttgccggccctggccgccgaaggcctggtagatgcggtggatgccttctgcgaacacctcgcgttctcgccggcccaggtcgagcggctgttcatcaaggcgcgcgaactgggcctgccggtcaagctg

SEQ ID NO: 265647 - DNA, 1234 bp, Unknown
  Bacterial polypeptide expressing nucleotide sequence isolated from the Sargasso Sea
aatgtcttgggatcaggtttggatagacgttaacgtagcaacaatggacccttccatatcagcaccttacggtgcaattaccaatgcggctatcgcagtaaaagacggtaaaattgcctggttaggcccacgcagcgagctgcccgccttcgatgtgttgtccattcctgtttacaggggcaagggcggttggatcactccggggctgattgatgcccacacccatttagtgtttgcaggtaatcgtgccaacgaattcgagctacgcctaaagggcgctacctatgaggaaatcgcccgtgctggcggcggcattatttccacggttaacgcctgccgtgaggccgacgaagccgagttatttgatctcggccgccagcgtttaaatgccttggcaaaggaaggcgttaccacggtcgagattaaatctggctatggtctagataccgaaactgaactcaaaatccttcgcgtcgcccgcgaactcggccaacatcaccatgtggatgtgaagaccaccttcctcggtgcccatgcggtgccgcccgaatttaaagacaatagcgacggctatgtcgacttaataatcaataagatgctgcctgcggtgattgccgaaaacctcgccgatgcggtggatgtattctgtgaaaacatcgcctttaacctagaacaaaccgagcgcgtgctgagcgccgccaaagcggctggcctgcaagttaaactgcatgccgagcaattatccaatatgggcggctctgaattagccgcacgcttaggggctaagtcggttgatcatattgaatatttagatgaggctggcgttcaagccctaagtgaaagtggcacctgcgccgtgctgttaccgggcgcgttttactttttgcgggaaacccaaaaaccgccaatcgacttattgcgtcaatacggtgtgcctatggtgctcgccagcgactttaaccccggctcatcgcccatctgctcgaccctgctgatgctgaacatgggttgcaccctattccgcttaaccccagaggaagcgcttgcgggtttaacactcaatgccgctaaggcgcttgggattgaagataatgtcggcagcttagtggtcggcaaacaggcggatttctgtctgtgggatatcgccaccccagcacagttggcctacagctacggcgtcaatccctgcaaagatgtagtgaagaatggcaagctagttcatcaacacacctaa

SEQ ID NO: 265648 - DNA, 1228 bp, Unknown
  Bacterial polypeptide expressing nucleotide sequence isolated from the Sargasso Sea
aatgtcttgggatcaggtttggatagacgttaacgtagcaacaatggacccttccatatcagcaccttacggcgcaattaccaatgcggctatcgcagttaaagacggtaaaattgcctggttaggcccacgcagcgagctgcccgccttcgatgtgttgtccattcctgtttacaggggcaagggcggttggatcactccaggactgattgatgcccacacccatttagtgtttgccggtaatcgcgccaacgaattcgagctacgcctaaagggcgccacctacgaggaaattgcccgtgccggcggcggcattatttccacagttaacgcctgccgtgaggccgacgaagccgaactatttgacctcgggcgccagcgtttaaatgccttggcgaaggaaggcgttaccacggttgagattaaatctggctatggcctagataccgaaaccgaactcaaaatcctgcgcgtagcccgcgaactcggccaacatcaccatgtggatgtgaagaccaccttcctcggtgcccatgcggtaccgcccgagtttaaagacaatagcgacggctatgtcgacctaattatcaataagatgctgcctgcggtgattgccgaaaacctcgcggatgcggtggatgtattctgtgaaaacatcgcctttaacctagagcaaaccgagcgcgtgctgagcaccgccaaggcggctggcctgcaagttaaactgcatgccgagcagttatccaatatgggcggctctgaattagccgcacgtttaggggctaagtcggttgatcatattgaatatttggatgaggctggcgttaaagcccttagtgaaagtggcacctgcgccgtgctgttacctggcgcgttttactttttgcgggaaacccaaaaaccgcctatcgacttattgcgtcaatacggtgtgcctatggtgctcgccagcgactttaaccccggctcatcgcccatctgctcgaccctgctgatgctgaacatgggttgcaccctattccgcttaaccccagaggaagcgctcgcaggtttaacattgaatgccgctaaggcgctagggattgaagataacgtcggcagcttagtggtcggcaaacaagccgacttttgtctgtgggatatcgccaccccagcgcaactcgcctatagctacggcgtgaatccctgcaaggatgtagtgaaaaacggtaagttaattcatcaataa

SEQ ID NO: 265649 - DNA, 1204 bp, Unknown
  Bacterial polypeptide expressing nucleotide sequence isolated from the Sargasso Sea
aatgccgaaccgtctgctcatcacaaatgcatctatcgctaaaatggatgaaccggatgacgggtacggacttatgatgcatgcagctcttttgattcaggacgagaaaatcgaatggcttggctctgtttcggatattcctgctggcctgggtgatcccgaagaactggatgcttgcgggcgtttgctgaccccggccttgattgattgccatacccacatcgttcacggtggtaaccgcgcacgcgagtttgagatgcgacttgagggtgccagctatgaagaaatcgcacgcgctgggggtggtattatctcaacggtcactgcaacgcgtgaaaccgatgaagccgcattgctccaagatgcgcttaaacgtgcagattctctgattgccgaaggtgttagtttgatcgaaatcaagtctggttatgggctcgatgtggaaacagaacttaaaatgctgcgcgttgcgcgggccatcgaacgggaacgctcggtgcgggttgtgacttcatttctcggtgcacatgccgtgcctaagggcgcagatgctgatttctatattgacaaagtttgtatccccgcattggaggcagctcataaagaaggtctagtagatgcagtggatgggttctgtgaaggcatagctttcgatactgtccaaatggggcgtctttttgagagagcgcggcagcttgatatcccagtcaaactacacgccgagcagctttccaatattggtggtaccaagctggcggcaagttacaatgcgctatctgtagatcacgttgagtatgcagacaaaacggatattgccgccatggcaaaggcgggtagcgtggctgttttattgcctggtgcattctataccttgcacgaaacgcaaaaacccttagttgaggcttttcgctctgagagcgtgccaatggctgtcgccactgactggaacccgggctcttccccaatggggtccttactcctggccatgaacatgtcctgcacgctgtttggcttgaccccggtagaagcccttgcgggaacaacgcgcaatgcggcacgagcgcttggacttaaggattgtggcattgtcgccccaggaaaacgtgccgatctggcaatatgggatgtgcttgaacctgcagaactcagttatcgttttggcgtaaatccattacatcggcgtatttttggaggtaggctttga

SEQ ID NO: 265650 - DNA, 1222 bp, Unknown
  Bacterial polypeptide expressing nucleotide sequence isolated from the Sargasso Sea
ttgaactgcgagcgggtctggctcaacgtgacacccgccaccctgcgctccgatctggccgactacggtctgctggagccccatgccctcggcgttcacgaggggcggatccacgccctggtgccgatgcaggatctcaagggcccctatcccgcccattggcaggacatgaagggcaagctggtcacccccggcctcatcgattgccacacccacctcatcttcgccggcagccgtgccgaagagttcgaactgcgccagaagggggtgccctatgcggagatcgcccgcaagggcggcggcatcatcagcacggtgcgcgctacccgcgcggccagcgaggatcagctgtttgagctggcgctgccgagggtgaaatccctgatccgcgaaggggtcaccacggtggagatcaagtcgggttacggcctcaccctggaagacgagctcaagatgctgcgagtcgcccgccggctgggggaggcgctgccgatccgggtcaagaccaccctgctggcagcccatgcagtgccgccggagtatcgcgacgatcccgactcctgggtcgagactatctgccaggagatcatcccggctgccgccgaggcgggcctggccgatgcggtggacgtcttctgtgaacacatcggcttctcgctcgctcagaccgagcaggtctatctggcggcggatcaatacggtctggcggtgaaagggcacatggatcagctctccaacctgggcggcagcacgctggctgccaacttcggcgccctctcggtggatcacctggagtacctggatccggaagggatccaggcgctggcccatcgtggcgtggtggccaccctgctgcccaccgccttctacttcctcaaggagaccaagctgccgccggtcgtcgcgctgcgcaaggcgggggtgccgatggcagtctcctccgatatcaaccccggcacggcccccatcgtctcgctgcggatggccatgaacatggcctgcaccctgttcggcctgaccccggtggaggccatggccggagtgacccgccacgccgcccgcgcgcttggcgagcaggagcagctggggcagctcagggtcggcatgctggcggactttctggtctggaactgcggccatccggccgagctcagctacctcatcggcgtcgatcagctggtgagccgggtggtcaacggcgaggagacgctccatggatgag

SEQ ID NO: 265651 - DNA, 1225 bp, Unknown
  Bacterial polypeptide expressing nucleotide sequence isolated from the Sargasso Sea
catgaaaccgactgtctggcatcacctgaggctgtgtccgcacggccatcctgacgagacgatcgacgacgcggcgatcgccgtcgacgaaaccggcacgatcgtctggctcggcgcggtgtccgcgctcccgcacggttacgcccactggcggcgcgaggatctgcacggcgcgtgggtgacgccgggcctcgtcgactgccatacgcacctcgtgtacggcggcacgcgtgccgacgaattcgcgcagcgcctcgcgggcgtgagctacgaggaaatcgcgcggcagggcggcgggatcgtgtcgacggtgcgcgcgacgcgcgcggccgacgagacgacgctgttcgtgcaggccgcggcacgcctgcagccgctgctcgccgaaggcgtgaccgcgatcgagatcaagtcgggctacgggctcgacctcgcgagcgaacgcaagatgctgcgcgtcgcgcgccagctcggcgaacgctttccggtcaccgtctacacgaccttcctcggcgcgcacgcgttgccgcccgaatatgcgggccgtgcggatgcgtacatcgacgaagtgtgcgaccggatgctgccggcgctggccgacgaagggctcgtcgacgcggtcgacgtgttctgcgaacgcatcggcttttcgctcgcgcagaccgagcgcgtgttcgaggccgcgacgcggcgcgggctgcccgtgaagctgcatgcggagcaactgtcgaatgcgggcggcacggcgcttgccgcgcgttatcgcgcgctgtccgccgatcacctcgaatttctcgacgaagcgggcatcgaggcgatgaaggcagccggtacggttgccgtgctgctgcccggcgcgtactacttcatccgcgagacgcaactgccgccgatcgaactgctgcgcaagcacggcgtaccgatcgcgctcgcgaccgatcacaatcccggcacgtcgccactcgaatcgctgctgctgacgttgaacatgggctgcacgctgttccgcatgacggtgcccgaggtgctgcagggcgtcacgtgccatgcggccgcggcgctcggccgcgcggatcgccacggcgcgctcgaggtcggtcgccaggccgacttcgccgcgtggtcggtcggctcgctggcggagctcgcctactggatcggccggccgctgtgcgagcaggtcgtacgcggcggcacgaccgtgtttcgccggatgaatggatag

SEQ ID NO: 265652 - DNA, 1189 bp, Unknown
  Bacterial polypeptide expressing nucleotide sequence isolated from the Sargasso Sea
tatgcaaaacactcaacaaaataataacttagaaaatatcgatttacttttaatcgatgcaaatattgccacaatggatcctactagagatacaccttatgggatcatcaaaaatgcagcgttagccattaaaaacggaataattgtatggttaggtgaacaagcatcgttaccgccatttgacgcttttgcaacgccaactttgagcataaaagggcaatggctaacacctggtttaatagattgccatacacatttggtatttgctggttctcgtgcgcaagaatttgagcagcgattacaaggcgtaagctatgaacaaattgcagcgcaaggcggaggcattgcaagtacagtaaaagcaaccagagctgcagatagagagcaactatttgttgatgccaaagacaggctcaatacactgttaaaagaaggcgtaacaacagttgaaattaagtcgggttatgggcttgataccgaaaacgaaattaaactattagaagtggcaagactactgggtgagcatcaccctattgatataaaaacaacatttttaggcgctcatgcattacctaaggaatacaaaggccgtgcagatgaatatattgacttggtgtgcaacgagatgcttgagcaagtcgttgcaggtgatcttgccgacgccgttgatgtgttttgcgaaaatgtagggtttagttatgagcaaactaagcgcgtatttgcggcggcgactaaacataatttgccagtaaaatgccatgcagagcagttatctaatcagcatggtgctgagctggtggccgaatttaatggattatcggcagatcatatagagtaccttgatgagcaaggtgtagaagccatggcaaaggctggcactgtagctgtgcttttaccgggggcattttattttttaagagaaactaaacagccccccatagagctacttaatcaatataaggtgccaattgcgattgcgagcgactttaatccaggtacttcaccgctgtgttcggtgcaattaatgatgaatatggcatgtacactctttagattaacaccagagcaagcactggcaggtgttaccagtaacgcagctaaagctctgggattaaatgatagaggagtgttaaaagtgggagccagagccgacattgcacattggcaaataagccacccatcgcaatta

SEQ ID NO: 265653 - DNA, 883 bp, Unknown
  Bacterial polypeptide expressing nucleotide sequence isolated from the Sargasso Sea
tttgctagattaccggaattaagagacgtgaaaagttgtgatgtagcaattgtaggagttccttttgactctggaactagttatagacctggagcacgatttgggccccagagtataagacaagcttcaagacatttgagaacaaattatcatccaagttacgacgttgaaccgtttaaagtacaacaagttgctgatgcaggagatatttcctgtaatccatttaatatagatgaagctataaaacaaatagaagttggtgctacagatcttttaaataaagtaggtgggattattagtcttggtggtgatcatacaatagccgttccattgcttagagcaattaataaaaagaataaaggcccagtttcattagtccattttgatgctcacttagatacttgggatacttattttggagcaccttacacacacggtacaccatttaggagagccagagaggaaaatttatttttagatgatgcatcaatgcatgttggaattagaggtccactttatagcagggaagatattaagaacgatgaaagttttggttttaaaataattcattgcgatgaatttcaaacagaaggtatagataaaatagttgagagaattagaaacagagtaggagacaatgctttatatctatcgatagatattgatgttctagacccagcttttgctcctggaactggtacacccgagatagcaggtatgactacaagagaaattgtaaatgttataagaggattgtcagggctaaacttagtttcagcagatgtagttgaagtagcaccagcatatgatcatgcagaagtaacttctttagcggctgcaacaattgtttatgaattaacaaatttgtttgcaaaagcctaaa

SEQ ID NO: 265654 - DNA, 394 bp, Unknown
  Bacterial polypeptide expressing nucleotide sequence isolated from the Sargasso Sea
gatgcatgttgggataagaggaccactgtacagcagagatgatataaaaaatgatgaaagttttggttttaaaattatccattgtgacgaatttcaaactgaaggaacagataagatcgctgaaagaataaaaaaaagagtaggcgacaatgctctttatctttcaattgatatagatgttttagatccagcctttgcgcccggaactggaacacctgaaattgcaggtatgaccacaagagaaatggtaaatgtactaagaggattatctggtttgaatttaatttctgcagatgttgtagaagttgccccagcatatgatcatgctgaagttacttctttagccgcagccacaattgtctatgagctaactaatttatttgcaaaaacctaa

SEQ ID NO: 265655 - DNA, 667 bp, Unknown
  Bacterial polypeptide expressing nucleotide sequence isolated from the Sargasso Sea
taatccatttaacattgatgaagcaatcaaacaaattgaagtaggggcaaccgatttattaaataaagttggaggaataataagccttgggggagatcacacaattgctgtgcctttacttagggcagccaataaaaagaataatggacccgtgtcacttgttcattttgatgcccatttagatacctgggatacctactttggagcaccatatacccacggcactccatttagaagagcccgtgaggaaaatttatttttagatgacgcctctatgcatgtaggtataagaggtccactttatagcagagatgatataaaaaatgatgaaagctttggatttaaaattattcattgtgatgaatttcaaacagaaggaattgataaaattgttgaaagaataaaaaatagagtaggtgataatgcattatatctgtccattgatattgatgtattagatccagcatttgcgccaggaacaggaacacctgaaattgcaggaatgaccacaagagaaatggtaaatgtccttaggggtttatcaggtttaaatttgatttctgcagatgtagtagaagttgcgcctgcttatgaccatgcagaagtcacctctcttgctgcagcaacaattgtttatgaattaacaaatttatttgcaaaatcatga

SEQ ID NO: 265656 - DNA, 410 bp, Unknown
  Bacterial polypeptide expressing nucleotide sequence isolated from the Sargasso Sea
tttagatgatgcatcaatgcacgttggaattagaggcccactctatagcagggaagatatcaaaaatgatgaaagttttggttttaaaataattcattgtgatgaatttcaaacagaaggtatagacaaaatagttgatagaattagaaacagagtaggagacaatgctttatatctatcgatagacattgatgtcttagatccagcttttgctcctggaactggtacgcctgagatagcaggtatgactacaagagaaattgtaaatgttataagaggattgtcagggctaaacttagtttcagcagatgtagttgaggtagcaccagcatatgatcatgcagaggtaacttctttagcagctgcaacaattgtttatgaattaacaaatttgtttgcaaaagcctaaa

SEQ ID NO: 265657 - DNA, 912 bp, Unknown
  Bacterial polypeptide expressing nucleotide sequence isolated from the Sargasso Sea
aagtaccaagatatgcaggaccatcaacctttgctagattaccagaattaagagatgttgaaagttgtgatgtagcaattgtaggggttccttttgactctggaactagttacagacctggagcaagatttggaccccaaagtataagacaagcttcaagacatttaagaacaaattatcatccaagttatgatgttgaaccatttaaagtgcaacaagttgcagatgcaggagatatagcctgtaatccttttaatattgatgaggctataaaacaaatagaagttggtgctacagatattttaaataaagtaggagggattattagtcttggcggtgatcatacaatagctgttccattgcttagagcaattaataaaaagaataaagggccagtttcattagtccattttgatgctcacttagatacttgggatacttattttggagcaccttacacacacggcacaccatttaggagagctagagaagaaaatttatttttagatgacgcgtcaatgcacgttggaataagaggtccactctatagtagggaagatatcaagaatgatgaaagttttggttttaaaataattcattgtgatgaatttcaaacagaaggcatagacaaaatagttgagagaattagaaacagagtaggagacaatgctttatatctgtcgatagacattgatgtcttagatccagcttttgctcctggaactggtacgcctgagatagcaggtatgactacaagagaaattgtaaatgttataagaggattgtcagggctaaacttagtttcagcagatgtagttgaggtagcaccagcatatgatcatgcagaggtaacttctttagcagctgcaacaattgtttataaattaacaaatttgtttgcaaaagcctaaa

SEQ ID NO: 265658 - DNA, 370 bp, Unknown
  Bacterial polypeptide expressing nucleotide sequence isolated from the Sargasso Sea
ctctatagcagggaagatattaagaacgatgaaagtttttggtttaaaataattcattgcgatgaatttcaaacagaaggtataaataaaatagttgagagaattagaaacagagtaggagacaatgctttatatctatcgatagatattgatgttctagacccagcttttgctcctgggactggtacacccgaaatagcaggtatgactacaagagaaattgtaaatgttataagaggattgtcagggctaaacttagtttcagcagatgtagttgaggtagcaccagcatatgatcatgcagaagtaacttctttagcggctgcaacaattgtttatgaattaacaaatttgtttgcaaaagcctaaa

SEQ ID NO: 265659 - DNA, 638 bp, Unknown
  Bacterial polypeptide expressing nucleotide sequence isolated from the Sargasso Sea
acaaatagaagttggtgctacagatcttttgaataaagtaggtgggattattagtcttggcggtgatcatacaatagccgttccattgcttagagcaattaataaaaagaataaaggcccagtttcattagtccattttgatgctcacttagatacttgggatacttattttggagcaccttacacacacggtacaccatttaggagagccagagaagaaaatttatttttagatgatgcatcaatgcatgttggaattagaggtccactctatagcagggaggatattaagaacgatgaaagttttggttttaaaataattcattgtgatgaatttcaaacagaaggtatagataaaatagttgagagaattagaaacagagtaggagacaatgctttatatctatcgatagatattgatgttctagacccagcttttgctcctgggactggtacacccgagatagcaggtatgactacaagagaaattgtaaatgttataagaggattgtcagggctaaacttagtttcagcagatgtagttgaggtagcaccagcatatgatcatgcagaagtaacttctttagcggctgcaacaattgtttatgaattaacaaatttgtttgcaaaagcctaaa

SEQ ID NO: 265660 - DNA, 633 bp, Unknown
  Bacterial polypeptide expressing nucleotide sequence isolated from the Sargasso Sea
gatgcagggactttactggtggggtattcctacgctttttcgatgtccttacaatacagatacaaaaggatgtgatatagcacttgttggtgtgccccatagcacaggaaatggaactacagaaagagatcagcacttgggccctagagcagtaaggaatatttcagcattgggtaggcgtgctcatttaaaatttggcctttccccttgggatatatgtgatattcgcgacttaggtgatgtgcctcttccagaagcaaataacaatgaaaggtgtatagaacatattactgatttttatactcgtattgctgaaacaaatactcgaccactttcagttggtggtgaccattcgattactggaggtataattcaagcgattgcgtctccaaattcaaaactgacaggaggggaaaaggccgtgttattacattttgatgcacatacggatacttttcaccagcttgatcacttcctaggtgcgataaaatctgcagcgcattgggcaagctatctagttcgtgatggttttgttgatgcttcgagtagtgtgcagataggtattaggggtaatccccgtactttggattggctggattctagttatgaattgggatacgaagtaattaccaa

SEQ ID NO: 265661 - DNA, 339 bp, Unknown
  Bacterial polypeptide expressing nucleotide sequence isolated from the Sargasso Sea
aaagttttggttttaaaattatacattgtgatgaatttcaaacagagggaacaaacaaaattgccgaaagaattaaaaaaagagtaggagataatccactttatttgtcaatagatattgatgttctagacccagcttttgctcctggcacaggcactccagagatagcaggcatgacatcaagagaaatagtcaatgttttaagaggtttatctgggctaaatttagtttcagctgacgtagtagaagttgctccagcttatgatcatgctgaagtaacctctcttgcagcagcaacaattgtttatgaacttacaaatctatttgcaaaaatataaa

SEQ ID NO: 265662 - DNA, 400 bp, Unknown
  Bacterial polypeptide expressing nucleotide sequence isolated from the Sargasso Sea
atgcatgtaggtattagaggtccattatatagtaaagacgatattaagaatgatgaaagttttggttttaaaattatacattgtgatgaatttcaatctgaaggaacagataaaattgctgacagaataaaaaaaagagtaggaaacaatgctctttatctttcaattgacatagacgttttggatccagcttttgctccaggaactggcacaccagaaattgctgggatgaccacaagagaaatagtaaatgtcttacgaggtctctcaggattaaatttgatttcagcagacgttgtggaagttgccccagcctatgatcatgctgaagttacatctttagcagcagcgacaattgtttttgaactaaccaatttgtttgcaaaaaaaaaactttagg

SEQ ID NO: 265663 - DNA, 540 bp, Unknown
  Bacterial polypeptide expressing nucleotide sequence isolated from the Sargasso Sea
ttaataaaaagaataaaggcccagtttcattagtccatttcgatgctcacttagatacttgggatacttattttggagcaccttacacacacggtacaccatttaggagagccagagaggaaaatttatttttagatgatgcatcaatgcatgttggaattagaggtccactctatagcagggaagatattaagaacgatgaaagttttggttttaaaataattcattgcgatgaatttcaaacagaaggtatagataaaatagttgagagaattagaaacagagtaggagacaatgctttatatctatcgatagatattgatgttctagacccagcttttgctcctggaactggtacacccgagatagcaggtatgactacaagagaaattgtaaatgttataagaggattgtcagggctaaacttaatttcagcagatgtagttgaggtagcaccagcatatgatcatgcagaagtaacttctttagcagctgcaacaattgtttatgaattaacaaatttgtttgcaaaagcctaaa

SEQ ID NO: 265664 - DNA, 790 bp, Unknown
  Bacterial polypeptide expressing nucleotide sequence isolated from the Sargasso Sea
tgcaagatttggcccacaaagtatcagacaagcatctagacatttaaggactaattatcatccaaattatgacgtagaaccattcaaagtacaacaagttgcagatgcaggtgatatcacttgtaatccatttaacattgatgaagccatcaaacaaattgaagtaggggcaaccgatttattaaataaagttggaggaataataagccttgggggagatcacacaattgctgtgcctttacttagggcagccaataaaaagaataatggacctgtatcacttgttcattttgatgcccatttagatacctgggatacctactttggagcaccatatacccacggtactccatttagaagagctcgtgaggaaaatttatttttagatgacgcctctatgcatgtaggtataagaggtccactttatagcagagatgatataaaaaatgatgaaagctttggatttaaaattattcattgtgatgaatttcaaacagaaggaattgataaaattgttgaaagaataaaaaatagagtaggtgataatgcattatatctgtccattgatattgatgtattagatccagcatttgcgccaggaacaggaacacctgaaattgcaggaatgaccacaagagaaatggtaaatgtccttaggggtttatcaggtttaaatttgatttctgcagatgtagtagaagttgcgcctgcttatgatcacgcagaagtcacctctcttgctgcagcaacaattgtttatgaattaacaaatttatttgcaaaatcatga

SEQ ID NO: 265665 - DNA, 802 bp, Unknown
  Bacterial polypeptide expressing nucleotide sequence isolated from the Sargasso Sea
ttcagacctggagcaagatttggtccacaaagtattagacaagcttcaagacatcttagaacaaactatcaccctaattatgatattgaaccatttaaagtacaacaggtagccgatgctggagatattgtatgtaatccttttaatattaatgaagcgatacaacaaatagaaaaaggtgctttagatttattaaataaagttggtggaataattagtatgggaggggatcacacaattgcgtttcctttgcttaaagctgttaataaaataaataaaggaccggtcgcactagttcattttgatgctcatctagatacttgggatacatatttcggagctccttatactcacgggacaccttttagaagagcaagagaagaaaatttatttttggataatgcttctatgcacgttggaataagagggcctctatatagtagagaagacctaaaaaatgatgcagaatttggtttcaaaattattcattgcgacgaatttcaaacagagggaatagataaaattgtaaaaagaataagagatagagttggaaacaatccattgtacttgtcaattgatgttgatgttcttgatcctgcttttgctcctggtacaggtacacctgaagtagcggggatgactacaagagaaattgtaaatgtcattagaggtttatcgggtctaaacttaatttcagccgatgttgtagaagttgcaccagcttatgatcacgctgaggtcacttctttagctgctgctacaattgtttatgaattaacaaatctatttgcgaaaagttaaa

SEQ ID NO: 265666 - DNA, 901 bp, Unknown
  Bacterial polypeptide expressing nucleotide sequence isolated from the Sargasso Sea
agaaaaaaataaaaacccaaaacagccagtaagtgggactaaggttccaagatatgctggtccctcaacgtttgctagactgcctgaactaagggatgtagaaagttgtgatgttgcaatagtgggagtaccatttgactcaggcacaagttatagacctggtgcaaggtttgggccgcaaagtattcgacaggcctcaagacatttaagaacaaattatcacccaagctatgatgtagagccctttaaagtgcagcaagtagcagatgcaggagatattgcttgcaatccatttaatattgacgaagctattaaacaaatagaggtgggtgcaacggatttattaaataaagtgggaggaataataagtcttggtggagatcacacaattgcggttccattgttaagagcagctaacaaaaaaaataatggaccagtatcattagttcattttgatgcacatttagatacttgggatacttattttggagctccatatactcatggaactccttttagaagagcacgtgaggaaaatttatttttagatgatgcttccatgcatgttgggatacgtggtccactttacagcagagatgatataaagaatgatgagagttttggttttaaaataattcattgtgatgaatttcaaacagaaggaactgataaaattgcagaaagaataaaaaaaagagtaggagataatgctttgtatttatctattgatatagatgtattggatcctgcatttgctccagggacaggaacacctgaaattgcaggtatgacaacaagagaaatggtaaatgttttaagaggattgtcaggtctaaatctaatttctgcagatgttgtagaagttgctcccgcatatgatcatgctgaagttacttctctt

SEQ ID NO: 265667 - DNA, 640 bp, Unknown
  Bacterial polypeptide expressing nucleotide sequence isolated from the Sargasso Sea
aaacaaatagaagttggtgctacagatcttttaaataaagtaggtgggattattagtcttggcggtgatcatacaatagccgttccattgcttagagcaattaataaaaagaataaaggcccagtttcattagtccattttgatgctcacttagatacttgggatacttattttggagcaccttacacacacggtacaccatttaggagagccagagaggaaaatttatttttagatgatgcatcaatgcatgttggaattagaggtccactctatagcagggaagatattaagaacgatgaaagttttggttttaaaataattcattgcgatgaatttcaaacagaaggtatagataaaatagttgagagaattagaagcagagtaggagacaatgctttatatctatcgatagatattgatgttctagacccagcttttgctcctgggactggtacacccgagatagcaggtatgactacaagagaaattgtaaatgttataagaggattgtcaggcctaaacttagtttcagcagatgtagttgaggtagcaccagcatatgatcatgcagaagtaacttctttagcggctgcaacaattgtttatgaattaacaaatttgtttgcaaaagcctaaa

SEQ ID NO: 265668 - DNA, 310 bp, Unknown
  Bacterial polypeptide expressing nucleotide sequence isolated from the Sargasso Sea
tgatgaatttcaaactgaaggtacagacaaaattgctgaaagaataagaaaaagagtaggagacaatgctctttatctatcaattgatattgatgttttagaccctgcatttgccccaggtactggcaccccagagattgcaggcatgacaacaagagaaatggttaatgtaattagaggtttgtcaggattaaatcttatttctgctgatgttgtagaagttgcaccagcttatgaccatgctgaggtcacttccttggctgcagccacaattgtttttgaattaaccaatttatttgcaaaaaaataa

SEQ ID NO: 265669 - DNA, 364 bp, Unknown
  Bacterial polypeptide expressing nucleotide sequence isolated from the Sargasso Sea
agcagggacgatataaaaaatgatgagagttttggttttaaaattatccattgtgatgaatttcaaactgaaggaacagataagattgctgaaagaattaaaaaaagggtaggaaataatgctctttacctttcaattgatattgatgttttagatccagcttttgctccaggaactggaacaccagaaattgcaggaatgaccacaagagaaatggtaaatgtactaagaggattatctggtttaaatctaatttctgcagatgttgttgaggttgctccagcttatgatcacgcagaggttacatctttagctgcagctacaattgtatatgagttaactaatttatttgctaaatcttaag

SEQ ID NO: 265670 - DNA, 219 bp, Unknown
  Bacterial polypeptide expressing nucleotide sequence isolated from the Sargasso Sea
atgtattggatcctgcatttgcgccagggacaggaacacctgaaattgcagggatgacaacaagagaaatggtaaatgttttaagaggattgtcaggtttaaatctaatttccgcagatgttgtagaagttgcaccagcatatgatcacgctgaagttacttctcttgcagctgctacgattgtttacgaattgacaaatttatttgcaaaatcataaa

SEQ ID NO: 265671 - DNA, 301 bp, Unknown
  Bacterial polypeptide expressing nucleotide sequence isolated from the Sargasso Sea
tcaaccgaaggtattgataaaatagttgatagaattaagaaaagagtaggcaataatgctttatatttatcaattgatatagatgttttagatccagcttttgcacctggaactggtacccctgaaattgctggaatgactacaagagaaattgtaaatgttataagaggtctttcaggtatgaatttaatttcagcagatgtagttgaggtagccccggcatatgatcatgctgaggttacgtcactggcagcagcaactataatatatgaattaacaaatttatttgcaaaaaaataaa

SEQ ID NO: 265672 - DNA, 253 bp, Unknown
  Bacterial polypeptide expressing nucleotide sequence isolated from the Sargasso Sea
aagagacaatccactatacttatcaattgatatagatgtgctagatccagcttttgctccaggaaccggaacaccagaaatagcaggcatgagcacaagagaaatggtaaatgtaattagaggtttgtctggattaaatttaatttcagctgatgtagtagaggttgctcctgcctatgatcatgctgaagtcacttctcttgcagccgcaacgatagtttatgaattaactaatttatttgcaaaatcataa

SEQ ID NO: 265673 - DNA, 796 bp, Unknown
  Bacterial polypeptide expressing nucleotide sequence isolated from the Sargasso Sea
tatgcccgatcatcccgatgggatcgctgcgccacgttttacggggattccgactttcatgcgggtgcctttcgcaacggcaataaaaaacttggatattgccatggtaggagttccctatgatgggggtgttacaaatcggcctggggctcggcatggtccccgtgagattcgtaatcagtcgagctttatacgcggcatccatcatgtttctaaaatcaatccctttgagatctgccgaatatctgacgtaggcgatgtcccgttcagatcttcgcataacccggaaatagctatgggggagattgaagatttttttcgagaaatccatcaagctggcgtgattcctcttacagcagggggcgatcactcgatcacttatcctattttttgtgctatcgcgaccccggacgcgcctattggtatggtgcacattgatgcccacacggatacctgggatgcgtggcaaggaaacaaatttaatcacggagctccctttcgccgggctgttgagagtggagttctggacccaaaacgcacagtacaaattggaattcgtggtcctcagaacgttttcgacggttgggatttctctataaaaagcgggatgcgggtgatttttatggaggaatttactgaacttggggtcgatgcggtaattgcggaggcacaaagcgtggttggtaacggtccgacatacatttcatttgatgtagatggtcttgatccggtctatgcgccaggcacggggacaccggaaattggcggcataaccacggtagaagcacaacggctg

SEQ ID NO: 265674 - DNA, 226 bp, Unknown
  Bacterial polypeptide expressing nucleotide sequence isolated from the Sargasso Sea
agatattgatgttctagacccagcttttgctcctggaactggtacacccgagatagcgggtatgactacaagagaaattgtaaatgttataagaggattgtcagggctaaacttaatttcagcagatgtagttgaagtagcaccagcatatgatcatgcagaagtaacttctttagcagctgcaacaattgtttatgaattaacaaatttgtttgcaaaagcctaa

SEQ ID NO: 265675 - DNA, 655 bp, Unknown
  Bacterial polypeptide expressing nucleotide sequence isolated from the Sargasso Sea
ttgatgaagccatcaaacaaaattgaagtaggagcaaccgatttattaaataaagttggaggaataataagccttggaggagatcacacaattgctgtgcctttacttagagcagccaataaaaagaataatggacccgtatcacttgttcattttgatgcccatttagatacctgggatacctactttggagcaccatatacgcatggcactccatttagaagagctcgtgaggaaaatttatttttagatgatgcctctatgcatgtaggtataagaggtccactttatagcagagatgatataaaaaatgatgaaagctttggatttaaaattattcattgtgatgaatttcaaacaaaaggaattgataaaatcgttgaaagaataaaaaatagagtaggtgataatgcattatatttgtccattgatattgatgtattagatccagcatttgcaccaggcacaggaacacctgaaattgcagggatgaccacaagagaaatggtaaacgtcctcagaggtttatcaggcttaaatttgatttctgcagatgtagttgaagttgcgcctgcttatgaccatgcagaagtaacctctctagctgcagcaacaattgtttatgaattaacaaatttatttgcaaaatcatgaa

SEQ ID NO: 265676 - DNA, 592 bp, Unknown
  Bacterial polypeptide expressing nucleotide sequence isolated from the Sargasso Sea
attataagtttagggggcgatcatactattgctgttcccctgttaagagctgcaaataaaaaaaataacggtccagttgctttagtacattttgatgctcatctagatacttgggatacctattttggagctccatatactcatggaactccttttagaagggcaagagaagaaaatttatttttagatgaggcatcaatgcatgttggaataagaggaccattatacagtcgagacgatctcaagaatgatgaaagttttggtttcaaaattatacattgtgatgaatttcaaactgaaggtacagagcaaattgccgaaagaataagaaaaagagtaggagacaatgctctttatttgtcaattgatattgatgttttagacccagcatttgctccaggaactggtaccccagagattgcaggcatgacaacaagagaaatggttaatgttattagaggtttgtcaggattaaatcttatttctgctgacgttgtagaagttgcaccagcatatgaccatgctgaagtcacttctttggctgcagcgacaattgtttttgaattaaccaatttgtttgcaaaaaaataac

SEQ ID NO: 265677 - DNA, 952 bp, Unknown
  Bacterial polypeptide expressing nucleotide sequence isolated from the Sargasso Sea
attgaaagataaaaataaaaaaccaatccaaccagttagtggaacgaaagtaccaagatatgcgggaccatcaactttcgctagattgccggaattaagagacgttgaaagttgtgatgtagcaattgtaggagttccttttgactctggaactagttatagacctggagcaagatttgggcctcagagtataagacaagcttcaagacatttgagaacaaattatcatccaagttacgacgttgagccgtttaaagtacaacaagttgctgatgcaggagatattgcctgtaatccatttaatattgatgaagccataaaacaaatagaagttggtgctacagatcttttaaataaagtaggtgggataattagtcttggcggtgatcatacaatagccgttccattgcttagagcaattaataaaaagaataaaggcccagtttcattagtccatttcgatgctcacttagatacttgggatacttattttggagcaccttacacacacggtacaccatttaggagagccagagaggaaaatttatttttagatgatgcatcaatgcatgttggaattagaggtccactctatagcagggaagatattaagaacgatgaaagttttggttttaaaataattcattgcgatgaatttcaaacagaaggtatagataaaatagttgagagaattagaaacagagtaggagacaatgctttatatctatcgatagatattgatgttctagacccagcttttgctcctggaactggtacacccgagatagcaggtatgactacaagagaaattgtaaatgttataagaggattgtcagggctaaacttaatttcagcagatgtagttgaggtagcaccagcatatgatcatgcagaagtaacttctttagcagctgcaacaattgtttatgaattaacaaaatttgttgcaaaa

SEQ ID NO: 265678 - DNA, 955 bp, Unknown
  Bacterial polypeptide expressing nucleotide sequence isolated from the Sargasso Sea
aatgacaaagtctaaaaaacctattcagcctgttagtggcacagaagtgccaagatatgcgggcccttctacatttgcaagattacctgagctaagagatgtagaaagttgtgatgttgctattgtcggagttccatttgattcaggaactagttatagaccaggtgcaagatttggcccacaaagtattagacaagcatctagacatttaaggactaattatcatcctaattatgatgtagaaccattcaaagtacaacaagttgcagatgcaggtgatattacttgcaatccatttaatattgatgaagccatcaaacaaattgaagtaggagcaaccgatttattaaataaagttggaggaataataagccttggaggagatcacacaattgctgtgcctttacttagagcagccaataaaaagaataatggacccgtatcacttgttcattttgatgcccatttagatacctgggatacctactttggagcaccatatacccacggtactccatttagaagagctcgtgaggaaaatttatttttagatgacgcctctatgcatgtaggtataagaggtccactttatagcagagatgatataaaaaatgatgaaagctttggatttaaaattattcattgtgatgaatttcaaacagaaggaattgataaaatcgttgaaagaataaaaaatagagtaggtgataatgcattatatttgtccattgatattgatgtattagatccagcatttgcaccaggcacaggaacacctgaaattgcaggaatgaccacaagagaaatggtaaacgtcctcaggggtttatcaggcttaaatttgatttctgcagatgtagttgaagttgcgcctgcttatgaccatgcagaagtaacctctctagctgcagcaacaattgtttatgaattaacaaatttatttgcaaaatcatga

SEQ ID NO: 265679 - DNA, 976 bp, Unknown
  Bacterial polypeptide expressing nucleotide sequence isolated from the Sargasso Sea
catgcagaagcagccagtcgtgcgcggtgacggcgcgatccgtcgcgaatcgccctatggttcgtcgaaggagaacacctatgcgggcgtggtgtcgttcatgcggcgcctgtatacgaaggaactggcaggcgtcgatctcgcggtgaccggtgtgccgctcgatatcgcgacgaccaaccgtccgggcgcacggctcggcccacgcgcgatccgtgcggcgagcagccagctcggcgtgctgctgccgtatccatgggggatcaatccgtttgacgactatgcggtgatcgactacggcgactgctggctcgacgtgcacaatccgtcgaccgtcaaggagacgatcgtcacgcatgcgcgcacgattctcgatgccggtgctcggatgctgacgctcggcggtgatcactacatcagctacccgctactcgtggctcatgcggaaaagtacggcaggccgctttcattgatccatttcgatgcgcactgcgatacctggcccgacgatcaaccggacagcctcaatcatgggtcgatgttctacaaggcgatcaaggacgggctgatcgatcccgcccactcggtgcaggtcggcatccgcacgtggaacgacgatttcatgggcgtgtcggtgctcgatgcggcttgggtgcatgagcacggcgtgaacgcgaccatcgcgcgcatcgtcgagatcgtgggcgcgcggccggcttatttcaccttcgacgtcgacgggctcgatccggccttcgcgcccggcaccggcacgcccgtgccgggcggcctgtcgagcgcgcaggctctgtcgatcatccgcgggctcacgtcggtcgacctggtcggcgcggacgtggtcgaggtcgcacccgcctacgatcatgcggacattaccgcgctggtcgccgcgcacgtggcgagcgagctgatctgcctgttcaggcatcgcgctcgcgcggcacggcacaggtag

SEQ ID NO: 265680 - DNA, 961 bp, Unknown
  Bacterial polypeptide expressing nucleotide sequence isolated from the Sargasso Sea
aatgaaaaaagaaaaaaataaaaacccaatccaaccagtaagtggaactaaagttccaagattcgcaggtccatcaacttttgcaagattaccagaactgagagatgtagaaagttgcgatgtagctattgtaggtataccatttgatgctgggacaagttacaggcctggagctagattcggtcctcaaagtattagacaagcatcaagacacttaagaacaaactaccatccaaattatgatgttgaaccatttaaaattcagcaagttgcagacgcaggtgatattacatgtaatccattcaatattgatgaagcaataaaacaaatcgagaatggcgcttatgatcttttacaaaaaactggaggaataattagtatgggcggagatcacacaattgcatttccacttttaagagcaattaataaaattaataaagggcctgtagcgttagttcattttgatgcacatttagatacttgggatacttattttggagcgccttatactcatggaaccccattcagaagagcaagagaggaaagattatttttagatgatgcctcaatgcatgttggaataagaggtccactttatagtagagacgatattaaaaatgacgaaagttttggatttaaaattattcattgtgatgattttcaaaccgaaggtattgataaaatagttgatagaattaagaagagagtaggcaataatgctttatatttatcaatagacatagatgttttagacccagcttttgcacctgggactggtactcctgaaattgctggaatgactacaagagaaatcgtaaacgttataagaggtctttcaggtatgaatttaatttcagcagatgtagttgaggtagccccagcatatgatcatgctgaggttacgtcattagcagcagcaactatagtatatgaattaacaaatttatttgcaaaaaaataa

SEQ ID NO: 265681 - DNA, 961 bp, Unknown
  Bacterial polypeptide expressing nucleotide sequence isolated from the Sargasso Sea
aatgaaaaaagaaagaaataaagatccaattcaacctgtaagtggaaccaaagttcctagatatgccggaccaaatacttttgctagattacctgaattaagagatgttgaaagttgtgatgttgcaatagttggtgttccatttgattctggcactagttatagaccaggagcaaggttcggacctcaaagcattagacaggcttcaagacatttaagaacaaactatcatccaaattatgatgtagaaccttttaaagttcaacaagtagctgatgcaggtgatatagcatgtaatccatttaatatagacgaagctattaagcagatcgaagttggtgccactgatcttttgaataaagtaggtggaattattagtttgggtggcgatcatactattgccgttcctttattaagagctgcaaataaaaaaaacaatggaccagtttctttggtacattttgatgctcatctagatacttgggatacttattttggagccccttatactcatggaactccttttagaagagcaagagaagaaaatttatttttagacgatgcatcaatgcacgttggaataagaggcccattatatagcagagatgatcttaagaatgatgaaagttttggttttaaaattatacattgcgatgaatttcaaaccgaaggtacagataaaattgtagaaagaataagaaaaagagtaggtgacaatgctctttatttgtcaattgatattgatgttttagatccagcatttgctccaggaactggcactcccgagatagcaggaatgactacaagagaaatggttaatgttatcagaggtttgtcaggattaaatcttatttcagctgatgttgtagaagttgctcctgcctatgatcatgcagaagttacatcattagccgcagcaacaattgtttttgaattaaccaatttgtttgcaaaaaaataa

SEQ ID NO: 265682 - DNA, 961 bp, Unknown
  Bacterial polypeptide expressing nucleotide sequence isolated from the Sargasso Sea
atggaaaaagaaaaaaataaaaacccaaaacagccagtgagcggtactaaagttcctagatatgctggaccctcaacatttgctaggttgcctgaactcagagatgtagatagttgtgatgttgccattgttggagtaccttttgattcaggaactagttacagacccggtgcaagatttggaccacaaagtattagacaagcttcaaggcatttaagaacaaattatcacccaagttatgatgttgaaccatttaaagtacaacaagttgcagatgcaggagatattgcttgtaatccttttaatattgacgaagcaataaaacaaattgaagttggtgcaacaaatttactagataaagtaggaggaattattagtcttggaggagaccataccattgcagtaccattacttagagcagtaaataaaaaaaataatggacctgtatcattagtgcattttgatgctcatttagacacttgggatacttattttggagcaccatacacacatggaacgccttttagaagagcgcgtgaagaaaatttatttttagacgatgcatctatgcatgttggtattagaggtccattgtacagtagagatgatataaagaatgatgaaagttttggttttaaaataattcattgtgatgaatttcaaaccgagggaactgataaaattgccgaaagaattaaaaaaagagttggagataatgctttgtacttatctattgatattgatgttttagatcctgcatttgcaccaggaacaggaacacctgaaattgcaggtatgaccacaagagaaatggtaaatgttcttagagggttgtcaggtctaaatttaatctcagcagacgtggtggaggttgcaccagcatatgatcatgctgaagttacttctcttgcagctgctacaattgtttacgaattaactaatttatttgcaaaatcataag

SEQ ID NO: 265683 - DNA, 958 bp, Unknown
  Bacterial polypeptide expressing nucleotide sequence isolated from the Sargasso Sea
ttgaaagataaaaataaaaaaccaatccaaccagtaagtggaacaaaagtaccaagatatgcgggaccatcaacctttgctagattaccagaattaagagatgttgaaagttgtgatgtagcaattgtaggagttccttttgactctggaactagttacagacctggagcaagatttggaccccaaagtataagacaagcctcaagacatttgagaacaaattatcatccaagttatgatgttgaaccatttaaagtgcaacaagttgctgacgcaggagatattgcctgtaatccatttaatattgatgaagctataaaacaaatagaagttggtgctacaaatattttaaataaagtaggagggattattagtcttggcggtgatcatacaatagctgttccattgcttagagcaattaataaaaagaataaaggtccagtttcattagtccattttgatgctcacctagatacttgggatacttattttggagcaccttacacacatggcacaccatttaggagagctagagaagaaaacttatttttagatgacgcatcaatgcacgttggaataagaggtccactctatagcagggaagatatcaagaatgatgaaagttttggttttaaaataattcattgtgatgaatttcaaacagaaggtatagacaaaatagttgagagaattagaaacagagtaggtgacaatgctttatatctatcgatagacattgatgtcttagatccagcttttgctcctggaactggtacgcctgagatagcaggtatgactacaagagaaattgtaaatgttataagaggattgtcagggctaaacttagtttcagcagatgtagttgaggtagcaccagcatatgatcatgcagaagtaacttctttggcagctgcaacaattgtttatgaattaacaaatttgtttgcaaaagcctaaa

SEQ ID NO: 265684 - DNA, 958 bp, Unknown
  Bacterial polypeptide expressing nucleotide sequence isolated from the Sargasso Sea
ttgaaagataaaaataaaaaaccaatccaaccagtaagtggaacaaaagtaccaagatatgcgggaccatcaaccttcgctagattgccagaattaagagatgttgaaagttgtgatgttgcaattgtaggagttccttttgactctggaactagttacaggcctggagcacgatttggaccccaaagtataagacaagcttcaagacatttgagaacaaattatcacccaagttatgatgttgaaccatttaaagtgcaacaagttgcggatgcaggggatatagcctgtaatccttttaatattgatgaggctataaaacaaatagaagttggtgctacagatattttaaataaagtaggagggattattagtcttggcggtgatcatacaatagctgttccattgcttagagcaattaataaaaagaataaaggtccagtttcattagtccatttcgatgctcatctagatacttgggatacttattttggagcaccttatacacatggtacaccatttaggagagctagagaggaaaatttatttttagatgatgcgtcaatgcacgttggaataagagggcctctttatagtagagaagatatcaaaaatgatgaaagttttggttttaaaataatccattgtgatgaatttcaaacggaaggtatagacaaaatagttgagagaattagaaacagagtaggagacaattccttatatatgtcgatagacattgacgtcttagatccagcttttgctcctggaactggtacacccgagatagcaggtatgactacgagagaaattgtaaatgttattagaggattgtcaggcttaaacttagtttcagctgatgttgttgaggtagcaccagcatatgatcatgcagaagtaacttctttagcagctgctacaattgtttatgaattgacaaatttgtttgcaaaagcctaaa

SEQ ID NO: 265685 - DNA, 619 bp, Unknown
  Bacterial polypeptide expressing nucleotide sequence isolated from the Sargasso Sea
aaccgaacttttaggtaaagtcggtggcataattagtcttggaggagatcatactattgcagttcctttattaagagcaataaataaaaaagttaaaggaccagtatcattagtgcattttgatgcacatttagatacgtgggatacttattttggtgcaccttatactcatggaactccttttagaagagcgagagaagaaaatctttttttagatgatgcttcaatgcacgttggcataagaggcccattatatagtagagatgatataaagaatgatgaaagttttggatttaaaattatacattgtgacgaatttcaaacagagggaactgataaaatagcagaaagaataaaaaaaagagttggaaaaaatccattatacctttcaattgatattgatgttctagatccagcatttgctcctggtactgggacacctgagattgcaggaatgacaacaagagaactagtaaatgttataagaggattagttggactgaacttagtttcagcagatgtagttgaagttgcccctgcatatgatcatgccgaagttacatctcttgcagcagcaactattgtttatgaattaactaatttatttgcaaaaacataa

SEQ ID NO: 265686 - DNA, 955 bp, Unknown
  Bacterial polypeptide expressing nucleotide sequence isolated from the Sargasso Sea
atgacaaagtctaaaaaacctattcagcctgttagtggtacagaagtgccaagatatgcaggcccttctacatttgcaagattacctgagttaagagatgtagaaagttgtgatgttgctattgtcggagttccatttgattcaggaacaagttatagaccaggtgcaagatttggcccacaaagtattagacaagcatctagacatttaaggactaattatcatcctaattatgatgtagaaccattcaaagtacaacaagttgcagatgcaggtgacattacttgtaatccatttaatattgatgaagccatcaaacaaattgaagtaggagcaaccgatttattaaataaagttggaggaataataagccttggaggagatcacacaattgctgtgcctttacttagagcagccaataaaaagaataatggacccgtatcacttgttcattttgatgcccatttagatacctgggatacctactttggagcaccatatacgcatggcactccatttagaagagctcgtgaggaaaatttatttttagatgatgcctctatgcatgtaggtataagaggtccactttatagcagagatgatataaaaaatgatgaaagctttggatttaaaattattcattgtgatgaatttcaaacagaaggaattgataaaatcgttgaaagaataaaaaatagagtaggtgataatgcattatatttgtccattgatattgatgtattagatccagcatttgcaccaggcacaggaacacctgaaattgcaggaatgaccacaagagaaatggtaaacgtcctcaggggtttatcaggtttaaatttgatttctgcagatgtagttgaagttgcgcctgcttatgaccatgcagaagtaacctctctagctgcagcaacaattgtttatgaattaacaaatttatttgcaaaatcatgaa

SEQ ID NO: 265687 - DNA, 902 bp, Unknown
  Bacterial polypeptide expressing nucleotide sequence isolated from the Sargasso Sea
atttgcaggaccatctacatttgctagattgcccgaacttagagatgttaaaagttgtgatgtagcaatagttggtatcccatttgatgctgggacaagttacagacctggtgcaagatttggacctcaaagcattagacaagcttctagacatttaagaactaattaccatccaagttatgatgttgagccttttaaagttcagcaagttgctgatgctggtgatattgcttgtaatccatttagtatagatgaagcaataaaacaaattgaagctggagcaactgatttattaaataaagttggaggaataataagtttaggaggagatcatacgattgctgtaccattgttaagagcaattaataaaaaaaataaaggaccagtttcattagttcattttgatgctcatctagatacttgggatacttattttggagccccttatacacatggcactccttttagaagagctagagaagaaggtttatttttagatgatgcatctatgcatgtaggaataagaggaccattatatagcagggacgatataaaaaatgatgaaagttttggatttaaaattatacattgtgatgagtttcaaacagaaggtacagacaaaatagcagaacgaataagaaaaagagtaggagacaatccattatacttgtcaattgatattgatgttttagatccagctttcgctccaggaacaggaacaccagaaatagcaggtatgagtacaagagaaatggtaaatgtaattagaggtttgtctggattaaatttaatttcagccgatgtagttgaagtagcgcctgcatatgatcatgctgaagttacttctcttgcagccgcaacaatagtttacgaattaactaatttatttgcaaaatcataaa

SEQ ID NO: 265688 - DNA, 970 bp, Unknown
  Bacterial polypeptide expressing nucleotide sequence isolated from the Sargasso Sea
atgacaaaaaaaacaacatttaaatcacccgttacgaaaaaggattacgttggaaatttagagcctcgatatgctggtattccaacattcatgagaactccaatggcagaatcattggagggagttgatattggtctgattggggttccttacgatggcggtgtaacaaatcgagccggcgcaagacatggacccagagagataagaaatcaatcgagcctgatgaggaccattcatcatgtcaatagagaaagcccatttgatattgccaacattgctgatttgggcgatgtatctttttcagagccatttaatcatcaggcagtgaatcatgatattgctgagttttttaagcttgttaaagagtcaggcgtgattccattaagcgctggtggcgatcattcggttacatacccaatctttaaagggattgccaatgatggcccaataggcatgattcatgttgatgctcatacagacacatggggagaaatatggggatctaaatttcatcacggttcaccttttaggctggctgtagaggacggtcttctagaccctaagcgaactgttcagattggcatcaggggagctcagaattttatggatggaattgatttttcgcttgattcgggaatgcgagttgtattcatggaggagttttttgagataggcgttaaagaggttattaaggaagcattaaaagtagtgggcgatggaccaacatacatttccttcgatgttgacggtctggatcctgtatttgctccaggaactggaacgcctgaagtgggtggaatcacaaccgttgaggcacaaacgcttctgagaggcctaaaagggctcaatctgattggggcagatgttgtagaggtcgccccaccattcgatcaaactggaaacacggctctggtaggagcaaccatgatgtatgaaattctatgccttctcgctgatcgattcaggtaaa

SEQ ID NO: 265689 - DNA, 262 bp, Unknown
  Bacterial polypeptide expressing nucleotide sequence isolated from the Sargasso Sea
aaaagagtaggagacaatgctctttatttatcaattgatattgatgttttagacccagcatttgccccaggaactggtacaccagagattgcaggcatgacaacaagagaaatggttaatgttattagaggtttgtcaggattaaatcttatttctgctgatgttgtagaagttgcaccagcttatgaccatgctgaagtcacttctttggctgcagcgacaattgtttttgaattaaccaatttgtttgcaaaaaaataac

SEQ ID NO: 265690 - DNA, 869 bp, Unknown
  Bacterial polypeptide expressing nucleotide sequence isolated from the Sargasso Sea
agaattaagagatgttgaaagttgtgatgttgcaattgttggaattccatttgatagtggaacaagttacagaccgggcgcaagatttggacctcaaagtattcgacaagcctcaagacatttaagaactaattatcatccaagttatgatgttgagccgtttaaagttcaacaagttgcagatgcaggggatatagcttgtaacccatttaatattgatgaagccattaaacaaattgaggtaggcgcaacagatttattgagtaaagtaggtggaattattagtcttggcggtgatcatacaattgcagtgccactattaagagccgcaaataaaaagaataacggtccagtatctttggtccattttgatgctcatttagatacttgggatacttattttggtgcaccctatacacatggaactccttttagaagagctcgtgaagaaaatttatttctagatgatgcctctatgcatgttggtataagaggacctttatacagcagagacgacataaagaacgatgaaagttttggatttaaaattattcattgtgatgaatttcaaacagagggaacagataaaattgcagaaagaattaaaaaaagagttggagataatgctttgtacttatctattgatattgatgttcttgatccagcctttgcaccaggaacaggaacacctgaaatagcagggatgaccactagagaaatggtaaatgtcctaagaggattgtcaggtttaaatttgatctcagcagatgtcgtagaagttgcacctgcgtatgatcatgctgaagttacttctcttgctgctgctacaattgtttacgaattaacaaatttatttgcaaaatcataaa

SEQ ID NO: 265691 - DNA, 300 bp, Unknown
  Bacterial polypeptide expressing nucleotide sequence isolated from the Sargasso Sea
atgaaattaataattttgcctataatacattaaatcaaattgaagattttgtagaagataatccaatacatttatcttttgatgtagatgtagtagatcctttttatattcctagtacaggaacacctgtcggagaaggattaaatttagaatcaacaggaatcttattgaataatattatgaaatataatttagtttcaatggatcttacagaattaaatttagccattgggaataatgaagataaggtaaaatcattgaataatgttagacatttaatgaaggggatagtgtattaga

SEQ ID NO: 265692 - DNA, 544 bp, Unknown
  Bacterial polypeptide expressing nucleotide sequence isolated from the Sargasso Sea
ttgaaagatgcggaaaaacaggtagatcgggcatttacaagggatagttacactggacagtcctttgagaatgcatttggtggggctacttcattcttacgtttaaaatatacaaaagagttaaataatgttgatttagcaattactggaatcccatttgatcaagcagttaccaatcggccagggtcgcgttttggtccacgcgcaataagggaagcgtcaactttacagccatttgatcccatatacgggtgggaggattttgatccaatgtcagagatattcatggtcgattatggagatatcgcatatgactatgcaaaagtaagtgagtttcctcagattttagaagaccacgttagcactatactaggcaaatgtagcggatgtatttcgctcggcggtgaccattttatatcctaccctatattaaaggcctatagtaaaaagtttggaaagccgttggctttattacagtttgacgctcactcagatacatggcctgatgatgacatgcatcgtattgaccatggaacaatgtttt

SEQ ID NO: 265693 - DNA, 467 bp, Unknown
  Bacterial polypeptide expressing nucleotide sequence isolated from the Sargasso Sea
ggccgatgatgatttcagccgcgtcgatcatggcaccatgttctacaaggcggtgaaatccggcattattgatccggcgacctcggtgcaggtgggcattcgcaccaccaatgaggacaatctcggcgtgccgaccatcgacgcgcccactgtgcatgaaatcggcccggtcgagaccgtgcgccgcatccgcgaggttctgggcgaccggccggtctatctgacctttgacatcgactgtcttgatccggcctatgcaccgggcaccggcacaccggtctggggcggtctgaccacggcgcaggcagaggcgatcctgaagggcctgcgcggcatcaacattgtgggcggcgatatcgtcgaggtctctccgccctttgacaccaccggcgccaccgcgattgcgggcgcccatgtggccatgagtattatttgccttctgggctggaggatgacaggacgatgag

SEQ ID NO: 265694 - DNA, 625 bp, Unknown
  Bacterial polypeptide expressing nucleotide sequence isolated from the Sargasso Sea
atgagttcaccccccgatcaggcaatgctccgcgagagtctcaaaggtgtgaccgaggaagccacttacggcggtatcctgagctttatgcgccgttgctatacccgcgatttggccgacgctgatgtcgctgtgctgggtattccctttgatctggcgaccaccgctcgtcccggcagcagatttggcccgcgttcggtgcgcgaggcgtcagcgagcctcgcctgggagcgtaaagcggtgggctggggtttctcgccgctcgagacactggcgattgttgattacggcgactgtgattttgatgcgggtaaccccgctaaggtgcctgacgagatttacgagtgcgcccgccagattctcgctaccgatactgtgctgctatcgattgggggcgaccactttgtgtcttacccactgctcagagcacacgctgaaaaatatggtgagttgtcactgattcatttcgatgcccattccgatacttgggcagaggatagccagcggattgatcacggcaccatgttctatcacgccgcacagcaggggctcatttcaccggcacactctgcacagatcggtctgcgcacccacaacgacagcgaccatggcttcaatatttaag

SEQ ID NO: 265695 - DNA, 712 bp, Unknown
  Bacterial polypeptide expressing nucleotide sequence isolated from the Sargasso Sea
tatgaaaacagtgggtgatggtgctttccgcagcgaaaatttaaatagcccctcaaatgatatgacatattctggcgcgctcagttttcttcggcgcaagtattcgcgtgacttaaccggtgttgatgttgccgtgacaggtattccttatgattgtgccaccagcaatcgccccggagcccgcttcggaccacgtggaattagatcagcctctacagaacttgcctcactggatgctttccatttcaacttcgatccattcaaatgcctggctgtagtggattacggagatgtgtggctcgattacggatatccgcagaacgttgtggagaaggtagaaaaacatgcagacactatcttgcaacagtctacctctctattgagtttcggaggtgatcatttcattacctatccactgctccgtgctcatcacaaggtgcatggcactatttcacttattcactttgacgcacactcagacacttgggaagacgacggcaatagggtggatcatggatccatgttcctgcgggccgcacgggaggaaatcgttattccagaaaagtcagtgcaaatcggaattcggacacaaaattactgtactcatggcttcaacattctgcatgctccctgggtacatactcacggagttcaggctgtgattgacacaatacacaatgtcatctctcctgacgatccagtttacattaca

SEQ ID NO: 265696 - DNA, 955 bp, Unknown
  Bacterial polypeptide expressing nucleotide sequence isolated from the Sargasso Sea
atgcccccggcgcgcgctgacacggccaccgccgggcaccccgccgggcccacctacgccggcgtgctgtccttcatgcgccgcccttatacgcgcgatctcgccggcgtcgacgtcgccgtatcgggcattccgctcgatctcgcgaccaccttccgccccggcacgcgtttcgggccggccgggatgcgcgcggcctcggtgcaattggcggacctgggcgcgtttccgtggggcatcgatcccttcgaccatctcaacgtggtcgactacggcgactgctgtttcgacgcccacaacccgctcggcattcgcgacgcgatcgttgcccacgcccgggaaattcttgccgccggcacgcgcatgctgaccttcggcggcgatcactacatcacctatccgctcctgatcgcgcacgctgaaaaattcggcaagcccttgagcctgatccatttcgatgcgcattgcgatacctggccggacgacaaccccgattcgctgaaccacggcacgatgttctacaaggccattcgcgaagggctgatcgaccccgcccgctcggtgcaggtcggcattcgtacctggaacgacgacttcatgggcgtgcgcattctcgacgcgccgtgggtgcatcgcaacggcacgcaggcgaccatcgacgaagtgttgtcgatcgtcggcgatgcgccgacctacctcaccttcgatatcgactgcctcgacccggccttcgcacccggcacgggcacgccggtggcgggcggtctgagctcggcgcaggcgcttgaaatcgtgcgcgcgctgggcgccgtgaatctggtaggcgcggacgtggtggaagtgtcgccgccctacgatcacagcgacgttaccgcgctcgccgcagcgcaccttgccgccgacatgctgtgcctgatgcgtaaccggaagctgcaaagtcagcagcgcgagtaag

SEQ ID NO: 265697 - DNA, 616 bp, Unknown
  Bacterial polypeptide expressing nucleotide sequence isolated from the Sargasso Sea
gggagcaatttttactcatgctaagtctataattgacacaaatacaaagatgttaacttttggaggcgatcatttcatttcccttcctttgttaagagcgcatgctgaaaagtatggccccctatctttgctacaatttgattcccattgtgatacatgggaaccacaagggccaattgatcacggaactatgtttctaacagcagttaatgaaggtttaattaatgttgatacatcaattcaagttggattaagaacacacaatgatcttgacgttgggattgaagttattgatgtaaggtatatacatgaaaatggtattaagaaatcagtcgaaagaatattaaaacgtattaataaaacaaattgttacatgacttttgatatagatttccttgatcctgcttttgcacctggaactggcactccagtttgcggtggagtagccacatggcaagccttggaattcataagatcattagaagaaattaattttgttggtatggatcttgtagaggtgtctccaccatatgaccatgcggagataacttcaatggccgctgctacagtagctcatgactggatttgtataatggcagacaaacaaagaaaataa

SEQ ID NO: 265698 - DNA, 739 bp, Unknown
  Bacterial polypeptide expressing nucleotide sequence isolated from the Sargasso Sea
cctggctgtagtggattacggagatgtgtggctcgattacggatatccgcagaacgttgtggagaaggtagaaaaacatgcagacactatcttgaaacagtctacctctctattgagtttcggaggagatcatttcattacttatccactgctacgcgcacatcacaaggtacatggctctatttccctaattcactttgacgcacattcagacacttgggaggacgacggcaatagggtggatcatggatccatgttcctgcgggccgcacgggagggaatcgttattccagaaaagtcagtgcaaattggaattcgaacacaaaattactgtactcatggcttcaacattctgcatgctccctgggtacatgctcacggagttcaggctgtgattgacacaatacacaatgtcatctcttctgacgatccggtttacattacatttgacattgactgtctggacccggcctttgcacccggaaccgggactccggtggtaggcggtttgagcaccacccagattttgccaatacttcaatccctgggagatctgaatttgattggaatggatattgttgaggttgcgccaatttacgaccatgcggaaattactgctttagcagcggcaacacttggttataattacctctgcctgcttgcgcaaatgaaggggacgaaggcagagcatatcggtacctgtcttgatgaaactcccagcggatctgcagctggctga

SEQ ID NO: 265699 - DNA, 946 bp, Unknown
  Bacterial polypeptide expressing nucleotide sequence isolated from the Sargasso Sea
tatgagttcaccccccgatcaggcaatgctccgcgagagtctcaaaggtgtgaccgaggaagccacttacggcggtatcctgagctttatgcgccgttgctatacccgcgatttggccgacgctgatgtcgctgtgctgggtattccctttgatctggcgaccaccgctcgtcccggaagccgatttggcccgcgcggggtgcgcgaggcgtcagcgagcctcgcctgggagcgtaaagcggtgggctggggtttctcgccgctcgagacactggcgattgttgattacggcgactgtgattttgatgcgggtaaccccgctaaggcgcctgacgagatttacgagtgcgcccgccagattctcgctaccgatactgtgctgctatcgattgggggcgaccactttgtgtcttacccactgctcagagcacacgctgaaaaacatggtgagttgtcgctgattcatttcgatgcccattccgatacttgggcagaggatagccagcggattgatcacggcaccatgttctatcacgccgcacagcaggggctcattgcaccggcacactctgcacagatcggtctccgcacccacaacgacagcgaccatggcttcaacatttttgatgcgcctacggtgcacgacatgaagcctgccgatctggcggcacaggtaaaaggcatcgttggggatcggccttgttacttaacctttgatatcgactgtctggaccccagttttgccccgggtaccggaacgcccgtggtcggtggcctgtcgacccatcaggccatgcaaatcttgcagcacttaaagggtattaatctggtgggtatggacgtggttgaggtagcgccgcaatacgatgtgggcgcgattacctcactcgctgcggcaacgattgcgctccagcagctgtgtttattcgccagcgcaccccagtaa

SEQ ID NO: 265700 - DNA, 970 bp, Unknown
  Bacterial polypeptide expressing nucleotide sequence isolated from the Sargasso Sea
catgaccgaacttctccacggcgacggcgcgatccgtcgcacgacgccgtacggctcgtcgatcgaaaacacctatgcgggcgtgctgtcgttcatgcgccgcaactattcgcgcgcgctcgacggcgtcgacgtcgcgatctccggcgtgccgctcgacctcgcgacgacctaccgctccggcgcgcggctcggcccggcggcgattcgcgcggcgagcgtgcagctcgcggagcttcatccgtatccatggggcttcaacccgttcgacgatctcgcggcggtcgactacggcgattgctggttcgacgcgcacaacccgctgtcgatcaagcccgcgatcgtcgagcatgcgcgcacgatcctcggttccggcgcgaagatgctgacgctcggcggcgaccactacatcacgtatccgctgctggtcgcgcacgcggagcgctacggcaggccgctgtcgctgatccatttcgacgcgcactgcgatacgtgggccgacgacgatccggacagcctcaatcacgggacgatgttctacaaggccgtgaaggaagggttgatcgatccggcgacgtcggtgcaggtcgggattcgcacgtggaacgacgacttcctggggatcgagcggctcgatgcggcgtgggtgcatgaccatggcgcgcgcgcggcggtcgagcggatcgtcgacatcgtcggcgcgcggccggcgtacctgacgttcgatatcgattgtctcgatccggcgttcgcgcctggtaccggcacgccggtcgcgggcgggctctcgtctgctcaggcgctagcgatcgtgcgtgcgctcggcgcggtgaacctggtcggcgcggatgtggtcgaggtcgcgcccgcgtacgaccacgcggacatcacggcgatcgcggccgcgcatgtcgcgtgtgacttgctgtgtttgtggcggcagaagaaggtggcgggggcgctgaagtaa

SEQ ID NO: 265701 - DNA, 988 bp, Unknown
  Bacterial polypeptide expressing nucleotide sequence isolated from the Sargasso Sea
catgactgaactcatctacggcgacggtgcgatccgtcgtgcgtcgctttatggctcgtcgatcgagaacacctatgcgggtgtgttgtcgttcatgcgccgcaagtacactcgcgaactcgacggcgtcgacgtcgtggtctccggcgtgccgctcgatctggctaccacgttccgctcgggcgcgcgtctcggcccggcggcagtgcgcgcggcgagcgtgcagttgtcggagttgcatccgtatccgtggggtttcaatccgttcgacgatctcgccgtgacggattacggcgattgctggttcgacgcgcacaatcccatgacgatcaaggaatcgatcgtcgagcatgcgcggacgatcctgcgttcgaacgcaaagatgctgacgctcggcggcgatcactacattacttatccgctgctgatcgcgcatgcggagaagtacggcaagccgctttcattgatccatttcgacgcccactgcgatacctgggccgacgacagcccggacagcctgaatcacggctcgatgttctacaaggcggtgaaagacggcctgatcgatccgaagacctcggtgcaggtcggtattcgcacatggaacgacgacttcatggggatcaacatcctcgacgccgcgtgggtccacgaacacggcacgcgtgcggcggtggaacggatcacgtcgattgtcggcgagcggcccgcgtatctgaccttcgatatcgactgtctcgatccggccttcgcgccaggcacgggtacgccggtggcgggcggtttgtcgtcggcacaggggctggccattgtgcgcgggctcggcgcgttgaacctggtgggcgcggatgtggtggaagtggcgcccgcttacgaccagagcgagatcacggcgatcgccgccgcgcatattgcctgcgatctgttgtgtctttggcggcagcggaaagtggctgaacaagtggttgaacgggcaactgaacgttag

SEQ ID NO: 265702 - DNA, 441 bp, Unknown
  Bacterial polypeptide expressing nucleotide sequence isolated from the Sargasso Sea
cagtgcagattggaattagaacacaaaattactgtactcatggatttaacattctgcatgctccctggatacatgctcacggagttcaggcagtaatcgacacaatacacaaagtcgtctcttctgatgatccggtttacattacttttgacattgactgtcttgaccctgcctttgcacctggaaccggaactcctgttgtaggagggttaactactacccaggtgttgccgatacttcagtctcttggagatctgaatctaattggaatggatattgttgaggttgcgccggcatacgatcacgccgaaattacttccttagcagcggcaactcttggttataattacctctgtcttcttgcacaaattaaaggagcgaaggcagagcatatcggaaccagtcttgatgaaaatcccagcggatcagcagctggctgat

SEQ ID NO: 265703 - DNA, 976 bp, Unknown
  Bacterial polypeptide expressing nucleotide sequence isolated from the Sargasso Sea
aatggtattaagtaacgcaaaaactgagatagatctcgcttttacaagaaaagatttaaagggtttatcatacgaaaatgctttcggtggttcgacttcatttttgcgacgacgctacaccaaagacttaaaagatgtagatatagcgataactggggtgccctttgatcaagcagtaaccaatcggccaggcgccagatttggtcctagggctataagggaagcatcaactttacagacatttgatccgccatatggctgggactttgatcctatgcaagagttaaatattattgattacggtgacttggcttttgattatgccaaagtgcaagagtttccctccttattggagcagcatatatctaaaattctgtccaataatgtttcaacaatagttttagggggtgatcattttataacatacccaatattaaaagcttattttaataagctagggtcacctttatctttactacaatttgatgcgcattcagatacttggccggatgatgatgaagaccgaattgatcatggaacgatgttttacaaggcagtcaaaagtggaataatcgatcctaaaacatcggttcaagttggtattcgtacaacaaatgaagataccttgggggtaaatattattgatgcaagggaagtacatgaaaacggcccagttgaggtcgcaaaaaaaataaaatcaattttgggaaatcaacccacatacctgacattcgatattgattgtcttgacccggcttttgctcctggtactgggacaccagtttggggcgggttatcttccggtcaggctgcaattcttcttagggatatcgcagggattaatatgataggtggagatgttgttgaggtttcgcctagttatgacacttctggtgctaccgctattgctggcgctcatgctgttacggagcttttatgcatttggggttctaattcaaaaaataagagggcttga

SEQ ID NO: 265704 - DNA, 495 bp, Unknown
  Bacterial polypeptide expressing nucleotide sequence isolated from the Sargasso Sea
ttcattttgatgcgcacactgatacatacagcaatggctcgcgttttgatcacggcactatgttttatcatgcacccatggaagggctgattgatgtagagcacagcatacaaataggtattcgtaccgactttgaccaatcaaagcatgagtttgcagtgattgatgcaatgcaagctaacgatttgcacgccaatgaaatagcagcgcaaatacgcgagcgggtaggcgacttacccgtttacctaacgtttgatatagactgccttgacccggcatttgcaccaggtacaggcacaccggtttgtggtggtttaacatcagataaagtgcttaaaatactgcgcgcgcttaaaggtataaatatggtgggaatggatgtggtagaggtatcaccgtcgtatgaccaaagtgagcttaccgctattgccgcagcaacaattgcgagcgagttattgcatttgtggacacataaaaataagtactcactctaaa

SEQ ID NO: 265705 - DNA, 376 bp, Unknown
  Bacterial polypeptide expressing nucleotide sequence isolated from the Sargasso Sea
catgagcaccttaggtcatcaatacgataactccctggtatctaacgcgtttggttttctgcgtctgccgctgaatttccagccgtacgacagcgatgctgactgggtcattaccggcgtacctttcgatatggcgacttccgggcgcgcgggcggccgtcatggcccggcggcgatccgtcaggtctctaccaacctggcgtgggaacataaccgcttcccatggaacttcgacatgcgcgagcgcctgaacgtggttgactgcggcgatctggtttacgccttcggcgacgcgcgtgagatgagcgagaagctgcaggcgcatgcggaaagactgctggcggccggtaagcgtatgctctccttcggcggcgac

SEQ ID NO: 265706 - DNA, 713 bp, Unknown
  Bacterial polypeptide expressing nucleotide sequence isolated from the Sargasso Sea
tagcggcccatcggcaatccggcaggcctcaggcaccctgcgatgggaggaggccagatggccctggcggtatgccctcgccgatcatcttaagatggtggactgcggtgacctggttttccctcccggcgacagcgcggcgtttacgcaagcgctttacgaccgggcgctagatatcattcagtcaggaaagacgctaatgagttttgggggagatcactttatcagtctaccgttgttgcgcgcacatcacgcggtgcatggggaactcgccctgattcattttgacgcgcatactgatacctatcagaacggtggagagtttgaccacggaacgatgttctatcgggcgcctcgcgaaggcctgattgaccctgcggcttcggcgcagatcgggatcagaaccgagtacgatgccgaccatcatgagtttctcgtcctggatgccgacaaggtccatcatcttggctgtaaagccgtcagtgaccgcgtgcgggagcgggtggctggccgaaaggcttacctgacttttgatattgattgccttgacccggcttttgcgcccggtaccggtactccggtcgcgggaggtctttccagcaatgtggtgctgcagatactgcgcggcctcaagggcgtcgatgttgtgggtatggatattgtggaagtcgccccgtcctatgaccacgccgaaatcacggcgcttgctgcgg

SEQ ID NO: 265707 - DNA, 520 bp, Unknown
  Bacterial polypeptide expressing nucleotide sequence isolated from the Sargasso Sea
catgagcaccttaggtcatcaatacgacaactccctggtttctaacgcctttggttttttacgtctgccgatgaacttcatgccgtacgacagcgacgccgactgggtgatcaccggtgtaccgtttgatatggcaacgtctggtcgtgcgggcgggcgtcatggtccggcggcaatccgtcaggtgtccaccaacctggcctgggagcacaaccgattcccgtggaacttcgatatgcgcgagcgcctgaacgtggtggactgcggcgatctggtttatgcgttcggggatgcgcgtgaaatgagtgaaaaactgcaggcgcatgctgagaagctgctgtctgccggtaagcgcatgctctcctttggcggcgaccacttcgtcacgctgccgctgctgcgcgcgcatgccaagcactttggtaaaatggcgctggtgcactttgatgcccacaccgacacctacgctaacggctgcgaattcgaccacggcaccatgttctacactgcgccgaacgaa

SEQ ID NO: 265708 - DNA, 1024 bp, Unknown
  Bacterial polypeptide expressing nucleotide sequence isolated from the Sargasso Sea
atgaaaacagtcggtgacggcgctttccgccgggaagatttaaacagccgatcaaatgacatgacctattcaggagcactcagtttccttagacggaagtattcacgtgacttaaacggtgttgatgttgccgtgacagggattccttatgattgtgccaccagcaatcgtcccggagcacgcttcggcccccgcgggattagatccgcctctactgagcttgcctctctggatgctttcccgttcaacttcgatcccttcaaattccttgctgtcgtggactatggagatgtgtggctcgattacggatatccccaaaaagttgtggaaaaggtagaaaaacatgcagacactatcttgaaacagtctacctctcttttaagtttagggggtgatcatttcattacttatcccctcctgcgttcacattacaaggttcatggccctatttcccttattcattttgatgcacattcagatacttgggaagacgacgggaatagggtggatcatgggtcgatgttcctgagggccgcacgggagggaattgtgattccagaaaagtcagtgcagattggaattagaacacaaaattactgtactcatggctttaacattctgcatgctccatggatacatactcacggagttcaggcagtgatcgacacaatacacaaagtcgtctcttccgatgatccagtttacattacttttgacattgactgtcttgaccctgccttcgcacctggaaccgggactcctgttgtaggagggttaactactacgcaggtgctgccaatacttcaatctcttggagatctaaatttaattggaatggatattgttgaggttgcaccggcatacgatcacgccgaaataactgccttagcagcggcaacacttggttacaattacctttgccttattgcgcaaatgaaaggggctaaaccagagcatattggcaccggtcttgatgaaacacccagctggtttagcagctggctgattaaattaagtaaataac

SEQ ID NO: 265709 - DNA, 448 bp, Unknown
  Bacterial polypeptide expressing nucleotide sequence isolated from the Sargasso Sea
atgacagctccgcggcagctttccgtcgaaccgctgacggcggccgccttcgcgcccttcggaacggtgatcgagaccgagggcgcgacccgcatgatgatcaatgagggcacgaccgagaggttccacgcgcttgccgccgccgatgtcgcggccggcggcggcacggcgatcctgtcgatctttcgcggcacccgccggcccgacccgattgccatccggatgatggagcggcatccgctcggctcgcaggccttcatgccgctggcggcgcacgactggcttgtcgttgtggcgccgaccgacgccggtgaccgggcgccggatttcggccggctccgctgtttcctcgcgcgcggtgaccagggggtgagctacgcccgcaatgtctggcaccacccgctgctgatcctgcagccgcgccaggatttcctgatcgtcgaccgcg

SEQ ID NO: 265710 - DNA, 799 bp, Unknown
  Bacterial polypeptide expressing nucleotide sequence isolated from the Sargasso Sea
atgattaacttggctgatccaagactggggtcaaaggtaatttttaaaactgatgattttttcgcatcagcaagtagaataattaatccaaatccaccaatttttaaagatggagtttttgataagcatggaaaatggatggatggatgggaaacaagaagaagaaggaaaaaaggatttgattatttaattataaaacttggtaagccaggaagaatttttaatgttgatattgacacaactcacttttcaggaaatcaacccatgtatgcttctttggaagcttgtcaaaataataaaaagctgaatagtaattcaaaatggaccaaaattttaaattataaaaaacttggacctaataaaaatcataaatttagtattaaaaataaatctatctttactcatattaaacttaatatttatccagatggtggagtagcaagacttaggatctatggagaaattgaaactaaaaatataaattatggaaagaaaacaattaatcttacttctatgttaaatggtgcatcaattgtgggttgtaacaacgaacattttggaagagctgaaaatgtactaacgccaggcaaaggtaaaaatatgggcgatggatgggaaacgagaagaagcagaggaaaaaactttgactggcttataattaaaatgggccgagcagggaaaattaataaaattgaaatagacacacatcattttaaaggaaattatcccgatagttgttcaattcaaggaacatatattcccaataaaatatcaaataatttaattgtaaaaaaatcaa

SEQ ID NO: 265711 - DNA, 841 bp, Unknown
  Bacterial polypeptide expressing nucleotide sequence isolated from the Sargasso Sea
aaaagaattattaatccttggccaccaatatttaatgaaggagtttttgataagcatggtaaatggatggatggatgggagacgagaagaaaaagaactaaaggacacgattttttaattctaaaactaggaaagcctggatttataaataaagttgatatcgatacatcttatttttctggcaatcatcctaaatatatctcgttggaagcttgttctattagcggaaaattgccaaataaaagaactaattggaaaacaattataaaaaaaagtccaactaaagcaaatagtcatcacttatttaatataaaaaataaaaatttttttacacacgtaaaactaaatatttttcctgatggtggtgttgcaagattaagagtttatggttcaatgaaagttaaaaaaaaactttctaaaggaacacaaaacctaacatcaattataaatggttcagtgccaattgcttgtaataatgaacattttggtagagctgaaaatatacttgctcccggtgtaggtaaaaatatgggcgatggttgggaaacaagacgtagtagaggaaaaaactttgattggatcataataaaatgctctacagaaggaaagattgatagaattcaaatagacacccaccattttaaaggaaattatccagacaaatgttctatacaagcaacctatattgacaataaactttcttcaaaaaatatcgtaaaaaaatctaaaaggtggaaattgcttcttaataaaacaaaactttatgctcatagaaaacataactttaaaaacaaaataatgagaaataaaaaaataaactatataagaataaacatcttcc

SEQ ID NO: 265712 - DNA, 666 bp, Unknown
  Bacterial polypeptide expressing nucleotide sequence isolated from the Sargasso Sea
tttggttgatttagctcaatcacgcttaggctcaaaaattatttataagaccgatgaattttttgctccagcaaaaagaattatcaatccttggcctccagtatttaaagaaggggtttttgacaaacatggcaagtggatggatggatgggaaacaagaagaaaaagaactaagggtcatgactatttagttttaaaattaggaaagcctggaaaaatacataaagtagatattgatacatcttactttaatggtaatcagcctagtaaagtttctcttgatgcctgttttagtagaacaaaatctcctaataaaaattcaaaatggataaacattttgaaaaaaaaatctaccaagcctaatagtcatcatttttttactattaaaaacagatctgttttcactcatgtcagactaaacatttttcctgatggaggtgttgcaaggttaagaatttatggagaaatgattgtaaataaaaagtttggtaaaaaaactataaatcttacttctgttttaaatggatcaacgcctatagcttgtaataatgaacattttggaagagcagaaaatattttagccccaggatctggaaaaaatatgggagatggttgggaaacaaggagaagtagaggaaaaaattatgattggttaattttaaagtg

SEQ ID NO: 265713 - DNA, 910 bp, Unknown
  Bacterial polypeptide expressing nucleotide sequence isolated from the Sargasso Sea
atggatggatgggaaactagaagaaaaagaacaaaaggttttgatttcttaattttaaagtttggaaaacgaggtttaataaaaaaagttgatgtcgatacatcttatttctctggaaatcatcctgatcaagtttcattacaagcttgcattagtaaaaaaaaaatacctgataaaaaaacaaaatggacaacgattattaaaaaaagccgaactaaagcaaatagtcatcattttttttacgtaaaaaataaaaattattttacgcatgtaaagctaaatatttttccagatggaggtgtagcaagattaaggatttacggatcaatgaaaataaaaaataaaaagcaaaaaaaaaatcaaaatctaacatctgtagttaatggagctgtaccaatcgcttgtaataatgaacattttggaagagcagaaaatatacttgctccaggaattggaaaaaatatgggtgatggatgggaaactagaagaagtagaggtaaaaattttgactggataataattaaatgttcttcacctggaattattaataaaattcaactagatacacatcattttaaaggtaattatccagataaatgctctgtacaagcagcctatataccaaataaagtttcagaaaaaaatattgttaataaatcaaaaaaatgggcttatcttctaaataagattaaacttcatgcacataaaaaacataactttaataataaattaatgaaaaataaaaaagtaaattatatgagaattaatattttccctagatggtggaatttcaagagtaagagcttttggaaaagcagaatgactgaaaaaattataagacctaaactgattaacaaagaaaatttcaaaaagtttggtgatatgattacgactaaagatataaaacctt

SEQ ID NO: 265714 - DNA, 859 bp, Unknown
  Bacterial polypeptide expressing nucleotide sequence isolated from the Sargasso Sea
ataataaacccttggccaccggtatttaaagaaggtgttttcgataaacatggaaaatggatggacggatgggagacgagaagaaaaagaacaaaaggttatgattttttaatactaagatttggaaaacctggtttaataaaaaaaatcgatgtcgatacatcatacttttctggaaatcatcctgatcaagtttctttacaagcatgtataagtaaaaaaaaaattcctgataaaaaaattaaatgggtaacaattgttaaaaaaagtcgaactaaagcaaacagtcatcatttctttaatgtaaaaaataaaaattattttacacatattaaactaaatattttccctgatggtggtgttgctcgattaagagtttacggttcaatgaaaattgaaaataaaattaaaaataaaattcaaaatcttacttcggttataagtggcgcagtacctatagcgtgcaacaatgaacattttggaagagcagaaaatatacttgcgccaggaataggcaaaaatatgggtgacggttgggaaacaagaagaagtagaggaaaaaattttgattggataatagtaaaatgttcttctcctggtaaatttaataaaatccagttagacacacatcattttaaaggaaactttcctgataaatgctcaatacaagccgcttatattccaaaaaatatttcaaataaaaatattgttaaaaaatcaaataaatgggctttcttgcttaacaaagtaaaactttatgctcataaaaaacataactttaaaaataatttaatgaaaaataaaaaagtaaattatattaaaattaatatcttcccagatggtggtattcaagaattag

SEQ ID NO: 265715 - DNA, 823 bp, Unknown
  Bacterial polypeptide expressing nucleotide sequence isolated from the Sargasso Sea
gatggatggatgggaaactagaagaaagagaaccaaaggacatgattttttaatattaaaatttgggaaacctggtttaattaaaaaaattgatgttgatacctcttacttttcaggaaaccaaccagataaagtttctttacaagcttgtgttagtaaaaaaaaaataccagataaaaaaactaaatggataactattattaaaaaaagtcaaacaaaagcaaatagtcatcatttttttagcataaaaagtaaaaattattttacacatattaaattaaatattttccctgatgggggtgtggccagattaagagtttatggatcaatgaaaattaacaataaaatccacaataaaactcaaaatcttacatcgcttataagcggtgctgtaccaattgcgtgcaataatgaacattttggaagagcggaaaatatacttgctccaggaataggaaaaaatatgggtgatggttgggaaacaagaagaagtagaggaaaaaattttgattggataattataaaatgttcttcaccaggaaaattaaacaaaatccagttagatactcatcattttaaaggaaattatccagataaatgttcattacaagcagcatatattccacaaaaaatttcagaaaaaaatattgtaaaaaaatcaaaaaaatggggtcatattctaaataaagtaaaactttatgctcataaaaaacataactttgaaaataaaataatgaaaaataaaaaaataaattatattaaaattaatatctttccagatggtggaaatttcagaattagagcttttggtaaacctgaatga

SEQ ID NO: 265716 - DNA, 666 bp, Unknown
  Bacterial polypeptide expressing nucleotide sequence isolated from the Sargasso Sea
tgcacctgcaaaaagaataatcaatccttggccacctgtatttaaagaaggtgttttcgataaacatggaaaatggatggatggatgggaaactagaaggaagagaacaaaaggacatgattttttaattttaaaatttggaaaacctggtttaataaaaagagttgatgttgatacttcatacttttcaggaaatcatccagataaaatttctttacaagcctgcattagtaaaaaaaataaaccagataaaaaaacaaaatgggtaacaattattaaaaaaagtcgaaccaaagcaaatagtcatcatttttttaatataaaaaataaaaattattttacacatattaaattaaatattttccctgatggtggtgtagctagattaagggtttacggatcaatgaaaattaaaaataaaatccaaaataaaactcaaaaccttacatcgcttataagcggtgcggtaccaattgcatgcaataatgaacattttggaagagcagaaaatatacttgctccaggagtaggaaaaaatatgggtgatggttgggaaacaagaagaagtagaggaaaaaattttgattggataattataaaatgctcttcacctggaaaattaaataaaatccaattagacactcatcattttaaaggaaattatcc

SEQ ID NO: 265717 - DNA, 864 bp, Unknown
  Bacterial polypeptide expressing nucleotide sequence isolated from the Sargasso Sea
aatgattaatttagcagaaccaagacttggttcaaaggtagtttttaaaactgatgatttttttgcatctgcaaataggataattaatccaaatccacccgtatttaaagaaggagtttttgacaaacatggaaaatggatggatggatgggagacaagaagaagaagaagaaaaggttttgactatttaattgtaaaacttggaaggccaggaaaaatttttaatgttgatatcgatacagctcatttttcgggaaaccaaccaatgcaaacttctttggaagcttgccatagtagtaaaaatccaaaaaataaatcaaaatggattacaattttaaataaaaaaaaacttaagccaaataaaaatcataattttaaaataaaaaataaatctatcttcacccacattaaattaaatatttatccagatggtggagttgcaagacttagagtctatggagaagttgaaataaaaaaaattaattttggaaaaaaaacaattaatctttcatctatgttaaatggcgcttctatcgtgggttgtaataatgaacattttggcagggctgaaaacatcctcgcaccaggtaaaggaaaaaatatgggagatggatgggagacaagaagaagtagaggaaaaaattttgactggcttataataaaattagggcatgcaggaacaattaataaaattgaaattgatacccatcattttaaaggcaactaccctgacaggtgctctgtacaagcaacatatatacctaaaaagatatcaaattatttggtagtaaaaaaatctaataaatggaagtcacttttaaataaagttaaactaaacgctaataaaaaacatagctttaataa

SEQ ID NO: 265718 - DNA, 901 bp, Unknown
  Bacterial polypeptide expressing nucleotide sequence isolated from the Sargasso Sea
gacttagctcaatcacgtttaggttcaaaggtagtatacaaaactgacgagttttttgctccagcgaaaagaattatcaatccttggcctccaatttttaaagaaggagtttttgataagcatggaaaatggatggatggatgggaaactagaagaaaaagaaacaaagggcatgactatttaattttaaaactgggcaggcctggaaaaatacataaagtagatattgatacatcttattttaacggaaatcagccaagtaaagtttcacttgatgcttgttacagtaaaaataaattacctaataaaaattcaagatggataaatattttgaaaaaaagtaccaccaaacctaacagtcatcacttttttaatataaaaaataaatctatttttactcatgtaaaattaaatatatatcctgacggtggtgttgcaagaattagaatttatggtgaaatgaagattaataaaaaatttggaaaaaaaataacaaatcttacatctctattaagtggagctacaccaatcgcttgtaataatgaacatttcggaagagcagaaaatgtccttgctcccggctcaggtaaaaatatgggtgatggatgggaaacaagaagaagtagaggtaaaaattttgattggctaattttaaaatgtgcaacagcgggtaaaataaataagattcaaattgatactcatcacttcaaaggtaactatcctgataaatgttctgtccaggctgcttatttaaacaatcgaatctcatctaaaagtattgttaataaatcgaaaaattggaaattgctattaggtaaagttaaactccatgcccataaaaagcataattttaataataagctaatgaaaaataaaaaaattaactacataagaataaata

SEQ ID NO: 265719 - DNA, 688 bp, Unknown
  Bacterial polypeptide expressing nucleotide sequence isolated from the Sargasso Sea
atgaaaaaaaataatattatttacttaaatggattaattgatttagctcagtcaaggctaggttctaaaattgtttataaaactgatgaattttttgcacccgctaaaagaataattaacccttggccccctgtatttaaagaaggagtgtttgataaacacggtaaatggatggatggatgggaaactaggagaaagagaacaaagggatacgattatcttattttaaagtttggaaaacctggattaataaaaaaagttgatgttgatacttcttatttttctggaaatcatcctgaccaaatttcaatacaagcttgtattagcaaaaaaacaataccagataaaaaaactaaatggataacaattattaaaaaaagtagaactaaagcaaatagccatcatttttttaaagtaaaaaataaaaattattttactcatataaagttaaatatttttcctgatggaggagttgcaagattgagaatttatggttatatgaaaactaaaaataaaattagtaataaaattcaaaatctgacatcagttgttaatggggcggtaccaattgcttgtaataatgaacattttggaagagcagaaaatatacttgctccaggcgttggaaaaaatatgggtgatggatgggaaactagaagaagtagaggaaaaaatttgactggataat

SEQ ID NO: 265720 - DNA, 799 bp, Unknown
  Bacterial polypeptide expressing nucleotide sequence isolated from the Sargasso Sea
aatgattaacttagcggatccaagaattggatctaaagtaatatttaagactgacgatttttttgcggctgctcacagaatattaaacatcgaaactccagtttttaaagatggactatttgacaaacacggtaaatggatggatggatgggaaacaaggagaagaagatcaaaaggttttgattatttaattttaaaacttggtaaacctggaaagatatttgatatagacattgacacaacacatttcaatggaaatcagcccacacatgcttcgttagagggttgcttaagtaaaacaaagcctaataagaaaacaaaatggatttctttgctgagcaaaaaaaaacttgggccaagccgaaaccatagcttcaaatcaaacaacaaatctgtttttaattatataagactaaacatttttccggatggtggagttgcaagactaaggctttatggaaaaattgaaatggagaaaaaatttttaaataacaaaactgtcaaccttacatctgttttaaatggcgcttcaattattggttgtaataatgaacatttcggcagggctgaaaatatcatagcacctggtaaaggaaaaaatatgggagatggttgggaaacaagaagaagtagaggaaaaaactttgattggcttataataaaatttggaaaaccaggattaataaaaaaactagagatagatacccatcattttaaaggaaactaccctgatagttgttcaattcaaactgcaagcatttcaaaagatctgtccaataaatcaatgtcaataatcaaa

SEQ ID NO: 265721 - DNA, 820 bp, Unknown
  Bacterial polypeptide expressing nucleotide sequence isolated from the Sargasso Sea
ggatggatgggaaacacgtagaaaaagaaaaaaaggacatgactatttaattttaaaattaggtaggccaggcaaaatacataaagtagatattgacacatcgtattttaatggaaaccaaccaagcaaagtttccttggatgcttgttacagtaaaaagaaactacctaataaaaattcaaaatgggttaatattttaaaaaaaagcactactaaaccaaatagccatcatttttttaaaataaaaaacaaatctatttttacacatgtgaaattaaatatttatcctgatggtggtgttgcaagaattagaatttatggagaaatgataattaataaacagtttaaaaaaaaaataacaaatcttacttccgtattaaatggggcctcaccaatagcttgtaacaatgagcattttggaagagcggaaaatattttagcaccaggaataggtaaaaacatgggagatggttgggaaacaagaagaagtagaggaaaaaattttgactggttaattttaaaatgcgcaactccaggtaaaataaataaaattcaaatcgacactcatcattttaaaggaaattatcctgataaatgttctcttcaggctacttatttaaatgataaaacttcaactaaaaatattgttaatagttcaaaaaattggaagcttttattagataaagtaaaattacacgcgcataaaaaacataattttaaaaataaactaatgaaaaataaaaaagttaattatataaggattaatatttatcctgatggtggtatttcgagaatcagagtttttggaaagtcagaataa

SEQ ID NO: 265722 - DNA, 856 bp, Unknown
  Bacterial polypeptide expressing nucleotide sequence isolated from the Sargasso Sea
taaagaaggagtgtttgataaacatggaaaatggatggatgggtgggaaactagaagaaagagaataaagggatatgattacctaattttaaaatttgggaaacctggtttaataaaaaaagtagatgttgatacatcttatttttctggaaatcatcctaatcaaatttcattacaagcttgtattagtaaaaaaaaaatacctaataaaaaaactaaatggataacaattattaaaaaaagtagaaccaaagcaaatagccatcatttttttaaagtaaaaaataaaaattattttacacatataaaattaaatatttttcctgatggaggagtagcaagattaagaatttttggttctatgaaaactaataataaaactaataataaaattcaaaatttgacgtctgttgttaatggagcggtaccaattgcttgcaataacgaacactttggaagagctgaaaatatacttgctccaggcattggaaaaaatatgggtgatggatgggaaactagaagaagtagaggaaaaaattttgactggataataataaaatgctcatcaccaggaaaaattaataaaattcaattagatactcatcattttaaaggaaattatccagacaaatgttctgtgcaagctgcttatattccaaataaaatttcagaaaaaaacattgttaataaatcaaaaagatggggctatcttcttaataaaattaaactctatgcaaataaaaaacataattttaataataaaataatgaaaaacaaaaaaataaattatattagaattaatattttccccgatggtggaatttctagaataagagcctttggaaaaatagaatga

SEQ ID NO: 265723 - DNA, 734 bp, Unknown
  Bacterial polypeptide expressing nucleotide sequence isolated from the Sargasso Sea
aatgattaacttagcagatccaagaattggatctaaagtaatatttaagactgacgatttttttgcggctgctcacagaatattaaacatcgaaactccagtttttaaagatggactatttgacaaaaatggtaaatggatggatggatgggaaacaaggagaagaagatcaaaaggttttgattatttaattttaaaacttggtaaacctggaaagatatttgatatagacattgacacaacacatttcaatggaaatcagcccacacatgcttcgttagagggttgcttaagtaaaacaaagcctaataagaaaacaaaatggatttctttactgagcaaaaaaaaacttgggccaagccgaaaccatagcttcaaatcaaacaacaaatctgtttttaattacataagactaaacatttttccagatggtggagttgcaagactaaggctttatggaaaaattgaaatggagaaaaactttttaaataataaaactatcaaccttacatctgttttaaatggcgcttcaattattggttgtaataatgaacatttcggcagggctgaaaatatcatagcacctggtaaaggaaaaaatatgggagatggttgggaaactagaagaagtagaggaaaaaactttgattggcttataataaaatttggaaaaccaggattaataaaaaaactagagatagatactcatcattttaaaggaaactaccccgata

SEQ ID NO: 265724 - DNA, 964 bp, Unknown
  Bacterial polypeptide expressing nucleotide sequence isolated from the Sargasso Sea
ctgatagatcttgctcaatctagattgggttcaaaaatagtatttaaaacagatgaattttttgctccagctaaaagaataattaatccatggccagcagtttttaaagaaggtgtttttgataaaaatggcaaatggatggatggatgggaaacaagaagaaaaagaattaaggggcatgattatttaattttaaaacttggacaacctggaaaaatacataagatagatgtagatacatcatatttttctggaaaccatccttcaaaagtttcattggaagcttgttatagtattaaaaatactccagataaaaatacaaaatggtttacaattttaaaaaaatcaaaaactaaagcaaatagtcatcatttttttaacataaaaaataaaactatcttttcacatgttaaattaaatatttttcctgatggaggagttgccagattaagaatttatggctcaatgaatctcaaaaaaaaatttggaaaaaattctataaatcttacatctgttataaatggtgccacaccaattgtctgtaatgatgaacattttggaagagccgaaaatatcttagcacctggaaaaggtaaaaacatgggagatggttgggaaactagaagaagtagaggaaagaactttgattggcttataattaaatgtgcagccccaggaataattaaaaaaatacaaattgatacacatcattttaaaggaaactttcctgataaattttctttgcaagctggttatattaataaaaatatttctagcaaaaacataatcaataaatcaataaaatggaaattcttattaaaaaaaaccaagctatatgcaaatagaaaacataattttcaaaataaattaatgaaaaatgataaaattaattatattaaaattaatatttttcctgatggtggaatttcaagaattagagctttcggtaaggttgaagaatgaa

SEQ ID NO: 265725 - DNA, 932 bp, Unknown
  Bacterial polypeptide expressing nucleotide sequence isolated from the Sargasso Sea
gatgaaaaaagataaaaatatttttttaaatggtttaattgacttagctcaatcacgtttaggatcaagtgttgtatataaaacagatgaattttttgcgcctgctaaaagaattattaacccttggcctccaatttttaaagagggagtttttgataaacatggaaaatggatggatggatgggaaacaagaagaaaaagaaataaaggacatgattatttaattttaaaattaggtaaaccaggtaaaatacataaagtagatatagacacatcctattttaacgggaatcaacccagcaaagtttctcttgatgcttgttatagcaaaacaaaattaccaaataaaaattcgaaatggataagaatattaaaaaaaaaatcaactaaacccaatagccatcatttttttaatataaaaaataaatctattttcactcatgtaaaactgaacatctatcctgatggtggcgttgcaagaattagaatttttggagagatgaagattaataaaaaatttggaaaaaaaataacaaaccttacttctgtactaaatggtgctacaccaatcgcctgtaataacgaacattttggaagagcagaaaatattcttgccccaggtattggaaaaaatatgggtgatggatgggaaactagaagaagtagaggaaaaaattttgattggttaattctaaaatgtgctactgcaggtaaaataaataagattcaaattgatactcaccattttaaaggtaattatcccgacaaatgttctgttcaagcagcatacctaaataaccgagtctcatccaaaagtattgttaaaaattcaaaaaattggaaattgcttttaaacaaagttaaacttcacgctcatagaaaacataattttaataataagctgatgaagaataaaaaaatcaactacataa

SEQ ID NO: 265726 - DNA, 937 bp, Unknown
  Bacterial polypeptide expressing nucleotide sequence isolated from the Sargasso Sea
atgaaaaaaaataatattatttacttaaatggattaattgatttagcccagtcaagacttggttctaaaattgtttataaaactgacgagttttttgcacctgctaaaagaataattaacccttggccacctatatttaaagaaggagtttttgataagcacggaaaatggatggatgggtgggaaactagaagaaaaagaaccaaagggtatgattatcttattttaaagtttggaaaaccaggtgttataaaaaaagtagatgttgatacatcttacttttctggaaatcatcctgatgaaatttcattgcaagcctgtattagtaaaaaaaaaatacctaataaaaaaactaaatggataacaattattaataaaagcaaaactaaagcaaatagccatcacttttttagagtaaaaaataaaaattattttactcatataaagttaaatatttttcctgatggtggagttgcaagattaagagtttatggttctatgaaaactaaaaataaagttaataataaaattcaaaatctgacatctattgtaaatggagctgtaccaattgcttgtaataatgaacattttggaagagcggaaaacatacttgctccaggcgttggaaaaaatatgggtgatggatgggaaacaagaagaagtagaggaaaaaattttgattggataataataaaatgctcatcaccagggaaaataaataaaatccagttagatactcatcattttaaaggaaattatccagataaatgttctttacaagctgcttatataactaaaaaaatctcggaaaaaaatcttgtaaaaaaatcaaataaatggcctcatattctaaataaagcaaaacttcatgcgcataaaaaacataactttaaaaataagataatgaaaaataaaaaaataaattatattagaatta

SEQ ID NO: 265727 - DNA, 1015 bp, Unknown
  Bacterial polypeptide expressing nucleotide sequence isolated from the Sargasso Sea
catggctgttccgcttctcgatcccaacgctcccgacttcacgcggcgctacgtgaacctggccgacccgcgtctcggtgcgcaggcgctcgaagccagcgacgatttcttcgcgccgaaggaccggatgctgaaccccgagccggccgtcttcatccccggcaagtacgacgaccacggcaagtggatggacggctgggaaacgcgccgcaagcgcacgacgggctacgactggtgcatcgtcaagctcgcgcgcccgggcgtgatcaagggcttcgacatcgacacgagccatttcaccggcaatttcccgccggccgcgtcgatcgaggccgcgttcgtggccgacggcgcgccgacgcatgcgaccgagtgggtcgagatcgtgccctcgacgacactgcagggcaacagccatcactacgtcgaagcgagcgatgcgcgagcgtttacccacctgcgcgtgaacatctacccggatggcggcatcgcacgcctgcgcgtgtacggccagccgcagctcgactgggccggcgcgagcgcgaccgagcagttcgacctcgcggcgatggaaaacggcggttatgtggtggccgcgaacaaccagcacttcggcgtcgcgtcgaacctgctgctgccgggccgcggtgtgaacatgggcgacggctgggaaacccgccgccgccgcgaaccgggcaacgactgggcgatcatcgcgctcgcgcagccgggcgtgatccgcaagatcgaagtcgataccgcgttcttcaagggcaactacccggaccgctgttcgatccaggccgcgtacgtgtcgggcggcacggacagctcgctgatcacgcagtcgatgttctggccggtgctgctcggcgaacagaagctgcagatggacaagcagcactacttcgaacaggatatcgcgtcgctcggccccgtcacgcacgtgcggctgaacatcattccggacggcggcgtgtcgcgcctgcgcctgtgggggacgctcgacaaatga

SEQ ID NO: 265728 - DNA, 961 bp, Unknown
  Bacterial polypeptide expressing nucleotide sequence isolated from the Sargasso Sea
ttgattgatttagctcagtcaagactgggttctaaaattgtttataaaactgacgagttttttgcacctgctaaaagaataattaatccttggccacctatatttaaagaaggagtttttgataaacacggcaaatggatggacggatgggaaactagaagaaaaagaacaaaaggatatgattatcttattttaaagtttggaaaaccaggtgttataaaaaaagtagatgttgatacatcttacttttctggaaatcaccctgatcaaatttcattacaagcttgtattagtaaaaaaaaattacctgataaaaaaactaaatggataactattattaaaaaaagtagaactagagcaaatagtcatcatttttttaaagtaaaaaataaaaattactttactcatataaagttaaatatttttcctgatggaggagttgcaagattaagagtttatggttctatgaaaactaaaaataaaattaataataaaattcaaaatttgacatctgtcgtaaatggagcagtgcccatcgcttgcaataacgaacattttggaagagcagaaaatatacttgctcctggtattggaagaaatatgggtgatggatgggaaactagaagaagcagaggaaagaatttcgactggataatagtaaaatgttcatcaccaggtaaaattaataaaattcaattagatactcatcattttaaaggaaattatccagacaaatgttcagtgcaagcagcttatattcctaataaaatttcagaaaaaaacattgttaataaatcaaaaagatgggcctatcttcttaacaaaattaaactctatgcacataaaaaacataactttaataataaaataatgaaaaataaaaaaataaattatattagaattaatattttccctgatggtggaatttctagaataagagcctttggaaaagctgaatgac

SEQ ID NO: 265729 - DNA, 1009 bp, Unknown
  Bacterial polypeptide expressing nucleotide sequence isolated from the Sargasso Sea
catggcagcccccatcctcgatccgaatgcgcctgcctttacgcggcgttacatgaacctcgccgacccgcgcctcggggcgcaggcgctctttgccagcgatgaattcttcgcgccgaaagagcgcatgctgaatcccgagccggccgtattcatccccggcaagtacgacgaccacggcaagtggatggacggctgggaaacacgccgcaagcgcacgaccggccacgacttctgcgtggtgcggctcgcgcggccgggcgtgatccacggcgtcgacctcgatacgagccacttcaccggcaacttcccgccggccgcgtcgatcgacgcatgcgtcgccgaaggcgacctgccgcctgacgacacgcaatggcgcccgatcgtcccggcgacgacgctgcagggcaattcgcatcactacgtgagcgtcgacgatgcgcagccctatacgcacctgcgcgtgaacctgtacccggacggcggcctcgcacggctgcgcgtgtacggccagccgcagcgcgactggcgccaggtgccggccggcgagctcgtcgatctcgcggcgatcgagaacggcggttacctggtggccgcgaacaaccagcacttcggcccggcatcgcagatgctgatgccggggcgcggcgtgaacatgggcgacggctgggaaacgcggcggcgccgcgagcccggcaacgactgggcgatcgtcgcgctcgcgcggccgggcatcatccggcgcgtcgaggtcgataccgcgttcttcaagggcaatttccccgaccgctgctcgctgcaggccgcgcgggtcgagggcggcaccgacgattcgctcgtcacgcaggcgatgttctgggccgaactgctcggcgagcagaagctgcagatggaccacgtccacacgttcgaccagcttgccgcgctcggccccgtcacgcacgtgcgtttcaacatcttcccggacggtggcgtgtcgcgcctgcgtctgtggggcgagccggcttga

SEQ ID NO: 265730 - DNA, 886 bp, Unknown
  Bacterial polypeptide expressing nucleotide sequence isolated from the Sargasso Sea
gatgattaatttagctgagccaaaacttggttcaaaagtaatttttaaaactgatgacttttttgcatctgctaatagaataattaatccgaacccaccggtctttaaagaaggaatttttgacaaacatggaaaatggatggatggatgggaaacaagaagaagaagaagaaaaggttatgattatttaataataaaacttgggagaccaggtaaaatttttaacgttgacattgatacatctcatttcaatggtaaccaaccaacttatgcttcgctagaagcttgtcattctaataaaaagctaaacatcaaaacaaagtggattaaaatattaaataaaaaaaaacttaagccaaacaagaatcataattttaaaattaaaaataaatctattttcactcacattaaattaaatatttttcctgatggcggagtcgcgaggcttagagtttatggagaagttgaaattaaaaaaattaattttggaaataaattaattaatcttacttctgtgttaaacggagcttcgattgtaggttgtaataatgaacattttggaaaagcagaaaatgttttagcaccaggtaaaggtaaaaatatgggagatggatgggaaacaagaagaagtagaggaaaaaatttcgactggcttgtaataaaattaggaagaacaggaattattaataaaattgaaattgatactcaccactttaaaggaaactacccagatcagtgttcagtacaagcaacttatattcctaaaaaaacatcaaattatacagtagtaaaaaaatctaataaatggagatctctcttaaacaaggctcaacttaatgctaataaaaagcatagttttaaaaataaaacaatgaaaaaaaatata

SEQ ID NO: 265731 - DNA, 904 bp, Unknown
  Bacterial polypeptide expressing nucleotide sequence isolated from the Sargasso Sea
aatgattaatttagcagatccaagaattggatctaaaattatatttaagactgacgatttttttgctgctgctcatagaatattaaacatggatcctccagtttttaaagatggattatttgacaaacatggtaaatggatggatggttgggaaacaaggagaagaagatcaaaaggttttgattatttaattttaaaacttggtaaacctggaaagatatttgatatagacattgatacaacacacttcaatggaaaccaacccacccatgcctcgttagagggttgctttagtaaaactaaacctaacaagaaaacgaaatggatttctttattgagcaaaaaaaaacttgggccaagtagaaatcatagcttcaaatcaaaaaaaaaatcagtgtttaattatataagactaaatatttttccagatggtggagttgcaagactaaggctttatggaaaaattgaaatggaaaaaaactctttaagtaataaaactatcaaccttacttctgttttaaacggtgcttcaattattggttgtaataatgaacattttggcagagctgaaaatatcatagcacctggtaaaggaaaaaatatgggagatggttgggaaacaaggagaagtagaggaaaaaactttgattggcttataataaaatttggaaaaccaggattaataaaaaaattagagatagatacgcatcattttaaaggaaactatcccgatagttgttcaattcaaactgcaattattactaaggatctgtctaataaattaatagtcgataactcaaaaaattggaagtttattttaaataagtcaaaactatcagctcacaaaaaacatatttttaaaaaattcttaattaaaagaagtaaggaaaatatcttagaataa

SEQ ID NO: 265732 - DNA, 682 bp, Unknown
  Bacterial polypeptide expressing nucleotide sequence isolated from the Sargasso Sea
atgattaatttggcagagccaagacttggttcaaaagtaatttataaaactgatgatttttttgcatctgcaaaaagaattattaaaccagatccacctgttttcaaagaaggactttttgattcacatggcaaatggatggatggatgggaaacaagaagaagaagaagaaaagggtttgattatttaattataaaacttggaaaaccgggaaaaatttttaatgttgatattgatacatctcattttaatggtaaccagccaactcatgcttccttggaggcttgctacacaaataaaaaaccaaataaaaaaacaagatggattaaaattctaaataacaaaaaacttggaccaaataaaaatcataattttaaaattaaaaataaattagtttttaattatgttaagttaaatatttttcctgacggaggtgtggcaagacttagagtttacggagaagttgaaattaataaatttaattttggaaataaattaattaatctcacttcagttttaaatggagcatctatagtaggttgtaataatgaacattttggtagagctgaaaatgttttagcaccaggtaaaggtaaaaatatgggtgatggatgggaaacaagaagaagcagaggaaaaaactttgattggcttataattaaattaggacgtacaggtacaa

SEQ ID NO: 265733 - DNA, 994 bp, Unknown
  Bacterial polypeptide expressing nucleotide sequence isolated from the Sargasso Sea
tatgaaaaaaaaaaatattatttatcaaaatggtttggttgacttagcacaagcaagacttggttctaaaattgtttataaaactgatgagttttttgcacctgctaaaagaattattaatccctggccacctgtattcaaagaaggtgtatttgataaacacggcaaatggatggatggatgggaaacaagaagaaaaagatcaaaaggtcacgactttttaattttaaaacttggaaagccaggtataattaaaaaagttgatgtagatacttcttacttctcaggaaatcaccctgataaagtttctctacaagcttgttttagtaataaaataatacctcataaaaaaacaaaatggattacaataattaaaaaaagccccacaaaagctaattctcatcatttttttaatgtaaaaaataaaaattttttcacacatataaaattgaatatttttcctgatgggggtgttgcaagaatacgtgtatatggattaatgaaaattaaaaaaaaatttggaaaaaaaatacataacttaacttctgttacaaatggagcaataccaattgcttgtaataatgaacattttggaagagcagaaaatattcttgctccaggaattggtaaaaatatgggagatggctgggaaacaagaagaagtagaggtaaaaattttgattggattataattaaatgtgctgcaccaggaaaaattaaaaagattcaaattgacacccatcatttcaaaggaaactttcctgataaatgctctatccaagcagcaaacataaataaaaaaatttccggaaaaaatattgttaaaaattctaaaaattggaatttaattctaaataaatcaaaactttatgctcacaaaaaacataactttatcaataaattgatgaaaaatagaaaagtaaactatataagaattaatattttcccagacggaggaatatctagagtaagagcatttggaaaagtagaatga

SEQ ID NO: 265734 - DNA, 964 bp, Unknown
  Bacterial polypeptide expressing nucleotide sequence isolated from the Sargasso Sea
aatgattaacttagcggatccaagaattggatctaaagtaatatttaagactgacgatttttttgcggctgctcacagaatattaaacatagaaactccagtttttaaagatgggctatttgacaaacatggtaaatggatggatggatgggaaacaaggagaagaagatcaaaaggttttgattatttaattttaaaacttggtaaacctggaaagatatttgatatagacattgacacaacacatttcaatggaaatcagcccacacatgcttctttagagggttgcttaagtaaaacaaagcctaataagaaaacaaaatggatttctttactgaggaaaaaaaaacttgggccaagccgaaaccatagcttcaaatcaaacaacaaatctgtttttaattatgtaagactaaacatttttccagatggtggagttgcaagactaaggctttatggaaaaattgaaattgagaaaaactttttaaataacaaaactatcaaccttacatctgttttaaatggcgcttcaattattggttgtaataatgaacatttcggcagggctgaaaatatcatagcacctggtaaaggaaaaaatatgggagatggttgggaaacaagaagaagtagaggaaaaaactttgattggcttataataaaatttggaaaaccaggattaataaaaaaactagagatagatacccatcattttaaaggaaactaccccgatagttgttcaattcaaactgcaagcatttcaaaagatctgtccaataaatcaattgtcaataattcaaaaaattggaagtttattttaaataagtcaaaactgtcagctcacaagaaacatatttttaaaaaattcttaattaagagaagtaaggaaaattatcttaaaataaatatctatccagacggtggaatttcaagaataagggcatttggaaattttgtgagatga

SEQ ID NO: 265735 - DNA, 886 bp, Unknown
  Bacterial polypeptide expressing nucleotide sequence isolated from the Sargasso Sea
aagaataattaacccttggcctgctgtgtttaaagagggagtgtttgataaacatggtaagtggatggatggatgggaaacaagaagaaaaagaacaaaaggatatgattatctaattttaaagttcggaaaaccgggcattataaaaaaagtagatatcgatacatcttacttttctggcaatcatcctgatcaaatttcgctacaagcttgtataagtaaaaaaaaaatacctgataaaaaaactaaatggataacaatcattaaaaaaagtagaactaaagcaaatagccatcatttttttaaggttaaaaataaaaattattttacccatataaaattgaatatttttcctgatggaggagttgcaagattaagagtttatggttctatgaaaattaaaaataaaattaataataaagttcaaaatttgacatctgttgtaaatggagcagtacccattgcttgtaataatgaacattttggaagagcagaaaatatacttgctcctggtgttggaaaaaatatgggtgatggttgggaaactagaagaagtagaggaaaaaactttgattggataataataaaatgttcttcaccaggtaagattaataaaattcaattagatactcatcattttaaaggaaattatccagacaaatgttcggtgcaagcagcttatattccttataaaatttcagaaaaaaatattgttaacaaatcaaaaaaatgggcctatcttcttaacaaaattaaactccatgcacataaaaaacataactttaataataaaataatgaaaaataaaaaaataaattatattagaattaatattttcccagatggtgggatttctagaataagagcatttggaaaagcagaatga

SEQ ID NO: 265736 - DNA, 1015 bp, Unknown
  Bacterial polypeptide expressing nucleotide sequence isolated from the Sargasso Sea
atggcactcccgattctcgatcccaacgcaccggaattcacgcgccgctatgtgaatctggcggacccgcgtctgggcgcgcaggcccttgaggccagcgacgatttcttcgcaccgaaggaacgtatgctgaatccggagccggccgtcttcattccgggcaagtacgacgacaacggcaagtggatggacggctgggaaacgcgccgcaagcgcgccaacggttacgactggtgcgtggtcaagctcgcccgccccggcgtgatcaagggtctcgacctcgacaccagccacttcacgggcaacttcccgccggcggcttcggttgaggcggcgcgagtcgtggacggcgtgccgaaccagtcgacgcaatggaccgaaatcgtcccgtcgaccacgctgcaaggcaacagccatcactatcacgaagtcagcgacacgaacgcttacacgcacctgcgcgtgaacatttacccggacggcggcattgcgcgtctgcgagtgtatggccaaccgcaagtcgactgggcgggcgcaagccgcacggagcagttcgatctcgcagcgatggaaaacggcgcgtatctggtcgcggcgaataaccagcacttcggcgctgcatcgacgattctgatgccgggccgtggcgtgaacatgggtgacggctgggaaacgcgccgtcgccgcgagccgggcaacgactgggcgatcgtcgcactggcacaaccgggcgtgatcaaaaagatcgaagtcgatacggctcacttcaagggcaactttccggaccgttgctcgatccaggctgcgtatgtgaccggcggcacggatagctcgctgattacgcaagccatgttctggccggtgctgctgggcgaacagaagctgaagatggacaaccagcactatttcgaaagcgaaatcgccgcattgggtccggttacgcacgtgcgtttcaacatcattccggacggcggcgtctcgcgtctgcgtctgtggggcacgctcgcatcatgaa

SEQ ID NO: 265737 - DNA, 898 bp, Unknown
  Bacterial polypeptide expressing nucleotide sequence isolated from the Sargasso Sea
gcagctgctaaaagaataattaatccttggccacctgtatttaaagaaggcgtgtttgacaagcatggcaaatggatggatggatgggaaactagaagaaagagaacaaaaggatacgattatcttattttaaagtttggaaaaccaggtgttataaaaaaagtagatgttgatacatcttacttttctggcaatcatcctgcagaaatttcattacaagcatgtattagtaaaaaaaaaatacctgataaaaaaactaaatggataacaattattaaaaaaagtaaaactaaagcaaatagccatcatttttttagagtaaaaaataaaaattattttactcatataaagttaaatatttttccagatggaggagtggcaagattaagagtttatggatctatgaaaactaaaaataaaattaataataaaattcaaaatctgacatctattgtaaatggagctgtaccaattgcttgtaataatgagcattttggaagagcagaaaacatacttgctccaggcgttggaaaaaatatgggtgatggatgggaaacaaggagaagtagaggaaaaaattttgattggataattattaaatgttcttcacctggaaaattaaataaaatccagttagatactcatcattttaaaggaaactatccagataaatgttctttacaagccgcatatattcctaaaaaaatctcagaaaaaaatattgtaaaaaaatcaaataaatggcctcatattctaaataaagtaaaacttcatgctcacaaaaaacataactttaaaaataagataatgaaaaataaaaaaataaattatattagaattaatatttttccagacggtggaatttcaagaattagagcttttggcaaacctgaatgac

SEQ ID NO: 265738 - DNA, 994 bp, Unknown
  Bacterial polypeptide expressing nucleotide sequence isolated from the Sargasso Sea
atgaaaaaaaataatataatttacttaaatggactaatagatttagctcaagctagattgggttcaaaaatagtttataaaacagatgagttttttgctcctgctaaaagaataattaatccttggccaccaatatataaagaaggagtttttgataatcatggaaaatggatggatggatgggaaactagaagaaagagaacaaaaggatatgactatttaatattgaaacttggcaaacctggtttaataaaaaaagttgatgtcgatacttcatacttttcaggaaatcatcctgaaaaaatatctttacaggcttgtattagtaaaaaaaatataccagataagaaaactaaatggactacaattattaaaaaaaattctaccaaagcaaatagtcatcacttttttaatataaaaaataaaaattatttcactcatattaaattaaatatttttcctgatggaggagtagcaagattaagagtttatggattgatgaaaattaaaaataaattccaaaaaaaaattcagaatcttacatcagttttaactggtgcagtacctattgcttgtaacaatgaacatttcggaagagcagaaaatatacttgcaccagaaattggaaaaaatatgggagacggttgggaaacaagacgaagtagaggaaaaaattttgattggataatagtaaaatgttcatcaccaggaaaattaaataaaatccaattagacacgcatcattttaaaggaaactatcctgacaaattttctgtgcaagcagcttatattcctaaaactctttcagcaaaagatatagtaaaaaaatcaagcaaatggtcttatattctaaataaatcaaagctatatgctcataaaaaacataattttcaaaacaagataatgaaaaataaaaaaataaattatattaaaataaatatattccctgacggtggaatttcaagaattagagctttcggtacaccagaatgac

SEQ ID NO: 265739 - DNA, 964 bp, Unknown
  Bacterial polypeptide expressing nucleotide sequence isolated from the Sargasso Sea
atgataaatttggcagatcccagaattggaactaaaattatatataagacagatgaattttttgcagctgctcacagaattttaaaaactaatcctcctctctttaaagatggattatttgacaatcatggtaaatggatggatggatgggaaacaaggagaagaaggtcaaaaggttttgattatttaattttaaaaattggtaaacctggaaagatatttaatatagacattgacacaacacacttcaatggtaaccaaccaactcatgcatcgttggagggatgctttagtaaaacaaaacctaataagaaaacaaaatggactcaattactaggtaaaaaaaaacttggaccaagtagaaaccatagcttcaaatcaaaaaataaatctgtttttaattatataaaactaaatatttttccagatggtggggttgctagactaagactttatggaaaaattgagatggaaaaaaaccttttaaataagaaaaatattaatctaacatctattttaaatggtgcttcaattattggttgtaataatgaacagtttggcagagctgaaaatatcatagcccctggtaaaggaaaaaatatgggagatggctgggaaacaaggagaagtagaggaaaaaactttgattgggttataattaaatttggaaaaccaggtataatcaagaaattagaaatagatacacaccattttaaaggaaactaccctgatacttgttcaattcaaactgcaaatattaaaaaagatctatctaataaatcaattgtaaataattcaagaaattggaaatccattttaaataattgcaaactatctgctcacaaaaaacatatttttaataaattcttaattaagagaagtaaggaaaattatcttagaataaatatctatccagatggtggaatttcaagaataagagcatttggaaattttgtgaaatgaa

SEQ ID NO: 265740 - DNA, 994 bp, Unknown
  Bacterial polypeptide expressing nucleotide sequence isolated from the Sargasso Sea
atgaaaaaaaataaaattatttacctaaatggattgattgatttggcacaatccaggattggttctagaatagtttataaaacagatgaattttttgcacctgctaaaagaataataaatccttggccacctatatataaagaaggcgtttttgataagcatggaaaatggatggatggatgggaaacaagaagaaagagaataaaaggttatgattttttaattttaaagtttggaaaacctggattaataaaaaaaattgatgttgatacctcatatttttctggcaatcatcctaatcaaatttctttgcaagcttgtaaaagtaaaaaaaataaaccagatataaaaacaaaatggataacaattataaaaaaaagcaaaactaaagctaatagtcaccatttttttaatataaaaaataaaaattattttacacatattaagttaaatatttttcctgatggtggtgtagctagattaagagtttttggatcaataaaaattaaaaacaaaactcaaaataaaattcaaaacctcacatcaattataaatggagcagtaccaattgcatgtaataatgaacactttggaagagcagaaaatatacttgctccaggaataggaaaaaatatgggtgatggttgggaaacgagaagaagcagaggaaacaatttcgattggataattattaaatgttcttcaccaggaaaaataaataaaatccaagtggatactcatcattttaagggtaactatccggataagtgttctttacaagctgcatatattcctacaaaaatttcaggaaataatattgtaaaaaaatcaaataaatggcctcatattctaaataaagtaaaactttatgcacacaaaaaacataactttaaaaataagataatgaaaaataaaataataaactatattagaattaatatctttcctgatggtggaatttcaagaattagagcttttggtaaacctgaatgac

SEQ ID NO: 265741 - DNA, 502 bp, Unknown
  Bacterial polypeptide expressing nucleotide sequence isolated from the Sargasso Sea
cattgaattccttgcccagtcgctgtttaagcatcgccaggctgaacgcgtcatcgcggttgaactgccgaaacatcgctcctgtatgcacctcgataccgtcatgacccacattgatatcgataccttctccgtctacccggaagtggtacgcccggatgtccagtgctggaccctgacgccagacgggcgcggcggcttgaaacgcacccaggaaagtactctggtacatgccctcgaaaaagcgctgggcctcgaccaaatcacgctgataaccaccggaggcgacgccttcgaagctgaacgcgaacagtggaatgacgccaacaacgtcctgacgctacgccccggtgtggtcgtgggctacgagcgcaacatctggaccaacgagaaatacgacaaagcaggcatcaccgttttacccattcctggcgacgaacttggacgtggacgcggcggcgcacgctgcatgagctgcccactggaacgcgacggtatttaa

SEQ ID NO: 265742 - DNA, 1222 bp, Unknown
  Bacterial polypeptide expressing nucleotide sequence isolated from the Sargasso Sea
atgagcaaattttatgtaggttctgaagttggccaattgcgccgtgtcatgttgcaccgccccaacctcagtctgaagcgtctgactccttccaactgccaggatctgctgtttgatgacgtcctgtcggttgaacgtgccggtcaggagcacgacaaattcgctcaggtactgcgcgatcagaatgtcgaagttttcctgctgaccaatctgctggccgaaaccctggacgtgccggaagccaaaacctggctgctgcaacatcaggtctccgactatcgcctcggcacctcctttgccaacgacgtgcgctgcttcctggcagacatgccgcaccgtgaactggcccgcattctttccggcggcctgacctactccgagatgccctacagcggcgtcaacatggtagtcggcatgcacgccccgaccgacttcatcatcgagccgctgcccaaccacctctttacccgtgacacctcctgctgggtctatggtggcgtttccatcaaccccatggccaaggccgcccgtcgtcgcgagaccaaccacgtgaaggccatctaccgctggcacccgcagttcgccggtcaggacttcatcaaatacttcggtgatgaagatcgcgactacgacaactccaccatcgagggcggtgacgtgctggtcatcggccgcggttccgtgctcatcggcatgtccgagcgcaccacaccgcaaggggtcgaacacctggctcgcggcctgttcaagcacggccaggccaaacaggtcatcgccatgcaactgccgaaacaccgcagctgcatgcacctcgataccgtcatgacccacatggacatagacaccttctccgtttatccggaagtcatccgcaaggatgtgaactgctggagcctgactccgggcggcgccaccggcatgaacatcaaggaagagggttacttcgtcaccgccatcgagaaggcactgggtgtcgatcagctcaagctcatcaccacaggtggtgacaccttcgaggccgagcgcgagcagtggaacgatgccaacaacgtgctgaccgtgcgccccggcgtggtggtgggttacgagcgcaatacctacaccaacgagaagtacgacaaggcaggcatcacagtgctgcccatcccgggtgaagagctgggacgtggtcgcggcggcgcccgctgcatgagctgcccgatggaacgcgacggcatctaac

SEQ ID NO: 265743 - DNA, 490 bp, Unknown
  Bacterial polypeptide expressing nucleotide sequence isolated from the Sargasso Sea
gttcgccaagggtgcagccgagcgggtggtggtcgctggcctgggtcgttcccgcgcggccatgcacctggacaccgtgttcagtttctgcgaccgcgacctggtgaccatctttccggaagtggccaacagcatcgtgcccttcattctgcgtccggacgagagccgcccaggcggcatcgacgtacgccgcgaggacaaacccttcgtcgatgtggtcgctgaatccctcaacctgaaaaaactgcgtgtggtggaaaccggcggcgacgcctacgaggccgaacgcgagcagtgggacgacggcaacaacgtggtctgcctggagccgggcgtggtcatcggctacgaccgcaacacctacaccaacaccctgctgcgcaaggccggcgtcgaggtcatcaccatcagcgccagcgaactgggacgcggccgtggcggcggccactgcatgacctgcccgatcatccgcgaccccatcgattactga

SEQ ID NO: 265744 - DNA, 801 bp, Unknown
  Bacterial polypeptide expressing nucleotide sequence isolated from the Sargasso Sea
aagtttcatcctgccgccgctgcccaatacccagttcacccgcgacaccacctgctggatctacggcggcgtgacgctcaacccgatgtactggccggcgcgacgccaggaaaccctgctgaccagcgccatctataaattccaccctgagttcaccaacgcggacttccagatctggtacggcgaccccgaccaggaacatggcgccgcgacgctggaaggcggcgacgtgatgccgattggcaatggcgtggtgttgatcggcatgggtgagcgctcctcccaccaggccatcggccaactggcgcgcaacctgttccagaacaaagccgtggaacgcgtcatcgttgccggcctgcccaaatcccgcgccgcgatgcacctggacaccgtgttcagcttctgcgaccgcgacctggtcaccgtcttccccgaagtggtcaaccagatcgtgccgttcaccctgcgccctgacgagagcaagccccacggcatcgacatccagcgcgagaaaaccaacttcctcgaaaccgtggccgcagcgctcaacctcaaggcgctacgtgtcgtcgagaccggcggcaacagcttcgccgccgaacgcgagcaatgggatgacggcaacaacgtggtggccgtggaaccgggtgtggtgattggctacgaccgcaacacctacaccaacaccctgctgcgcaaggccggtgtggaagtgatcaccatcagcgccggtgaactcggccgtggccgtggcggcggccactgcatgacctgcccgatcatccgcgaccctatcgacta

SEQ ID NO: 265745 - DNA, 585 bp, Unknown
  Bacterial polypeptide expressing nucleotide sequence isolated from the Sargasso Sea
tcggcggcggtcacgaagtggcgttcggtagctggtcgggtctggccgagtacctgagtggcaaccctgcgccgaagattggcatcgtcaatttcgacgcccatttcgacctgcgcgacccggcccatgtgcattcctccggcacgcccttcgcgcagatcgccgagcagtgcgctgcacgcggctggccgttccgctatgcctgcctcggcgtcagccgcgccagcaacacccgcgcgctgttcgcccgcgccgccgagctgaacgtgctggtgcgtgaggatcaccagattcgcgagtcgacactcgatgccatcggtgctgagctggacgccttcgtcgccgagtgcgacgcgctctacctgaccatcgacatcgacgtgctgccggcctgcgaagcgccaggcgtcagcgcgccagccgcccgtggcgtgcgcctggagctgctggagccgctgctcgaacggctcaaggccagcggcaagctgcgcctggccgacctggccgagctcaaccccgaatacgacatcgacaaccgcaccgccaaggtggctgcgcggcttattcatctgctcagcctctgag

SEQ ID NO: 265746 - DNA, 709 bp, Unknown
  Bacterial polypeptide expressing nucleotide sequence isolated from the Sargasso Sea
atggctgcctggagcggtcgtaccgacccggaaaccgacagcgcgcgctggcaccagcgcatccgcgcactcgccgaagacagccagccgggcctggccctgctggggttcgcctgcgacgagggcgtgcgccgtaaccatggccgcgtcggtgctgccgctgcgccgcaaagcgtacgcaaggcgctggccaacctggcctggcatcgtcaggcgccggcctatgacgccggtgacgtgacctgcgaggacggcgacctggaagcggcgcaggcgcgccttggccataacgtctgcgcgctgctggacgccggccatctgccgctggtgatcggtggtgggcatgaagtcgccttcggtagctggtcgggtctggccgagcacatgagcggccaagccaccccacgcatcggcatcatcaatttcgacgcccatttcgacctgcgcgacccggcccatgtgcattcctccggcacgcccttcgcacagatcgccgagcagtgtgccgcacgcggctggccgttccgctacgcctgcctgggcgtcagccgcgccagcaacacccgcgcgctgttcgcccgcgccgccgagctggacgtgctggtgcgcgaggatcaccagattcgcgagtcgaccctctatgccatcggtgccgagctggacgccttcgccgccgagtgcgacgcgctctacctgaccatcgatatcg

SEQ ID NO: 265747 - DNA, 604 bp, Unknown
  Bacterial polypeptide expressing nucleotide sequence isolated from the Sargasso Sea
atgtcggtctggcaggggcgccaggatccggaagatggcgagctggccctgcgctggcacgacaaggtgcaaccctggccacaagcaggccgcaccgccccgggcgtagccctggtgggttttgcctgtgacgagggggtgcgccgcaacaaggggcgggtcggggccgccggtgcgccgctggcggtgcgcaagctgctggccaacagcgcctggcatctgggtcggcccgtctatgactgcggtgacgtgaactgcgaggatggcgatctcgatgccgcccatggccgtctggccgaacgggtggcccgcttgctggacgaggggcacttcccgctggtattgggcggtggccacgaggtggccttcggcagctggagcggcctcaacctgcatctggctggtcgtggccgggtcggcatcatcaacttcgacgcccactttgacctgcgcatgaagctggagcaggcgagctccggcacccccttcttccagattgccgagcagtgcgccgcccagggcacaccgtttacctacgcctgcctcggggtggccgagaccgccaatacccaggcgctgttcgcgcgcgccgaggcgctgggag

SEQ ID NO: 265748 - DNA, 943 bp, Unknown
  Bacterial polypeptide expressing nucleotide sequence isolated from the Sargasso Sea
catgactcactggcaacctgcttcacctgcgctatggcagggacgtgatgaccgggccgaatcgccgaatgcgctgcgcctgtttcagactatcacccagagcccgacgtttagcccagaaatgtatcgcgagcagatagcgttgctcgggtttgcttgcgacgaaggtgttaaacgtaatcaggggcgcacgggagctgccggagcgcccgatgtgctgcgcaaggcgctggcgaatttagccagccacgatgggcatcatcgactggtggatctgggcaatattgtggcgcaggcccccgatcttgagggcgcgcagcaggcgctacgcaatgcagtacagcgttgccagcaggaaaatatgcgcacctttgttctggggggcggacacgaaaccgcatatgcccatggcgcaggtgtgctggacgcgttcccgcaggcgaaagtggggatagtcaacttcgatgcgcatctcgatttgcgccatgccgggcaggctacatccggtacgccgtttcgccagctggcgcagctttgcgatgaacaacagcgtgaatttcactatgcctgtatcggcgtcagccgggcggcaaacacccaggcgctttgggatgaggcccagcggctcggtgtgaccgtagtggaggatctgcattgtgatacggcgcaggcgcagttagcgcagttcattgccaatctggatgtcatctatctgacaatcgacctcgacgtgctgccggtgtgggaaatgcccggtgtgtcggcccccgccgcgcttggcgtaccgttggcgacgctgctgagactgattgagcctctgtgtcgtagcggtaaactacaggcggtggatatggttgaatttaatccacgctttgacgatgatggcagggcggcgcgggttgcggcgcgattaggctggcaaatcgcccactggtggcactga

SEQ ID NO: 265749 - DNA, 1000 bp, Unknown
  Bacterial polypeptide expressing nucleotide sequence isolated from the Sargasso Sea
catgagagttccattcgacgacaaggtgtggatcggccgttccgacgacggtgagcctggcgacacccggcgtattttcaatcaggtggtggcgtttggcggcgcgccggcgcatgaagttaagcttcacggcgcactgcaagttgaaaacgatgcgccggtgattatcggttttggctccgacgaaggcgtgcggcgcaatcagggacgtaccggcgcggcacatgcgccgaaggaattgcgccgggtgctggccggcctgccggcgaagacctcgatggcgacgcttgccgatgcgggcgatgtgatctgcgacgacggcgacctcgaaggcgcgcaggcggaactcgcgagcgcgataagcgacgtgctcgcggccggcgcccggcctttggtgttcggcggcggtcatgaggttgcgtgggggacgtatagcggtttgcgcctgcatcaggatcgcgtggccgctgcgtcggtcacttcggcggcaacccgcaagctgcttatcatcaacttcgatgcgcacttcgatctgcgccagaagcggcccgccaattcgggcacgccgttcgatcagatcgcgaacgattgcgccgagcgcggcgtgccattcaactacgcgtgcttcggtatcagcgatctgggcaataccgcttcgctgtttgcccatgcagaagaacttggcgtgcactacgtgctcgacagcgacatgcaggaaccgcaattgccgcagcgtctgcatgagctccagcagttgctggatgcagcggacgatgtctatctgacaatcgaccttgacgtgctcccggccgccaccgcgccaggggtgtcggcaccggccgcgttaggcgtgccgctgtcggtagtcgaagcgatggtgctgcgcgtgcgtacgtcgggcaagctgcgcgcggcggatatcgcggaatacaacccgtcgctcgatcaggacaagcgcacggcgagggcggcggcacgattggcgtatcggttgctttaa

SEQ ID NO: 265750 - DNA, 970 bp, Unknown
  Bacterial polypeptide expressing nucleotide sequence isolated from the Sargasso Sea
atgtttaagtggcaaggcagaatagacagtgaagacggtgttgagggcctacgttggcatcaaaaagttaacgaacttgaagtgggcgaagataattcattagccaacgccgttacccttgttggttttgagagtgatttaggtgtggcatttaacaaaggccgcgtaggtgcagctgctggtccaaacgctattcgccaggcacttgcaaacttgccttggcactggccaaacgcatcattagccgatttagggaatgttaccgctaaagagaacttagcccaggcacaaacccaatatgccgacgccatttgttatgcgctcaagcaaaatgatggattggtcatcgggctgggagggggacatgaaattgcatggggtagctatcaaggggttttcaatgctaagcccgaaagcgcccgcattggtattattaatttcgacgcccattttgatttaagaaagccttcaccaaacaccagttcaggtacgccgttcaggcaagtgtatgatcactgccagttacacgatacaccgtttcattatgcttgtttgggcgtatcgaaagcggctaatacaccagcgctgtttaactttgccaatacgtccaacacgcgctatttaaccgatgtggcgttaaatgatgaatcactgtgtatgcagcgaatagatgagctactatctccgatgctaaaagacatcgatgagctttacgtcactgtatgtttagatgcatttccagcagcacaagcacctggcgttagcgcgcccagtgcgttggggatttcccccacacttgttattaacacactgcactttttagctcagcaccaaaatacttatgggtatcaatggagactgtgtgacgttgcggaaatgaaccccaattatgatattgatagccgcacagcaaagctggctgcacggctaatttttgaagcagtagatgcaataagctcgcacacttaac

SEQ ID NO: 265751 - DNA, 979 bp, Unknown
  Bacterial polypeptide expressing nucleotide sequence isolated from the Sargasso Sea
catgctcgcccaagccgaaccgaacgtctggcgaggccgcgtcgatgcggaggaaggccccctgggccagcgttggcaccagacggtgcgccgtatcgatgcatcgacgccgctggccaacaccgtcgccctggcgggttttgcctgcgatgcgggtgtcgcgcgcaatcacgggcgaaccggtgcccaggtgggccccgctgccatccgcaagatgctcgcgaacttgcccgcgcgtgccggccgtgtggtcgtcgacgcgggcgacgtaacttgccagggcgatgcgctggaagacgcgcagagcgagttgtccggcgtgctgcacgatctgctcgaccgcggcgcatttccgatcgcgctcggcggcgggcacgagatcgcatgggcctcgtttggcggcttggcgcggcacctggcggcaaaatccgaccagccgccgcgtatcggcattctcaacctggacgcgcatttcgatttgcgcgccggcgagcgcggcagctcgggcacgcccttccgccagatcgccgaagactgcgcgcggcgaggctggccgttccactacgcctgcctcggcgtgagcacttacgccaacaccgaagcgctgttcgcgcgtgcgcgccagctcggcgtgcgctggatgcacgacgacgagatggacgtcacgcagctggcgcacgtgctgaaggtggtcgaggtgttcctgagtcaggtcgaccacgtttatctgacgatgtgccttgacgtgctgccggccgcggtggccccgggcgtgagcgcgccgtcggcacgcggcgtggggatggacctgatcgagcccatcgtcgatcgcgtggtcagctcaggcaagctgcggctggcggacgtggcggaactgaacccgtcgctcgacattgatcaccacacggcacgtgttgctgcccgcctcgtggcgcgcgtggcagacggcattggcctgcagggagccgcacatgactga

SEQ ID NO: 265752 - DNA, 487 bp, Unknown
  Bacterial polypeptide expressing nucleotide sequence isolated from the Sargasso Sea
ctgcctgagcacaacaaagatacgccactaaatgtagataaagcgttagatgagctttcgtcttcatcttatagcgacacccccgcatacagcacgtggataaactgcattagacgctttaaaaacacacagaacgtgcagcatgctgccgatgcaatccacgcttcggtagaaaatattgctgcccagcttgaaagtggtaataacgtgattcgctacataatctgggctattccttcgattggtttcgttggcactgttcgcggtattggcgcagcccttgcgcaagcagacgcagccctagatggtgatatagcgggaatgacggcttcgctgggcgttgcgttcaactctacgctcgtcgcgctttttatatcgcttatactaatgttgttaatgcacctgttaaatggtcgccaagacactatggtaattcgcacacaagagtcttgtgaacaccaccttctgtcacaccttcacaactaat

SEQ ID NO: 265753 - DNA, 529 bp, Unknown
  Bacterial polypeptide expressing nucleotide sequence isolated from the Sargasso Sea
aatgtgcaaagagaacaatatgatagagccatttcttgatcatcaaatctctgagggaaagatatcctatggattaagcagcatgggttatgatgtcagaatttctgatgagtatagaatatttacaaacgtgaatagttcattggtagatccaaaaaatttttctgatgataactttattgagcgaaagggaccttattgcataattccaccaaattcatttgttttggctaaaactgttgaatattttagaataccaaaagacgttctttgtatctgtgttggaaaaagtacctatgcaagaacgggaattatttgtaacgtaaccccaattgaaaatgagtttgaggggaatattgttattgaattaagcaacacaaccccaaatcccgcaaaaatttattcaaatgagggtattgcccaatttttatttttaaaatcagatactcaaccagagacaacttataaatcaaaaaacggtaaatatcagggacaaactaccatacaggttgctaaaataaaaaagtaa

SEQ ID NO: 265754 - DNA, 595 bp, Unknown
  Bacterial polypeptide expressing nucleotide sequence isolated from the Sargasso Sea
aatgcttaaaaacgatctctggataaaccaaaaagcttctgaagggatgataaaccctttccaatcaaatttggtaaggcatcttgagcctgacaatcagcaaaaaccagttttgagttacggatgctcctcatatggctatgacttaagactttcatcaaaagaattccttatttttagacatatccctggtactgtgatgaatcccaaaaagtttaatcctgacaatttagaaaaaactgttcttcactatgatgaagatggagaattttttattcttcctgcacactcctatggtttaggagtggctctagaaaagatgaaagtcccagaaaatataactgtaatttgtattggcaaaagtacctatgcacgattaggaattattgttaatacaacccccgcagaagcaggatgggaaggacacctaactcttgagttcagtaatagttcaggtgcagattgcagaatttatgctaacgagggcatatgccaattactcttttttgaaggtgatccttgctctacaacatacaacgatagaagaggtaaatatcaaaatcaaccagaaaaagtaactctagccaaaatctaa

SEQ ID NO: 265755 - DNA, 562 bp, Unknown
  Bacterial polypeptide expressing nucleotide sequence isolated from the Sargasso Sea
atgtcaattcaacctgattcttggattaaaaaaatgtgcaaagagcacaatatgatagagccatttttagatcatcaagtttccgaaggtaaaatttcttatggattaagtagtatgggatatgatgtaagaatctcagatgaatatagaatttttaccaatgttaatagttctttagttgatccaaagaatttttctgatgataactttatagaacgaaaaggaccacattgtattatcccaccaaattcattcgttttagctaaaacagtagaatattttagaataccaaaagatgttttatgtatttgtgttggaaaaagtacttacgcaaggacaggaattatttgtaatgttactccaattgaaaatgaatttgagggcaatattgtaattgagctaagtaatacaacacctaaccctgcaaaaatttattcaaatgagggaatagcacaatttttatttttcaaatcagatactcagccagaaacaacttataaatcaaagaacggtaaatatcagggtcaaactacaattcaagttgctaaaattaaaaagtaat

SEQ ID NO: 265756 - DNA, 595 bp, Unknown
  Bacterial polypeptide expressing nucleotide sequence isolated from the Sargasso Sea
atgctcaagtgcgatcgttggatcactgaacaggccgggcagggaatgatcgagccattccagagcggtctggtccgtcacctggagccggagcagaagctgcggccagtgctgagttttggttgctcctcctacggctacgacctacgcctctctccccaggaatttctgatcttccgacatgttccaggcacggtgatgaaccccaagcggttcaacccggccaacctcgaacccactccccttcatgaggatgaagacgggcgttacttcattctcccggcccattcctatggcctcggtgtggccttggagaagctgcgtgttccccccaacatcaccgtgatctgcttgggcaagagcacctatgcccgccttggaatcatcgtgaacaccaccccggcagaagcgagttgggagggtcacctcacccttgaattcagtaacagttccggtgctgactgtcgcatctatgcggatgagggcatctgtcagctgctgttttttgagggtgatccctgctcgaccacctacagcgatcgacaaggcaagtaccagcaccaaccggaacgggtgacgctggccaaggtctagt

SEQ ID NO: 265757 - DNA, 496 bp, Unknown
  Bacterial polypeptide expressing nucleotide sequence isolated from the Sargasso Sea
ttagatcatcaaatttctgagggaaagatatcttatggcctaagtagcatgggttatgatgtcagaatttctgatgagtataggatatttacaaacgtgaatagttcattggtggatccaaaaaacttctctgatgataactttattgagagaaaggggccatattgtataatcccaccaaattcatttgttttagctaaaaccattgaatattttagaataccaaaagatgtactttgtatctgtgttggaaaaagcacttacgcgagaacaggaattatttgtaatgtaaccccaattgaaaatgagtttgaaggaaatattgttattgaattaagcaacacaactcctaaccctgcaaaaatttattcaaatgaaggtattgctcaatttttattttttaaatcagatactcaaccagaatcaacttataaatcgaaaaacggtaaatatcagggacaaaccaccatacaggttgctaaaataaaaaagtaat

SEQ ID NO: 265758 - DNA, 418 bp, Unknown
  Bacterial polypeptide expressing nucleotide sequence isolated from the Sargasso Sea
gaatttaaaatttttacaaatataaaaggtgcaactgctgatccaaaaaattttagtgaggataattttgttacagttaaaggtgaagagtctatattaatacctccaaattcgtttgcactggcaagtagtttagaatatttcaaaatgccaagaaatgttacaggacttgttacagccaaatccacttatgcgagatgtggattaggcactcctcctacagttttagaggcaggatggcatggaaatttagttttagagttttctaatcatacaagtaattcaataaaactttatgctaatagtggcgctgcacaaatattattttttaaaggagatcaaccagaagtttcttactcagatagaaaaggtaagtatcaaggccaagttggaattacactcgcaaaatcaaaataaa

SEQ ID NO: 265759 - DNA, 553 bp, Unknown
  Bacterial polypeptide expressing nucleotide sequence isolated from the Sargasso Sea
atgatacttaatgataagcagataaaaaaattggtagaggaaaaagatatgataagaccttttgtagacaagtctattgcacaaggtatcagctacggtttgaattcttttggttttgacttaaggtgtggtgaagaatttaagatatttactaatataaaaggagcaacagctgatccaaaaaattttacagaggacaactttgttaccgtaaagggtgaaccttcaatattaataccacctaattcatttgctttggcaagtagtttagaatattttaaaatgccaaggaatgttacaggtctagttacagctaaatcaacttacgctcgctgtggtttagggactcccccaacagtattggaagctggatggcatggaaatctagttttagagttttctaatcatacaagtaattcaatacgtctttatgcaaatagtggagctgcacaaatattgttttttcaaggtgaagagccagaggtttcatatgctgatagaaaaggtaaatatcagggacaaactggaattacactggcaaaatcaaaataat

SEQ ID NO: 265760 - DNA, 322 bp, Unknown
  Bacterial polypeptide expressing nucleotide sequence isolated from the Sargasso Sea
atgacgattaaatctgataaatggataaaggaaatgtctgaaaagcatgaaatgataaaacctttcgaacctggtcagattagagttgatcaaaataaccaaaaacttatttcctatggtacatcttcttacggttatgatgttagatgttcaactgagtttaaggtttttactaacattcattctgcaacagttgatcctaaaagatttgatgaaaacagctttgtggatatacaaagcgatgtttgtgttattccacctaattcatttgccttagcaagtaccattgaatattttaaaatacctagaaatgtgttgacca

SEQ ID NO: 265761 - DNA, 496 bp, Unknown
  Bacterial polypeptide expressing nucleotide sequence isolated from the Sargasso Sea
ggatatatacaaccctccagtgttgatttaagggtcgggacagaattcagagtttttgaaaatcataaatatagtcatatagatccgaaatcaccccaggaagatttaactactctagtggaagcctcaaaggacgaaccatttgtcctccatcctggtgaatttgttttgggcacaacctatgaaaaagttgctttatcaaataagattgttgcaagactcgaaggtaagtcatcactaggtaggataggtttattaattcactcaactgcaggatttgttgatcctggattttcaggttatctaacattagaactttcaaatgttgcaaacttaccaatcaaaatatatccagagatgaaaattggacaaatatctttctattatttgaattcaccttcagaggctgagtatggtgacgtcagctatggaagtaagtatcaaggtcaagaagggcctacaccaagtaaaagccatagcgattttagcagctaat

SEQ ID NO: 265762 - DNA, 565 bp, Unknown
  Bacterial polypeptide expressing nucleotide sequence isolated from the Sargasso Sea
aatgttatcagatatagacataaaaaactcaattaaaaataatgaaattgagatatctccattggatgaggattatatccaaccttcaagtgtagatctaagagtaggagctgattttagagtttttgaaaaccataaatattcacatattgatccaaaagctcaacaagatgatctaacttcacttgtagctgcaacgatcgaagaaccatttgtacttcatcctggtgaatttgtacttggaactactttcgagaaagtttctctttcaaataaagttgttgccagactcgaaggaaaaagttcacttggaaggattggtttattaattcactctactgcaggttttgttgatccaggattttctggatacttaacacttgaactttcaaatgtggcaaaccttccgataaaaatttacccggagatgaagattggccaaatttctttttattacttaaattcgccttcagaatctggatacggatcagaaacttatgggagtaagtaccaagggcaagaagggcccactccaagtaaaagtcatactgactttaataaataa

SEQ ID NO: 265763 - DNA, 553 bp, Unknown
  Bacterial polypeptide expressing nucleotide sequence isolated from the Sargasso Sea
aatgatactaaacgataagcaaataataaaattggcagaggaacatgcaatgatcaatccatttgtgaataaaagtgttgctaatggaattagtcatggtgttaacccatttggttatgatctccgttgtggatctgaatttaaaatttttactaatataaaaggagctatagcggatccaaaaaattttagtgaagataatttcattactgtaaaagatgaagaatcaattctaattccaccaaattcttttgcactcgcctcgagtcttgagtatttcaagatgccaaggaatgttacaggcttagtaactgcaaaatcaacttatgcaagatgcggtttaggtgtaccaccaacggtattggaagcaggctgggaaggtgttttagttttagaattttcaaatcacacaagtaattcaataagattatatgcaaatgcaggtgcggctcagatattattttttcaaggagaggaacccgctgtttcatatgcagatagagaaggaaagtatcaaggtcaaacaggaattactttagcaaaatcaaaataa

SEQ ID NO: 265764 - DNA, 595 bp, Unknown
  Bacterial polypeptide expressing nucleotide sequence isolated from the Sargasso Sea
aatgcttaaaaatgatctctggataaatcaaaaagcatgtgaggggatgataaatccgttccaatcaaatttggtgaggcatcttgagcctgataatcaacaaaagccagttttgagttatggatgttcctcttatggctatgacttaaggctctcatcaaaagaattcctaatttttagacatattcctggtactgtaatgaaccctaaaaagtttaatcctaaaaatttagaaaaaactgttcttcatcatgatgatgatggagacttttttattcttccagctcactcctatggtttaggagtggcttttgaaaagatgaaagtgccagaaaatataactgtaatatgcataggcaaaagtacttacgcgagattaggtattatagttaatacaacgcctgctgaagcaggatgggaaggccacttaacattagagtttagtaatagttcaggtgcagattgtagaatttatgctaatgagggtatttgtcaactactcttttttgagggtgatccttgctcaactacatatgaggatagaaaaggtaaatatcaaaatcaaccagagaaagtaactttagcaaagatctaa

SEQ ID NO: 265765 - DNA, 169 bp, Unknown
  Bacterial polypeptide expressing nucleotide sequence isolated from the Sargasso Sea
aatgacgattaaatcagataagtggataagaaagatggcggttgatcaaggcatgattgagccatttcaagaggatcaaataagatattctgatgacaattcaagacttatatcatatggcctttctagttatgggtatgacgttaggtgtgcaaatgaatttaaagta

SEQ ID NO: 265766 - DNA, 539 bp, Unknown
  Bacterial polypeptide expressing nucleotide sequence isolated from the Sargasso Sea
aatgtcaattcaacctgattcttggattaaaaaaatgtgtaaagagcaaaatatgatagagccatttttggatcatcaagtttccgaaggtaaaatttcttatggattaagtagcatgggatatgatgtaagaatttcagatgaatatagaatatttactaatgttaacaattctttggttgatccaaagaatttttctgatgataactttatagaacgaaaagggccacactgtattattccaccaaattcattcgttttagctaaaacagtagaatattttagaataccaaaagacgttttatgtatttgcgttggaaaaagtacttatgcaaggacaggaattatttgtaatgtcacaccaattgaaaatgaatttgagggcaatattgtaattgagctaagtaatacaacacccaatcctgcaaaaatttattcaaacgagggaatagcacaatttttattttttaaatcagatactcagccagaaacaacttataaatcaaagaacggtaaatatcagggtcaaacccacattc

SEQ ID NO: 265767 - DNA, 562 bp, Unknown
  Bacterial polypeptide expressing nucleotide sequence isolated from the Sargasso Sea
atgtcaattcaacctgattcttggataaaaaaaatgtgcaaagagcacaatatgatagagccatttttggatcatcaagtttctgaaggtaaaatttcttatggattaagtagtatgggatatgatgtaagaatctctgatgaatttagaatatttactaatgtaaatagttctttggttgatccaaagaatttttctgatgataactttatagaacgaaaaggaccacactgtattataccaccaaattcattcgtattagccaaaacagtagaatattttagaataccaaaagacgttttgtgtatttgtgttggaaaaagcacttatgcaaggacaggaattatttgcaatgttacgccaattgaaaatgaatttgagggtaatattgtaattgagctaagtaatacaacacctaaccctgcaaaagtttattcaaacgagggaatagcacaatttttatttttcaaatcagacactccaccagaaacaacttataaatcaaagaacggtaaatatcagggtcaaaccacaattcaagttgctaagattaaaaagtaat

SEQ ID NO: 265768 - DNA, 539 bp, Unknown
  Bacterial polypeptide expressing nucleotide sequence isolated from the Sargasso Sea
tatgctttcagatgtagatataaaaatggctcttgatgaaaaattaattgaggttagcccattagatgatacttacattcagccctcaagtatagacttaagagtagggtctgaatttagagtttttgaaaatcataaatatagccatatagatcccaaagcagaccaagatgacttaactactttagttacagctacaattgaggagccctttgttttgcatcctggtgagtttgttcttggtactacttttgaaagagtcacgttgtcaaacaaggttgttgcaagactcgagggaaaatcttccttaggaagaattggcttattaatacattctactgcagggtttgtagatcctggttttgctggttatttaactttggagctttctaatgttgcaaatctaccaataaaaatttatcccgaaatgaaaataggtcaaatctctttctattatttaaattctccatcagaatctgagtatggttctgaagcctacggaagcaaatatcaaggacaagaagggcctactccaagta

SEQ ID NO: 265769 - DNA, 292 bp, Unknown
  Bacterial polypeptide expressing nucleotide sequence isolated from the Sargasso Sea
atgactattaagtctgataagtggattcaaaggatgtcaaaaaagcatgacatgataaagcctttttcgtccaatcaaattagggttgatgacgaaggcaataagttaatttcgtatggtgtatcaagttatggatatgatgtgagatgctctagcgaattcaaagtatttacaaatatccattcagcaattgtagatccaaaatcatttgatgaaaaaagtttcgtagatattaattcagatatatgcgtaataccaccaaattcttttgcattagctcgaaccggttgaa

SEQ ID NO: 265770 - DNA, 562 bp, Unknown
  Bacterial polypeptide expressing nucleotide sequence isolated from the Sargasso Sea
atgtcaattcaacctgattcttggattaaaaaaatgtgcaaagagcacaatatgatagagccatttctggatcatcaagtttctgaaggaaaaatttcttatggattaagtagcatgggatatgatgtaagaatttctgatgaatacagaatttttactaatgttaatagttctttagttgatccaaagaatttttctgatgataacttcatagaacgaaaaggaccacattgcattattccaccaaattcatttgttttagctaaaacagtagaatattttagaataccaaaagacgttttatgtatttgcgttggaaaaagtacttatgcaaggacaggaattatttgtaatgttactccaattgaaaatgaatttgagggcaatattgtaattgagttaagtaatacaacacctaatcctgcaaaaatttattcaaacgaagggatagcacaatttttatttttcaaatcagatactcagccagaaacaacttataagtcaaagaacggtaaatatcagggtcaaaccacaattcaagttgctaagattaaaaagtaat

SEQ ID NO: 265771 - DNA, 454 bp, Unknown
  Bacterial polypeptide expressing nucleotide sequence isolated from the Sargasso Sea
gtcttattcatttggatatgacttaagatgtgggtcagaatttaaaatatttacaaacattaaaggagcaactgcagatccaaaaaattttagtgaagataactttgtgacggttaagggtgaagaatttatactcattccaccaaattccttcgcattagcaagtagcttggaatattttaaaatgccacgtaatattactgggctagtaaccgctaaatctacttatgcaagatgtggcctaggtacaccgccaactgtccttgaagcaggatggcatggtaatttggttcttgagttttcaaatcatacaagcaattcaataaaattatatgctaatagtggtgctgcacaaattttatttttccaaggggaacaacccgaagtttcatatgcagaccgaaaaggtaagtatcaaggtcaaactggtatcacactagcaaaatcgaaataa

SEQ ID NO: 265772 - DNA, 190 bp, Unknown
  Bacterial polypeptide expressing nucleotide sequence isolated from the Sargasso Sea
atgtcggtccaatctgataggtggattatacaaatggccagagataatgatatgatctctccttttgaggacaaacaagttagaggagataaaatatcatttggtgtttcatcatatggttatgatgcaagagtttctgatgaatttaaaatttttaccaacgtaaattccgaaattgtagatccacaaa

SEQ ID NO: 265773 - DNA, 382 bp, Unknown
  Bacterial polypeptide expressing nucleotide sequence isolated from the Sargasso Sea
aatgaatgataaatggatcaagaaaatggctcttgagcatgatatgattgtaccatttcaagataagcttatttctgaggggaaaataagttcaggagtctcgagctttggtttcgattgtacattatccgatacatttaaaatttttcacaatactcatgcaggaattgttgaccctaaaaattttgataattcaaattttatagaaaagaaatcaaaagaaatacttcttcctggaaattcattttgtcttggagttacggaacaagtttttaaacttccaagacatgttttagcaatatgtgttggaaaatcgacctacgctagagcaggtattattgtaaatgtaacacctatcgaacctgagttcacggtacaataa

SEQ ID NO: 265774 - DNA, 163 bp, Unknown
  Bacterial polypeptide expressing nucleotide sequence isolated from the Sargasso Sea
cttgagttttctaacactaccacctttaccagcaaaaatatatgctaatgagggagccgcgcaattcatttttattaaaggaaatgaaaagccagaaattacttattctaaaagaaaaggtaagtatatgaaacaaagaggtgttacccttcccaaaatttaa

SEQ ID NO: 265775 - DNA, 562 bp, Unknown
  Bacterial polypeptide expressing nucleotide sequence isolated from the Sargasso Sea
atgtctatccagcctgactcatggataaaaaaaatgtgtaaagaacataatatgattgaaccttttttagatcatcaagtctcagaaggtaagatatcttatggattaagtagcatgggatatgatgtaagaatatcagatgaatatagaatatttactaatgtaaatagttcacttgttgatccaaaaaatttttctgatgacaattttattgaaagaaaaggaccttactgcattattccaccaaattctttcgttttagcgaagactgtagaatatttcagaataccaaaagatgttttgtgtatttgtgtaggaaaaagtacttatgctaggactggaattatttgtaatgtaactcccattgaaaatgaatttgagggaaatattgtcattgagcttagtaacacaactcccaatccagcaaaaatatattctaatgaaggcatagctcaatttttgttttttaaatcagatactcaaccagaaacgacttataaatctaagaacggcaaatatcagggacaaaccaccatacaggttgctaaaataaaaaagtaat

SEQ ID NO: 265776 - DNA, 438 bp, Unknown
  Bacterial polypeptide expressing nucleotide sequence isolated from the Sargasso Sea
aaaaccacaaatattcacatattgacccaaaagctcaacaagatgatctaacttcactggtaactgcaacgattgaagaaccatttgtacttcatcctggtgaatttgtgcttggaactacgtttgaaaaagtttctctttcaaataaagttgttgccagactcgaaggaaaaagttcacttggaagaattggtttattaattcactctactgcaggttttgttgatccaggcttttctggatacttaacacttgaactttcaaatgtagcaaatcttccgataaaaatttaccctgagatgaagattggtcaaatttctttttattatttgaattcgccttcggagtctgaatatggatcagaaacttatggtagtaagtaccaagggcaagaagggcccactccaagtagaagtcatactgactttaaaaaataat

SEQ ID NO: 265777 - DNA, 562 bp, Unknown
  Bacterial polypeptide expressing nucleotide sequence isolated from the Sargasso Sea
atgtcaattcaacccgattcttggataaaaaaaatgtgcaaagagcacaatatgatagagccatttttggatcatcaagtttctgacggtaaaatttcttatggattaagtagtatgggatatgatgtaagaatctccgatgaatatagaatatttactaatgtaaatagttctttggttgatccaaagaatttttctgatgataactttatagaacgaaaaggaccacactgtattataccaccaaattcattcgtattagctaaaacagtagaatattttagaataccaaaagacgttttatgtatttgtgttggaaaaagcacttatgcaaggacaggaattatttgcaatgttactccaattgaaaatgaatttgagggcaatattgtaattgagctaagcaatacaacacctaaccctgcaaaaatttattcaaacgaaggaatagcacaatttttatttttcaaatcagatactcagccagaaacaacttataaatcaaagaacggtaaatatcagggtcaaaccacaattcaagttgctaagattaaaaagtaat

SEQ ID NO: 265778 - DNA, 466 bp, Unknown
  Bacterial polypeptide expressing nucleotide sequence isolated from the Sargasso Sea
ttcttatggattaagtagtatgggatatgatgttagaatctcagatgaatatagaatttttaccaacgttaatagttctttagttgatccaaagaatttttctgatgataactttatagaacgaaaaggaccacattgtattatcccaccaaattcattcgttttagctaaaacagtagaatattttagaataccaaaagatgttttatgtatttgtgttggaaaaagtacttatgctaggacaggaattatttgtaatgttactccaattgaaaatgaatttgagggcaatattgtaattgagctaagtaatacaacacctaatcctgcaaaaatttattcaaatgaaggaatagcacaatttctatttttcaaatcagatactcagccagaaacaacttataaatcaaagaacggtaaatatcagggtcaaactacaattcaagttgctaaaattaaaaagtaa

SEQ ID NO: 265779 - DNA, 558 bp, Unknown
  Bacterial polypeptide expressing nucleotide sequence isolated from the Sargasso Sea
aaaaaatgatattaaatgataaacaaataacaaaactagcaaaagaacaagagatgataaatccttttgtcaataaaagtgtttcaaatgggattagccatggacttaactcttttggttatgatctaagttgtgggtcagaatttaaaatatttactaatattaagggagcaacagcagatccaaaaaattttagtgaagataactttgtaactgtaaaaggagaagattctattttaattccgccaaactcatttgctttagctagtagtctagagtattttaaaatgccaagaaatgttactggacttgttactgcaaaatcaacttatgcaagatgtggtttgggtactccgccaacagttcttgaagcaggctggcatggaaatttagttttagaattttctaatcatacaagcaattcaataagattatatgcgaatagtggggcagctcaaattttattttttcaaggagaacagccagaaatttcttacgctgacagaaatggcaagtatcaaggtcaaaaaggcattactctagcaaaatcaaaataat

SEQ ID NO: 265780 - DNA, 562 bp, Unknown
  Bacterial polypeptide expressing nucleotide sequence isolated from the Sargasso Sea
aatgtctattcaacctgattcttggattaaaaaaatgtgcaaagagcacaatatgatagagccatttttggatcatcaagtttctgaaggtaaaatttcttatggattaagtagtatgggatatgatgtaagaatctccgatgaatatagaatatttactaatgtaaatagttctttggttgatccaaagaatttttctgacgataactttatagaacgaaaaggaccacactgtattataccaccaaattcgttcgtattagctaaaacagttgaatattttagaataccaaaagacgttttatgtatttgtgttggaaaaagcacttatgcaaggacaggaattatttgcaatgttactccaattgaaaatgaatttgagggcaatattgtaattgagctaagtaatacaacacctaacccagcaaaaatttattcaaacgagggaatagcacaatttttattttttaaatcagatactcagccagaaacaacttataaatcaaagaacggtaaatatcagggtcaaaccacaattcaagttgctaagattaaaaagtaa

SEQ ID NO: 265781 - DNA, 634 bp, Unknown
  Bacterial polypeptide expressing nucleotide sequence isolated from the Sargasso Sea
atgcatgcaacaagccgtgcaacgacaagcaacccatcgagtggtggtgagaggctacgaaggcaacggagcggcagacatgtcgcgcatggagggagacaaccggtgacagttctcagtgatcagcagatcctcgatgaagttcacatcgagcccaagcaacagtcgcagtgcggcgaaggcgtggtgtccttcggcgtatcaagctacggctatgacgtgcgtgtcggaacgcggttcaagatcttcacgaatacgacttcaggtggcgtcgcgatcgtcgacccgaagcgattcaccgacgatctgttcctggaagtcgatacggaagccaatggagttgatcatgtgatcattcctccaaacagcttcgccctcgcggaaaccgtcgaatggatcgaggtaccgcgggacgtcctgaccatctgtgtcggcaagagcacctatgcacgctgcggactggtggtcaatgtcacgcctcttgaaccggagtggcgaggcaaggtcacactcgaaatcagcaacaccaccccactgcccgcgaaggtctatgccaatgagggaattgcgcagatgatctttctcaaggcggacaccatgtgtcgaaccagctatgcggatcgacgcggcaagt

SEQ ID NO: 265782 - DNA, 562 bp, Unknown
  Bacterial polypeptide expressing nucleotide sequence isolated from the Sargasso Sea
aatgtcaattcaacctgattcttggattaaaaaaatgtgcaaagagcacaatatgatagagccatttttagatcatcaagtttctgaaggaaaaatttcttatgggttaagtagtatgggatatgatgttagaatctccgatgaatatagaatatttactaatgtaaataattctttggttgatccaaagaatttttctgatgataactttatagaacgaaaaggaccacattgtatcataccaccaaattcatttgtattagctaaaacagtagaatattttagaataccaaaagacgttttatgtatttgtgttggaaaaagtacttatgcaaggacaggaattatttgtaatgttacaccaattgaaaatgaatttgagggcaatattgtaattgagctaagtaatacaacacctaaccctgcaaaaatttattcaaacgagggaatagcgcaatttttattttttaaatcagatactcagccagaaacaacttataaatcaaagaacggtaaatatcagggtcaaaccacaattcaagttgctaagattaaaaagtaa

SEQ ID NO: 265783 - DNA, 562 bp, Unknown
  Bacterial polypeptide expressing nucleotide sequence isolated from the Sargasso Sea
aatgtcaattcaacctgattcttggattaaaaaaatgtgtaaggagcacaatatgatagatccatttttggatcatcaagtgtctgaaggtaaaatttcttatggattaagtagtatgggatatgatgttagaatctcagatgaatatagaatatttactaatgtaaatagttctttggttgatccaaagaatttttctgatgaaaactttatagaacgaaaaggaccacactgtattataccgccaaattcattcgtattagctaaaacagtagaatattttagaataccaaaagatgttttatgtatttgtgttggaaaaagtacttatgcaaggacaggaattatttgtaatgttactccaattgaaaatgaatttgagggcaatattgtaattgagctaagtaatacaacacctaaccctgcaaaaatttattcaaacgagggaatagcacaatttttatttttcaaatcagatactcagccagaaacaacttataaatcaaagaacggtaaatatcagggtcaaaccacaattcaagttgctaaaattaaaaagtaa

SEQ ID NO: 265784 - DNA, 562 bp, Unknown
  Bacterial polypeptide expressing nucleotide sequence isolated from the Sargasso Sea
aatgtctattaaacctgacacttggattaaaaaaatgtgtaaagagtataacatgattgacccttttttggatcatcaggtttctgagggaaagatatcatatgggctaagtagtatgggttacgatgtcagaatttctgatgaatatagaatatttacaaatgtcaacagttcgttagtagatccaaaaaacttttctgatgaaaactttattgagcgaaagggaccatattgtattattccaccaaattcatttgttttggctaagaccattgaatattttagaattccgaaagatgttctttgtatatgtgttggaaaaagcacgtatgctcgaactggaataatctgcaatgttacccccattgaaaacgagtttgaaggaaacatcgtaatcgagctcagcaacacaactcctaatcccgcaaagatttattcaaatgagggtattgctcaatttttgttttttaaatcagatacccaaccagaaacaacatataaatcaaaaaacggcaaatatcagggacaaaccaccatacaggttgctaaaataaaaaagtaa

SEQ ID NO: 265785 - DNA, 325 bp, Unknown
  Bacterial polypeptide expressing nucleotide sequence isolated from the Sargasso Sea
aatgacagttctttcagataaatggattaaaaaaactgtgaaagaaaaaggaatgatcaaaccttttataagtaaacaagttagaaaaggtaaaatctcatttgggttatcatcttatggatatgacgcgagagtttctaacgaatttaaaatatttacaaatgttaattcaggtatagttgatcctaaaatattcaaaaaagaaagttttgttacaaagattggaaaagaatgtattattccgcctaattcttttgcactagcaagaacaataaaatatttcaaaatcccagatgatatattagttatttgtcttggaaaatcg

SEQ ID NO: 265786 - DNA, 208 bp, Unknown
  Bacterial polypeptide expressing nucleotide sequence isolated from the Sargasso Sea
atgacagttctttcagataaatggattaggaaaatgtctaaagaggagaatatgattactccttttgaggaaaaacaagttagaggagacagcatatcttatggactttcatcttttggatatgacgctagagtttcagaagaatttaaaatttttacaaatgtaaattccgaaatagtggatcctaaaaattttaaaccaacttaat

SEQ ID NO: 265787 - DNA, 448 bp, Unknown
  Bacterial polypeptide expressing nucleotide sequence isolated from the Sargasso Sea
ttttttgaaaaccataaatattctcatattgatccaaaagctcaacaagatgatctaacttcacttgtaactgcaactattgaagagccgtttgtacttcaccctggtgaatttgtacttggaaccacattcgaaaaagtttctctttcaaataaagttgttgccagactcgaaggaaaaagttcacttggaaggattggtttattaattcactctactgctggttttgttgatcctggattttcgggctacttaacacttgagctttcaaatgtagcgaatcttccaataaaaatttaccctgaaatgaaaataggtcagatttctttttactatctgaattcgccttcagaatctgaatatggatcagaaacttatggtagtaaatatcaagggcaagaaggacctacgccaagcagaagtcatactgactttaaaaagcaatgat

SEQ ID NO: 265788 - DNA, 409 bp, Unknown
  Bacterial polypeptide expressing nucleotide sequence isolated from the Sargasso Sea
gaatttttacaatgtaaatagttctttagtagaccctaaaaacttctctgatgaaaattttattgaaagaaaaggcccccactgcataattccacctaattcttttgttttagcaaaaacagttgaatattttagaattccaaaagatgtcctctgtatttgtgttggaaaaagtacttacgcaagaactggcattatttgtaatgtaactccaattgagaatgagtttgagggtaatattgttatagagctaagtaatacaacacctaatcctgcaaaaatttattctaatgaaggaatagctcagtttttattttttaaatcagagacagaaccagaaactacatataaatctaagaacggaaaatatcagggtcaaacaactattcaggtcgcaaaaataaaataa

SEQ ID NO: 265789 - DNA, 553 bp, Unknown
  Bacterial polypeptide expressing nucleotide sequence isolated from the Sargasso Sea
atgatactaaacgataagcaaataaaaaaattagctgaagaggaggaaatgatcaaaccgtttgtcggtgaaagtgtatcaaaaggtattagtcatggacttaattcttttggttatgacttaaggtgtggatcagaattcaaaatatttactaatataaaaggagctacagctgatccaaaaaattttagtgaagacaattttattactgtaaaagatgaagaatcaatattaattccacctaattcttttgcacttgcctcaagtcttgaatattttaagatgccaagaaatgttacggggttagtcactgcaaagtcaacttatgccaggtgtggcttaggtgttccgccaacagttctcgaaggaggttggaatggagtgctggtgcttgaattttcaaaccatacaagcaattcaataagattatatgcaaatagtggtgctgcacaaattcttttttttcaaggtgagcaaccagatgtttcttacgctgatagaaatggaaagtatcaagggcaaactggtattacattagctaaatcaaaataaa

SEQ ID NO: 265790 - DNA, 181 bp, Unknown
  Bacterial polypeptide expressing nucleotide sequence isolated from the Sargasso Sea
aatgccagttctttctgataaatggattaaaaaaatggcattagaaggaatgattgcaccatttgaagaaaagcagattagagaaggaaaaatttcttatggtttatcttcatatggttatgatgcaagagtctctaacgaatttaaaatttttaccaatatcaattttctgatattgttg

SEQ ID NO: 265791 - DNA, 175 bp, Unknown
  Bacterial polypeptide expressing nucleotide sequence isolated from the Sargasso Sea
aatgacgattaaatcagataagtggataagaaagatggcagttgaacatggcatgattgaaccatttcaagaggatcaaataaggtattctgatgacaattcaagacttatatcatatggcctctctagctatgggtatgacgttaggtgcgcaaatgaatttaaagtatttact

SEQ ID NO: 265792 - DNA, 529 bp, Unknown
  Bacterial polypeptide expressing nucleotide sequence isolated from the Sargasso Sea
aatgtgtaaagaacacaatatgattgaaccatttttagatcatcaagtttctgaaggaaaaatatcttatggccttagtagcatgggttatgatgttagaatctccgatgagtacagaatatttaccaacgttaacagttctttagtggaccctaaaaatttttctgatgataattttatagagagaaaaggaccatactgcattattcctccaaattcatttgtattagcaaaaacagttgagtattttagaataccaaaagatgttttatgtatttgtgttggaaaaagcacttatgctcgaacaggtattatttgtaatgtaacaccaatagaaaatgaatttgaaggaaatatagttattgaattaagtaacactacacccaatccagcaaaaatatattctaatgagggcattgctcaatttttattttttaaatcagatacccaaccagaaacaacatataaatctaagaatggtaaatatcagggccaaactacaattcaggtagctaaaattaaaaaataa

SEQ ID NO: 265793 - DNA, 598 bp, Unknown
  Bacterial polypeptide expressing nucleotide sequence isolated from the Sargasso Sea
atgctcaaaaatgatctctggataaatcaaaaagcttctgaaggaatgttaaaccccttccaatcaaatttggtgcgacatcttgatcctggtggtaatcaacaaaagccagttttgagttacggatgttcgtcttatggctatgatttaagactttcatcacaagaattcctaattttcagacatatccccggcactgtaatgaatcctaaaaattttaaccctaataatttagaacaaactgttcttcaccatgatgatgatggtgacttttttattcttcctgctcactcctatggtttaggcgtagctttagaaaagatgaaagtaccagaaaatataactgtaatttgcatcggcaaaagcacttacgcccgactaggaattatagttaatacaacgcctgcagaagcaggatgggaagggcacctaactttggagtttagtaatagttcaggtgcagactgcagaatttatgctaacgagggtatctgtcaactactcttttttgaaggtgatccttgctctacaacatataaagatagaaaaggtaaatatcaaaatcaaccagagaaggtaactctagcaaagatctaaa

SEQ ID NO: 265794 - DNA, 161 bp, Unknown
  Bacterial polypeptide expressing nucleotide sequence isolated from the Sargasso Sea
catgagcatcaagagcgacaaatggatccgccgcatggcggccgagcacggcatgatcgagcccttcgagcccggtcaggtgcgtgaggtcgagggccgcaagatcatcagctacggcaccagcagctacggctatgacatccgttgtgcgcccgaattca

SEQ ID NO: 265795 - DNA, 553 bp, Unknown
  Bacterial polypeptide expressing nucleotide sequence isolated from the Sargasso Sea
atgatactaagcgataaacaaataaaaaaatttgcagaagacgaaggaatgatagatccttttgttagcaaaagtgtatcaaaaggaattagtcatggtcttaattcctttggttatgatcttagatgtggatcggaatttaaaatatttactaatataaaaggagcaacggcggatccaaaaaatttcagtgaagataactttattactgtaaaaggtgaggattctattttaattcctccaaattcttttgcgctagctagcagtttagaatacttcaaaatgccacgcactgtgaccggacttgttactgcaaaatcaacctatgcaagatgtggtttaggaactccacccacagttcttgaggctgggtggcacggaaatttagttttggaattttcaaatcacacaagcaattcaataagactatatgcaaatagtggagcagctcaaattttatttttccaaggagaacagccagaaatctcttatgcagatagggatggaaagtatcaaggtcaaacaggcattactttagcaaaatcaaaataaa

SEQ ID NO: 265796 - DNA, 568 bp, Unknown
  Bacterial polypeptide expressing nucleotide sequence isolated from the Sargasso Sea
atgtcaattcaaactgatacatggattaaaaaaatgtgcaaggaacataatatgatagatccttttttagatcatcaagtctcagatggtaaaatatcatatggtttaagtagcatgggatacgacgttcgaatttcagatgaatatagaatatttactaatgtaaattcctctttggttgatccaaaaaatttctcagaggataattttatagaaagaaaggggcctttttgtattattccaccaaattcttttgtattagctaaaacgatagaatattttagaataccaaaagatgttttgtgtatatgtgttggcaaaagtacttatgcaagaacaggtataatctgtaatgtaactcctattgaaaacgagtttgaaggaaatattgtaatagaattatcaaacactacaccaaatccagcaaaagtttattcaaacgagggaattgcccaatttttattttttaaatcagacagtcaacctgaaacaacatataaatctaaaaatggaaagtatcagggacaaacgactattcaggtggcaaaaataaaaaaaaatggataaa

SEQ ID NO: 265797 - DNA, 595 bp, Unknown
  Bacterial polypeptide expressing nucleotide sequence isolated from the Sargasso Sea
aatgctgaaaaatgatctctggataaatcaaaaagcttcagaaggaatgataaagccattccaatcaaatttagttcgtcatcttgaacctgataaccagcaaaagccagttctaagttacggatgttcctcttatggatatgatttaagactatcctcaaaagaattcctaatttttagacatattcctggtacagttatgaatcccaaaaagtttaatcctgataatttagaaaaaactattcttcaccatgataatgatggagactattttattcttcctgcacactcctatggtctaggagttgctttagaaaagatgagagtaccagaaaatataactgtaatttgcataggtaaaagtacttacgcacggcttggaattatagttaatacaacgcccgcagaggcaggatgggaaggtcacctaactttagagtttagtaatagttcaggtgcagattgcagaatttatgctaatgaggggatctgccaactacttttttttgaaggtgatccttgttccacaacatatgaagatagaagaggaaaataccaaaatcaaccagagaaagttactctagcaaagatataa

SEQ ID NO: 265798 - DNA, 190 bp, Unknown
  Bacterial polypeptide expressing nucleotide sequence isolated from the Sargasso Sea
atgtctattaaaccagatgtatggattaaaaaaatggctgaatctgtggggatgattgagcctttctctaaaaaccaggtgcgagtagatgaaaaaggtgaaaaactcatttcatatggtgtctcaagctttggttatgatgttcgttgtgccaatgagtttaaagtttttacaaacatccactcagcaa

SEQ ID NO: 265799 - DNA, 370 bp, Unknown
  Bacterial polypeptide expressing nucleotide sequence isolated from the Sargasso Sea
ctcaaaggacgaaccatttgtcctccatcctggtgaatttgttttgggcacaacctttgaaaaagttgctttatcaaataagattgttgcaagactcgaaggtaagtcatcactaggtaggataggtttattaattcattcaactgcaggatttgttgatcctggattttcaggttatttaacattagaactttcaaatgttgcaaacttaccaatcaaaatatatccagagatgaaaattggacaaatatctttctattatttaaattcaccttcagaggctgagtatggtgacgtcagctatggaagtaagtatcaaggccaagaagggcctacaccaagtaaaagccatagcgactttagcagctaa

SEQ ID NO: 265800 - DNA, 559 bp, Unknown
  Bacterial polypeptide expressing nucleotide sequence isolated from the Sargasso Sea
atgtctattcagcctgatacttggataaaaaaaatgtgcaaagaacacaaaatgattgatccatttttagatcatcaagtttcagacggaaagatatcttatggtttaagcagcatgggttatgatgttagaatttcagacgaatataggatttttaccaatgttaatacatctttagtagatccaaaaaatttttctgatgataattttattgaaagaaaaggaccatattgcatcatcccaccaaattcttttgttttagcaaaaacagttgaatactttcgaataccaaaagacgttctttgtatttgtgttggtaaaagtacttatgctagaacaggtataatttgtaatgttactccaatcgaaaatgaatttgagggcaatattgttattgagctatcaaatactacaccaaatccagcaaaaatttattctaatgagggcatagctcagtttttattttttaaatcagatactcaacctgaaactacatataaatcaaagcaaggtaaataccagggtcaaacgactattcaggtagcaaaaataaaataat

SEQ ID NO: 265801 - DNA, 334 bp, Unknown
  Bacterial polypeptide expressing nucleotide sequence isolated from the Sargasso Sea
aatgccagtactttcagataaatggattaaaaaaaatgcaaaatttaaaggaatgattaaaccttttgtgaacaaacaagttagaaagggaaaaatatcttttggattgtcttcatatggatatgacgccagagtttcaaatgagtttaaaatttttacaaatgtcaattcaggtgttgtagacccaaaaattttcaaaaaagaaagtttcgtaacaaaaaaaggtaaagaatgtattattcctcctaattcttttgctttagcaagtactattgaatacttcaaaatcccagaggacgtgctagtaatttgtttagggaaatctacttatgca

SEQ ID NO: 265802 - DNA, 482 bp, Unknown
  Bacterial polypeptide expressing nucleotide sequence isolated from the Sargasso Sea
aagtatagatcttagagtaggtgcagattttagggtttttgaaaaccataaatattctcatattgatccaaaagctcaacaagatgatctaacttcacttgtaactgcaagtattgaagagccgtttgtgcttcaccccggtgaatttgtacttggaaccacattcgaaaaagtttctctttcaaataaagttgttgccagactcgaaggaaaaagttcacttggaagaattggtttattaattcactctactgcaggctttgtggatccaggattttcgggctacttaacacttgaactttcaaatgtagcaaatcttccaataaaaatttaccctgaaatgaaaataggtcagatatcgttttactatctgaattcgccttcagaatctgaatatggatcagaaacttatgggagtaagtaccaggggcaggaaggacctactccaagcagaagtcacactgactttaaaaagttatgat

SEQ ID NO: 265803 - DNA, 252 bp, Unknown
  Bacterial polypeptide expressing nucleotide sequence isolated from the Sargasso Sea
aatgacagtactttcagacaattggattaaaaaaatgtcaaaagaaaaagatatgattagtccatttgaagaaaaacagattcgaggtgacagcatttcttatggtttatcatcatttggttatgatgccagagtttcaaatgagtttaaaatttttactaatgtaaattctgaaatagttgatcctaaaaattttaagcctacaaattttgttacaaaaagattaaatgaatgcataataccaccaaattc

SEQ ID NO: 265804 - DNA, 807 bp, Unknown
  Bacterial polypeptide expressing nucleotide sequence isolated from the Sargasso Sea
aaaaagagcacttgagcaaatattagagtacaaaaaattctttgataatgacctaaatgttattcaagagttcatagaaagcgaagaattaaatcaagatgatagaaggcaaataaaattactaaaaactaattataagaaaattttatctcataaggattatgttcttaaactgaattctggaaataaatattcacaaaagttaataaagtttatttatgatagtaaccttcccataaaaattttatgggaagggacttcgcaaaacgctcttcccgaaaaccttttcgattataaaataaatggcttctgctcaagtctttatgaagatgctatcaattcgatacttagaaatataaataatgatgaaggatcgacattagttatctactctgatcaatatcaaaatatcgcacaaaacatagcatcctatagccctcaaatatggacaattccatattctgcaagtaattttcaagactatgctgcagaaattttaggagttcgttctagcaataaaaggtttgagaaaatatctagcctgaatccaaatcaaaaattacaatttaaccctcgccccagaaaggatttaaaagaaattatattgcttgtagatcctaaaaattttaaagccatgatcccagctttgagatatcatggggggaataatttcaagtatttaaatttcatttcagccttagaggaagttgatgatcctcttcagctaattgattatgaagattcttacgttcctctatctacctatgcatcaaaaaaaattggaagtgggagcatgaagtcaatgga

SEQ ID NO: 265805 - DNA, 562 bp, Unknown
  Bacterial polypeptide expressing nucleotide sequence isolated from the Sargasso Sea
atgtctatccagcctgatacttggataaaaaaaatgtgcaaagagcacaacatgatagatccatttcttgatcatcaagtttctgaaggaaagatatcctacggattaagcagcatgggttatgatgtgagaatttctgacgaatacagaatatttacaaatgtaaatagttctttagtagatccaaaaaatttttctgatgataatttcattgagagaaaagggccatattgtattatcccacctaattcattcgttttagcaaaaactgttgaatatttcaggatcccaaaagatgttttatgtatttgtgttggaaaaagtacttatgctaggacaggtattatttgcaatgtaactccaattgaaaatgaatttgagggaaatattgtgattgagcttagtaatacaactcccaatccagcaaaaatctattctaatgagggaattgcacagtttttattttttaaatcagatactcaacctgaaacaacatataaatctaagaacggcaaatatcagggtcagactacaattcaagttgctaaaattaaaaagtaaa

SEQ ID NO: 265806 - DNA, 565 bp, Unknown
  Bacterial polypeptide expressing nucleotide sequence isolated from the Sargasso Sea
atgctttcagataaagatattaaaaaagccttagaagataagtggatcgaaatatcaccattagatcaaggatatatacaaccctccagtgttgatttaagggtcgggacagaattcagagtttttgaaaatcataaatatagtcatatagatccgaaatcaccccaggaagatttaactactcttgtggaggcctcaaaggacgaaccatttgtcctccatcctggtgaatttgttttgggcacaacctatgaaaaagttgctttatctaataagattgttgcaagactcgaaggtaagtcatcactaggtaggataggtttattaattcattcaactgcaggatttgttgatcctggattttcaggttatttaacattagaactttcaaatgttgcaaacttaccaatcaaaatatatccagagatgaaaattggacaaatatctttctattatttaaattcaccttcagaggctaagtatggtgacgtcagctatggaagtaagtatcaaggccaagaagggcctacaccaagtaaaagccatagcgattttagcagctaat

SEQ ID NO: 265807 - DNA, 565 bp, Unknown
  Bacterial polypeptide expressing nucleotide sequence isolated from the Sargasso Sea
atgctttcagacgtagacataaaaagagctcttgatgaaaaattaattgaggttagtccattagatgaaacttatatccaaccctcaagtatagatttaagagttgggtctgaatttagagtttttgaaaatcataaatacagtcatatagaccccaaagcagaccaagatgacttaaccactttagttacggcaacaattgaggagccctttgttttacatcctggtgaatttgttcttggtactacttttgaaagagtcacattatcaaataaggttgttgcaagacttgagggaaaatcttctctaggaagaattggcttgttaatacattctactgctggatttgtcgatccaggctttgccggttatttaactttagagctgtctaatgttgcaaatctaccaataaaaatttatccagaaatgaaaataggtcaaatctctttctattatttaaattctccatcagaatctgaatatgggtctgaagcctacggaagtaaatatcaaggacaagaagggcctacgccaagtaaaagccattcagattttaaaaagtaat

SEQ ID NO: 265808 - DNA, 553 bp, Unknown
  Bacterial polypeptide expressing nucleotide sequence isolated from the Sargasso Sea
aatgatactaaacgataagcaaataataaaattagcagaggaacatgaaatgattagtcctttcgtgaacaaaagtgttgctaatggaattagtcatggggttaatccatttggttatgatcttcgttgtggatctgaatttaaaatttttaccaatataaaaggagctacagcagatccaaaaaatttcagtgaagataattttattacggtaaaagacgaagagtctattttaattccaccgaatagctttgcacttgctgcgagtctggaatattttaaaatgccaagaaatgttactggtcttgtcacagcaaaatcaacttatgcaaggtgtggtttaggtgttccaccaactgtgctagaggctggttgggaaggtgttttagttttagaattctcaaatcatacttcaaatagtattaggctttatgcaaatagtggtgcagcccaaatccttttttttcaaggggatcagccagaagtttcttatgctgacagagatggaaagtatcaaggtcaaacaggaattactttagcaaaatcaaaataa

SEQ ID NO: 265809 - DNA, 541 bp, Unknown
  Bacterial polypeptide expressing nucleotide sequence isolated from the Sargasso Sea
aatgtccattcagccagactcttggataaaaaaaatgtgtaaagagcataagatgatcgaaccatttttggatcatcaagtctctgaggggaaaatatcatatggactaagtagcatgggttacgatgttagaatttctgatgagtatagaatatttacaaatgtcaatagttcgctagtagatccaaaaaatttttctgatgaaaactttatagagagaaaggggccttattgtataattccaccaaattcatttgttttggctaagaccattgaatattttagaattccaaaagatgttctttgtatttgtgttggaaaaagtacttacgcgagaacaggaattatttgtaatgtaacgccaattgaaaatgaatttgaaggtaatattgttatcgaattaagtaatacaactcctaatcctgcaaagatttattcaaacgagggtattgctcaatttttattttttaaatcagatacccagccagaaacaacatataaatcaaaaaacggtaaatatcagggacaaaccaccatacag

SEQ ID NO: 265810 - DNA, 559 bp, Unknown
  Bacterial polypeptide expressing nucleotide sequence isolated from the Sargasso Sea
aatgtctattcagccagattcttggattaaaaaaatgtgtaaggagaaaaagatgatagatccttttgtagatcatcaagtatcagaaggcaaaatatcttacggtcttagtagcatgggatatgatgtaagaatttctgatgaatatagaatttttacaaacgttaacacttctttagttgatccaaaaaatttttcggatgataacttcattgaaaaaaaaggaccatattgcataattcctcctaattcttttgtattagcaaagactgttgaatattttaaaataccaaaagatgtactttgtatatgtgttggaaaaagtacatatgcaagaactggtattatttgtaatgttactccgattgaaaatgaatttgaaggaaatatagtaattgaactttcaaacacaactcctaatcctgcaaaaatttattcaaatgaaggtatagctcaatttttattttttaaatctgaaactcaacctgaaacaacatataaatcaaagaacggcaaatatcagggacaaacaacgatacaggttgctaaaataaaataa

SEQ ID NO: 265811 - DNA, 562 bp, Unknown
  Bacterial polypeptide expressing nucleotide sequence isolated from the Sargasso Sea
aatgtcaattcaacccgattcttggattaaaaaaatgtgcaaagagcacaatatgatagagccatttttggatcatcaagtttctgaaggaaaaatttcttatggattaagtagtatgggatatgatgtaagaatctcagatgaatatagaatatttactaatgttaatagttctttagttgatccaaagaatttttcagatgataattttatagaacgaaaaggaccacactgtattatcccaccaaattcatttgttctagctaaaacagtagaatactttagaataccaaaagatgtcttatgtatttgtgtaggaaaaagcacgtatgcaaggacaggaattatttgtaacgttacaccaattgaaaatgaatttgagggcaatattgttattgagctaagtaatacaacacctaatcctgcaaaaatttattcaaacgagggaattgcgcaatttttattttttaaatcagatactcagccagaaacaacttataaatcaaagaacggtaaatatcagggtcaaaccacaattcaagttgctaagattaaaaagtaa

SEQ ID NO: 265812 - DNA, 553 bp, Unknown
  Bacterial polypeptide expressing nucleotide sequence isolated from the Sargasso Sea
aatgatactaaacgataagcaaataataaaattagcagagaaacatgaaatgatcagtcctttcgtgaataaaagtgttgctaatggaattagtcatggtgttaacccatttggttatgatctccgttgtggatctgaatttaaaatttttactaatataaaaggagctactgcagatccaaaaaatttcagcgaagataattttattactgtaaaagacgaagagtccattttaattccacctaatagctttgcacttgctgcaagtcttgaatattttaaaatgccaagaaatgttacaggattagtaactgcaaaatcaacttatgcaaggtgtggtttaggtgttccaccaacggtactagaggcggggtgggaaggtgttttagttttagaattctcaaatcatacttcgaatagtattaggctttatgcaaatagtggtgcagcccaaatccttttttttcaaggagaacagccagatgtttcttatgctgacagagatggaaagtatcaaggtcaaacaggaattactttagcaaaatcaaaataa

SEQ ID NO: 265813 - DNA, 149 bp, Unknown
  Bacterial polypeptide expressing nucleotide sequence isolated from the Sargasso Sea
aatgacgattaaatcagataagtggataagaaagatggcagttgaacatggcatgattgaaccatttcaagaagatcaaataaggtattctgatgacaattcaaggctcatatcatatggcctctctagctatgggtatgacgttaggt

SEQ ID NO: 265814 - DNA, 595 bp, Unknown
  Bacterial polypeptide expressing nucleotide sequence isolated from the Sargasso Sea
gatgctgaaaaacgatcgctggatcaatgagcaggcggccgatgggctgctggagccttttcaacccaccctggtgcgccacctcgatcccgagaatcgcaccggcgctgtcctcagcttcggttgttcttcttatggctacgacctgcgcctgtcgccccaggaatttctgatcttccgccatgttccaggcacggtgatgaaccccaagcggttcaacccagccaacctggaaccggcaccaatgcagaaggatgaagacggcagctacttcatccttccagcccactcctacggattaggcgtggcgcttgaaaagatgaaagtgccagaaaacatcaccgtgatctgcctgggcaagagcacctatgcccggctgggaatcatcgtcaataccacccctgcagaagctggttgggaaggacatctcaccctggaattcagcaacagttctggagccgactgccgcatctatgccaacgagggcatttgtcagctgctgtttttcgaaggtgatccctgcgataccacctacaaagaccgttccggcaaataccagcaccaacctgagcgcgtgaccctggcgcggatctaa

SEQ ID NO: 265815 - DNA, 595 bp, Unknown
  Bacterial polypeptide expressing nucleotide sequence isolated from the Sargasso Sea
atgcttaaaaatgatctctggataaatcaaaaagcgtctgaaggaatgataaaccccttccaatcaaatttagtgaggcatcttgaacctgataatcaacaaaagccagttttaagttatggatgttcatcttatggctatgatttaagactttcatcgaaggaattcttaatttttagacatattcctggtacagtgatgaatcccaaaaattttaatcctgataatttagaaaaaactgtgctgcataatgatgatgatggagacttttttattcttcctgctcattcctatggtttaggagtggctttagaaaagatgaaagtaccagaaaatataactgttatttgtataggcaaaagtacatacgcgcgactaggaattatagttaatacaacgcctgcagaagcaggatgggaaggccacctaactttagagtttagtaatagttcaggtgcggattgcagaatttatgctaacgagggtatctgtcaactactcttttttgaaggtgatccttgttccacaacatatgaagatagaagaggtaaatatcaaaatcaaccagaaaaggtaactctagcaaagatctaaa

SEQ ID NO: 265816 - DNA, 163 bp, Unknown
  Bacterial polypeptide expressing nucleotide sequence isolated from the Sargasso Sea
atgtctattaaatctgataagtggattaaagaaatggcggaaagccatggaatgatcgagccatttcaatatgatcaagtcaaaaaaaatggtaagggttcaattgtctcatttggaacttctagttacggatatgatgttcgttgttctgacgagatttaaa

SEQ ID NO: 265817 - DNA, 553 bp, Unknown
  Bacterial polypeptide expressing nucleotide sequence isolated from the Sargasso Sea
atgattctaaacgataaacaaattaaggaacttgcagaaaaagaggagatgataagtccatttgtaagtgaaagtatatctaaaggcattagtcatggacttaactcatttggctatgatttaagatgcggctctgaattcaaaatttttacaaatataaaaggggctactgctgaccccaagaatttcagtgaggataattttataactattaaaggtgaagagtctgttttaattcctccaaattctttcgcactggcaagtagtcttgagtattttaaaatgccaagaaatgtaaccggattagtaactgccaagagtacttacgcaagatgtggacttggaactccccccacagttttagaagcgggttggcatggcaacttagttttagaattttcaaatcatacaagcaactctataaaattgtatgcaaatagtggagcagcgcaaattttgttctttagtggagatcagccagaagtatcatattctgagagaaaaggaaaatatcaaggtcaagttggtataactttagcaaaatcaaaatagt

SEQ ID NO: 265818 - DNA, 243 bp, Unknown
  Bacterial polypeptide expressing nucleotide sequence isolated from the Sargasso Sea
tatggctattaaatctgataagtggataagaaaaatggcaaaagaacataatatgattgagccatttgaagctgggcaggttagaaaaggtcaaaataatgataagctaatttcttatggaacatcttcttatggttatgacgttagatgttccaacgaattcaaggtcttcacaaatatccattcagcaactgttgaccctaagcactttgatgagaacagttttgtagatgttgttgatga

SEQ ID NO: 265819 - DNA, 565 bp, Unknown
  Bacterial polypeptide expressing nucleotide sequence isolated from the Sargasso Sea
atgctttcagatgtagacataaaaagagctcttgatgaaaaattaattgaggttagtccattagatgaagcttacatccagccctcaagtatagatttgagagttgggtctgaatttagagtttttgaaaatcataaatacagccatatagaccccaaagcagaccaagatgacttaactactttagttacagcaacaattgaagagccctttgttttacatcctggtgaatttgttcttggtactacttttgaaagagtcacgttatcaaataaggttgttgcaagacttgagggaaaatcttctctaggaagaattggcttgttaatacattctactgctggatttgtcgatccaggctttgccggctatttaactttagagctgtctaatgtagcaaatttaccaataaaaatttatccagaaatgaaaataggtcaaatctctttttattacttaaattctccatcagaatctgaatatggttctgaagcctacggaagcaaatatcaaggacaagaagggcctactccaagtaaaagccattcggattttaaaaagtaat

SEQ ID NO: 265820 - DNA, 553 bp, Unknown
  Bacterial polypeptide expressing nucleotide sequence isolated from the Sargasso Sea
aatgatattaaatgataagcaaataacaaaactagcaaaagaagaggagatgataagtccttttgttagtaaaagtgtttcaaacggcataagtcatggacttaattcttttggctatgatcttagttgcgggtcagagtttaaaatatttactaatattaagggagcaactgcagacccgaaaaattttagtgaagacaactttgtaactgtaaaaggggaagattctattttaattcccccaaactcatttgctttagctagtagtctagagtattttaaaatgccaagaaacgttacaggactcgttactgcaaaatcaacatatgcaaggtgtggattaggtactccaccgacagttcttgaagctggttggcatggaaacttagttttagaattttctaatcatacaagtaattcaataagattgtacgcaaatagtggagcagctcaaattttattttttcaaggagatcagccagaaatttcatatgctgatagaaatggcaagtaccaaggtcaaaaaggcattactctagcaaaatcaaaataa

SEQ ID NO: 265821 - DNA, 577 bp, Unknown
  Bacterial polypeptide expressing nucleotide sequence isolated from the Sargasso Sea
atgagtgttttaagcgacaaaacaatacttgaatgtattaaaaggggagacatagtaatcactccccttgacgaagatgatgtgcagccggcaagtgtagatctgcactttgacgacaaagtattagtattcagtaattctctgaggccatacatagatgtgagggatagcttagaagatctcacagaagtcgtacaaattgatgagaacactccttttatactacaccctggagaatttgtgttaggcagcacttcggaacatatcgaattacctgcacatttagtagctagacttgaaggtaaaagtagtttaggtaggcttggattagtaatacactcaacagctggctttgttgatcctggctggaaaggccatctgacactggaactaagtaacctttcaaacttgccaatcactctgtttcacggaatgaaaataggacaaatctcattcctagaactaactacacctgccacgcgtctttatggatctaaggaattaggaagcaaataccaaggccaatctgacccaacgcccagtaaatattacgaaaactactccggcagacaatagt

SEQ ID NO: 265822 - DNA, 553 bp, Unknown
  Bacterial polypeptide expressing nucleotide sequence isolated from the Sargasso Sea
aatgattctaaacgataagcaaattaaacgattggctgaagagcaagaaatgattagtccatttgttggagaaagtgtttcaagaggtattagtcatgggcttaactcatttggatatgatcttcgttgtgggtcagaattcaaaatttttacaaatataaaaggagctactgctgatccaaaaaattttagtgaagacaattttattacagtaaaaaacgaagattctattttaatacctccaaattcttttgcgcttgcctctagtcttgaatatttcaaaatgccaagaaatgttacaggtcttgttacagcaaaatcaacatacgcaagatgtggattaggtgttccaccaacagttcttgagggaggttggaatggagtgttagttctcgaattttctaatcatacaagtaattcaataagattgtatgctaatagtggtgctgctcaaatattgttttttcaaggagatccaccggaggtttcatatgcagatcgtaaaggtaagtatcaaggacaaacgggaataactttagcaaagtcaaaataa

SEQ ID NO: 265823 - DNA, 595 bp, Unknown
  Bacterial polypeptide expressing nucleotide sequence isolated from the Sargasso Sea
atgcttaaaaatgatctctggataaatcaaaaagcatctgaagggatgataaaccccttccaatcaaacttagtgcggcatcttgagccgcataatgaacaaaagccggttttaagttatggatgctcctcttatggctatgatttaagactttcatcaaaagaattccttatttttagacatattcctggtactgtaatgaatcctaaaaagtttaatcctgataatctagaaaaaaccattcttcaccatgatgatgatggagacttttttattcttcccgctcattcctatggcttaggtgtagccctagaaaagatgaaagttccagaaaatataactgtaatttgcataggcaaaagtacatacgcgcgcctaggaatcatagttaatacaactcctgcagaagcaggctgggaaggtcacttaaccttggagtttagcaacagttcaggtgccgattgcagaatttatgctaacgaaggtatctgccagctactcttttttgaaggtgatccttgctctacaacatatgaagatagaagaggtaaatatcaaaatcaaccagaaaaggttactttagcgaaaatctaaa

SEQ ID NO: 265824 - DNA, 562 bp, Unknown
  Bacterial polypeptide expressing nucleotide sequence isolated from the Sargasso Sea
atgtctattcagcctgactcgtggattaagaaaatgtgtaaagaatacaatatgattgaaccatttttagaccatcaagttgcggagggaaaaatatcatatggattaagtagtatgggttatgatgttagaatctctgacgaatatagaatattcactaatgtaaataattccttagttgatccaaaaaatttttcagatgacaattttatagaaaaaaagggaccacattgcatcattcctccaaactcatttgttttggctaaaacagtagaatatttcagaattcctaaagatgtactttgtatatgtgttggcaaaagcacttatgcaagaacaggtataatttgtaatgtaactccaattgaaaacgaatttgaaggaaatatagttatagagctaagcaacactacacctaatccagcaaaaatttattctaatgaaggtatagcccaatttttattttttaaatcagaaactcaaccagagacaacttataaatctaagaagggtaaatatcaaggacaaaccactattcaagttgctaaaattaaaaagtaag

SEQ ID NO: 265825 - DNA, 175 bp, Unknown
  Bacterial polypeptide expressing nucleotide sequence isolated from the Sargasso Sea
atggcagtactatcagataaatggatcagaaaaaatgctcttactaaaggaatgataaaaccttttgttagcaaacaagttagaaagggtaaaatttcttttggtttatcctcatacgggtatgatgcgagagtttcaaacgaatttaaaatattcacaaacgtaaactcaggta

SEQ ID NO: 265826 - DNA, 247 bp, Unknown
  Bacterial polypeptide expressing nucleotide sequence isolated from the Sargasso Sea
atgagtattaaatcagacaagtggataaaaaaaatgtcgcaaaactatagcatgattacgccttttgaggaaaatcaaataaaagccaatgataacgggaaaatcatatcatatggaacatcaagttatggttatgatgttagatgtgcggatgaattcaaagttttcactaacataaattcatctttagtagatccaaagaattttgatgatcaaagttttgtcgatattaaatcagaatgtttgt

SEQ ID NO: 265827 - DNA, 355 bp, Unknown
  Bacterial polypeptide expressing nucleotide sequence isolated from the Sargasso Sea
atgagtatcaaatctgataagtggataagaaaaatggccgaagatcataaattgattgagccctttgaagccggtcagatcaggaaagacgaaaaagaaaataggcttatttcgtatggtacctcttcttacggttacgatgttagatgttcaaatgagtttaaggtatttactaatattcattcagcaactgtagaccctaagaattttgatgaaaatagttttgtagacgttgttgatgatgtttgcgtcatacctccaaattcttttgcgctcgcaagtaccatagaatattttaagattcccagaaacgtattaacgatatgcctcggtaaatcaacctatgccagatgcg

SEQ ID NO: 265828 - DNA, 244 bp, Unknown
  Bacterial polypeptide expressing nucleotide sequence isolated from the Sargasso Sea
aatgtcagttcaatctgataagtggattatacaaatggccagagaaaatgacatgatctctccttttgaagacaagcaagttagaggagataaaatatcatttggtgtatcatcatatggttacgatgctcgagtgtctgacgaatttaaaatttttaccaacgtaaattctgaaatagtggatccaaaaaattttaaatcttcaaattttattactaaaaactcatctgaatgcataatacca

SEQ ID NO: 265829 - DNA, 233 bp, Unknown
  Bacterial polypeptide expressing nucleotide sequence isolated from the Sargasso Sea
aatgtcagttctttcagacaaatggattagaaaaatgtctaaagaacaggatatgattacaccatttgaagaaaaacaaattagaggagacagtatttcctacggactttcgtcttatggatacgacgcaagagtttcagatgaatttaaaatttttactaatgtaaattcagaaatagtagatcctaaaaattttaagcctacgaattttgttactaagagtaccccagaat

SEQ ID NO: 265830 - DNA, 232 bp, Unknown
  Bacterial polypeptide expressing nucleotide sequence isolated from the Sargasso Sea
atgtcagttcaatctgataagtggattattcaaatggccagagataatgatatgatttctccatttgaagataaacaagttcgaggtgataaaatatcatttggtgtatcatcatatggttacgatgcaagagtctctgacgaatttaaaattttcactaatgtcaattctgaaattgtagatccaaaaaattttaaatcctctaattttattactaaaaactcatcagaat

SEQ ID NO: 265831 - DNA, 238 bp, Unknown
  Bacterial polypeptide expressing nucleotide sequence isolated from the Sargasso Sea
atgacgattaaatcagataagtggataagaaagatggcagtcgagcatggcatgattgagccatttcaagaagatcaaataaggtattctgatgataattcaaaacttatatcatatggtctatcaagttatggatatgacgttagatgtgcaaatgaatttaaagtattcacaaatattcattctgccatagttgacccaaaatcttttgatgaaataaagttttgtagatattaac

SEQ ID NO: 265832 - DNA, 322 bp, Unknown
  Bacterial polypeptide expressing nucleotide sequence isolated from the Sargasso Sea
tatgtcaataatgccagattcttggataaaaaaaatgtctaaagaaaaaaatatgattgaaccttttgcagatgagcaaaataagaatggtgttattagttatggtgtatcatcttatgggtatgatgcaagagtatctgatgaatttaaggtttttacaaatgtaaataatgctttagtggaccctaagaacttttctgaagcatcttttattgaacgcaaagcagacagttgtattattccccctaacagttttgttttagctagaactgtagaatattttaaaattccaagagatggttttagtgatttgtttaggaaa

SEQ ID NO: 265833 - DNA, 451 bp, Unknown
  Bacterial polypeptide expressing nucleotide sequence isolated from the Sargasso Sea
aatgtcaattaaatcagacaaatggattaagatgatgtcagaagattatagcatgatatcaccatttactgataaacagataagtaaagaaaaaatatcatttgggttatcatcttacggatatgatttgagagtttctgatgaatataaaatatttacgaatataaatagcagtatagtcgatcctaaatcatttgactctacttcctttattgattttaaaggagatgtttgcattgtccctccaaacagctttgctctagctcgtagtgttgagtattttaagattccacgtaatgttttaacaatatgcgttggaaaatcaacatatgcaaggtgtggtattattgtcaatgttactccatttgaaccagagtgggaagggtatgttacattagaaatttcaaatacaacgcctcttcctgctaggatttattctaatgaaggactt

SEQ ID NO: 265834 - DNA, 409 bp, Unknown
  Bacterial polypeptide expressing nucleotide sequence isolated from the Sargasso Sea
atgagcgttcaatctgacaaatggatcaaaaaaatgtccctagaacataatatgattgatccatttgtggaaaaacaagtttcttctggtaaaatatcttatggattaagttcttttggttacgacgtccgtgtatcagatgagtataaaatatttactaatgtaaattcctcaattgtcgatccaaaaaattttagtgaaacaaattttgtagatcgtaagggaccagaatgtattattccaccaaattcatttgttttagcgagaacaatagaatattttaagataccaagagacattttatgcatttgtgttggaaaaagcacttatgcaagatgtggaattgtcattaatgttacaccaatagaaaatgaattcgagggacatataacattagaatttctaacac

SEQ ID NO: 265835 - DNA, 412 bp, Unknown
  Bacterial polypeptide expressing nucleotide sequence isolated from the Sargasso Sea
aatgtcagttctttcagataaatggattagaaaaatgtctaaagaagagggtatgatttatcctttcgaagaaaaacaggtaagaggagatagtatttcttatggactttcatcttttggatatgatgctagagtttcagatgaatttaaaatctttacaaatgtaaattctgaaatagtagatcctaaaaattttaaaccttcgaattttgttacaaagaatgtttctgaatgtattatcccacctaattcatttgtattggctagaacagttgaaaaatttaaaattcctagtgatgtacttgttatttgtcttggtaaatctacatacgcaagatgtggaattattgttaatgtaactcctcttgagccaggctgggagggatatgttactttagaatttctaacacta

SEQ ID NO: 265836 - DNA, 370 bp, Unknown
  Bacterial polypeptide expressing nucleotide sequence isolated from the Sargasso Sea
atgtcggttctctcagacaattggattaaaaaaatgtctaaagaaaatggaatgattttcccatttgaggaaaagcaaatacgaggggatagcatctcatacgggctttcatcctttggctatgatgcaagggtttcagatgaatttaaaatttttacaaatgtaaattctgaaatagtagatcctaaaaattttaaaccaacaaattttgtaacaaagaaagtttcggagtgtattatacctcctaactcctttgttctagcaagaactgtcgaaaaatttaaaataccaaatgatgtgcttgttatatgtcttggaaaatcaacatatgcaagatgtgggattatagtgaatgttaccccactagaac

SEQ ID NO: 265837 - DNA, 408 bp, Unknown
  Bacterial polypeptide expressing nucleotide sequence isolated from the Sargasso Sea
tatgacagttcaatctgataaatggataacaaaaatggctaaagataataatatgatttccccatttgaagataagcaaattaggggaaatagtatttcatatggagtatcttcttttggatatgatgctcgattatcagatgagtttaaaatttttacaaatgttaatacagaaatagttgatccaaaaaattttaaatcgacgagttttataactaaaaaaggaaaagaatgtatcattcctcccaattcatttattttagcgagcactgttgaatattttaagataccaaaggatgtcttggtaatttgtcttggaaagtcaacttatgctaggtgtggagtaattgtaaatgttacccccctagaaccaggttgggagggagtagttactttagaattaagtaa

SEQ ID NO: 265838 - DNA, 353 bp, Unknown
  Bacterial polypeptide expressing nucleotide sequence isolated from the Sargasso Sea
aatgtcaattcagtcagataaatggataaaaaaaatgtcaaaagagaacaatatgatttcaccctttgaggaaaaacaaatacgaggtaacagtatttcttatggtctctcatcatttgggtatgatgctagagtttcagatgaatttaaaatttttacaaatgtaaattctgaagttgtagatccgaaaaatttcaaacccacgaactttgtaactaaaaaagtttcagaatgtataattccacctaactctttttgtttagctagaacagttgaaaaattttgtattccaaacgatgttttagttatttgtttgggcaaatctacttatgctagatgtggaataattgtaa

SEQ ID NO: 265839 - DNA, 136 bp, Unknown
  Bacterial polypeptide expressing nucleotide sequence isolated from the Sargasso Sea
ccagcgaaaatttatgctaatgagggtatcgctcaagttttgttcttcgaagctgacagtgaatgtgatgtatcttatgctgacaaaaaaggcaagtatcaaaaacaggaatcaattgtacttcctaaactctagc

SEQ ID NO: 265840 - DNA, 184 bp, Unknown
  Bacterial polypeptide expressing nucleotide sequence isolated from the Sargasso Sea
tgggtgggaaggacatgtgacattagaattttctaatactactcctttgccagctaagatttatgctaatgaaggtgttgcacaacttgtatttatcaaaggcaatgaaaaacctagcattacttatgctaaaagaaaaggtaagtacatgaaacaaaaaggcgttactcttcctaagatttaa

SEQ ID NO: 265841 - DNA, 178 bp, Unknown
  Bacterial polypeptide expressing nucleotide sequence isolated from the Sargasso Sea
ggaaggacatgtcactcttgaattttcaaatacaacccctttacccgcaaaaatttatgctaacgaaggtgttgcacaattcatatttttaaagggcaatgaaaagcccgaagtaacttacgcaaagcgaaaagggaaatatatgaggcaaaaaggtgtaacacttccaaaagtataa

SEQ ID NO: 265842 - DNA, 220 bp, Unknown
  Bacterial polypeptide expressing nucleotide sequence isolated from the Sargasso Sea
aatgactgttctatctgataaatggataaaaaatatggctaaagaatatgaaatgatatctccatttgaagaatctcaagttagaggaaataaaatatcttttggaacttcaagctatggttatgatgctcgcgtgaattcggaatttaaaatatttacaaatgtaaattctgagattgtggacccaaaaaattttaaatcttcgagtttgtatcaaaat

SEQ ID NO: 265843 - DNA, 385 bp, Unknown
  Bacterial polypeptide expressing nucleotide sequence isolated from the Sargasso Sea
atgacagttctttcagataaatggataagaaaaatgtctaaagaagaagatatgatttctccttttgaagaaaaacaagtaagaggagaaagtatttcttatggactttcatcttttggctatgatgcaagggtttcaaatgagtttaaaatttttaccaatgttaattctgagattgttgaccctaaaaattttaaaccaactaattttgtaactaaaaatgtttcagagtgtattattccaccaaattcatttgtattagctagaacagttgaaaagtttaaaattcctaaagatgtacttgttatttgtttaggtaaatcaacatatgcacgatgtggaattatagtcaatgtaactcctttagaacctggttggcaaggtt

SEQ ID NO: 265844 - DNA, 268 bp, Unknown
  Bacterial polypeptide expressing nucleotide sequence isolated from the Sargasso Sea
aatgtcagttcaatctgataaatggattatacaaatggcaagaaatcacaatatgatctcgccttttgaagacaaacaggtaagaggggataaaatatcgtttggcgtgtcatcatatggttatgatgcaagagtttctaatgaatttaaaatttttacaaatgtaaattctgaaattgttgacccaaaaaattttaaatcttctaattttataactaaaaactcatcagaatgtataataccacctaattctttcgtgttagcaaga

SEQ ID NO: 265845 - DNA, 190 bp, Unknown
  Bacterial polypeptide expressing nucleotide sequence isolated from the Sargasso Sea
aatgacgattaaatcagataagtggataagaaagatggcagttgaacatggcatgattgagccatttcaagaggatcaaataagatattctggtgataattcaagacttatatcatatggactttcaagctatgggtatgacgttaggtgtgcaaatgaatttaaagtatttactaatattcattcagct

SEQ ID NO: 265846 - DNA, 199 bp, Unknown
  Bacterial polypeptide expressing nucleotide sequence isolated from the Sargasso Sea
atgacgattaaatcagataagtggataagaaagatggcagttgaacatggaatgattgaaccatttcaagaggatcaaataagatattctgatgacaattcaagacttatatcatatggcctctctagctatgggtatgacattaggtgcgcaaatgaatttaaagtatttactaacattcattcagcgatagtgaccc

SEQ ID NO: 265847 - DNA, 328 bp, Unknown
  Bacterial polypeptide expressing nucleotide sequence isolated from the Sargasso Sea
agaatgtattattccacctaattcgtttgtattagcaagtacggttgaacattttagaataccaaaggatgttttggttgtttgtttaggaaaatcaacttatgcaagatgtggaataatagtaaatgttactcctttagaaccaggttgggaaggtcatgtaactttggaattttcaaacacaacacctttgcctgcaaaagtatatgccaatgaaggtgttgcccaatttatatttctaaaaggaaacgaaactccagagacaacttattctgatagaaatggaaaatatatggggcaaaccggagtaactttacctaaaatatag

SEQ ID NO: 265848 - DNA, 227 bp, Unknown
  Bacterial polypeptide expressing nucleotide sequence isolated from the Sargasso Sea
tgcaagatgtggaattatagttaatgttacacctttagagcctggttgggaaggttatgtaacgcttgagttttcaaatacaacaccattacctgcaaaaatttatgctaatgagggagttgcacagtttattttcttaaaaggaaatgaaaaaccagaggtgacttatgctgatagagatggaaaatatatgggtcaaactggggtaacattacctaaagtttaat

SEQ ID NO: 265849 - DNA, 147 bp, Unknown
  Bacterial polypeptide expressing nucleotide sequence isolated from the Sargasso Sea
caacaccgttaccagcaaaaatttatgccaatgaaggagttgctcaatttgtttttattaagggcaatgaggatccagctgtttcatatgcagatagaaatggtaaatatcagggtcaaaagggagttacacttccaaaaatataaa

SEQ ID NO: 265850 - DNA, 205 bp, Unknown
  Bacterial polypeptide expressing nucleotide sequence isolated from the Sargasso Sea
aacgtaacgcctttagaaccttcatggtgtggaaatgttacacttgaattttcaaacacaacacctttacctgcaaaaatatatgcaaatgaaggtgcgtgccaatttgtttttttaaaaggcaatgaaaaaccagaaactacatattctgatcgagaaggcaaatatatggaccaaaaaggggttacacttcccaaagtttagc

SEQ ID NO: 265851 - DNA, 322 bp, Unknown
  Bacterial polypeptide expressing nucleotide sequence isolated from the Sargasso Sea
aatggcagtactatcagataaatggattagaaaaagtgctcttactaaaggaatgataaaaccttttgttagcaaacaagttagaaagggtaaaatttcttttggtttatcctcctacgggtatgatgcgagagtttcaaacgaatttaaaatattcacaaacgttaactcaggtattgtagatccaaaggttttcaaaaaagagagctttgttactaaaattggaaaagagtgtattattccacctaattcctttgctttagctaggactattgagtatttcaaaattcctgaagatgttctggtaatttgtttaggtaag

SEQ ID NO: 265852 - DNA, 379 bp, Unknown
  Bacterial polypeptide expressing nucleotide sequence isolated from the Sargasso Sea
catgacagtgctctcagataaatggatcaaaaaaatggttaaatcaactaacatgattaaaccatttgtttctaaacaaataaggaagggaaaaatttcatttggtctttcttcttacggttatgatgcaagagtttcaaacgagtttaaaatttttactaatgtaaactctggagtagttgatccgaaagtctttaaaaaagaaagttttgttactaaaattggaaaagaatgcattattcctccaaactctttcgcattaggaagcacaattgaatatttcaaaattccagaaaacgttctggttatatgcttaggaaaatctacctatgcaagatgtggtataatcgtaaatgttactcttttagagcccgggtgg

SEQ ID NO: 265853 - DNA, 352 bp, Unknown
  Bacterial polypeptide expressing nucleotide sequence isolated from the Sargasso Sea
atgtcgattaagtcagataagtggattaaagatatgtcaattaaacatgaaatgattaaaccattttcagaggttcaggtaaggcttgacgacagcggcaataaacttatttcttatggtgtatcgagctatggttacgatgttagatgttcaaatgaatttaaagttttcacaaatattcattcggcagttgtagaccctaaatcatttgacgaaaaaagctttgttgatatcaattctgatgtgtgcattattcctccaaattcttttgctttagcaagaacaattgagtattttaaaataccaagaaatgttttaactgtttgcctaggaaaatccacttatgctagat

SEQ ID NO: 265854 - DNA, 295 bp, Unknown
  Bacterial polypeptide expressing nucleotide sequence isolated from the Sargasso Sea
atgtctgtacaatctgataaatggattaagaaaatggctaaggaaaatggtatgatatctccatttgaggaagaacaagttagaggaaacaagatatcatttggtacctcaagttatggatatgatgctcgtgttaattcagagtttaaagtatttacaaatgtaaattctgagatagtagatccaaaaaattttaagcccactagttttgtttcaaaaactggaccagaatgtattatacccccaaattcttttgcattagctagcactgttgaatatttaaaaattccaaaag

SEQ ID NO: 265855 - DNA, 319 bp, Unknown
  Bacterial polypeptide expressing nucleotide sequence isolated from the Sargasso Sea
tatgccagtactttcagataaatggattaaaaaaaatgctttaacaaaaggtatgatcaagccttttgtaagcaaacaggtacgtaaaggaaaaatttcctttgggttatcctcatatggttacgatgctagggtatcaaatgaatttaaaatatttacaaatgtcaattctggcattgtagatccaaaagtttttaaaaaagaaagttttgtaacaaaaataggcaaagaatgtataatacctcctaattcttttgctcttgcaagaactattgagtattttaaaattccagaagatgtattagtgatttgcctcggg

SEQ ID NO: 265856 - DNA, 559 bp, Unknown
  Bacterial polypeptide expressing nucleotide sequence isolated from the Sargasso Sea
atgagcgttcaatctgacaaatggatcaaaaaaatgtccctagaacataatatgattgatccatttgtggaaaaacaagtttcttctggtaaaatatcttatggattaagctcttttggttacgacgtccgtgtatcagatgagtataaaatatttactaatgtaaattcctcaattgtcgatccaaaaaattttagtgaaacaaattttgtagatcgtaaggggccagaatgtattattccaccaaattcatttgttttagcgagaacaatagaatattttaagataccaagagacattttatgcatttgtgttggaaaaagcacttatgcaagatgtggaattgtcattaatgttacaccaatagaaaatgaattcgagggacatataacattagaattttctaacacaactccaaaccctgccaaaatttattctggggagggctgtgctcagtttttatttttaaaaggaaatgaacaaccagaaacaagttacaagtcaaggggtggcaaatatcaaggtcaaaagggtgtaacattagctaaagttaaataat

SEQ ID NO: 265857 - DNA, 325 bp, Unknown
  Bacterial polypeptide expressing nucleotide sequence isolated from the Sargasso Sea
aatgaccgttctatcagataaatggattaaaaaagcagctcaagatgggatgataaaaccttttgtgagcaagcaagttagaaaaggtaaaatttcttttggactctcatcttatggttatgacgcaagagtttctaatgaatttaagatatttaccaacgtaaattctggcattgtagatccaaaagtcttcaagaaagaaagttttgtaacaaaaatcggaaaagaatgcataattcctccaaattcttttgcattagcaagaactgttgagtattttaaaattcctgaaaatgtactggtgatatgtctaggtaaatctacc

SEQ ID NO: 265858 - DNA, 290 bp, Unknown
  Bacterial polypeptide expressing nucleotide sequence isolated from the Sargasso Sea
aatgtcagttcaatctgataagtggattatacaaatggccagagaaaatgacatgatctctccttttgaagacaaacaagttagaggagataaaatatcatttggtgtatcatcatatggttacgatgctcgagtgtctgacgaatttaaaatttttaccaacgtaaattctgaaatagtagatccaaaaaattttaaatcctcaaattttattactaaaaactcatctgaatgcataataccacccaattcatttgtattagcaaggactgtagaatattttaagatac

SEQ ID NO: 265859 - DNA, 322 bp, Unknown
  Bacterial polypeptide expressing nucleotide sequence isolated from the Sargasso Sea
tattatcccaccaaattcatttgcattagcaaggacggttgaatacttcaaaattccaagagatgttcttgttatttgtttaggtaaatcaacttatgctaggtgtggaattattgtaaatgtaactccacttgagcctgagtgggaggggcatgtaacacttgaattttccaatacaaccccattgccagcaaaggtttatgcaaacgaaggcgcttgccagtttcttttttttaaaggtgatgctccacctgatgtttcatataaggatagaagcggcaaatacatgggacaaaaaggcgtcacacttcccaagttataa

SEQ ID NO: 265860 - DNA, 472 bp, Unknown
  Bacterial polypeptide expressing nucleotide sequence isolated from the Sargasso Sea
atgtcagttcagcccgataaatggattgccaaaatggcaaaagacaaagaaatgatttctccttttgaagctaaacaaattagaagagataagatttcatttggagtttcttcttatggttatgacgcacgtgtttctgaagaatttaaaatatttaccaatgttaactctgaaattattgatccaaaaaattttaaacctacaaattttataacaaaaaatggatctgaatgtattataccaccaaattcatttgtattggcaagtactgttgaatattttaagataccaaatgatgttctggtaatttgtttaggtaaatcaacgtatgcaagatgcggaataatagtaaatgtaactcccttagagcctggatgggaaggtcatgtaactttagaattttctaataccacacctctgcctgctaaaatttatgccaatgaaggagcggcacaatttatttttctacgag

SEQ ID NO: 265861 - DNA, 595 bp, Unknown
  Bacterial polypeptide expressing nucleotide sequence isolated from the Sargasso Sea
atgcgcttgtgcgaccgcgatatctaccaacatctgcaagatggaaaaattaaaattgaccctacacccagctacgatcaaataagtggtgtaacggtagatatccgcctaggtaataaatttcgcgtgtttgaagatcaccaagcgccgtttatcgatttaagtgggccgaaagcacaggttcaagaggcgctcgaccatgttatgagcgatgaaattgaactagaagagggtaaagccttctttctacaccctggggagctagcgcttgccattacccacgagtcagtaaccttgcctgacaacatcgtaggttggctagacgggcgttcttcgcttgcgcgtttgggcttaatggttcacgtgaccgcgcatcgaatagatccaggctggtcgggcaacatcgttcttgagttttacaacagtggtaagttaccgctggcgcttcgccctaaaatgaaaataggggcgcttagctttgaggtgctatctgcgccagctgaaaagccgtacaacgcaagagtggacgctaaatacaaaggccaagcaggcgcagttgcaagccgaatctcgtcagacgacgagagtaaataaa

SEQ ID NO: 265862 - DNA, 421 bp, Unknown
  Bacterial polypeptide expressing nucleotide sequence isolated from the Sargasso Sea
ttcagagtttaaaatatttactaatgtaaattctgagatagtagatccaaaaaattttaaaccctctagttttgtttcaaaaacaggatcagaatgtattattcctccaaattcttttgctctcgcaagtacaattgaaaagtttaaaattcctgaagatgttcttgttatttgtttgggtaaatcaacatatgctagatgtggtataatagttaatgtgactcctttagagcctggctggacaggtcacgttacacttgaattttcaaacacaactccattaccagcaaaaatatatgctaacgaaggagtggcacaatttatatttttgaaggggaatgaaaggccagaaattacctatgctgaccgtaaagggaaatatatggaccaagaaaataaggttacgctaccaaaagtttaa

SEQ ID NO: 265863 - DNA, 498 bp, Unknown
  Bacterial polypeptide expressing nucleotide sequence isolated from the Sargasso Sea
catgcgcttgtgcgaccgcgatatctaccaacatctgcaagatggaaaaattaaaattgaccctacacccagctacgatcaaataagtggtgtaacggtagatatccgcctaggtaataaatttcgcgtgtttgaagatcaccaagcgccgtttatcgatttaagtgggccgaaagcacaggttcaagaagcgcttgaccatgttatgagcgatgaaattgaactagaagagggtaaagccttctttctacaccctggggagctagcgcttgccattacccacgagtcagtaaccttgcctgacaacatcgtaggttggttagacgggcgttcttcgcttgcgcgtttgggcttaatggttcacgtgaccgcgcatcgaatagatccaggctggtcgggcaacatcgttcttgagttttacaacagtggtaagttaccgctggcgcttcgccctaaaatgaaaataggggcgcttagcttcgaagtgtgtcagcgcca

SEQ ID NO: 265864 - DNA, 369 bp, Unknown
  Bacterial polypeptide expressing nucleotide sequence isolated from the Sargasso Sea
aaaattttaagaaagagggttttgtaagtaaaaaatcaaaagtttgtattattcctcctaactcatttgtattagctagaacagttgaatattttaaaatacccgaaaatgttattgtaatctgtttaggtaaatctacttatgctagatgtggaataattgttaatgttactcctttagaaccaggatgggagggtcatgtaacactagaattttcaaataccactcctcttccagcaaaaatttatgcaaatgagggagccgctcaatttatttttattaaaggaaatgaaaaacctgaaactacatattctcagagaaaaggtaaatatatgaagcaaaagggtgttacacttcctaaaatttagc

SEQ ID NO: 265865 - DNA, 556 bp, Unknown
  Bacterial polypeptide expressing nucleotide sequence isolated from the Sargasso Sea
atgtcggtccaatctgataagtggattatacaaatggccagagataatgatatgatctctccttttgaagacaaacaagttagaggagataaaatatcatttggtgtttcgtcatatggttatgatgcaagagtttctgatgaatttaaaatttttaccaacgtaaattccgaaattgtagatccaaaaaattttaaatcctcaaattttataacaaaaaactcatctgaatgcataataccacccaattcattcgtattagcaaggactatagaatattttaagattcctaaaaatgttttggttatatgtttaggaaaatctacatatgcaagatgtggaataattgtaaacgttacacctcttgaaccaggttgggagggacatgtaacattagaattctctaatacaacaccgttaccagcaaaaatttacgccaatgaaggagttgctcaatttgtttttattaagggcaatgaggatccagctgtttcatatgcagatagaaatggtaaataccaaggtcaaaagggagttacacttccaaaaatataat

SEQ ID NO: 265866 - DNA, 372 bp, Unknown
  Bacterial polypeptide expressing nucleotide sequence isolated from the Sargasso Sea
caaaaaactttaaatcctcaaattttattactaaaaactcatctcaatgcataataccacccaattcattcgtattagcaaggactgtagaatattttaagatacctaaaaatgttttagttatttgtttaggaaaatccacatatgctagatgtggaataattgtcaacgttacacctcttgaaccaggctgggagggacatgtgacattagaattttccaatacaactccattaccagcaaaaatttatgccaatgaaggtgttgctcaatttgtttttattaagggcaatgaagatccagctgtttcatatgcagatagaaatggtaaataccaaggtcaaaagggagttacacttccaaaaatataaa

SEQ ID NO: 265867 - DNA, 412 bp, Unknown
  Bacterial polypeptide expressing nucleotide sequence isolated from the Sargasso Sea
aatgtcgattaagtcagataaatggataaaagatatgtcaattaatcatgaaatgattaaacctttttctgagggtcaggtaaggctagacgatagtggtaataaactcatttcttatggtgtatcaagttatggttacgatgttagatgctcaaatgaatttaaagtttttacaaatattcattcggcagttgtagatcctaaatcatttgatgaaaaaagctttgttgatattaattccgatgtatgtattattcctccaaattcttttgctttagctagaacaattgagtattttaaaataccaagaaatgttttaactgtttgcttagggaaatctacttatgctagatgtggaattattgttaacgtaacgccattagaaccagagtgggaggggcacgtaacacta

SEQ ID NO: 265868 - DNA, 223 bp, Unknown
  Bacterial polypeptide expressing nucleotide sequence isolated from the Sargasso Sea
agatgtggaataattgtgaacgtcacacctctcgaaccaggctgggaaggacatgtaacattagaattttctaatacaacaccgttaccggcaaaaatttacgctaatgaaggagttgctcaatttgtttttattaagggcaatgaggatccagctgtttcgtatgcagatagaaatggtaaataccaaggtcaaaagggagttacacttccaaaaatataat

SEQ ID NO: 265869 - DNA, 475 bp, Unknown
  Bacterial polypeptide expressing nucleotide sequence isolated from the Sargasso Sea
aatgtctattaaaccagatgtatggattaaacgaatggctgaatcagaaggaatgattgaacctttttctgagaatcaggtgcgggttgatgaaaacggagaaaaactcatttcgtatggcgtttcaagtttcggctatgacgtgcgctgcgccaatgagtttaaagtttttacaaatattcattccgcaaccgttgaccccaaggtttttgatgacaatagctttgtggatataacttcagatgtatgcgttatcccgcctaattcttttgcgctagcaagaacagttgaatattttcgaatcccaagaaatgtattaactatttgtcttggcaaatcaacatatgcgagatgcggtatcattgttaatgttactccgttagagccagagtgggaagggcatgtaaccctggagttttcaaacaccaccaatttaccagaaaaaatatatgccggtgaaggtgtcgctcagatg

SEQ ID NO: 265870 - DNA, 502 bp, Unknown
  Bacterial polypeptide expressing nucleotide sequence isolated from the Sargasso Sea
gaggatcaaataaggtattctgatgacaattcaagacttatatcatatggcctctctagctatgggtatgacgttaggtgcgcaaatgaatttaaagtatttactaacattcattcagcgatagttgacccaaaatcttttgatgaaaaaagctttgtagacattaactcagatgtatgtgtaatacctcctaactcttttgctttggcaagaacagtagagtatttcaggatacccagagatgttctaactatctgtctcggtaaatcaacttatgcaagatgtggaattatagtaaacgttactccccttgagcctgaatgggaaggccatgtcaccctcgagttttcaaatacaagcaatttgccagcgaaaatatatgcaggtgagggggtagcccaaatgatattccaccaatcagatgagcaatgcgaggtaagctataaggatagagatggaaaatatcagggccaaactggggttacgctacccaaaacttagt

SEQ ID NO: 265871 - DNA, 429 bp, Unknown
  Bacterial polypeptide expressing nucleotide sequence isolated from the Sargasso Sea
aatgacgattaaatcagataagtggataagaaagatggcagttgaacatggcatgattgaaccatttcaagaggatcaaataaggtattctgatgacaattcaagacttatatcatatggcctctctagctatgggtatgacgttaggtgcgcaaatgaatttaaagtatttactaatattcattcagcgatagttgacccaaaatcttttgatgaaaaaagctttgtagatattaactcagatgtatgtgtaatacctcctaactcttttgctctagcaagaacagtagagtatttcaggatacccagagatgttctaactatctgtctcggtaaatcaacttatgcaagatgtggaattatagtaaacgttactccccttgagcctgaatgggaaggccatgtcaccctcgagttctcaaatacaag

SEQ ID NO: 265872 - DNA, 382 bp, Unknown
  Bacterial polypeptide expressing nucleotide sequence isolated from the Sargasso Sea
atgagcgttttgtcagataaatggataaaaaaaatggcaaaaactaaaaagatcatttcaccttttgtcccaaaacaaacaagaaaaggcagaatatcttatggtctttcatcatacggatatgatgcaagagtttcaaatgattttaaaattttcacaaatgttaattccactattgttgatcctaaaaattttaaaaaagatggttttatatcaaaaaaatcaaatatttgtgtaataccaccaaactcttttgctttagccagaaccgtagaatatttcaaaatacccgataatgtaattgtaatttgtttaggtaaatctacatatgcaagatgtggtataattgtaaatgtgacaccattagaaccaggttgggaag

SEQ ID NO: 265873 - DNA, 556 bp, Unknown
  Bacterial polypeptide expressing nucleotide sequence isolated from the Sargasso Sea
aatgagcgttttatcagatcgttggattaaaaaaatggctcttgaaaacgaaatgataaaaccatttgtggcagagcaaaaagcaaataaaaatatttcttttgggttatcgtcatttggttacgatgctagagtctccaatgaatttaaagtttttactgatgtaaattctgttattgttgatccaaaaaattttgaaaaaaatagttttgttactagaactggcccagaatgtataattccaccaaattctttcgtgcttgcgagtacagtagaatattttaaaattccaaaaaatgttttagttatttgcttaggaaaatccacatatgcaagatgtggaattatagtaaatgttacaccactagaacctggttgggagggacatgtcacacttgagttttctaatacaacgccattacctgcaaaaatttatgctaacgaaggcgcggctcaatttatttttttagaaggtaatgaggcaccagaaacaacttactctcaaagaaatggcaaatatatgaaacaaactggcgtaactttgcctaaagtataa

SEQ ID NO: 265874 - DNA, 556 bp, Unknown
  Bacterial polypeptide expressing nucleotide sequence isolated from the Sargasso Sea
aatgagcgttttatcagatcgctggattaaaaaaatggctatagaaaaagaaatgattaaaccatttatttctgaacaaaagcatgatggaacaatttcttatggattgtcttctttcggttatgatgcgagggtttctgatgaatttaaaatttttacagatgttgactctgcagtagttgatccaaaaaattttaaaaataatagtttcgtatccagaaaaattaatgagtgtataataccaccaaattcatttgttttagcaagcactgtagaatactttaaaataccaaaagatgttttagtgatatgtttaggtaaatctacatacgctagatgtggaattattgttaatgtcacaccacttgaaccaggttgggaaggtcatgttacgcttgaattctctaatactactccactacctgcaaaaatttatgctaatgaaggagcagcacagtttatttttttgaaaggtaatgaagagccagaaataacttatgacaaaagaaatggaaagtatatgagacaagctggagttactctgcctaaagtttag

SEQ ID NO: 265875 - DNA, 446 bp, Unknown
  Bacterial polypeptide expressing nucleotide sequence isolated from the Sargasso Sea
tatgacgataaaatcggataagtggatcaaagaaatggctatgcatcataatatgattgagccttttcaagaggatcaagttaaaactaataatggagacaaaatagtctcttatggaacctcaagctatggatatgatgttcgttgcgctgatgaatttaaagtttttacaaatataaattcaactatggttgatccaaaaaactttgatgataagagttttatagatattaaatctgatgtttgcacaatccctcctaattcattcgctttagctagaactgtagaatattttaagattcctagacaggttttaacattatgtttaggaaaatctacctatgctagatgcgggattattgtcaatgtaacaccgttagaaccagaatgggaaggacatgtcaccttagaattttcaaatacaacatcgcttccagcaaagatat

SEQ ID NO: 265876 - DNA, 556 bp, Unknown
  Bacterial polypeptide expressing nucleotide sequence isolated from the Sargasso Sea
atgtcagtacagtcagataattggataaggaaaatggccatttcacaaagtatgattaaaccattggtatcaaaacagataagaaagggaaaaatttcttttggactctcatcttacggctatgatgctcgagtatcaaacgagtttaaaatattcactaatgttaactctggaatagtagatcctaaaacttttaaaaaagagagttttgtcacaaaaaaaggaaaagagtgtattattcccccaaattcttttgctttagctagtacgatggaatattttaaaataccagataatgtattagtcatttgtcttggtaagtctacttacgcaagatgtggaataattgtaaacgtaactccactggagccgggttgggaaggtcatgtaactttagaattttctaacactacacctttgccagcaaaaatttatgctaatgaaggtgttgcacagttcatttttattaaagggaatgaaaaaccgtctgttacttacaatgatcgtaagggaaagtatatgaaacagcgaggcgtaacattgccaaaaatttaat

SEQ ID NO: 265877 - DNA, 568 bp, Unknown
  Bacterial polypeptide expressing nucleotide sequence isolated from the Sargasso Sea
gatggcaataaaatctgataagtggattaaagatatggcggaaggccatggaatgatcgaaccattccaatatgatcaggtgaaacaaaatggtaagggttcaattgtctcatttggaacatcaagttacggatatgatgttcgttgctctgacgaatttaaaatctttacaaatataaattcatcttttgttgatcctaaagctttcgatgagcaaagttttgtggatgtaaaatctgacgtgtgcatcattccgccaaattcgtttgcccttgcacgcactgtcgagtatttcagaatccctagaaaggtgcttacgctgtgcttaggtaaatcaacttacgctagatgtgggataattgttaacgtgacgccgctggaacctgagtgggagggtcacgtaactctggagttttccaatactacaccacttccagccaaaatatatgcaaatgagggtgtagcgcaattcatattcttagagtccgatgaagtttgtgaaacttcttacaaagatcgtaaaggtaaatatcagggacaaaagggtgtcacacttcctaaaacataa

SEQ ID NO: 265878 - DNA, 226 bp, Unknown
  Bacterial polypeptide expressing nucleotide sequence isolated from the Sargasso Sea
atgcagatgtggaataattgtaaacgtcacacctctcgaaccaggttgggagggacatgtaacattagaattctctaatacaacaccgttaccagcaaaaatttatgccaatgaaggagttgctcaatttgtttttattaagggcaatgaggatccagctgtttcatatgcagatagaaatggtaaatatcagggtcaaaagggagttacacttccaaaaatataa

SEQ ID NO: 265879 - DNA, 380 bp, Unknown
  Bacterial polypeptide expressing nucleotide sequence isolated from the Sargasso Sea
agttgatccaaaaaattttaaacctactaattttataactaaaaatggatcagaatgcattatacctccaaattcgtttgtattagcaaggactgttgagtactttaaaattcctaaagatgtacttgttatttgtttaggcaaatcaacatatgcaagatgtggaataattgttaacgtaactcctctcgaaccaggttgggaaggtcatgtaactttggagttttcaaatacaactcctttaccggcaaaaatttatgctaatgaaggtgtggctcaatttatcttcttaaaaggcaatgaagttcccgaagttacttatgctgatagaaatggcaaatatatgggccaaaaaggtgtaacgcttccaaaagtataat

SEQ ID NO: 265880 - DNA, 389 bp, Unknown
  Bacterial polypeptide expressing nucleotide sequence isolated from the Sargasso Sea
catgagcattaaaaacgatcgctggattattgaacaagcaaaaaaaggaatgatcgaaccattctctgaaaaacaagtcaaacaagaaggcaatcgttctctcatatcttacggcgtttccagttatggttatgatgtcaggtgtgcaagagaatttaaaatttttaccaacgtgcacgcctctgtcattgacccaaagtcatttgatcccaacagttttatcaccatagaaaaagacatatgcaccatccctcctaatagctttgcacttgcaagaacggttgaatactttaggatcccacgccacacattaaccatttgccttggaaaaatcacctatgcacgttgcggtatcatcgtcaatgtaacgccactagaacctgagtggg

SEQ ID NO: 265881 - DNA, 556 bp, Unknown
  Bacterial polypeptide expressing nucleotide sequence isolated from the Sargasso Sea
atgccagttttgtcagataaatggattaaaaaaatggctacaagtcaagaaatgattaaaccatttgaagaaaaacaaataagaaatggtaaaatatcttatggtctatcttcgttcggttatgatgctagagtttctaatgaatttaaaatttttactaatgtaaattccgaaatcgttgatccaaaaaaatttaaaccaagtaattttataaccaaaaatatagatgaatgcattataccgcccaattcatttgttcttgcaagtactgtagaatattttaagataccaaaaaatgttttagttatatgtcttggaaaatctacctatgcaagatgtggtatcatagtcaatgtaactcctttagagccaggatgggaaggtcatgttacgctcgaattttctaatacgactccattgccagctaagatatatgcaaacgagggagtagctcaatttgtttttttagagggtaatgaaaatcctgaagtgtcatactctgacagaaaaggtaaatatatgggtcaaactggggttactttaccaaaagtataaa

SEQ ID NO: 265882 - DNA, 556 bp, Unknown
  Bacterial polypeptide expressing nucleotide sequence isolated from the Sargasso Sea
tatgacagttctttcagataaatggattaagaaagcagcaaaacaaaaaggaatgattaagccttttgtgggtaaacaggtaagaaaaggaaaaatttccttcggtttatcttcttacggatacgatgcaagggtgtctaatgaatttaaaatttttacaaatgtgaattcaggtgttgtagatcctaaagtttttaaaaaagagagctttgttactaaaattggaaaagaatgtattattcctccaaattcctttgcactagcaagaacgatggaatattttaaaatcccggatgacattctagttatttgccttggaaaatctacttatgcaagatgtggaattatagtgaatgtaacgcctttagaacctggttgggaagggcacgtaactttagaattttcaaacaccactccactaccggctaaaatttatgcgaatgaaggtgtagctcaatttatatttttaaaaggcaatgagagacccagcgtaacttatgctaatagaaaaggtaaatacatgaaacaaaaaggcgtaacacttccaaaagtttaa

SEQ ID NO: 265883 - DNA, 520 bp, Unknown
  Bacterial polypeptide expressing nucleotide sequence isolated from the Sargasso Sea
atgacagtactttcagataaatggattaaaaaaaatgcacaaattaagggaatgattaaaccctttgtaggaaaacaagttagaaaaggaaaaatttcttttggtctttcatcttatggatatgatgccagagtttcaaacgaatttaaaatatttacaaatgtcaactcaggagtcgtagatcctaaagttttcaaaaaagaaagttttgtaactaaaaaaggtaaagaatgtataatcccacctaactcatttgcgcttgcaagaactgttgaatattttaaaattccagaaaatgttttagttatctgcttaggaaaatctacctacgcaagatgcggaataattgtaaatgttacacctttagagcctggctgggagggacatgttactttagaattctctaacacaacacccttaccagccaagatttatgctaatgaaggagttgcacaatttgtatatattaaaggaaatgaaaaaccaaatggtttcttatgcgaaaagaaaaggcaaatat

SEQ ID NO: 265884 - DNA, 367 bp, Unknown
  Bacterial polypeptide expressing nucleotide sequence isolated from the Sargasso Sea
ttttaaaccaacaaattttgttacaagaaaaggaccagaatgtataattccgcctaattcatttgctttagcaagcacagttgaaaagtttaaaattccagaagatgttctggttatttgtttaggcaaatcaacatatgcaagatgtggtatcattgtaaatgtaacaccgttagagcctggatggactggacatgtgactttagaattatcaaattcaactcctttacctgcaaagatttatgctaatgaaggatgttgccaattcatatttttaaagggaaatgaaaggcctgaaattacctacgcagatcgtaaaggaaaatatatggaccaagaaaacaaggttacattaccaaaagtttaa

SEQ ID NO: 265885 - DNA, 372 bp, Unknown
  Bacterial polypeptide expressing nucleotide sequence isolated from the Sargasso Sea
catgagtattaaatccgataagtggattaaagaaatggccaataatcataggatgatagagcctttcgaggctgggcaggtaaggttaggtgcaaaagaagagaaattaatttcttatggaacctcttcatatggatatgatgttagatgctctaacgaatttaaagtatttactaatattaattctgctactgttgatccgaaaagctttgatgaaaatagctttgtagatgtaaaaagtgatgtttgcgtaatacctccaaactcctttgctcttgctagtactatcgaatattttagaattcccagaaatgtccttactatttgtttaggtaagtccacttatgctagatgtggaataatagtaaacgt

SEQ ID NO: 265886 - DNA, 520 bp, Unknown
  Bacterial polypeptide expressing nucleotide sequence isolated from the Sargasso Sea
aatgattaaacctttttctgatgatcagataagaaaggatgagaatggaaataagctaatttcttatggggtgtctagttacgggtatgatgttagatgttcaaatgaatttaaagtttttacaaatatacattctgcaattgtagaccctaagtcttttgatgaaaaaagttttgtggacatcacttcagatgtttgtgttattcctccaaattcatttgctttagcaagtacagttgagtattttaaaatacccagaaatgttcttaccatttgtttaggtaaatctacttatgcaagatgcggaattattgtaaatgttactccgcttgagccagaatgggagggtcatgtaacacttgagttttcaaatacaacaaatttaccagcaaaaatttatgctggagaaggggttgcccaaatgttattttttgagtcagatgaagaatgtgatgtaagttataaagataggggtggaaaataccaaggtcaaacaggcgtcacactacccaaggcttaa

SEQ ID NO: 265887 - DNA, 556 bp, Unknown
  Bacterial polypeptide expressing nucleotide sequence isolated from the Sargasso Sea
atgaccgttctttcagataaatggataaaaaaaatggtcaaaactcatgaaattataaaaccttttatatctaagcagactagaaaaggaaaaatttcttttggattatcttcttatgggtatgatgccagagtatctaatgagtttaagatctttacaaatgtgaattctggagttgttgaccccaaaaaatttaaaaaagaaagttttgttactaagattggtaaagagtgtattattccacctaattcatttgcgttggcaagaactatagaatattttaagattccagaaaatgttttagtgatatgtttgggcaaatcaacttatgctaggtgcggtataatagtgaatgtcacacctcttgagccaggatgggaaggatatgttaccttagagttttcaaacaccactccacttccagctaaaatttatgccaatgaaggtgtagcacaatttgtttttatcaagggtaaccaaacgcctgaggtaacctattcaaaaagaaaaggtaaatacatgaagcaaaaaggtgtaacacttcccaaagtttaaa

SEQ ID NO: 265888 - DNA, 550 bp, Unknown
  Bacterial polypeptide expressing nucleotide sequence isolated from the Sargasso Sea
aatgacagttttatcagacaaatggattaaaagattagctacccaaaaaaaaatgattaaaccttttgttggtagacaagtgagaaaaggtaaaatttcatttgggctttcatcatatggttacgatgctagagtttctaatgaatttaagatttttactaatgtaaactcaggtgtagtagacccaaaagtttttaaaaaagatagttttgtaacaaaaattggcaaagaatgtataattccaccaaactctttcgctttagctagaactatagaatattttaaaatacccgaaaacgttctagtaatttgtttaggaaaatctacctatgccagatgtggaataatagtaaatgttacacctcttgagccagggtgggagggacatgttactttggaattttcaaataccactcctttaccagctaaaatttatgcaaatgaaggtgtggctcaatttgtgtttataaaaggaaatgaaaaaccgagtgttacatatgcaaaaagaaaaggtaagtatatgaagcaaaaaggggtaacacttcctaag

SEQ ID NO: 265889 - DNA, 556 bp, Unknown
  Bacterial polypeptide expressing nucleotide sequence isolated from the Sargasso Sea
atgacagttcagtctgataaatggattaaaaaaatgtcaaaagaaagtggtatgatatatccttttgaagagcagcaagtcagaggaaataaaatatcttttggtacttcaagctatggttatgatgcgcgcgttggatcagagtttaaagtatttactaatgttaattcagagatagtggatccaaaaaatttcaaatctacgagttttgtttcaaaaactggttcagaatgtattatacctccaaactcttttgctttagcaagtacagttgaatatttcaaaataccaaaagatatcctggttatttgtctaggtaaatctacatatgccaggtgtggtataattgtaaatgtaactccactagaacctggttgggaagggcacgtgactcttgaattttctaatacaaccccacttcctgctaaaatttatgctaatgagggtgttgctcagtttatttttttaaaaggaaacgaattaccagaattgacttatgctgatagaaaaggaaaatatatgggtcaaactggagtaactttaccaaaagtttaga

SEQ ID NO: 265890 - DNA, 553 bp, Unknown
  Bacterial polypeptide expressing nucleotide sequence isolated from the Sargasso Sea
atgtcagttctttcagataaatggataaaaagaatagctaaaacaaaaggaatgataaaaccttttgtaagcaaacaagtaagaaaaggaaaaatttcatttggattgtcctcttacggttatgatgctcgtgtttctaatgagtttaaaatttttactaatgtaaattctggagtagttgacccaaaagaatttaagaacgaaagctttgttactaaaaaaggcaaagaatgcattattcccccaaattcttttgctttagctagaaccattgaatactttaaaattccagaaaatgtgttggtgatatgtttaggaaaatcaacttatgctaggtgcggaataattgtaaacgtaactccgttagaaccaggttgggaaggacacgttactttagaattttccaatacgactcctcttcctgcgaagatttatgctaatgaaggagtagctcaatttgtattcattaaaggaaatgaaaaacctgaaattacatacgcaaaaagaaaaggaaaatacatgaaacaaaaaggcgttacccttcctaaagtat

SEQ ID NO: 265891 - DNA, 571 bp, Unknown
  Bacterial polypeptide expressing nucleotide sequence isolated from the Sargasso Sea
atgactattaaatctgataagtggataagaaaaatggcaaaagaacataatatgattgagccatttgaagctgggcaggttagaaaaggtcaaaataatgataagctaatttcttatggaacatcttcttatggttatgatgttagatgttccaacgaattcaaggtcttcacaaatatccattcagcaactgttgaccctaaacactttgatgagaacagttttgtagatgttgttgatgatgtatgtgttataccacctaattcctttgcactagcaagcacaatagaatatttcaggattccaaggaacgtgctaactatatgtcttggaaaatccacctatgcaagatgcggaataatagtaaatgtaacgcctttggaaccagagtgggaagggcacgttactttagagttttctaatacgaccagtttgcctgcaaaaatttacgctaatgaaggggtagcccaaatgcttttcttagaatcagatgaagagtgtgaagtcagttacaaagataggggtgggaaataccaaggtcaaacaggtgtaacattacccaaaacttagt

SEQ ID NO: 265892 - DNA, 571 bp, Unknown
  Bacterial polypeptide expressing nucleotide sequence isolated from the Sargasso Sea
catgacgattaaatcggataaatggatcaagaagatggctcaagagcatcagttgattgagccctttacagaaaatcaagtccgtgatgcagacagcggcaataaaattatttcttacggggtttcaagttttggttatgacgtgcgttgtgctgatgagtttaaagtttttactaacattaattcagcaaccgttgatcccaaatcctttgatgaaaatagttttgttgatgtgaaatcagatgtctgtgtgattccgcctaactcatttgcgctagcaagaacgattgaatattttaagattcctcgcaacgtattaaccatttgtttggggaaatcgacgtacgctcgatgcggcattattgttaacgtaactccacttgaacctgaatgggaaggtcatgtgaccctagagttttctaatactacaacgctaccggcaaaaatttatgcaggtgagggtgttgctcaaatgattttcttggaatctgatgaggattgcgaaacatcttacaaagatcgtaaaggcaagtaccaaggtcagacaggagtcacgttacccaaaacttaa

SEQ ID NO: 265893 - DNA, 556 bp, Unknown
  Bacterial polypeptide expressing nucleotide sequence isolated from the Sargasso Sea
aatgtcagtacaatcagataaatggataatcaaaatggcgaaagaacaagcaatgatttcaccatttgaggataaacaaataagggaagggaaaatttcatttggtgtttcttcatacgggtacgatgcgagagtatctaatgaatttaaaatatttactaatgttaactctgaaattgtagatccaaaaaattttaaaccaacaaattttgtaacaaaagaatctgatgaatgcattattccaccaaattcttttgttttagcaaggacagtagaatattttaaaatccctagtgatgttttggttatttgcttaggaaagtctacttatgctagatgtggaattattgttaatgtaacacctttagaaccaggatgggaaggtcatgtaactcttgaatttagcaacactactcctctgccagccaaaatttatgcaaatgaaggtgttgcccaatttatatttttaaaagggaatgagaaaccagatgtctcatatgcggatagaaatggaaaatatatgggtcaaaaaggagtaactctccctaaaatataa

SEQ ID NO: 265894 - DNA, 460 bp, Unknown
  Bacterial polypeptide expressing nucleotide sequence isolated from the Sargasso Sea
cattgtggtgtatcatcatatggttatgatgctagagtatctgatgaatttaaaatattcactaacgtaaattcagaaattgtagatccaaaaaattttaaatcttcaaattttataacaaaaaactcatctgaatgtataataccaccgaattcatttgtattagcgagaacagtagaatatttcaagatacccaaaaatgttttggttatatgtttaggaaaatctacatacgctagatgtggaataatagtaaacgttacacctcttgagcctggctgggaaggtcatgtgacattagaattttccaatacgacgccgttgcctgcaaaaatttatgccaatgaaggtgttgctcaattcgtttttattaagggtaatgaagatccattagtttcatatgcagatagaaatggtaaatatcaaggtcaaaagggagtaacacttcctaaaatataat

SEQ ID NO: 265895 - DNA, 232 bp, Unknown
  Bacterial polypeptide expressing nucleotide sequence isolated from the Sargasso Sea
acttatgctagatgcggaattatcgtaaatgttactccacttgagccagagtgggagggtcatgtaacacttgaattttcaaacacaacaaatttaccagcaaaaatttatgctggagagggagttgcccaaatgttgttttttgagtcagatgaagaatgtgacgtaagttataaagataggggtggaaaataccaaggtcaaacaggtgtcacactacccaaggcttaaa

SEQ ID NO: 265896 - DNA, 541 bp, Unknown
  Bacterial polypeptide expressing nucleotide sequence isolated from the Sargasso Sea
accattattattgaccctcgccctcgtattgaggcgatttcaggcgtcagcgtggatgtgcgtttaggcaaccaatttcgggtatttcaggaccatacagcaccttacattgatttaagtggcccaagcgcagaaatgcagttggcgttagacagagtcatgagtgacaaaattgacatagcggaaaaccaagcgttttttctgcacccaggtgaacttgctctggcagttacccttgaaagtgtcacactgccagcagatattgtaggctggttagatggtcgctcgtctttggcgcgtttagggttaatggtgcatgtgaccgcgcatcggattgatccaggttggcaaggaaagattgtgctggagtgttacaacagtggtaagttacctttagctttgcgtcccacaatgaccattggcgcgcttaattttgaacgcttaagttctgcggtagctcgtccttataacacccgtgagagcgcaaaatataaagatcagcaagatgctgtcccaagtcggatcagccaggacaaataat

SEQ ID NO: 265897 - DNA, 556 bp, Unknown
  Bacterial polypeptide expressing nucleotide sequence isolated from the Sargasso Sea
aatgtcagttctctccgataaatggattagaaaaatgtccaaagaatacaacatgatttcaccttttgaggaaaaacaagtaagaggcaagagtatttcttatggactttcctcttttggctatgatgcaagagtatcagacgagtttaaaatttttacaaatgttaattctgagattgttgaccctaaaaatttcaaaccaacaaattttgtaactaaaaatgtatctgaatgtgttattccaccaaattcatttgttttagcacgaactgtagaaaagtttaaaattccaaatgatgtattggttatttgtctaggtaaatcaacatatgcaagatgtgggatcattgtaaatgtaaccccactagagcctgggtgggaaggatatgttacgcttgaattttcgaacaccacacctttacctgcaaaaatttatgcaaatgaaggtgttgcacaatttattttcttaaaaggaaatgaaaaaccagaagtgacttatgcagatcgagatggaaagtatatgggtcaaactggggtaacattacctaaagtttaa

SEQ ID NO: 265898 - DNA, 556 bp, Unknown
  Bacterial polypeptide expressing nucleotide sequence isolated from the Sargasso Sea
atgtcagtccagtcagataaatggattaagcaaatggcaaaagatcacaaaatgatttcaccatttgaggataaacaagtaagaggtgataaaatttcttttggagtttcttcatacggttatgatgcaagagtttctaatgagtttaaaatttttacaaatgtaaattcagaaatagttgatccaaaaaactttaaacctacaaactttgttacaaaaaaatcttctgaatgtataattccgccaaattcatttgttttagcaagcacaattgaatattttaaagttccaaaaaatattttagttatttgtcttggaaaatctacttatgcaagatgtgggattatagttaatgttactccattagaacctggctgggaagggcatgtaactttagaattttcaaacaccacacctttgccagctaagatttatgcgaatgaaggagctgcacaatttgtttttctcaaaggaagtgaggtgccagaaactacttatgcagatagaaatggcaagtatatggggcaaactggtgtaactttacctaaagtttaat

SEQ ID NO: 265899 - DNA, 514 bp, Unknown
  Bacterial polypeptide expressing nucleotide sequence isolated from the Sargasso Sea
atgccagtactttcagataaatggattagaagaaatgtaaaattaaaagggatgataaaaccttttgtgaataagcaggtaagaaaaggaaaaatctcttttggactttcttcttatgggtacgatgcaagagtttcaaatgagtttaaaatttttacaaatgttaattcaggtatagtagatccaaaaatatttaaaaacgaaagttttgtaacgaaaaaagggaaagagtgcattatcccaccaaattcttttgcattggcaagtactatagaatattttaaaataccagaggacgtcctagtaatttgtttaggtaaatctacttacgcacgatgtggaataattgttaacgtaactccgcttgaacctggctgggaggggcatgtcacgttagaattctccaatacaacacctttgcccgcaaaaatttatgctaatgagggcgtagctcaatttatatttataaaaggcaacgaaaaacctgaaattagttatgcaaaaagaaaaggta

SEQ ID NO: 265900 - DNA, 361 bp, Unknown
  Bacterial polypeptide expressing nucleotide sequence isolated from the Sargasso Sea
gatgataaagggtttgtagatcggccaggtaaagaatgcataattccacctaactcatttgcattagcaagaaccgttgagtattttagaattcctcgcgatgttcttgtagtttgtttaggaaaatcaacttatgcaagatgtggcattatcgtaaatgttactcctcttgaaccagagtgggagggtcacgtaactttagaattttctaacacaactccattacctgcaaaaatttatgctaatgagggagcgtgccagtttttattctataagggagaagcgccaccagaagtttcatataaagatcgtaaaggtaaatatatgatgcaaacaggggttactttacctaaactttaaa

SEQ ID NO: 265901 - DNA, 543 bp, Unknown
  Bacterial polypeptide expressing nucleotide sequence isolated from the Sargasso Sea
aatgtctgtccaatctgataaatggattaagaaaatggcaaaagagcatgccatgatatccccatttgaagaagagcaagttagaggaaataaaatatcatttggtacttcaagctatggttatgatgctcgtgtaaattcagagtttaaaatatttaccaatgtaaattctgagatagtagatccaaaaaattttaaacctgcaagttttgtttctaaaactggatcagagtgtattatacctccaaattcttttgccttagcaagtacagtagaattttttaaaattccaaaggatgttttggtaatttgtctaggtaaatctacatatgccaggtgtggtataattgtaaatgttactcctttagagccaggatgggaaggacatgttacacttgaattttcaaacacaactccattacctgcaaaaatttatgctaatgaaggtgttgctcaattcatatttttaaaaggaaatgaagtcccagaagtgacatatgctgatagaaaaggaaagtatatgggtcaaacaggagtaacttt

SEQ ID NO: 265902 - DNA, 424 bp, Unknown
  Bacterial polypeptide expressing nucleotide sequence isolated from the Sargasso Sea
atgctctaatgaatttaaagtttttacaaatattcattctgcgatagtggatcctaagtcatttgatgaaaaaagttttgtggatattaattcagatgtttgtgttattcctccaaactcttttgcattagctagaactgttgagtattttaaaattccgaggaatattcttactgtatgtttaggaaaatcaacatatgctagatgtggaattattgtaaatgtaactccacttgaacctgaatgggagggtcatgttactcttgagttctcaaatacgacgaatcttcctgcaaaaatttatgccggcgagggggttgcacaaatgttgttttttgaatcagatgaagagtgtgagataagttataaagatcgtgatggaaaatatcaaggacaaaccggcgttactttacccaagacttaa

SEQ ID NO: 265903 - DNA, 247 bp, Unknown
  Bacterial polypeptide expressing nucleotide sequence isolated from the Sargasso Sea
tgtttgggtaaatcgacttacgctagatgtggcatcatagtaaatgtaactcctctcgaaccagagtgggaaggtcatgtcaccttagagttctctaataccactaatttgcctgctaaaatttacgcgaatgaaggtgttgctcaaatggtcttttttgaagctgatgaagtttgttcaacaagttataaagatagaggaggcaagtatcagggacaaaagggcgttactctgccaaaaacttagg

SEQ ID NO: 265904 - DNA, 556 bp, Unknown
  Bacterial polypeptide expressing nucleotide sequence isolated from the Sargasso Sea
gatgtcagttctttcagataagtggatcagaaaaatggctaaggaaaaaaaaatgatttctccatttgaggaaaaacaaattagaggaaatagtatttcctacggcctttcatcttttggttatgatgctagggtttctgatgaatttaaaatatttacaaatgtaaattcagaaatagtagatcctaaaaattttaaaccaacaaattttgttacaagaaacaattctgaatgtattatccctcctaactcttttgttttagccagaacagtagaaaaattcaagattccagatgacatactggtaatttgcttaggtaaatccacttatgcaagatgtggtataattgttaatgttacacctcttgagccaggttgggaaggttttgtaacattagagttttcaaatacaactccgttacctgcaaaaatttacgcaaatgaaggtgttgcacaatttatctttctaaaaggtaatgaaaaacctgatgttacttatgccgacagagatggtaagtatatgggtcaaacgggtgtaactttaccaaaagtttaa

SEQ ID NO: 265905 - DNA, 556 bp, Unknown
  Bacterial polypeptide expressing nucleotide sequence isolated from the Sargasso Sea
atgagtataaaatcagataaatggataaaaagaatggctctagagagtcgtctaatagaccctttcattgataaacaagttaaacatacagaagaggcaggtagtacagtttcatacggactatcaagctatggttatgatgtgagatgtgctgatgaatttaagatttttacaaatataaattctgctacggtggacccaaaaaattttgatgaagatagcttcattgatattaaatccgaagtgtgtgtaattcctccaaattcctttgctctagcaaggactgtggaatattttaaaattcccaggaacgtactaacaatttgtttaggaaaatctacctatgctagatgcggcataattgtaaacgtaactcctctcgaacctgaatgggaaggtcatgtaactcttgaattttcaaacacaacaagtttgccagcaaagatctatgcaaacgaaggcgtagcacaaatgctattttttgaatcagatgaattatgcgaaacaagttatgcggacaggaaaggcaaataccaaggtcaactgggcgtcacac

SEQ ID NO: 265906 - DNA, 517 bp, Unknown
  Bacterial polypeptide expressing nucleotide sequence isolated from the Sargasso Sea
aatgccagtccagtctgacaagtggattaaaaagatggcaactgattacaaaatgatcgagccctttgaagataagcaaattagaggtaatagcatatcttacggagtatcatcctacggttatgatgcacgtgttggcgatgaattcaaaatatttacaaatgtaaatacggaaattgttgatccaaaaaattttaaatcaacaagttttgttacaaaaaaagggacagagtgcataataccaccgaactcttttgttcttgctagcactgttgaatattttagaattccagataacgttttggtgatttgtttaggcaaatcaacatacgccagatgtgggataattgtaaatgtgacaccattagaaccatcgtggtgtggaaatgttacactcgaattttcaaacacaacaccgttaccagcaaagatatatgccaatgaaggagcatgccaatttatttttttaaagggaaatgaaaaaccagaaaccacctattctgatagagaaggcaaa

SEQ ID NO: 265907 - DNA, 517 bp, Unknown
  Bacterial polypeptide expressing nucleotide sequence isolated from the Sargasso Sea
atgtcagtattatcagataagtggattaaaaaaatgtctcaagaacatgagatgatttcaccttttgagggtaaacaggtacgagggagcaatatttcttttggcttatcatcttatggttatgatgcaagagtttcggatgaatttaaaatattcactaatgttaattccgaaatagttgatcctaaaaattttaaaccaactaactttgttacaaaaaaagtttcggaatgtataattccacctaactcatttgtattagcaagaactattgaaaagtttaaaatcccaaatgatgttcttgttgtttgtttgggtaaatcgacctatgctcgctgtggcataatagtgaacgtcacaccattagagcctggctgggaaggttatgtgacactagagttttctaatactactccactaccagctaagatttacgcaaatgagggtgtggcacaatttatttttttaaaaggaaatgaaaaacccgaggtaacttatgcagacagagatggtaaat

SEQ ID NO: 265908 - DNA, 556 bp, Unknown
  Bacterial polypeptide expressing nucleotide sequence isolated from the Sargasso Sea
atgtcagttcaatctgataaatggattatacaaatggccagagacaatgacatgatctctccttttgaagataaacaagttagaggtgataaaatatcatttggtgtctcatcatatggttatgacgcgagagtctctgatgaatttaaaattttcactaacgtaaattcagaaattgtagatcctaaaaattttaaatcttctaattttattacaaaaaactcatctgaatgtataattccacccaattcatttgtattagcgagaacagtggaatactttaagatacctaaaaatgttttagttatatgtttaggcaaatctacatacgcaagatgtggaataattgtcaacgttacacctcttgaaccaggctgggagggacatgtaacattagaattctctaatacaacaccgttaccagcaaaaatttacgccaatgaaggggttgctcaatttgtttttattaagggcaatgaggatccagctgtttcttatgcagatagaaatggcaaatatcagggtcaaaagggagttacacttccaaaaatataat

SEQ ID NO: 265909 - DNA, 267 bp, Unknown
  Bacterial polypeptide expressing nucleotide sequence isolated from the Sargasso Sea
ccggagaacgttttaactatttgtttgggaaatctacttacgcccggtgtggcattattgttaatgtcacgcctttggaacctgagtgggaaggtcacgttacgctagaattttctaacactacaactttgccagcgaaaatatatgcgaacgagggcgtagctcaaatgctgttctttgagtctgacgagcgttgtgaaatcacctacaaagatagaaacgggaaataccaggggcagacgggagtgactttgcctaaaccctagt

SEQ ID NO: 265910 - DNA, 571 bp, Unknown
  Bacterial polypeptide expressing nucleotide sequence isolated from the Sargasso Sea
aatgacgattaaatcagataagtggataagaaagatggcagttgaacatggcatgattgaaccatttcaagaggatcaaataaggtattctgatgacaattcaagacttatatcatatggcctctctagctatgggtatgacgttaggtgcgcaaatgaatttaaagtatttactaatattcattcagcgatagttgacccaaaatcttttgatgaaaaaagctttgtagatattaactcagacgtatgtgtaatacctcctaactcttttgctctagcaagaacagtagagtatttcaggatacccagagatgttctaactatctgtctcggtaaatcaacttatgcaagatgtggaattatagtaaacgttactccccttgagcctgaatgggaagggcatgtcaccctcgagttctcaaatacaagcaatttaccagcgaaaatatatgcaggtgagggcgtagcccaaatgatattccaccaatcagatgagcaatgcgaggtaagctataaggatagagatggaaaatatcaggggccaacaggggttacgctacccaaaacttag

SEQ ID NO: 265911 - DNA, 592 bp, Unknown
  Bacterial polypeptide expressing nucleotide sequence isolated from the Sargasso Sea
gatgagattgtgtgaccgcgatatagaacgccatttagctgaaggtaaaattaaaattgagccgatgccagacaccgatatgatcagcggcgtcagtgtggatatccgccttggcaacaagttccgcgtgtttcaggctcatgccgcaccctatatcgatttaagtgggccaagagccgaagtagataaagcgctcaacagtgtaatgagtgacgaaatttacatcgcggacggcgataaatttattctgcaccccggtgagctggcactggccatgacgctggagtccgtcacgctacctgctgatatcgtaggttggcttgatggccgctcatcgctggcacgtttgggcctgatggtacatgtgaccgcacatcgtattgatccgggttggtcaggcaacattgtgctggagttttataacagtggcaaattgccgctggcgcttcggccaaaaatgaaaatcggcgctctgaactttgagctgatgacaggcgcagcagagcggccttataacaaacgtctggatgccaagtaccagcaacaaaccggcgcggtagccagccgaattggtcatgatgataaaggctga

SEQ ID NO: 265912 - DNA, 544 bp, Unknown
  Bacterial polypeptide expressing nucleotide sequence isolated from the Sargasso Sea
tatgagtattaaatctgataggtggatcaaagaaatggcaattcaccacgaaatgatcaaaccttttgaattggaacaagtgcggttcggaaaaaatgaagagaaattaatctcatacggtacttcttcatatggctatgacgttagatgttcaaatgaatttaaagtttttaccaatatcaattctgcaacagttgatcctaagaggtttgatgaggatagtttcgttgatattcaaagtgaggtttgtgtaattccacctaattcttttgcgctagctagtactattgaatatttcaaaatacctagaaatgttttaactatttgcttgggtaaatctacttatgcacggtgtggaattatagtgaacgtaactcctttagaaccagaatgggaaggccatgttaccttggagttttccaataccactagcctgcctgctaaaatttatgccaatgaaggcgtggctcagatgctatttttagaatctgatgaagaatgcgaagtcagttacaaagatagaggtggtaaatatcaaggccaa

SEQ ID NO: 265913 - DNA, 571 bp, Unknown
  Bacterial polypeptide expressing nucleotide sequence isolated from the Sargasso Sea
atgacgattaaatcagataagtggataagaaagatggcagttgaacatggcatgattgaaccatttcaagaagatcaaataaggtattctgatgacaattcaaggctcatatcatatggcctctctagctatgggtatgacgttaggtgcgcaaatgaatttaaagtatttactaatattcattcagcgatagttgacccaaaatcttttgatgaaaaaagctttgtagatattaactcagatgtatgcgtaatacctcccaactcttttgctttggcaagaacagtagagtatttcaggatacccagagatgttctaactatctgccttggtaaatctacatatgcaagatgcggaattatagtaaatgttactccccttgagcctgaatgggaaggccatgtcaccctcgagttctcaaatacaagcaatttaccagcgaaaatatatgcaggtgagggcgtagctcaaatgatatttcaccaatcagatgaacaatgcgaggtaagctataaggatagagatgggaaatatcagggccaaaccggggttacgctacccaaaacttagt

SEQ ID NO: 265914 - DNA, 427 bp, Unknown
  Bacterial polypeptide expressing nucleotide sequence isolated from the Sargasso Sea
gagagtttcaacgaatttaaaatattcacaaacgtaaactcaggtattgtagatccaaaggtatttaaaaaagagagctttgttactaaaattggaaaagagtgcattattccacctaattcctttgctttagccaggactattgagtatttcaaaattcctgaagatgttctggtaatttgtttaggtaagtctacttatgcaagatgtggaataattgtaaatgttactcctttagaaccaggttgggaaggacatgttactttagaattttcgaatactacaccacttccagctaagatttatgccaacgaaggtgttgctcagtttgtttttatgagagggaacgaaaaacctcaagtttcttatgcaaaaagaaaaggcaaatatatgaaacaaaaaggtgttactcttccaaaagtataaa

SEQ ID NO: 265915 - DNA, 232 bp, Unknown
  Bacterial polypeptide expressing nucleotide sequence isolated from the Sargasso Sea
tacatacgcaagatgtggaataatcgtaaatgtaacaccattagaaccaggttgggaaggtcatgttacgcttgaattttctaacacaacacctttaccagcaaagatttatgcaaacgaaggtgctgcgcaatttatttttttatcaggaaacgaagaaccagaaacaacgtatgaccaaagaaaaggaaagtatatgaagcaaactggagttactttacctaaagtttaa

SEQ ID NO: 265916 - DNA, 403 bp, Unknown
  Bacterial polypeptide expressing nucleotide sequence isolated from the Sargasso Sea
gctcgaccatgttatgagcgatgaaattgaactagaagagggtaaagccttctttctacaccccggggaactggcgcttgctattacccacgagtcagtaactttgcctgacaacatcgtaggttggttagacgggcgttcttcgcttgcgcgtttgggcttaatggttcacgtgaccgcgcatcgaatagatccaggctggtcgggcaacatcgttcttgagttttacaacagtggtaagttaccgctggcgcttcgccctaaaatgaaaataggggcgcttagcttcgaagtgttgtcagcgccagctgaaaaaccgtacaacgcaagagtggacgctaaatacaaaggccaagcaggcgcagttgcaagccgaatctcgtcagacgacgagagtaaataa

SEQ ID NO: 265917 - DNA, 448 bp, Unknown
  Bacterial polypeptide expressing nucleotide sequence isolated from the Sargasso Sea
atgagcataaagagtgaccagtggattagaaaaatggctgaagaatacaagatgatagagccatttgaaccagttcagataaaaaaaaatggtactgagaaattgatatcctatgggacatcaagttatggttatgatgttcgatgcgctgatgaatttaagatttttactaatgttcattcagctacagtagatccaaaaaattttgatccagacagttttgttgataccaagggcgatcattgcataatcccacctaatgcatttgctctagccagaacaattgagtattttcgtattccaagaaaaattcttaccatatgtttgggtaaatcaacttatgcacgttgtggaattatagtgaatgtaactcccttagaaccagagtgggaagggcatgtcaccctagaattttcaaatacaactaacttaccagctaaaatttatg

SEQ ID NO: 265918 - DNA, 556 bp, Unknown
  Bacterial polypeptide expressing nucleotide sequence isolated from the Sargasso Sea
aatgccagtactttcagataaatggatagaaaaatatgcaaaggccaaagggatgataaagccctttgtgagcaaacaagtaagaaagggtaaaatttcttttggattatcttcatatggttacgacgcaagggtatctaatgagtttaagatatttactaatgttaattcaggaattgtggacccaaaagtttttaaaaaagaaagttttgttactaagataggcaaagaatgtattatccctcctaactcatttgctctagctagaactattgaatattttaaaattccagaaaacgttttggtaatttgtttaggaaaatcaacatacgctagatgcggaataatcgtaaacgttacacctttagaacctggttgggaaggacatgttactcttgaattttctaacacaacacctcttccagctaaaatatatgcttatgaaggtgttgctcaatttgtttttttaaaaggaaatgaaactcctgaaataacttatgcaaaaagaaaaggcaaatatatgaaacaaaaaggtgttatcttccgaaggtttgat

SEQ ID NO: 265919 - DNA, 556 bp, Unknown
  Bacterial polypeptide expressing nucleotide sequence isolated from the Sargasso Sea
aatgtccgttctatctgataagtggataaaaaaaatggtatccgaacactcaatgatttcaccatttgaggaaaaacaagtaagagaaggaaaaatttcctatggactatcttcttttggctatgacgcaagagtttcagatgaatttaaaatatttaccaatgttaattctgaaattgtagatccaaaaaactttaaacctagtaattttgtaacgaaaaaaatttcagagtgtgttattcctcccaattcatttgttttagcaagtacaattgaatattttaaaattccaaaagatgtattagttatttgtttggggaaatcaacatatgcaagatgtggaattatagtaaatgttacaccacttgaacctggttggcatggacatgttacacttgaattttcaaatactactccattaccagctaaaatttatgcaaacgaaggtgtggctcaatttatatttcttaaaggaaatgaaagcccagaaacaacttactcagatagaaaaggtaaatatatgggtcaaactggggtaactttaccaaaagtttaa

SEQ ID NO: 265920 - DNA, 419 bp, Unknown
  Bacterial polypeptide expressing nucleotide sequence isolated from the Sargasso Sea
catgaccataatgtcggataattggataaaaaaaatgtctgttgaagaaggcatgatagagccttttgttgatgctcaaaaaaaagaaggcactatttcatacggtgtttcttcctatggttatgatgccagagtttctgaggagtttaagatttttaccaatgttgattctgcaatagttgatccaaaaaatttcaatgacaaagggtttgtagatcgaccaggaaaagaatgtattattcctccaaactctttcgctttagcaagaacagttgaatattttagaattcctcgtgatgtacttgtgatatgccttggaaaatcgacttatgcaagatgtggtattatagtaaatgttactccacttgaaccagaatgggagggccatgttacactagaattttcaaacacaactcctt

SEQ ID NO: 265921 - DNA, 238 bp, Unknown
  Bacterial polypeptide expressing nucleotide sequence isolated from the Sargasso Sea
taagtcgacttatgcaagatgtggaatcattgtaaatgtaactcctttagaaccagaatgggaggggcatgttactcttgaattttcaaatacgacaaacttacctgctaagatttatgcaggtgaaggcgttgcacaaatgttattttttgagtcagatgaagaatgtgatgttagttataaagatagaggcggtaaatatcaagggcaaactggagttaccttacccaaaacttaa

SEQ ID NO: 265922 - DNA, 490 bp, Unknown
  Bacterial polypeptide expressing nucleotide sequence isolated from the Sargasso Sea
gttgcaaatcaaaaaagcaataatagtatctcatacggtttatcatcctacggatatgatgctagagtttcagatgaatttaagatttttactgatgtggattcagctgtagttgatccaaaaaattttaaaagcaatagttttgtttcaagaaaagtgaaggaatgtgttatacctccaaattcttttgctttagctagaactgtcgaatattttaaaattccaaaagatgtattagtgatttgcttaggcaaatccacttatgctagatgtggaataatagttaatgtaactcctcttgaaccaggttgggaaggacatgtaactttagaattttcaaacactacaccattgccagcgaaaatatatgcaaatgaaggtgcagctcagtttatatttttgaaaggaactgaaatacctgaaacaacatatgatcaaagagatggcaaatatatgaagcaaatcggcgtaactttgcctaaagtataat

SEQ ID NO: 265923 - DNA, 355 bp, Unknown
  Bacterial polypeptide expressing nucleotide sequence isolated from the Sargasso Sea
gacagtttcgtgcatgttgagggcgacgtctgcgtgattccaccgaactcctttgcgttggcctgcaccgttgagtatttccgtattccgcgcaatgtcctgaccatttgtttgggaaagtccacctatgcgcgctgtggcattatcgtcaatgtcacgccgctggaaccggagtgggagggccacgtgacgctggagttttcaaatacgaccactttaccggcaaaaatttatgccaacgagggcgttgcccagatgctgttttttgaatccgatgaggtttgcgagacgagctatgccgaccgtggaggcaagtatcaggggcagcgtggggtaaccttgccgcgggcataga

SEQ ID NO: 265924 - DNA, 518 bp, Unknown
  Bacterial polypeptide expressing nucleotide sequence isolated from the Sargasso Sea
gattgaaccatttcaagaggatcaaataaggtattctgatgacaattcaagacttatatcatatggcctctcaagctatgggtatgacgttaggtgcgcaaatgaatttaaagtatttactaatattcattcagcgatagttgacccaaaatcttttgatgaaaaaagctttgtagatattaactcagatgtatgtgtaatacctcctaactcttttgctctagcaagaacagtagagtattttaggatacccagagatgttctaactatctgtctcggtaaatcaacttatgcaagatgtggaattatagtaaacgttactccccttgagcctgaatgggaaggccatgtcaccctcgagttctcaaatacaagtaatttaccggcgaaaatatatgcaggtgagggcgtagcccaaatgatattccaccaatcagatgagcaatgcgaggtaagctataaggatagagatggaaaatatcagggccaaacaggggttacgctacccaaaacttagt

SEQ ID NO: 265925 - DNA, 361 bp, Unknown
  Bacterial polypeptide expressing nucleotide sequence isolated from the Sargasso Sea
atgccagtactttcagataaatggattaaaaaaacagttaaaagtaaagggatgataaagccttttttaagtaagcaagtgagaaagggtaaaatttcttttggcctgtcttcttatggttatgatgcacgtgtctccaatgaatttaaaatttttacaaacgtaaattctggaatagttgacccaaaagtttttaaaaaggaaagttttgttactaaaattggaaaagaatgtattattccaccaaattcttttgctttagctagaacagttgaatatttcaaaatacccgatgatgttttagtgatatgtcttggaaaatcgacttatgctagatgtggaataattgtaaatgtaacac

SEQ ID NO: 265926 - DNA, 556 bp, Unknown
  Bacterial polypeptide expressing nucleotide sequence isolated from the Sargasso Sea
atgtcagttctctccgataaatggattagaaaaatgtccaaagaatataacatgatttcaccttttgaggaaaaacaagtaagaggcaagagtatttcttatggactatcctcttttggctatgatgcaagagtatcagacgagtttaaaatttttacaaatgttaattctgagattgttgaccctaaaaatttcaaaccaacaaattttgtaactaaaaatgtatctgaatgtgttattccgccaaattcatttgttttagctagaactgtagaaaagtttaaaattccaaatgatgtattggttatttgtctaggtaaatcaacatatgcaagatgtgggatcattgtaaatgtaaccccactagagcctgggtgggaaggatatgttacgcttgaattttcgaacaccacacctttacctgcaaaaatttatgcaaatgaaggtgttgcacaatttattttcttaaaaggaaatgaaaaaccagaagtgacttatgcagatcgagatggaaagtatatgggtcaaactggggtaacattacctaaagtttaaa

SEQ ID NO: 265927 - DNA, 318 bp, Unknown
  Bacterial polypeptide expressing nucleotide sequence isolated from the Sargasso Sea
tacctccaaattcttttgttctggcaagaactgtggaatattttaaaattccaaaggatgttcttgtaatatgtttaggcaaatcaacttacgcaagatgtggaattattgtaaatgtaactcctttagagcctggatgggaagggcatgttactttagaattttcaaacactactcctttgcctgctaaaatttatgcgaatgaaggcgtggctcaattcatatttcttaaaggaaatgaaaaacccgaagtaacttatgcagatagaaatggcaaatatcagggccaaaaaggagttacacttccaaaagtttaaa

SEQ ID NO: 265928 - DNA, 571 bp, Unknown
  Bacterial polypeptide expressing nucleotide sequence isolated from the Sargasso Sea
atgtcgattaagtctgataaatggatacaagaaatgtctgagaaaaacggcatgataaaacctttttcaaaaaatcaagtaagacttgatgatgatggaaataaattaatttcatatggtgtttctagttatggatatgacgtcaggtgttcaaatgattttaaggttttcactaatatacattcagctgtagttgatcctaaatcttttgatgaaaaaagttttgtagatatcgattctgatatatgtgtaatccctccaaattcttttgcattagccagaacaattgaatatttcaaaattccaagaaacgttcttactgtatgtttaggtaaatcaacttatgctagatgtggcattattgtgaacgtaacacctcttgaaccagagtgggagggtcatgtaactctagaattctcaaatacaacaaatttaccagccaaaatatatgctggtgagggtgtcgcacaaatgcttttctttgaatctgacgaagaatgtaaaataagctataaggatcgtgggggtaaatatcaaggacaaacaggcgtaactttacccaaaacttagt

SEQ ID NO: 265929 - DNA, 326 bp, Unknown
  Bacterial polypeptide expressing nucleotide sequence isolated from the Sargasso Sea
atgtataataccaccaaactcattcgtattagcgagaacagtggaatattttaagatacccaaaaatgttttggttatatgtttaggaaaatctacatacgcaagatgtggaattattgtaaacgttacacctctcgagccaggctgggaaggacacgtaacattagaattttctaatacaactcctttaccagcaaaaatttacgcaaatgagggagttgctcaatttgtttttattaagggcaatgaggatccagctgtttcatatgcagatagaaatggtaaatatcagggtcaaaagggcgttacacttccaaaaatataat

SEQ ID NO: 265930 - DNA, 366 bp, Unknown
  Bacterial polypeptide expressing nucleotide sequence isolated from the Sargasso Sea
aatgtcagtgcaatcagataactggataatcaaaatggcaaaagaacaagcaatgatttcaccatttgaggataaacaaattagagaaggaaaaatatcatttggtgtttcttcatacggatatgatgcgagagtatctaatgagtttaaaatatttactaatgttaactctgaaattgtagatccaaaaaattttaaaccaacaaattttgtaacaaaagaagctgacgaatgcattattccgccaaattcgtttgttttagcaagaacagtcgaatattttaaaattcctagcgatgtcttagttatttgtttaggcaagtccacttatgccagatgcggaataattgttaatgtaacaccttt

SEQ ID NO: 265931 - DNA, 431 bp, Unknown
  Bacterial polypeptide expressing nucleotide sequence isolated from the Sargasso Sea
tgttagatgttcgaatgaattcaaggtcttcacaaatatctattcagccactgttgaccctaaacactttgatgagaacagttttgtagatgttgttgatgatgtgtgtgttataccgcctaattcctttgcactagcaagcacaatagaatatttcaggattccaaggaacgtgttaactatatgtcttggaaaatcaacctatgcaagatgtggaataatagtaaacgtaacgcctttggaaccagagtgggaaggtcatgttactttagagttttctaatacgaccagtttgcctgcaaaaatttacgctaatgaaggtgtagcccaaatgcttttcttagaatcggatgaagagtgtgaagtcagttacaaagataggggtgggaaataccaaggtcaaacaggtgtaacattacccaaaacctagt

SEQ ID NO: 265932 - DNA, 433 bp, Unknown
  Bacterial polypeptide expressing nucleotide sequence isolated from the Sargasso Sea
atgagcgttttgtcagataaatggataaaaaaaatggcaaaaagtaaaaagatcatttcaccttttgtctcaaaacaaacaaggaaaggcagaatatcttatggtctttcatcatatggatatgacgcaagagtttcaaatgattttaaaattttcacaaatgttaattctactattgttgatcccaaaaattttaaaaaagatggctttatatcaaaaaaatcaaatatttgtgtcataccacccaactcttttgctttagccagaactgtagaatattttaaaatacccgataatgtaattgtaatttgtttaggtaaatctacgtatgcaagatgtggcataattgtaaatgtgacaccattagaaccaggttgggaggggcatgtaactagggagttttctaataccacacctttaccagcgaaaatat

SEQ ID NO: 265933 - DNA, 556 bp, Unknown
  Bacterial polypeptide expressing nucleotide sequence isolated from the Sargasso Sea
aatgtcagttctctcagataaatggattagaaaaatgtccaaagaacaagatatgatttcaccatttaaggagacgcaggtaagaggcaagagcatctcatacggactttcatcttttggttatgatgcgagagtttcagatgagtttaaaatttttactaatgttaattctgagattgttgatcctaaaaactttaaacctacaaattttgtaacaaaaaaagtatctgagtgtatcattccaccaaattcatttgtattagccagaactgtagaaaagtttaaaattccgaatgatatcttggttatttgcttaggtaaatcaacatatgcaagatgtggaatcattgttaacgttactccattagaacctggctgggaaggatatgttactctcgaattttcaaacacaacaccattacctgcaaaaatttatgcaaatgaaggtgtagcacaatttatttttttaaaaggaaatgaaaaaccagatgtaacttacgcagatcgagatggaaagtacatggggcaaactggagtaacattacctaaagtttaa

SEQ ID NO: 265934 - DNA, 556 bp, Unknown
  Bacterial polypeptide expressing nucleotide sequence isolated from the Sargasso Sea
atgactgttttatcagataaatggataagaaaaatgtccaaagaaaatgatatgatttccccatttgaagagaagcaaataagaggtgatagcatttcttatggactttcatcatatggatatgatgctagagtttctgatgaatttaaaatattcactaatgtaaattcagaaatagttgatcctaaaaattttaaaccaacaagttttgtgacaaaaaatttaaaagaatgtattataccgccaaattcatttgtattagcaagaaccgtagagaaattcaaaattccaaatgatgttttagttatttgtcttggaaaatcaacttacgcaaggtgcgggattattgttaatgttacacctttggagccaggatgggaggggtatgtcactttagaattttctaacacaactcctttaccagcaaaaatctacgcaaatgaaggagtggcacaatttatttttcttaaaggaaatgaaaaaccagaagtcacttatgcagaccgaaaaggtaagtatatgggacaaactggagtaactttacctaaagtttaat

SEQ ID NO: 265935 - DNA, 490 bp, Unknown
  Bacterial polypeptide expressing nucleotide sequence isolated from the Sargasso Sea
aatgacagttttatcagataaatggattaaaaaagctgtaaaacaaaaaggaatgataaagccttttgtagataaacaggttagaaaaggaaaaatttcttttggtttatcttcttatggttatgatgcaagagtatctaacgaatttaaaatttttacaaatgttaattcagggatagttgatcctaaagtttttaaaaaggagagttttgttacaaaaataggtaaagaatgtatcattcctcccaactcattcgctttagcaacaacaatggaatattttaaaattcctaatgatattttagttatttgtcttggaaaatctacttatgcaagatgtggaattattgtgaatgtgacacctttagaaccaggttgggaaggtcatgttactttagaattttcaaatactacaccattacctgcaaaaatttatgccaatgagggtgtagctcaaatttatttttttaaaggggtaatgagcggccta

SEQ ID NO: 265936 - DNA, 422 bp, Unknown
  Bacterial polypeptide expressing nucleotide sequence isolated from the Sargasso Sea
ttcaaatgaatttaaaatttttacaaatgttaattcagaaattgttgatcctaagaattttaaacctacaaattttataacaaaaaatggatctgaatgtataattccaccaaattcatttgttttggcgagaacagtagaatattttaagatacccaaggatgttcttgtaatttgtttgggtaaatctacttatgcaagatgtggtataatagtaaatgttactcccttagaacctggatgggaaggtcaagtaactttagaattttcaaatactacaccattacctgcgaaaatttatgctaatgaaggagttgcgcaatttatatttcttaaaggtaccgaagaaccagaagttacatatgcagatagaaatggcaaatatcaaggtcaaaaaggtgtaacacttccaaaagtttaaa

SEQ ID NO: 265937 - DNA, 568 bp, Unknown
  Bacterial polypeptide expressing nucleotide sequence isolated from the Sargasso Sea
atgagtgtaaagagtgatttttggattagaaagatggcaaatgagtataaaatgatcgagccatttgagccaactcaagttaaaaagaacggaaaaaatcgattaatatcttatggtacttcaagttatggatatgatgttcgttgctcagatgaattcaaaatttttactaatattcattctgcaactgtcgatccgaaaaactttgatcccgatagtttcgttgatgtcaaaagtgattattgtgtaataccgccgaatgcttttgtacttgctagaacggttgaatattttcgaatcccaagaaatgtgcttaccatttgtttgggaaaatcaacttacgcacgctgtggtattattgttaatgtaactcctttagagcctgagtgggagggacatgttactttggaattttcaaacacaacaagtttgccagctaaaatttacgcaaatgaaggtgtagcacaggttatttttcttgaatcagatgaggagtgtgaaacatcatataaagatagatcagggaaataccaaggacagcgaggtgttaccttaccaaaagcataat

SEQ ID NO: 265938 - DNA, 466 bp, Unknown
  Bacterial polypeptide expressing nucleotide sequence isolated from the Sargasso Sea
aaaatttcttttggattatcatcctatggatatgacgcaagagtttccagcgagtttaagatatttacgaatgtaaactctgaaatagtcgatcctaaaaattttaaatcttcaaatttcatcacaaaaaaaggctctgcatgcattattccaccaaattcatttgttttagctagaactgtagaatattttaaaataccaaaagatgtattagttgtatgtcttggaaaatcaacttacgcaagatgtggaataattgtaaatgtaacacctcttgaacctggatgggaaggttatgtaactctagaattttcaaataccacaccactccctgcaaaaatttacgctaacgagggtgtcgctcaatttatttttcttaaagggaatgagtcaccggaggtaacttattccgacagaaaaggaaaatacatgaaacaaaaaggggtgactttacctaaagtctaat

SEQ ID NO: 265939 - DNA, 586 bp, Unknown
  Bacterial polypeptide expressing nucleotide sequence isolated from the Sargasso Sea
catgcgcttgtgcgaccgcgatatctatcaacatcttcaagatggaaaaatcaaaattgacccaacaccagactacgatcagattagtggtgtaacggtagatatccgtttaggtaataaatttcgcgtgtttgaagatcaccaggcgccgtttattgatttaagcggccctaaagcgcaagttcaagaagccctcgaccacgtaatgagcgacgaaattgaactagaagaaggtaaagcctttttcttgcatcctggagaacttgcgctggcaattacgcacgagtcggtaaccttgccagataacatcgtaggctggctagacgggcgttcatcgcttgcgcgcttaggcctaatggtgcacgtcacggctcatcgtattgacccgggttggtcgggtaatatcgtgcttgagttttacaacagcggtaaattgcccctaacgcttcgaccaaaaatgaaaattggcgcgcttagctttgaggtgttatcagcgcccgctgagaagccttacaacgcaagggttgatgctaaatacaaaggccaagccggtgctgtagctagccgaatttcttcggatgactaa

SEQ ID NO: 265940 - DNA, 556 bp, Unknown
  Bacterial polypeptide expressing nucleotide sequence isolated from the Sargasso Sea
atgagtgttttgtcagataaatggataaaaaacatgtcaaaaaagaaaaatatgataaagccatttgtgcctaaacaggtaagaaaaggaaaaatatcatttggcctttcatcttatggttatgacgcaagagtttctaatgattttaagattttcacaaatgtaaactctacaaccgtagatccaaaaaaatttaggaaagaagcatttatatcaaaaaaatcaaaagtttgcgtaattccacctaattcttttgctcttgcaagaacagtagaatatttcaaaatccccgaaaatgtaatggtaatttgccttggtaagtccacttatgcgaggtgtggaataattgtaaacgtgacacctcttgaaccaggctgggaaggatacgttacacttgagttttctaatactacccctttaccagcaaaaatttatgcaaatgagggagcagcccaatttgtttttattaaaggtaatgaaagaccccaagtttcatattcaaaaagaaaaggtaaatacatgaaacaaaaaggtgttactctcccaaagatttaat

SEQ ID NO: 265941 - DNA, 556 bp, Unknown
  Bacterial polypeptide expressing nucleotide sequence isolated from the Sargasso Sea
aatgtcagtcctttccgataaatggataagaaaaatgtctaatgaaaaaggtatgataacaccttttgaagaaaaacaagtgagaggtgacaatatatcattcggtttatcatcttttggttatgatgcaagagtagctgatgaatttaaaatttttactaatgttaattctgaaattgtagatcctaaaaactttaaacctactaattttgtaacaaaaaaaacttcggaatgcattatacccccaaattcttttgtattagcgagaacaattgaaaaatttaaaatacctgatgatgtccttgtagtttgtttaggtaagtcaacttatgcaagatgtggtataatagtaaatgtaactcctctcgagccaggatgggagggttatgtaaccttagaattttcaaatactacgccattaccagcaaaaatttatgcaaatgaaggagttgctcaatttattttcttaaaaggaaatgaaaaacctgaggtgacctatgctgatagagacggaaaatatatgggccaaacaggtgtaactttacctaaagtataa

SEQ ID NO: 265942 - DNA, 556 bp, Unknown
  Bacterial polypeptide expressing nucleotide sequence isolated from the Sargasso Sea
atgacagttctctcagatagatggataaaaaaaatgtctaaatcagcaggcatgattaagccttttgtagataagcagaatagaaaaggcaaagtttcttttggattatcatcttatggatacgatgctagagtttcaaatgaattcaaaatatttaccaatgtaaattcgggagtagtcgatcctaaagtttttaaaaaagacagtttcgttacaaaaagatctaaagaatgtattattcctcctaactcttttgctttagcaagaactgttgaatattttaaaattcctaaaaatgtccttgtaatttgtttaggaaaatccacctatgctcgttgtggaataatagttaatgtaactcctttagaaccgggttgggaaggtcatgtaacattagagttttcaaatacaacacctttgcctgcaaaaatctatgccaatgaaggagtggcacaatttgttttcattaaaggaaatgaagttcctaatattacctacgataaaagaaaagggaagtatatgaaacaaaaaggtgtgacgcttccaaaaatttaaa

SEQ ID NO: 265943 - DNA, 531 bp, Unknown
  Bacterial polypeptide expressing nucleotide sequence isolated from the Sargasso Sea
caaaagaatataatatgatagagccatttgaaccatctcaagttagaaaaaatggtaaagaacaactaatatcttacggtacttcaagttatggttacgatgttcgttgttcagatgagtttaaaatttttactaatgttcattcagcaactgtcgacccaaaaaattttgatcctaatagttttgtcgatattaaaaacgatcattgcataatacctcctaatgcttttgcactagcaagaacggttgaatactttcggattccaaggaatgtgcttactatctgtttaggaaaatcaacttatgcacgatgtggtattatcgttaatgtaactcctttagaaccagaatgggagggacatgttactttagagttttcaaacacaacaaatttgccagcaaaaatttatgcgaatgaaggtgtagcacaagtcatttttcttgaatcagatgaggagtgtgaaacatcatataaagacagatcggggaaatatcaaggtcagagaggtgttaccctaccaaaagcataat

SEQ ID NO: 265944 - DNA, 556 bp, Unknown
  Bacterial polypeptide expressing nucleotide sequence isolated from the Sargasso Sea
  misc_feature (67)..(67): n is a, c, g, or t
atgtcagttcaatctgataagtggattatacaaatggctagagaaaataatatgattacacctttgnaagacaaacaaattagaggagataaaatatcatttggcgtatcatcatatggttatgatgctagagtatctgatgaatttaaaatattcactaaagtaaattcagaaattgtggatccaaaaaattttaaatcttcaaattttataacaaaaaactcatctgaatgtataataccaccaaattcatttgtattagcgagaacagtagaatattttaaaatacctaaaaatgttttggttatatgtttaggaaaatctacatatgctagatgtggaataatagtaaacgttacacctcttgagccgggctgggaaggtcatgtaacattagaattttccaatacgacgccgttgcctgcaaaaatttatgccaatgaaggtgttgctcaatttgtttttatgatgggcaacgaagatccatcagtttcatatgcagatagaaatggaaaatatcagggtcaaaagggagttacacttcctaaaatataat

SEQ ID NO: 265945 - DNA, 535 bp, Unknown
  Bacterial polypeptide expressing nucleotide sequence isolated from the Sargasso Sea
aatgtctgttctttctgataagtcaataagaaagcttgctattgaaaatgatatgattactccgtttcaagataagcaagtaagcaatgggaaaatttcttatggccttagttcttatggctatgatgcaagagttgggcaagattttaaaatttttacaaatgtaaattctgaaattgtagatccaaaaaaatttacatcttctaactttgttaccaaaaaaacttccgagtctataattattccaccaaattcatttgctttggctactacagtagaatattttaatatacctagaaatataatgtgtatagtagtaggaaaatccacatatgcccgttgtggaattattgtaaatgttaccccgatagaaccaggttttagaggtgaagttactattgaactttcaaatacaactccgctaccagcaaaaatttatgctaatgaaggagttgctcaatttatatttctagagggaaatgagccaccagaagtttcgtatgccgataagaatggtaaatatcaagaacaaaaa

SEQ ID NO: 265946 - DNA, 204 bp, Unknown
  Bacterial polypeptide expressing nucleotide sequence isolated from the Sargasso Sea
atgtcaccccacttgagcccgaatgggagggacacgttactctcgagttttcaaacactacccctttaccagcgaagatttacgcgaacgagggcgtcgctcaaatgcttttctaccagtcagatgagcaatgcgatgttacttacaaggataggggtggcaagtacatggggcagataggggtgaccccgcctaaggcttgat

SEQ ID NO: 265947 - DNA, 556 bp, Unknown
  Bacterial polypeptide expressing nucleotide sequence isolated from the Sargasso Sea
atgcctgttttatctgataagtggataacaaaaatggcgttggagaatcaaatgatctcaccatttgaaggcaaacaaattagagctgataagatttcttttggactttcttcttttggctatgatgccagagtgtctaatgaatttaaaatatttactaatgttaattctgaaatagttgatccaaaaaattttaaaccaagtaattttattacaaaaaatgtttcagagtgtataatacctccaaattcttttgttttagctagcactgttgaatattttaaaattcctaaagatgttctcgttatttgtttgggaaaatcaacatacgcaagatgtggtatcatagtgaacgtaactcctcttgaacctggttgggaaggacatgtaactcttgaattttcaaatactactcctttaccggcaaaaatttatgccaatgagggtgtagcacaatttatatttcttaaaggaaacgaaaagccagaagttacttattcagatagaaaaggtaaatacatgggtcaaacaggggttactttaccaaaagtttaat

SEQ ID NO: 265948 - DNA, 571 bp, Unknown
  Bacterial polypeptide expressing nucleotide sequence isolated from the Sargasso Sea
atgagtattaaatctgataagtggatcaaggaaatggcaattaatcatgaaatgattaaacctttcgaattaaaccaagtacggctaggaaaaaatgaggaaaaattaatctcttacggtacttcttcatatggctatgacgttagatgttcagatgaatttaaggtctttaccaatatcaattctgctaccgttgatccgaagaggtttgacgaggatagttttgttgatgttcaaagtgaggtttgcgtaattccacctaattcttttgcactcgctagtactattgaatatttcaaaatccctagaaatgttttaactatttgcttaggtaaatcaacatatgcacggtgtgggattatagtgaacgtaactcctttagaacctgaatgggaaggccatgttaccttggagttttctaataccactagcctgcctgctaaaatttatgccaatgaaggcgtggctcagatgctatttttagaatctgatgaagaatgtgaagtcagttacaaagacagaggtggtaaatatcaaggccaaagaggcgtaaccttacctaaggcctaac

SEQ ID NO: 265949 - DNA, 430 bp, Unknown
  Bacterial polypeptide expressing nucleotide sequence isolated from the Sargasso Sea
gtgagatgtgctgatgaatttaagatttttacaaatataaattctgccacagtgaccccaaaaaattttgatgaggatagcttcattgatattaaatctgaggtgtgtgtaattcctccaaattcctttgccctagcaaggactgttgaatattttaaaattcctaggaacgtacttacaatttgtttaggaaaatctacgtatgctagatgcggcataattgtaaacgtaactcctctcgaacctgaatgggaaggccacgtaactcttgaattttcaaatacaacaagtttgccagcaaagatctatgcaaacgaaggcgttgcacaaatgcttttttttgaatcagacgaattatgcgaaacaagttatgcagacaggaaaggcaaatatcaaggtcaattaggtgttacaccccccaaagtttaaa

SEQ ID NO: 265950 - DNA, 445 bp, Unknown
  Bacterial polypeptide expressing nucleotide sequence isolated from the Sargasso Sea
ttcatatggttatgacgcaagagtttcgaacgaatttaaaatttttaccaacgtaaattcaggtgtagttgatccaaagatattcaaaaaagatagttttgttacaaaaaagtctaaagagtgtattataccgcccaattcttttgctttagcaagaacagtagaatattttaaaattccaaaaaatgttcttgtaatttgtttaggcaaatctacttatgcacggtgcggaataatagtaaatgtaactcccttggagccaggttgggagggtcatgttactttagagttttctaacacaactccacttccggcaaaaatttacgctaatgagggagttgcacaatttgtttttataaaaggaaatgaagtcccgtctattacttatgataaaagaaaaggtaaatacatgaaacaaaaaggtgtaacccttccgaaaatttaa

SEQ ID NO: 265951 - DNA, 571 bp, Unknown
  Bacterial polypeptide expressing nucleotide sequence isolated from the Sargasso Sea
atgtcgattaagtctgataaatggatacaagaaatgtctgagaaaaatggcatgataaaacctttttctaagaatcaagtaagacttgatgaagatggaaataaattaatttcatacggtgtttctagttatggatatgatgttaggtgttcaaatgagtttaaggttttcactaatatacattcagctgtagttgatcctaagtcttttgatgaaaaaagttttgtagatatcgattctgatatatgcgtaatccctccaaattcttttgcattagccagaacagttgaatattttaaaatcccaagaaatgttcttaccgtatgtttaggtaaatcgacctatgctaggtgtggcattattgtgaacgtcacacctcttgaaccagagtgggagggtcatgtaactctagaattctcaaatacaactaatttaccagccaaaatatatgctggcgagggtgttgcacaaatgcttttttttgaatctgacgaagaatgtgaaataagctataaggatcgtgggggtaaataccaaggacaaacaggcgtaactttacccaaaacttagt

SEQ ID NO: 265952 - DNA, 410 bp, Unknown
  Bacterial polypeptide expressing nucleotide sequence isolated from the Sargasso Sea
tatgacaataatgtcagataaatggataaaaaaaatgtctttggaaaaggatatgatcaccccttttgtagatgatcaaaaaaaagatggaacgatatcatatggagtgtcatcatatggatatgatgctcgagtttctgaagaatttaaaatatttaccaacgtagattcggcgatagtagatcctaaaaattttaacaataaaggatttgttgataggccaggtaaagaatgtattattcctcctaattcttttgccttagctagaactgttgaatatttcaaaataccgcgagatgttttagtaatttgtttaggaaaatcaacttatgctcgttgtggaataattgtaaatgtcacacctcttgagcccgaatgggaagggcatgtcactttagaattttcaaata

SEQ ID NO: 265953 - DNA, 571 bp, Unknown
  Bacterial polypeptide expressing nucleotide sequence isolated from the Sargasso Sea
atgacgattaaatcagataagtggataagaaagatggcagttgaacatggcatgattgagccatttcaagaggatcaaataaggtattctgatgacaattcaagacttatatcatatggcctctctagctatgggtatgacgttaggtgcgcaaatgaatttaaagtatttactaacattcattcagcgatagttgacccaaaatcttttgatgaaaaaagctttgtagacattaactcagatgtatgtgtaatacctcctaactcttttgctttggcaagaacagtagagtatttcaggatacccagagatgttctaactatctgtctcggtaaatcaacttatgcaagatgtggaattatagtaaacgttactccccttgagcctgaatgggaaggccatgtcaccctcgagttttcaaatacaagcaatttgccagcgaaaatatatgcaggtgagggcgtagcccaaatgatattccaccaatcagatgagcaatgcgaggtaagctataaggatagagatggaaaatatcagggccaaaccggggttacgctacccaaaacttagt

SEQ ID NO: 265954 - DNA, 517 bp, Unknown
  Bacterial polypeptide expressing nucleotide sequence isolated from the Sargasso Sea
gatgatagaaccttttgctgaatctcagattaggcattcagacggaaacgatctaatctcttacggcacttcaagctttggttacgatgttcgatgtgcaaccgaatttaaagtttttacaaatattcattcagccgttgttgaccccaaatcatttgatgaaaatagttttgttaactttgattccgatatatgcatcattcctccaaattcatttgcgttggcaagaaccattgagtatttcaggataccgagaaatgttttgaccatttgcttgggtaaatcaacgtacgcacgttgtggaattattgtgaatgttacacctctggaacctgagtgggaaggtcatgtcactctagagttttcaaatacaacaccattaccagcaaagatatatgcgaatgaaggcgttgcccagatgatatttcttgaatctgatgaagactgcgaggaatcgtatcgagatcgaaaaggaaagtatcagggccaaacaggcgttacattacccaaaacctag

SEQ ID NO: 265955 - DNA, 430 bp, Unknown
  Bacterial polypeptide expressing nucleotide sequence isolated from the Sargasso Sea
tgcaagagtctctaatgaatttaaaatttttacaaacgttaattcaggtattgttgatccaaaagtttttaaaaaagagagctttgttaccaaattaggtaaagagtgtatcattcctccaaattctttcgcattagctagaacaattgaatattttaaaataccagaaaatgtactggttatttgtttaggtaagtcaacttatgcaagatgtggaattatagttaatgtgactcctttggaacctggatgggaaggccatgttactttagaattttcgaatacaacacctcttcctgcaaaaatttatgcaaacgagggagtcgctcaatttatttttattaaaggaaatgaaaagccagaaatctcttatgcaaaaagaaaaggcaaatacatgaaacaaaaaggcgtaacccttccaaaagtataa

SEQ ID NO: 265956 - DNA, 448 bp, Unknown
  Bacterial polypeptide expressing nucleotide sequence isolated from the Sargasso Sea
atcatcatatggttacgatgctcgtgtgtctgacgaatttaaaatttttaccaacgttaattctgaaatagtagatccaaaaaattttaaatcctcaaattttattactaaaaactcatctgaatgcataataccaccaaattcatttgtattagcaaggactgttgaatattttaagataccgaaaaatgttttagttatttgtttaggaaaatctacatatgctagatgtggaataattgtcaacgtcacacctctcgaaccaggttgggagggacatgtaacattagaattctctaatacaacaccgttaccagcaaaaatttatgctaatgaaggagttgctcaatttgtttttattaagggtaatgaggatccagctgtttcatatgcagatagaaatggtaaataccagggtcaaaagggagttacacttccaaaaatataa

SEQ ID NO: 265957 - DNA, 592 bp, Unknown
  Bacterial polypeptide expressing nucleotide sequence isolated from the Sargasso Sea
atgagattgtgtgaccgcgacattgaagcctatatcgaagcaggcaagatccaaattacgccacggccaacaccggatatgatcagcggtgtcagcgtggatattcgtttaggccataaattccgtacttttcgtgcttatgctgcaccttttattgatttaagtggcccacgtgaagaagtggatttagcgctgaattcagtgatgagcgatgaaattgtactgacagatgacgaagcctttttcctgcacccaggcgaactggcgttggctattacgcttgaatccgtcactttgcctgccgacatagtgggttggttggatggccgttcttcattagcccgtttgggtttaatggtgcatgtaacggcacaccgcatcgatccgggttggtctggcaatatagtgctggagttttataacagtggtcgtttaccgctggcacttagacctaatatgaaaattggtgcgctgaattttgaaactatgacaggtgaagcggcgcggccatacaacaaaagagttgatgcgaaataccaacagcaaacaggtgcggtggcaagccgtatcagccaggatgatcagagctaaa

SEQ ID NO: 265958 - DNA, 298 bp, Unknown
  Bacterial polypeptide expressing nucleotide sequence isolated from the Sargasso Sea
tttggcaagaactgtggaatattttaaaattcctaatgacattttagtaatatgtttaggaaaatctacatatgcaagatgtgggataatagtaaatgtaactcctctagaacctggatgggaaggacatgttactttggaattttcaaatacaacacctttgcctgcaaagatttatgcaaatgagggagttgcacaatttgtatttataaaaggaaatgaaaaacctgaagttacttatgcggatagaaatggaaaatatcagggtcaaaaaggtgtaacactcccaaaagtttaa

SEQ ID NO: 265959 - DNA, 427 bp, Unknown
  Bacterial polypeptide expressing nucleotide sequence isolated from the Sargasso Sea
cgtgttggtagcgagtttaaaatatttacaaatgtaaacacagagattgttgatccaaaaaatttcaaaccaacaagttttgttacaaaaaaaggtccagagtgtataattccacctaactcctttgtacttgctagtactatagaatattttagaattccaaatgatgtccttgtaatttgtcttggaaaatctacatacgcaagatgtgggataattgttaacgtaacacctctagaaccatcttggtgtggaaatgttactctggagttttccaacacgactccattaccagcaaagatatatgcaaatgagggtgcttgccaatttatatttttaaaaggtaatgagaaacctgaaactacttactcggatcgcgaaggtaaatatatggatcaaaaaggagttacattacctaaagtctaaa

SEQ ID NO: 265960 - DNA, 439 bp, Unknown
  Bacterial polypeptide expressing nucleotide sequence isolated from the Sargasso Sea
aatgagcgttttgtctgatcgctggattaaaaaaatggctttggaaaaagaaatgatcaaaccatttgttaaaaagcaagttggaggaaaagtaatttcttatggcttatcatcctttggttacgatgcaagagtttctaataattttaaaatttttactgatgtagattcagctgttgttgatcctaaaaattttaaacaaaatagttttgtttcaagaaaaggtaaagaatgcattatacctccaaattcttttgcactagccagtactgttgaatactttaaaattccaaaaaatgttttggttatttgtttaggaaaatctacatatgctagatgtggaataatagtgaatgttactccactagaacctggttgggaaggtcatgtaacacttgaattttctaatacaacaccttttacctgccaaaatctatgc

SEQ ID NO: 265961 - DNA, 449 bp, Unknown
  Bacterial polypeptide expressing nucleotide sequence isolated from the Sargasso Sea
tcttttggatatgacgcaagagtttcccgatgaatttaaaatatttactaatgtaaattctgagattgtagatcctaaaaattttaaaccaacgaactttgtaaccaaaactgttaaggaatgtattataccaccaaattcgtttgttttagctagaacagtagaaaaatttaaaattcctaatgatattttagttatctgtttgggtaaatcgacttacgcaagatgtggtatcattgttaatgttacaccattggaaccaggttgggaaggatatgtaactcttgagttttctaatacaactcctttaccggcaaaaatttatgccaacgagggagttgcgcagtttatttttttgaaaggaaatgaaaaacccgaagttacttacgcggatagaaatggaaagtatatgggtcaaggaccagagccaacattaccaaaagtttaat

SEQ ID NO: 265962 - DNA, 571 bp, Unknown
  Bacterial polypeptide expressing nucleotide sequence isolated from the Sargasso Sea
tatgagtataaaatcagataaatggataaaaagaatggctctagagagtcgtctaatagaccccttcattgataaacaagttaaacatacagaagaggctggtagtacagtatcatacggactatcaagctatggttatgatgtgagatgtgctgatgaatttaagatttttacaaatataaattctgccacggtggacccaaaaaattttgatgaagatagcttcattgatattaaatccgaggtgtgtgtaattccaccaaattcctttgctctagcaaggactatggaatattttaaaattcctaggaacgtgctaacaatttgtctaggaaaatctacgtatgctagatgcggcataattgtaaacgtaactcctctcgaacctgaatgggaaggtcatgtaactcttgaattttcaaatacaacaagcttgccagcaaagatctatgcaaacgaaggcgtagcacaaatgctattttttgaatcagatgaattgtgcgaaacaagttatgcggataggaaaggcaaatatcaaggtcaattgggcgttacaccccccaaagtttaa

SEQ ID NO: 265963 - DNA, 556 bp, Unknown
  Bacterial polypeptide expressing nucleotide sequence isolated from the Sargasso Sea
tatgccagtactttcagataaatggataaaaaaaatagttaaaacaaaaggcatgataaaaccttttgttagcaaacaagtacgaaaaggcaaaatttctttcggtctttcttcatatggatatgatgcgagagtttcaaatgaatttaaaatatttacaaatgttaattctggtgtagtagatccaaaagttttcaaaaaagagagtttcgtaacaaaaaggggtaaagaatgtattattcccccaaactcttttgcattagcgagaacagttgagtacttcaaaattcctgaaaatgttttagtaatttgtttaggaaaatcaacttatgctaggtgtggaataatagtaaatgttacacctttggagccaggatgggaaggacatgttacattagaattctcaaatactactccattaccagcaaaaatttatgctaacgagggagttgcacaatttgttttcttaaaaggaaatgagaaaccggaagtttcttatgccaaaagaaaaggtaaatatatgaaacaaaaaggagtcactctaccaaaagtataa

SEQ ID NO: 265964 - DNA, 571 bp, Unknown
  Bacterial polypeptide expressing nucleotide sequence isolated from the Sargasso Sea
atgaccataaaatcagacaattggattcgaaaaatggcagagagtcatcaactcatccaaccattcgagcccggacaagtgagacattgctctaagggagacaaattgatttcgtatgggacttcctcctacggttacgatgttcgatgttcagaggatttcaaagtttttacgaatattcattcggctacagtggatcccaaaaattttgacgagaaaagttttgtagatgtgtccggaatggcttgcattatccctccgaactcttttgctcttgcaagaacggtagagtattttaaaattccaagaaacgttctgacaatatgtctaggaaaatctacctacgcaagatgcggtataatagtaaacgtcacgccccttgaacccgagtgggagggacatgtcaccttggagttctcaaacacaacaaacctgcccgcaaaaatttacgcaaacgagggcgtagcccaaatgcttttttttgaatctgacgaaatttgtgagacttcttatgccgacagagagggaaaatatcagggccaaactggcgtcacattgcccaaagcttgat

SEQ ID NO: 265965 - DNA, 409 bp, Unknown
  Bacterial polypeptide expressing nucleotide sequence isolated from the Sargasso Sea
aaatatttactaatgttaactctggtgttgttgatccaaaaattttcaaaaaaagagagttttattacaaaaattggcaaagaatgcataatacctcctaactcatttgcacttgctaggaccatagaatatttcaaaatacccgataatgtacttgtaatatgtttaggtaaatcgacttatgcaagatgtggtattatagttaatgttactcctctagaacctggctgggaagggcacgtcacattagaattttccaatacaacacctctaccagctaagatatacgctaatgaaggagtagcacaatttgtatttattcaaggaaatgagaaaccagaagtaacatatgcaaaaagaaaaggtaaatatatgaaacaaaaaggtgtcactcttccaaaagtataat

SEQ ID NO: 265966 - DNA, 378 bp, Unknown
  Bacterial polypeptide expressing nucleotide sequence isolated from the Sargasso Sea
tagatccaaaaaattttaaatcctcaaattttattactaaaaactcatctgaatgcataataccacccaattcattcgtattagcaaggacagtagaatattttaagattcctaaaaatgttttggttatatgtttgggaaaatctacatatgcaagatgtggaataattgtaaacgttacacctcttgaaccaggctgggagggacatgtaacattagaattctcaaatactacgccgttaccagcaaaaatttatgccaatgaaggagttgctcaatttgtatttattaaaggcaatgaagacccatcagtttcatatgcagatagaaatggtaaataccaaggtcaaaagggagttacacttccaaaaatataat

SEQ ID NO: 265967 - DNA, 476 bp, Unknown
  Bacterial polypeptide expressing nucleotide sequence isolated from the Sargasso Sea
aagaaaaggaaaaatttcatttggactatcatcatatggttatgatgctagagtttcagatgatttcaagattttcactaatgtaaattctgctgtggtagatccgaagaattttaaaaacgaaagttttatttctaaaaaatcaaaggtatgtgttattccacctaattcttttgctttagcaaggactgttgagtactttaaaattccagaaaatgtgatggttatttgtttaggcaaatctacctacgcaaggtgtggtataattgttaatgtcacacccttagaaccagggtgggagggtttcgtaactttagagttttctaatactactccacttccagcaaaaatttatgctaatgaaggtgcggctcaatttgtttttattagaggaaatgaaaaacctgaaatctcttactcaaaaaggaaaggtaagtacatgaagcaaaaaggtgtcacacttccgaaaatttaat

SEQ ID NO: 265968 - DNA, 538 bp, Unknown
  Bacterial polypeptide expressing nucleotide sequence isolated from the Sargasso Sea
atgacagttctttcagacaaatggattaaacaaaccgcaaaggaaaaaggaatgataaaaccttttgtaagcaagcaaataagaaaagggaaaatttccttcggattatcttcttatggatacgacgcaagagtctcaaatgaatttaaaatttttaccaacgtgaactctggtatagtagatcctaaaatttttaaaaaagagagctttgtaactaagattggtaaagagtgtataattccaccaaactcttttgctttggcgagaacggtggaatatttcaaaattccagatgatattatggttatttgtctcggaaaatcgacttatgctcgatgcggaattattgttaatgtaactcccctagagcccgggtgggaaggccatgttactttagagttttcaaacacaactccattaccagcaaaaatttacgcaaatgagggtgtagctcagtttgtttttttaaaaggaaatgagagaccaaacgttacttatgctaaaagaaaaggtaaatacatgaaacaaaaaggcgtca

SEQ ID NO: 265969 - DNA, 346 bp, Unknown
  Bacterial polypeptide expressing nucleotide sequence isolated from the Sargasso Sea
atggcaattaaatcagataagtggataaaagaaatggcagaaagccatggaatgatagagccatttcaatatgatcaagtaaagaaaaatgaaacaggttctattgtatcttatgggacctcaagctatggatacgatgtacgttgttcagatgagtttaaaatctttaccaatattaactctgcttttgtagatccaaaagcttttgatgatcaaagttttgtcgatgtcaaaaatgatgtttgtattattccacctaattcatttgcattggctagaacagttgaatactttaaaattccgagacagattttaactttatgtctcggtaaatcaacttatgcta

SEQ ID NO: 265970 - DNA, 559 bp, Unknown
  Bacterial polypeptide expressing nucleotide sequence isolated from the Sargasso Sea
atgccagtcttatcagataaatggattagaaaaatgtctaaagaaaatgacatgatttcaccatttgaagaaaaacaaattagaggtagcagcatatcttacggactttcatcatttggatatgatgcaagagtttcagatgaatttaaaatttttacgaatgtaaattctgaaattgtggatcctaaaaatttcaaacctacaaattttttgactaaaaaaacaaatgaatgtatcattccaccaaactcattcgttctggctaggacagttgaaaaatttaaaatacctgatgatgttttagttatttgtttaggaaaatctacttatgcaagatgtggaattattgttaatgtgacaccattagaaccaggttgggaaggatatgtaactctagaattttcaaataccactcctttacctgcaaagatctattcaaatgaaggtgttgctcagtttgtttttttaaaaggaaatgaaaaaccagaagtaacatatgcagatagaaaaggtaaatatatggaccaaggaccagaaccaacacttccaaaagtttaag

SEQ ID NO: 265971 - DNA, 553 bp, Unknown
  Bacterial polypeptide expressing nucleotide sequence isolated from the Sargasso Sea
gatgacagttctctcagataagtggatcaaaaaagctgcacaaaaaggaatgattaaaccttttatacaaaaacaagtaagaaaaggaaaaatttcttttggactatcatcttatggttatgacgcgagggtttcaaatgagtttaaaatatttactaatgtaaactcaggtattgttgacccaaaagtttttaaaaaagagagttttgtaactaaaattgggaaagaatgtataattcctccaaattcttttgcattagcaagaactgttgaatattttaaaataccagagaatgttctagtaatttgtttaggaaagtccacttacgccagatgtggaataattgttaatgttactccgttagaacctgggtgggaagggcatgtaacacttgaattttcaaatactacaccactacctgcaaagatttatgctaatgagggcgtctcacaatttgtttttattaaaggcaacgaaaagccaagtatcacgtatgctaaaagaaaaggcaaatatatgaagcaaaaaggcgttactcttcctaaaatttaa

SEQ ID NO: 265972 - DNA, 556 bp, Unknown
  Bacterial polypeptide expressing nucleotide sequence isolated from the Sargasso Sea
atgtcagttctttcagataagtggattagaaaaatgtctatagaagaagatatgattagtccgtttgaagaaaaacaagttagaggaaatagtatttcatatggtttatcctctttcggttacgatgctagagtatctgaagaatttaaaatatttacaaatgtaaattctgaaatagttgatcctaaaaattttaaaccaacaaactttgtaactaaaaatgtttcagagtgcattattccacctaattcatttgtattagctagaacagtcgaaaagttcaaaataccagatgatgtgctagttatttgtcttggtaaatctacttatgcacgatgcggaattatagttaacgtaacacctttagagcctggatgggaagggtatgtaacacttgagttttcaaacaccacaccactgcctgctaaaatttatgcaaatgaaggtgttgcacaattcatttttttaaaaggaaatgaaaaaccagaagtgacttatgcagatagaaacggaaaatacatgggtcaaactggagtaacattacctaaagtttaac

SEQ ID NO: 265973 - DNA, 520 bp, Unknown
  Bacterial polypeptide expressing nucleotide sequence isolated from the Sargasso Sea
atgacagttctatcagataaatggattaataaaatgtcgaaaaaaaatggcatgattaaaccttttgttgacaaacagactagatctggaaaagtttcatatggtttatcttcctacggatatgatgcaagagtttcaaatgaatttaaaatttttactaatgttaattcaggcgtggttgacccaaaagtttttaagaaggatagtttcgtaactaaaagatccaaagaatgtataattcctccaaattcttttgctctggctcgaacaatagaatattttaaaattccaaaaaatgttctagtaatctgtttgggaaaatctacttacgcaagatgtgggataattgtgaacgttaccccactggaaccaggatgggaaggacacgtcactcttgaattttctaacaccacacctttacctgcaaaaatttatgccaatgagggagttgctcagtttatttttattaaaaagacaatgagtttccaagtattcacttatgacaaaagaaaaggaaagt

SEQ ID NO: 265974 - DNA, 412 bp, Unknown
  Bacterial polypeptide expressing nucleotide sequence isolated from the Sargasso Sea
aatgccagtcctttcagacaaatggataacgagaatggctaaagataaaggtatgatctctccatttgaggaaaaacagattagaggaaatagcatttcttacggagtttcatcgtacgggtatgacgcaagagtagctgatgaatttaagatttttactaatgtaaatactgagatagtagatcctaaaaactttaaacctacaagcttcattagtaaaaaaggaaaagaatgcataataccgccaaattcttttgtgctggcaagtacagtcgaatattttaaagttccagaggatgtattggtaatatgtcttggaaaatctacttatgcaagatgtggaataattgtgaatgtaacaccattagaaccatcatggtgtggacatgtgactttagaattttcaaataca

SEQ ID NO: 265975 - DNA, 568 bp, Unknown
  Bacterial polypeptide expressing nucleotide sequence isolated from the Sargasso Sea
atgtctatcaagaacgacaattggattaaacaaatgtcaattgagcacgatatgataaatccttttgtcgatgatcaaactaaaaaaattggtgataaatcaattatttcatttggaacttcaagttatggctatgacgtaagatgttctgatgagtttaagatttttacaaacattaattctgctattgttgaccctaaaagttttgatccggagagctttgttgattataaaggggatgtttgcattatacctccaaactcatttgcattagctagaactgtagagtatttcaaaatacctagatctatacttacggtttgtttaggaaaatctacctacgctagatgtggaattattgttaacgttactccccttgaacctgaatgggaaggtcatgtgactttagaattttcaaataccactcctttacctgcaaaaatttatgcaaatgaaggcgtagctcaaatgcttttttttgagtcagatgaatcgtgcaaaatttcatataaagatagaaatggaaaatatcaagggcagacaggggtaacacttccaaaaacatgaa

SEQ ID NO: 265976 - DNA, 553 bp, Unknown
  Bacterial polypeptide expressing nucleotide sequence isolated from the Sargasso Sea
gatgacagttctttcagataagtggatcaaaaaagcagcaaaaaaaggtatgattaaacctttcatacaaaaacaggttagaaagggaaaaatttcctttggactttcatcctatggatatgatgcaagagtttcaaatgagttcaaaatatttactaatgtaaactcaggaattgttgatccaaaagtttttaaaaaagaaagctttgtcactaaaataggaaaagaatgtataattccaccaaattcctttgcattagctagaactattgaatattttaaaataccagagaatgtattggtaatttgtctaggaaaatctacttatgcaagatgtggaattatcgtaaatgtaactcctctagaacctggttgggaaggtcatgttactttagaattttctaacactacccccttaccggctaaaatttatgctaacgaaggtgtttcgcagtttgtatttattaaaggaaatgaaaaaccgagcgttacttacgcaaaaagaaaaggcaagtatatgaaacaaaaaggtgtaaccctacctaagatttaa

SEQ ID NO: 265977 - DNA, 556 bp, Unknown
  Bacterial polypeptide expressing nucleotide sequence isolated from the Sargasso Sea
aatgtccgtccaatctgataaatggattaagaaaatggccaaggagtatgaaatgatatctccttttgaagataggcaagttagaggaaacaaaatatcttttggaacttcaagctatggctatgatgctcgtgttgcctcggagtttaaagtatttacaaatgtaaattctgaagttgtagatccaaaaaattttaaatcaacaaactttgttacaaaaaatggatcagaatgtatcataccaccaaattcatttgttttagcaagtacagttgaatattttaaaatcccaaaagatatattggtaatctgccttggaaaatctacatatgctagatgtggaataattgtaaatgtcactcctttagagccaggctgggaaggtcatgttactcttgaattttcaaatactactccactgcctgctaaaatatatgcaaatgaaggagttgctcaatttatatttttgaaaggagatgaggttcccgaagtgacttatgctgatagaaaaggaaaatatatgggtcaaaaaggtgtaactttacccaaagtttaa

SEQ ID NO: 265978 - DNA, 556 bp, Unknown
  Bacterial polypeptide expressing nucleotide sequence isolated from the Sargasso Sea
atgtcagtacaatcagacaagtggataatcaaaatggcgaaagaacaaagaatgatatcaccatttgaagacaaacaaataagggaaggaaaaatttcatttggtgtttcttcttacggttacgatgcgagagtatctgatgagtttaaaatatttactaatgttaattctgaaatcgtagatccaaaaaattttaaaccaacaaattttgtaacaaaagaatctaatgaatgtattattccaccaaattcttttgttttagcaagaacagtcgaatattttaaaatacctagtgatgtcttggttatttgtttaggtaagtctacttatgctagatgtggtataattgttaatgtaacgcctttggaaccaggatgggaaggccatgtgactcttgaattttctaatacaactccattaccagctaaaatatattcaaatgaaggtgtggcccagtttatatttttaaggggcaatgagaagccagatgtctcatatgctgatagaaaaggaaaatatatgggtcaaaaaggggtaacgcttcccaaaatttaaa

SEQ ID NO: 265979 - DNA, 571 bp, Unknown
  Bacterial polypeptide expressing nucleotide sequence isolated from the Sargasso Sea
catgacaattaagtcggataaatggataaagaagatggctcaagagcatcagttgattgagccctttacagaaaatcaagtccgtgatgcagacagcggcaataaaattatttcctatggggtttcaagttttggttatgacgtacgttgtgctgatgagtttaaagtttttaccaacattaattctgcaaccgttgatcctaaatcctttgatgaagaaagttttgttgacgtaaaatcagatgtctgtgtgattccgcctaattcttttgcgctagcaagaacaattgaatattttaagattcctcgaaatgtactaaccatttgtttggggaaatcgacgtacgctcgatgcggtattattgttaacgtaactccgcttgaacctgaatgggagggtcatgtaactcttgagttttctaataccacaacgctaccggcaaaaatttatgcaggtgagggtgttgctcaaatgattttcttggaatccgatgaggattgcgaaacatcttataaagatcgcaaaggcaagtaccaaggtcagacaggagtcacgttacccaaaacttaa

SEQ ID NO: 265980 - DNA, 371 bp, Unknown
  Bacterial polypeptide expressing nucleotide sequence isolated from the Sargasso Sea
aatgtctgtccaatctgataagtggattaaaaaaatggccaaagaatatggtatgatatctccatttgaagagattcaggttagaggtaacaaaatatcttttggtacctcaagctatggatatgatgctcgtgtcaattcagagtttaaaatatttaccaatgtaaattcagagatagtagatccaaaaaactttaaagctgctagctttgtttcaaaaacgggcccagaatgtattattccaccaaattcttttgctctggctagtacagttgaatattttaaaattccaaatgatgttctcgtaatttgtcttgggaagtctacttatgctaggtgtggaataattgtaaatgtgactccgttggaac

SEQ ID NO: 265981 - DNA, 457 bp, Unknown
  Bacterial polypeptide expressing nucleotide sequence isolated from the Sargasso Sea
aatgccagttcaatctgacaaatggataaaaaaaatggcattagagcaccaaatgatttccccgtttgaagagaaacaagtaagaggaaacaaaatttcttatggattgtcatcttttgggtatgatgcaagagtttctaatgaatttaagatatttactaatttaaactctgaagttgttgatccaaaaaattttaaaccaactaacttcattacaaaaaatgtttcagagtgtattataccacccaattcatttgttttagcaagtacgattgaatgttttaaaattccaaaagatgttcttgttatttgtttaggaaaatctacttatgcaagatgtggtataattgtaaatgtaacaccgttggaaccaggctgggaaggacatgttactcttgaattttcaaatacaacacatataccagcaaaaatttatgcaaatgaaggtgtagctcaa

SEQ ID NO: 265982 - DNA, 556 bp, Unknown
  Bacterial polypeptide expressing nucleotide sequence isolated from the Sargasso Sea
aatgtcaattcaatctgacaaatggataaaaaaaatgtcaaaagaatttaatatgatttctcctttcgaagataagcaaataagaggagataagatttcatttggagtatcttcttatggatatgatgcaagagtttcaaatgaatttaaaatttttacaaatgttaactcagaaattgtcgatccaaagaactttaaacctacaaattttataacaaaaaatgggccagaatgtataattccaccaaattcttttgttttggcaagaactgtagaatattttaaaatacccagagatgttctggtaatttgtttaggtaaatctacatatgcaagatgtggtataattgtaaatgttactcctttagagcctggttgggaaggacaagtaactttggaattttcaaatacaacaccactgccagctaaaatttatgccaatgaaggtgttgcgcaatttatatttcttaaagggaatgaagaacccgaggttacctatgcagatagaaaaggtaaatatcaaggtcaaaaaggcgtaacacttccaaaagtttaa

SEQ ID NO: 265983 - DNA, 556 bp, Unknown
  Bacterial polypeptide expressing nucleotide sequence isolated from the Sargasso Sea
atgtcagttctctcagataaatggattagaaaaatgtctaaagaacaaaatatgatctcaccattcgaggagaagcaagtaagagggaaaagtatttcttatggcctttcttcttttggatatgatgcaagagtatccgatgagtttaaaatttttacaaatgttaattcagaaattgttgatccaaaaaattttaaaccatcaaattttgtaaccaaaaatgtttctgagtgtattattccaccaaattcattcgttttagctagaactgtagaaaagtttaaaattcctaatgatgtcttggttatttgcctaggaaaatcaacatatgcaagatgtggaattattgtaaacgtaacccctttagagcctggctgggaagggtatgttacactcgaattctcaaatacaacacccttgccagcaaaaatttatgcaaatgaaggggtcgcacagtttatttttttaaaaggaaatgagaaacccaaagttacttatgcagatcgagatggaaaatatatgggacaaactggagtaacattacctaaagtttaaa

SEQ ID NO: 265984 - DNA, 553 bp, Unknown
  Bacterial polypeptide expressing nucleotide sequence isolated from the Sargasso Sea
aatgtcagttctttctgataaatggattaaaaaaatggctttagaaggaatgataactccatttgaagacaaacaggtcagagagggaaaaatttcctatggtttatcttcatatggatatgatgcaagagtctctaacgaatttaaaatttttaccaatgttaactctgatattgttgatcctaaaaattttaaaccaagtaattttttaacgaaaaaagtttctgaatgtattattccaccaaattcatttgttttggcaagcacaattgaatatttcaaaatccctaaagacgttttagttatttgtttaggtaaatcaacgtatgcaagatgtggaattattgtaaatgtaacacccttagaacctggatgggaagggcatgtaactttagaattttcaaacacaactcctttgcctgcaaaaatatattccaatgaaggagtggcccaatttgtatttcttaaaggaaatgaaagaccagaagtcacttattctgatagaaaaggtaagtatatgggtcaggttggagttacattgccaaaaatataa

SEQ ID NO: 265985 - DNA, 583 bp, Unknown
  Bacterial polypeptide expressing nucleotide sequence isolated from the Sargasso Sea
gatgcgcttaaccgatatcgaaattgaacaggcccttgataacggcactatcgttatagaacctcgcccaagcatagatgcgatttctggcgtcagtgtggatgtgcgcttaggtgggcaatttcgcgtctttaaggatcatactgcgccttttatcgacctcagtggtccgagtattgaagtgcaggcggcgctcgatcgggtgatgagcgaaatcatcgaaatccccgacggcgaagccttcttcctgcatcccggtgaattggcgctcgccgtgacctatgagagtgtgacactgcctgccgatatcgtcggttggctcgatggccgctcctctctggcgcgtttaggcttgatggtgcacgtcactgcgcaccggattgatccgggttggcagggtaaaatcgtgctcgagttttacaacagcggtaagttgcctttagcgctgcgcccacggatgaccattggtgcgttaaactttgaacgtttaagtggcccagtggcgcgtccgtataacaagcgcaaaaatgccaagtataaagatcaacaggatgcggttgctagccgtatcagtcaggactaa

SEQ ID NO: 265986 - DNA, 571 bp, Unknown
  Bacterial polypeptide expressing nucleotide sequence isolated from the Sargasso Sea
gatgtcgattaaatcagataaatggattcaaaaaatgtcacaagagcacaatatgattgatccattttcaaaaaatcaagtaaggcttgataataatggcaataaactaatttcttatggtgtgtctagttatggatatgatgtcagatgctcaaatgaatttaaagtttttacaaacattcattctgctatagtcgatcccaagtcatttgatgaaaaaagttttgtggacattaattcagatgtttgtgttattcctccaaactcttttgcattagctagaaccgttgagtattttaaaattcccaggaatattctcactgtatgtttaggaaaatcaacatatgcaagatgtggaattattgtaaacgtaactccacttgaacccgaatgggagggtcatgttactcttgagttctcaaatacaacgaatcttcctgcaaaaatttatgccggagagggagttgctcaaatgcttttttttgaatcagatgaagagtgtgagataagttacaaagatcgtgatggaaaatatcaaggacaaactggggttactttacccaagacttaa

SEQ ID NO: 265987 - DNA, 454 bp, Unknown
  Bacterial polypeptide expressing nucleotide sequence isolated from the Sargasso Sea
gatgtcgattaaatcagataaatggattcaaaaaatgtcaaaagagcataatatgattgatccattttcaaaaaatcaagtaaggcttgataataatggcaataaactaatttcttatggtgtgtctagttatggatatgacgtcagatgctcaaatgaatttaaagtttttacaaacattcattctgctatagtcgatcctaagtcatttgatgaaaaaagttttgtggacattaattcagatgtttgtgttattcctccaaactcttttgcattagctagaaccgttgagtattttaaaattcccaggaatattctcactgtatgtttaggaaaatcaacatatgcaagatgtggaattattgtaaacgtaactccactagaacctgaatgggagggtcatgttactcttgagttctcaaatacaacgaatcttcctgcaaaaatttatgcc

SEQ ID NO: 265988 - DNA, 571 bp, Unknown
  Bacterial polypeptide expressing nucleotide sequence isolated from the Sargasso Sea
atgtcgattaagtcagataaatggataaaaaaaatgtcaattaatgaggacatgataaatcctttctcagagaatcaagttcgtcttgatgaatcgggcaataaacttatatcttacggagtttctagttatggatatgatgttagatgctccaatgagtttaaagtttttacaaatatacattcagctattgtcgatccgaaatcatttgatgaaaaaagctttgtgaatattgaatcagacgtttgtgtaatacctcctaactcttttgctttggcaagaacaatagagtatttcaaaataccaagaaatgttcttactgtttgtcttggaaaatcaacgtatgcaagatgtggaataattgtaaacgtaacacctcttgagccagaatgggaaggacatgttactttggagttttctaatacaactaatttgccagcaaaaatttatgctggagagggtgttgctcagatgctattttttgaatcagatgaggagtgtgaaacaagttataaagatcgaggtggcaaatatcaagggcaaacaggagtcacgctacccaaaacttaaa

SEQ ID NO: 265989 - DNA, 556 bp, Unknown
  Bacterial polypeptide expressing nucleotide sequence isolated from the Sargasso Sea
tatgacaatcatgtcggataactggataaagaaaaaagccttagaagaaggaatgattgaaccgttcgttgatgggcaaaaaaaagaaggtacaatttcatttggcctttcatcatatgggtacgatgcaagggtttcagaagaatttaagattttcaccaatgtagactctgctttagttgatccaaaaaactttgatgataaagggtttgttgatcggcctggtaaagaatgcataattccacctaactcatttgcattagcaagaaccgttgagtattttagaattcctcgtgatgttcttgtaatttgtttgggaaaatcaacttatgcaagatgtggtattatcgtaaatgttactcctcttgagccagagtgggagggtcacgtaactttagaattttctaacacaactccattacctgcaaaaatttatgcaaatgaaggagcgtgccagtttttattctataagggagaggcgccaccagaagtttcatataaagatcgtaaaggtaaatatatgatgcaaaaaggggttactttacctaagctttaa

SEQ ID NO: 265990 - DNA, 535 bp, Unknown
  Bacterial polypeptide expressing nucleotide sequence isolated from the Sargasso Sea
atggcagcaaatcatgggatgattgaaccttttgctgaatctcagattaggcattcggacggaaacgatctaatctcttacggcacatcaagctttggttacgatgttcgatgtgcaaccgaatttaaagtttttacaaatattaattcagccattgttgaccccaaatcatttgatgaaaatagttttgttaactttgattccgatatatgcatcattcctccaaattcatttgcgttggcaagaaccattgagtatttcaggataccgagaaatgttttgaccatttgcttgggtaaatcaacttacgcacgttgtggaatcattgtgaatgttacacctcttgaaccagagtgggaaggtcatgtcactctagagttttcaaatacaacaccattaccagcaaagatatatgcgaatgaaggcgttgcccagatgatatttcttgaatctgatgaagactgcgaggaatcgtatcgagatcgaaaaggaaagtatcagggccaaacaggcgttacattacccaaaacctagt

SEQ ID NO: 265991 - DNA, 568 bp, Unknown
  Bacterial polypeptide expressing nucleotide sequence isolated from the Sargasso Sea
atgagcattaaatctgataattggattattgaacaggcagaaaaaaatcagctcattaaaccttttgaaaaagagcaaattagagaagttgataataaaaaagtaatctcctatggcgtatcaagttatggttacgatgtaaggtgtgcaaatgaatttaaaatattcacaaatacattttcgtcagtagttgaccctaaaaattttgatgaaaaaagttttgtcgatatacaagatagtgaatgtattattccaccaaattcttttgcacttgctagaacagttgaatatttcaagataccaagatcgatacttactctatgtcttggaaagtcaacctatgcaagatgtggaattattgtaaatgtaactccactagagcctgaatgggagggtcatgtgactctagagttttcaaacacaactaatttacctgcaaaaatttacgctaacgagggagttgctcaaatgcttttttttgaatcagatcaagtttgtaaaactagttataaagatcgtgggggtaaatatcagggacaaacgggtgtcactcttccaaaaacttagg

SEQ ID NO: 265992 - DNA, 571 bp, Unknown
  Bacterial polypeptide expressing nucleotide sequence isolated from the Sargasso Sea
gatgtcgattaaatcagataaatggattcaaaaaatgtctcaggagcataatatgattgatccattttcaaaaaaccaagtaaggcttgatgacgatggcaataaacaaatttcttatggagtttctagttatggatatgatgtcagatgctctaatgaatttaaagtttttacaaatattcactcagcaattgtggatcctaaatcatttgatgaaaaaagttttgtggatattaattcagatgtttgtgttattccaccaaattcttttgcattagctagaactgttgagtattttaaaattccgagaaatattcttactgtgtgcttaggtaaatcaacatatgcaagatgtggaattattgtaaacgtaactccacttgaacctgaatgggagggtcatgttactcttgagttttctaatacaacgaatctccctgctaaaatttatgccggagagggagttgcacaaatgttgttttttgaatcagacgaagagtgtgagataagttataaagatcgtgatggaaaatatcaaggacaaactggcgttactttacccaagacttaa

SEQ ID NO: 265993 - DNA, 568 bp, Unknown
  Bacterial polypeptide expressing nucleotide sequence isolated from the Sargasso Sea
aatgacgataaaatcagataaatggataatagatcaatcagagaaaaatgatttgataaaaccctttgaatcttctcaagtaagagagattgatggtgaaaaaattgtttcttatggagtctcaagttatggctatgatgttaggtgtgcaaatgaatttaaaatatttactaacactcattcttcggtagttgatccaaagaattttgatgagaatagctttatcgatattgttgctgatgaatgtatcattcctcccaattcatttgctttagccagaacagttgaatactttaagattccgcgctcagttcttaccttatgtctaggtaaatcaacctatgctagatgtggaatcatagtaaatgtgactccacttgaaccagagtgggaaggccatgttactttggaattctcaaatacaaccaatcttccggcaaaaatttatgctaacgaaggcgttgctcaaatggttttctttgaatcagatgaaatttgctcaacaagctataaagatagaggtggtaaatatcaagggcaaaaaggagttactctcccaaaaacttag

SEQ ID NO: 265994 - DNA, 556 bp, Unknown
  Bacterial polypeptide expressing nucleotide sequence isolated from the Sargasso Sea
atgtctgttcaatctgataagtggataaaaaaaatggcaaatgaatatggcatgatcgatcctttcgaagaaagtcaagtaagaggtaaaaaaatatcatttggagtctcttcgtacggttatgatgctagagtttccaatgagtttaaaatttttacaaatgttaattcagaaattgttgatcctaaagattttaaaccatctaactttgttacgagaaatacttctgagtgtattattccgcctaattcgtttgttttagctagtacagttgaatattttaaaattccaaaagatatattagtaatttgtttaggaaaatctacatacgctagatgtggaataatcgtaaatgtaactcctttagaaccaggttgggaaggccatgtaactcttgaattttcgaatacaacaccgttaccagcaaaaatatatgcaaatgaaggagttgctcaatttatatttttaaaaggaaatgaagtacctgaagtgacttatgctgatagaaaagggaagtatatgggtcaaactggtgtaacattacccaaagtttaag

SEQ ID NO: 265995 - DNA, 571 bp, Unknown
  Bacterial polypeptide expressing nucleotide sequence isolated from the Sargasso Sea
atgagtattaaatcagataagtggattaagcgaatggcatcgacggaggcgatgatagagccttttgaatcaggtcaagtacgttttattgatgatcagaaagttatttcgtatggaacttcaagttatggatatgatgttcgatgtgcttctgaattcaagatttttaccaatgtccacaccaccaatgttgtagatcccaaaaattttgatgagactagtttcgtaactatagacgagccgagttgcattattccgccaaactctttcgcattagcaagaacaatagaatatttccgaataccaaaagatgttttgacaatttgcctgggcaagtcaacctacgcgcgctgcgggataatagtaaatgtaactccactagagccggagtgggagggtcatgtaactctcgagttttcaaatactactcccttgcctgcaaaaatttacgctaatgagggcgtagctcaaatgcttttttatcagtcggatgagcaatgcgacgtgacatataaggatcgaggtggcaaatatatgagacagaccggtgtaactccacccaaggcttgag

SEQ ID NO: 265996 - DNA, 559 bp, Unknown
  Bacterial polypeptide expressing nucleotide sequence isolated from the Sargasso Sea
atgtcagtactttcagataactggattaaaaaaatgtctaaagaaaaaggtatgattagtccatttgaagaaaaacaaatacgaggagatagcatttcttatggcttatcttcatttggttatgatgccagagtatcaaatgagtttaaaatttttactaatgtaaattcagaaatagttgatcctaaaaactttaagccgacaaattttgtaacaaaaaaatcaaatgagtgcataataccaccaaattcttttgtgctttctactacagtagaaaaatttaaaattcctgatgatgttctagtaatttgcctaggtaaatccacatacgccagatgtggaataattgtcaatgttacaccgttagaaccaggttgggaaggctatgtcaccctagaattttcaaacacaactcctttacctgctaaaatttatgcaaacgaaggggttgcacaatttatctttcttaaggggtctgagaaacctaacgtaacttatgcagacagaaatggtaaatatatggggcaaggtcaagaaccaactttacccaaagtataat

SEQ ID NO: 265997 - DNA, 564 bp, Unknown
  Bacterial polypeptide expressing nucleotide sequence isolated from the Sargasso Sea
gatgtcgattaaatcagataaatggattcgaaaaatgtcacaagaacacaatatgattgatccattttcgaaaaatcaagtaaggctcgataataatggcaataaactaatttcttatggagtttctagttatggatatgatgtcagatgctccaatgattttaaagtttttacaaatattcattctgctatagtcgaccctaagtcatttgatgaaaaaagttttgtagatattaattcagatgtttgtgttattcctccaaactcttttgcattagctagaactgttgagtattttaaaattccaaggaatattctcactgtctgtttaggaaaatcaacatatgcaagatgtggaattattgtaaacgtaactccacttgaacctgaatgggagggtcatgtcactcttgagttttcaaatacaacgaatcttcctgcaaaaatttatgccggtgagggggttgctcaaatgctgttttttgaatcagatgaagagtgtgagataagttacaaagatcgtgatggaaaatatcaaggacaaactggcgttaccttacccaa

SEQ ID NO: 265998 - DNA, 571 bp, Unknown
  Bacterial polypeptide expressing nucleotide sequence isolated from the Sargasso Sea
tatgagcatcaagtccgacaaatggattcggcgcatggccgaagagcacaagatgatcgagccgttcgtgcccgatcaggtccgcgcgtccgaggacggccgccggatcgtcagctacggcacgtcgagctacggctacgacatccgctgcgcggacgaattcaagatcttcacgaacatcaactcgacgatcgtcgatccgaagaacttcgacgaaggttcgtttgtcgatttcaagggcgacgtgtgcatcatcccgccgaactcgttcgcgctggcccgcaccgtcgaatatttccgcatcccgcgcaccgtgctgaccgtctgcctcggcaagtcgacctacgcgcgctgcgggatcatcgtcaacgtgacgccgttcgaacccgagtgggaaggctacgtcacgctggaattctcgaataccacgccgctgcccgcgaagatctacgcgaacgaaggtgtcgcgcaggtgctgttcttcgaaagcgacgaagtgtgcgacgtgtcgtacgccgatcgcggcggcaagtatcagggtcagcgcggtgtcacgctgccgaaaacctga

SEQ ID NO: 265999 - DNA, 583 bp, Unknown
  Bacterial polypeptide expressing nucleotide sequence isolated from the Sargasso Sea
atgcgcttaaccgatatcgaaattgaacaggcccttgataacggctcgattgtgattgaacctcgcccaagcaacgatgcgatttctggtgtgagtgtcgatgtgcgattaggggggcaatttcgcgtctttaaagatcataccgcgccttttatcgacctgagtggtccgagtacggaagtgcaggcggcgcttgatcgggtgatgagcgaaatcatcgaaatccctgacggcgaagccttcttcctgcatcccggtgaattggcgctcgccgtgacctatgaaagcgtgacgctgccagccgatatcgtcggttggctcgatggccgctcttcactggcgcgtttaggcctgatggtgcacgtcactgcacaccgaattgatccgggttggcagggtaaaatcgtgctcgagttttataacagtggtaagttgcctttagcgctgcgtccacggatgaccattggcgcattaaactttgaacgtttaagcggcccagtggcgcgtccttataacaagcgtaaaaacgcgaaatataaagatcagcaagatgcggtcgccagccgtatcagtcaggactaat

SEQ ID NO: 266000 - DNA, 556 bp, Unknown
  Bacterial polypeptide expressing nucleotide sequence isolated from the Sargasso Sea
atgtctgtacaatctgataaatggattaagaaaatggctaaggagaatggaatgatatccccatttgaaaaaaaacaagtcagaggaaacaagatatcatttggtacttcaagttatggatatgatgctcgtgttaattctgagtttaaaatatttactaatgtaaattctgagatagtagatccaaaaaattttaaagccaccagctttgtttcaaaaaaaggacccgaatgtattattcccccaaactcttttgctttagcaagtacagttgagtattttaaaattcccaaagatgttttagtaatttgtcttggaaagtctacatatgctaggtgtgggatcattgtaaatgtgactcctttggaacctggttgggaaggtcatgttacacttgaattttccaatacaactcccttgccagcaaaaatatatgcaaatgaaggagttgctcaatttatatttttaaaaggaaatgaagaaccagaagtgacttatgctgatagaaaaggaaagtatatgggtcaaacaggagtgactttacctaaagtttaat

SEQ ID NO: 266001 - DNA, 571 bp, Unknown
  Bacterial polypeptide expressing nucleotide sequence isolated from the Sargasso Sea
catgagtattaaatccgataagtggattaaagaaatggccaataatcataggatgatagagcctttcgaggctgggcaggtaaggttaggtgcaaaagaagagaaattgatttcttatggaacctcttcttatggatatgatgttagatgctctaacgaatttaaagtatttactaatattaattctgctactgttgatccgaaaagctttgatgaaaatagctttgtagatgtaaaaagtgatgtttgcgtaatacccccgaattcttttgctcttgctagcactattgaatattttagaattcctaggaatgttcttactatttgtttaggtaagtccacatatgctaggtgcgggataatagtaaatgtgacaccactagaaccagaatgggaaggacatgttactttagagttttcaaatacaacaagcttacctgcaaagatttatgccaacgaaggtgtagcgcaaatgctctttttggaatctgatgaggaatgtgagataagctataaagatagaggtggaaaatatcaaggacagactggagtaaccttgcccaaggcttaa

SEQ ID NO: 266002 - DNA, 478 bp, Unknown
  Bacterial polypeptide expressing nucleotide sequence isolated from the Sargasso Sea
atgcgtctttgtgataccgatatcgaacgtcatctggatgaaggcaagatcgtcattgagcccagacccggtattgaacggatcagcggcgtcagcgtcgacgtgctgctgggcaacgagtttcgggtgtttcgcgatcacaccgccccctatatcgatctgagcggccccagcagcgaaatggccgacgccatcgatcgggtgatgagcgatgaaatccatgtgccggatggcgaagccttctatctgcacccgggccagctggccctggcggtcacctatgaatcggtcaccctaccggccgacatcgtgggctggctggatggccgctcgtccctggcccgcctcgggctgatggtgcacgtgaccgcgcaccgcatcgatccgggctggtccggtcgcatcgtgctggagttctacaacggcggcaagctgccgctggcgctgcgccccaagatgaagatcggtgcgctgaact

SEQ ID NO: 266003 - DNA, 403 bp, Unknown
  Bacterial polypeptide expressing nucleotide sequence isolated from the Sargasso Sea
tttactaatattcattctgcaacagtggaccctaaaagctttgatgagaacagctttgtagatattgttgatgatgtatgcgttatacctccaaattctttcgcactggcaagtacaatagaatattttaagattcctagaaatgtgcttacaatatgtcttggtaaatctacctacgcaagatgtgggattatagttaacgtcactcctttagaaccagagtgggaaggtcatgtaaccttagagttttctaatacgacaagtttaccagcaaagatttatgccaatgaaggcgtggcgcaaatgcttttcttagaatccgatgaagaatgtgaggttagttataaagatagaggtggaaagtatcaaggacaacaaggcgttacattaccaaaagcttaat

SEQ ID NO: 266004 - DNA, 408 bp, Unknown
  Bacterial polypeptide expressing nucleotide sequence isolated from the Sargasso Sea
catgagattgtgtgaccgcgacattgaagcctatattgacgcaggcaagatccaaattacgccacggccaacaccagacatgatcagcggtgttagtgtggatattcgcttaggccataaattccgcacttttcgtgcttatgcagctgcatttatcgatttaagtggcccgcgtgaagaagtggaccatgcgttaaattcagtgatgagtgatgaaattgtattgtccgatgatgaagcttttttcctgcacccgggcgaactggctttggctattacgctcgaatccgtcactttgccagcagacatcgttggttggttagatggccgttcttcattagcccgtttaggtttaatggtgcatgtaacagcacaccgtattgatccgggttggtctggcaatatagt

SEQ ID NO: 266005 - DNA, 553 bp, Unknown
  Bacterial polypeptide expressing nucleotide sequence isolated from the Sargasso Sea
catgacagttctatcagataaatggattaaaaaagctgctcaaaaaggaatgataaacccttttgttagcaaacaagtcagaagaggaaaaatttcttttggactttcatcttatggatatgatgcaagagtttcaaatgaatttaagatatttactaatgtaaattctggaatagtagatccaaaagttttcaaaaaagagagttttgtaacaaaaattggaagagaatgtatcataccacctaattcttttgcattagcaagaaccatggaatattttaaaattccagaaaacgtattggttatatgtctaggcaagtcaacatatgcaagatgtggaatcattgtaaatgtaactccactagaacctggatgggaaggacatgtgactttagaattttcaaatactactcctttaccggctaaaatttatgctaacgagggtgtggcccaacttgtatttattaaaggtaatgaaaagcctagtatcacttatgctaaaaggaaaggtaaatacatgaaacaaaaaggtgtaactcttcctaagatttaa

SEQ ID NO: 266006 - DNA, 556 bp, Unknown
  Bacterial polypeptide expressing nucleotide sequence isolated from the Sargasso Sea
tatgacaatcatgtcggataactggataaagaaaaaagccttggaagaaggaatgattgaaccgttcgttgatggacaaaaaaaagaaggcacaatttcatttggtctttcatcatatggatacgatgcaagagtttcagaagaatttaaaatttttaccaatgtagattctgctttagtcgatccaaaaaactttgatgataaagggtttgtagatcggccaggtaaagaatgcataattccacctaactcatttgcattagcaagaaccgttgagtattttagaattcctcgcgatgttcttgtagtttgtttaggaaaatcaacttatgcaagatgtggcattatcgtaaatgttactcctcttgaaccagagtgggagggtcacgtaactttagaattttctaacacaactccattacctgcaaaaatttatgctaatgagggagcgtgccagtttttattctataagggagaagcgccaccagaagtttcatataaagatcgtaaaggtaaatatatgatgcaaacaggggttactttacttaagctttaa

SEQ ID NO: 266007 - DNA, 285 bp, Unknown
  Bacterial polypeptide expressing nucleotide sequence isolated from the Sargasso Sea
tggaatattttaaaattcctaggaacgtgctaacaatttgtctaggaaaatctacgtatgctagatgcggcataattgtaaacgtaactcctctcgaacctgaatgggaaggccatgtaactcttgaattttcaaatacaacaagtttgccagcaaagatctatgcaaacgaaggcgtagcacaaatgctattttttgaatcagatgaattatgcgaaacaagttatgcggataggaaaggcaaatatcaaggtcaattgggcgttacacccccaaaagtttaaa

SEQ ID NO: 266008 - DNA, 556 bp, Unknown
  Bacterial polypeptide expressing nucleotide sequence isolated from the Sargasso Sea
atgtctgtccaatctgataaatggataaaaaaaatggccaaagaatatgacatgatatctccatttgaggaaatacaggttagaggaaacaaaatatcttttggtacttcaagttatggatacgatgctcgtgtaaattcagagtttaaaatatttaccaatgtaaattcagaaatagtagatccaaaaaattttaaacctactagctttgtttcaaaaacaggtccagaatgtattattcccccaaattcttttgctctagccagcacagtggaatattttaaaattccaaatgatgttcttgtaatttgccttgggaagtcaacttacgctaggtgtggaataattgtaaatgttactccattggagccaggatgggaaggtcatgttacacttgaattttcaaataccactcctttgccagcgaaaatatatgcaaatgaaggagttgctcaatttatatttttaaaaggtaatgaagtaccagaagttacttacgcagatagaaaaggaaaatatatgggtcaaaaaggagtaactttacccaaagtctaaa

SEQ ID NO: 266009 - DNA, 418 bp, Unknown
  Bacterial polypeptide expressing nucleotide sequence isolated from the Sargasso Sea
tgatgaatttaagatatttacaaacgtaaactcagagattgtcgatcctaaaaattttaaaccttctaactttgttactaaaaatacatcagaatgtattatccctcctaactcattcgtattagctagaacagtagaaaaatttaagatacctaataatgtattagttatttgtttaggcaagtcaacatatgctcgatgtggtatcattgttaatgtaacacctttagagcctggttgggaaggatacgttactcttgaattttcaaatactacaccgttgccagctaagatctacgcaaatgaaggtgtcgcacaatttattttcttaaagggaaatgaggatcctgagatcacttacgcggacagagatggaaaatatatgggtcaaacaggtgtaactctaccaaaagtataa

SEQ ID NO: 266010 - DNA, 488 bp, Unknown
  Bacterial polypeptide expressing nucleotide sequence isolated from the Sargasso Sea
ttcgaaacaaataagaaaaggcaaaatatcttttggattatcatcgtatggatatgatgcaagagtatcgaatgactttaaagtttttacaaatgttaattctgcagtagtggatccaaaaaattttaaaaaagatagttttatttcaaaaaaatctaatacatgcgtgatacccccaaattcgtttgcactggcacgaaccgttgaatactttaagattccagaaaatgttctggtaatatgtttgggtaaatcaacctatgccagatgtggaattatagttaatgtaactcccctagagccaggatgggaagggtatgttacccttgaattttcaaatacaacacctctaccagctaaaatttacgccaatgagggtgcagcacaatttgtatttcttaagggtaatgaaaaacctgaagtttcttattcaaaaagaaaaggtaagtatatgaaacaaaaaggtgtaacacttcctaaaatctaat

SEQ ID NO: 266011 - DNA, 501 bp, Unknown
  Bacterial polypeptide expressing nucleotide sequence isolated from the Sargasso Sea
tatgagtgttctctcagataaatggataaaaaagatggttaaaaaccataaaattataactccatttattcccaaacaaacaagaaaaggaaaaatttcatacggtttatcatcatacggatatgacgcaagagtttctgatgattttaaaatatttacaaatgtaaactctacaatagttgatcctaaaaattttaatcaggatggatttgtttcaaaaaaatcaaaaatttgtgtgatacctccaaattctttcgctttagcaagaacagtagaatattttaaaataccagaaaatgtgcttgtgatttgtttaggaaaatctacgtatgcaagatgtgggattatcgttaatgtgacaccattagaaccaggctgggaagggcatgttacacttgaattttcaaacacaacacctcttcctgcaaaaatttatgcaaatgagggtgctgcacagtttgtttttataaaaggtaacgaaaaaccagaagtaacatatgc

SEQ ID NO: 266012 - DNA, 556 bp, Unknown
  Bacterial polypeptide expressing nucleotide sequence isolated from the Sargasso Sea
atgccagtccagtctgataagtggattaaaaaaatggcaactgatcataaaatgattgagccatttgaagataaacaaatcaggggtaataatatatcttatggtgtttcatcttatggatatgatgcgagagttggaaatgaatttaaaatatttacaaatgttaacacagaaattgttgatccaaaaaattttaaaccaacaagctttattacaaaaaaaggttcggagtgtataattccaccaaattcatttgtgcttgcaagcactattgaatattttaggattccagacgatgttcttgtaatttgtttaggaaaatcgacatacgcaagatgtgggattattgttaatgtaacacccctagaaccatcatggtgtggaaatgttactctagagttttcaaacacaactccattaccagcaaaaatatacgcaaatgaaggagcctgccaatttatttttttaaaaggtaatgaaaaacctgaaactacatattctgatcgagaaggtaaatacatggatcaaaaaggggtcaccttacccaaagtctaac

SEQ ID NO: 266013 - DNA, 556 bp, Unknown
  Bacterial polypeptide expressing nucleotide sequence isolated from the Sargasso Sea
aatgtcagttcaatcagataagtggataatcaaaatggcaaaagatcatgcaatgatttcaccatttgaagataagcaaataagagagggaaaaatttcatttggtgtttcttcatacgggtacgatgcgagagtatctaatgagtttaaaatatttaccaatgttaactccgaaattgtagatccaaaaaattttaaaccaacaaattttgtaacaaaagaatctgatgaatgtattattccaccaaattcttttgttttggcaagaacagtcgaatattttaaaattcctagtgatgttttagttatttgtttaggcaagtccacgtatgccagatgtggaataattgttaacgtaacacctttggaaccgggatgggaaggtcatgtgactcttgaattttctaacacaactccattaccagccaaaatatatgcaaatgagggcgtagctcaatttatatttttaaaagggaatgagaagccagatgtttcatatgctgacagaaatggaaaatatatgggccaaaaaggggtaacgcttcccaaaatttaa

SEQ ID NO: 266014 - DNA, 556 bp, Unknown
  Bacterial polypeptide expressing nucleotide sequence isolated from the Sargasso Sea
atgaccatcatgtctgataactggattaaaaaaatgtctttagaacaaggcatgattgagcccttcgtagacggacaaaaaaaagatgggactatttcctttggattgtcatcttacggatatgacgcaagagtatctgaagattttaaaatatttacaaatgttgactcagccttagttgatcctaaaaattttgatgacaaaggctttgttgatagaccaggcaaagaatgcatcataccacctaattcatttgcactggcacgcaccgtagaatatttcagaattccaagagatgtattagtagtttgtttaggtaaatcaacatatgcaagatgtggaataatagttaatgtaactcctttggagcccgagtgggaaggacatgtaactttagagttttcaaatacaacaccactgccagcaaaaatatatgcaaatgaaggaggctgtcagttcctattctataaaggagaggctccgcctgagatttcctacaaggatagaaaagggaaatacatgaaacaaactggcgttactcttcccaagctataaa

SEQ ID NO: 266015 - DNA, 355 bp, Unknown
  Bacterial polypeptide expressing nucleotide sequence isolated from the Sargasso Sea
tcaactttatcactaaaaacttcatctgaatgtataataccacctaattcttttgtgttagcaagaacggttgaatattttaaaattccaaaaaatgttttggttatatgtttaggaaaatctacgtatgcaagatgtgggataatagttaatgttacacctcttgaaccaggatgggaggggcatgtgactttggaattttcgaatacaacaccattacccgcaaaaatttatgctaatgaaggagttgctcaatttgttttcatcaagggcaatgaagacccgttagtctcatatgcagatagaagtggtaaatatcagggtcaaaagggagttacacttccaaaaatataac

SEQ ID NO: 266016 - DNA, 571 bp, Unknown
  Bacterial polypeptide expressing nucleotide sequence isolated from the Sargasso Sea
atgacgattaaatcagataagtggataagaaagatggcggttgatcaaggcatgattgagccatttcaagaagatcaaataagatattctgatgacaattcaagacttatatcatatggcctttctagttatgggtatgacgttaggtgtgcaaatgaatttaaagtatttactaatattcattcagcaatagttgaccctaaatcatttgatgaaaaaagctttgtagatattaactcagatgtgtgtgtaatacctcctaactcttttgccttggcaagaacagtagagtatttcaggataccaagagatgtgcttaccatttgtcttggtaaatcaacttatgcaagatgcggaattattgtaaatgtaactccgcttgaacctgagtgggaaggccatgtaactttagagttttctaatacaagcaatttaccagcgaaaatatatgcaggtgagggcgttgcccaaatgatatttcaccaatcagatgagcaatgcgaggtaagctacaaggatagggatggaaaatatcagggccaaactggagtgacactacccaaaacttagt

SEQ ID NO: 266017 - DNA, 571 bp, Unknown
  Bacterial polypeptide expressing nucleotide sequence isolated from the Sargasso Sea
atgtcgattaaatcagataaatggattcaaaaaatgtcacaagagcacaatatgattgatccattttcaaaaaatcaagtaaggcttgatagtaatggcaataaactaatttcttacggtgtgtctagttatggatatgacgtcagatgctcaaatgaatttaaagtttttacaaacattcattctgctatagtcgatcccaagtcatttgatgaaaaaagttttgttgacattaattcagatgtttgtgttatacctccaaactcttttgcattagccagaaccgttgagtattttaaaattcccaggaatattctcactgtatgtttaggaaaatcaacatatgcaaggtgtggaattattgtaaacgtaactccactagaacctgaatgggagggtcatgttactcttgagttctcaaatacaactaatcttcctgcaaaaatctatgccggagagggagttgctcaaatgctgttttttgaatcagacgaagagtgtgagataagctataaagatcgtgatggaaaatatcaaggacaaactggcgttactttacccaagacttgaa

SEQ ID NO: 266018 - DNA, 559 bp, Unknown
  Bacterial polypeptide expressing nucleotide sequence isolated from the Sargasso Sea
atgtcggtactttcagataaatggattaaaaaaatgtctaaagagaatagtatgattagtccatttgaagaaaaacaggttcgaggagatagtatttcttatggcttatcttcatttggttatgatgctagagtctcaaacgagtttaaaatttttactaatgtaaattccgaaatagttgatccaaagaattttaagcccacaaattttgtaacaaaaaaatctagtgaatgcataatacctccaaattcatttgtattatctactacagttgaaaaatttaaaattcctgatgacgttctagttatttgtttgggtaaatctacatacgctagatgtggtataattgtgaatgttaccccattagaaccaggctgggaaggatatgtcactctagaattttcaaacacaactcctttacctgctaaaatatatgccaacgaaggtgttgcacaatttatttttcttaaggggtcagagaaaccaagtgtaacatatgcagacagaaatggtaaatacatggggcaaggccaagaaccaacattacccaaagtttaat

SEQ ID NO: 266019 - DNA, 571 bp, Unknown
  Bacterial polypeptide expressing nucleotide sequence isolated from the Sargasso Sea
atgtcgattaagtcagataaatggataaagaaaatgtcacttgagcatgaaatgataaaacctttttctgaaggtcaaattagattagatgataatggcaataaacttatttcctacggtgtatctagctatggatatgatgttagatgttcgaacgaatttaaagtttttacaaatatacactcagcaatagttgatccaaagtcctttgatgaaaatagcttcgttgatattaattctgaagtttgtattattccaccaaattcttttgctttggcaaggacaattgaatattttaagattcctagaaatgttttaactatttgcttaggaaaatcaacttatgcaagatgcgggattattgtgaatgtaactccacttgaaccagagtgggaaggacatgtaacattggagttttctaatacaacaaacttgcctgcaaaaatatatgctggtgagggagtggctcaaatgttattttttgaatctgatgaggtttgtgaggtaagttataaagatcgtggtgggaagtatcaaggtcaaactggagtgacattacccaaaacttaga

SEQ ID NO: 266020 - DNA, 193 bp, Unknown
  Bacterial polypeptide expressing nucleotide sequence isolated from the Sargasso Sea
tttggaacctgagtgggaaggacatgttacgctagaattttctaacaccacaactttgccagctaaaatatatgccaacgagggcgtagctcaaatgctgttctttgagtctgacgagcgttgtgaaatcacctacaaagatagaaatgggaaataccaggggcagacaggagtgactttgcctaaaccttag

SEQ ID NO: 266021 - DNA, 412 bp, Unknown
  Bacterial polypeptide expressing nucleotide sequence isolated from the Sargasso Sea
tttaaaatttttacaaacgtaaactcaacaatagtagacccaaaagacttcaaacaagatggttttgttacaaaaaaagctaaagtttgtgtaataccaccaaactcttttgctctagcacgaacagttgaatattttaaaatacctgagaatgttttagtaatttgtttaggaaaatcaacttatgcacgttgtggaataatagtaaatgttactcccctagagcccggttgggaaggacatgttacgctagagttttcaaacacaacccccttaccagctaaaatttacgcaaatgaaggcgctgcacaatttgtttttataaaaggaaatgaactacctgaagtaacatattctaaaagaaagggtaaatatatgaaacaaaaaggcgttacccttcctaaaatttaat

SEQ ID NO: 266022 - DNA, 571 bp, Unknown
  Bacterial polypeptide expressing nucleotide sequence isolated from the Sargasso Sea
aatgtcgattaagtccgataagtggattcaagatatgtcaaagaatcataatatgatagaacctttttcaaagaaccaggttaggcttgatgatcagggcaataaattaatttcatatggtgtttcaagttatggttacgatgtgcgttgttcaaatgaatttaaagtatttacaaatattcattctgcaattgttgatccaaaatcatttgatgataaaagctttgttgatataaattcagatgtttgtatcattcctccaaattcttttgcacttgccagaactatcgagtattttaaaattcctagaaatatactcactatatgtcttggaaaatctacatatgcaagatgtggaattattgtaaatgtcactccacttgaaccagaatgggaaggacatgtaactctagaattttcaaatacaacaaatttacctgcaaaaatatatgctggagagggagttgctcaaatgcttttctttgaatctgatgaggaatgtgaaattagttataaagatcgtaaaggtaaatatcaaggacaaaccggtgttaccttacccaaaacttaa

SEQ ID NO: 266023 - DNA, 193 bp, Unknown
  Bacterial polypeptide expressing nucleotide sequence isolated from the Sargasso Sea
acttgagcctgaatgggaaggtcatgtcacgcttgagttttcaaatacaacaccattgcccgctaaaatatatgccaatgaaggtgtcgctcaaatgatatttcttgaatcagatgaagattgtgatgagtcgtatagagaccgaaaaggaaagtatcagggacagacaggggtcacattaccaaaaacttaa

SEQ ID NO: 266024 - DNA, 526 bp, Unknown
  Bacterial polypeptide expressing nucleotide sequence isolated from the Sargasso Sea
atgagcgtattgtctgacaaatggataacaaaaatggttaaaaaacataaaatgatttatccttttgttcccaaacagaaaagaaaaggcaaaatatcttatggtctttcatcttatggttacgatgctagggtatctagtgattttaaaatttttactaatgtaaattcagcagttgtagatcccaaaaatttcaaaaaagatggttttgtaagtaaaaaatcaaaagtttgtataataccacctaactcatttgttctagccacaacaatagaatattttaagattccagataatgtaattgtaatttgcttaggaaaatctacatatgcgaggtgtggtataatagttaacgtcactcctttggaacctggctgggagggtcatgttacacttgagttttcaaacacaacaccactacctgctaaaatttatgctaatgaaggtgctgctcaatttgtttttattaaaggaaacgaaaaacctcaaaccacatactctcaaagaaagggtaaatatatgaaac

SEQ ID NO: 266025 - DNA, 571 bp, Unknown
  Bacterial polypeptide expressing nucleotide sequence isolated from the Sargasso Sea
atgtcgattaaatctgataaatggataaagttaatgtctactaatcatgaaatgattcaacctttttctgaggatcagataagaatggatgagaatggaaataagctaatttcttatggggtgtctagttacgggtatgatgttagatgttcaaatgaatttaaagtttttacaaatatacattctgcaattgtagacccgaagtcttttgatgaaaaaagttttgtagatatagcttcagatgtttgtgttattcctccaaattcatttgctctagcaagaacagttgagtattttaaaataccaagaaatgttcttaccatttgtttaggtaaatctacttatgcaagatgcggaattatcgtaaatgttactccgcttgagccagagtgggagggccatgtaacacttgagttttcaaatacaacaaatttaccagcaaaaatttatgctggagaaggggtcgcccaaatgttgttttttgagtcagatgaagaatgtgacgtaagttataaagataggggtggaaaataccaaggtcaaacaggcgtcacactacccaaggcttaaa

SEQ ID NO: 266026 - DNA, 493 bp, Unknown
  Bacterial polypeptide expressing nucleotide sequence isolated from the Sargasso Sea
tttgaagataaacaagttcgaggtgataaaatatcattttggcgtatcatcgtatggttacgatgcaagggtctctgacgaatttaaaattttcactaatgtaaattctgaaattgtagatccaaaaaattttaaatcatctaattttattactaaaaactcatcagagtgtataataccacctaattctttcgtgttagcaaggacagtagagtatttcaaaattccaaaaaatgttttggtaatttgtttaggaaaatctacctatgcaagatgtggaataatagttaacgttacgccacttgagccaggatgggagggtcatgtaactttagaattttcaaacacaaccccattaccagcaaaaatttatgctaatgaaggtgttgcacaatttgtgtttatcaaaggaaatgaagatccatcagtttcatatgcagatagaaatggcaaatatcagggccaaaagggagttacacttccaaaaatataa

SEQ ID NO: 266027 - DNA, 556 bp, Unknown
  Bacterial polypeptide expressing nucleotide sequence isolated from the Sargasso Sea
atgtcagttctctccgataaatggattagaaaaatgtccaaagaatacaacatgatttcaccttttgaggaaaaacaagtaagaggcaagagtatttcttatggactttcctcttttggctatgatgcaagagtatcagacgagtttaaaatttttacaaatgttaattctgagattgttgaccctaaaaattttaaaccaacaaattttgtaactaaaaatgtatctgaatgtgttattccaccaaattcatttgttttagcaagaactgtggaaaagtttaaaattccaaatgatgtattggttatttgtctaggtaaatcaacatatgcaagatgtgggatcattgtaaatgtaaccccactagagcctgggtgggaaggatatgttacgcttgaattttcgaacaccacacctttacctgcaaaaatttatgcaaatgaaggtgttgcacaatttattttcttaaaaggaaatgaaaaaccagaagtgacttatgcagatcgagatggaaagtatatgggtcaaactggggtaacattacctaaagtttaaa

SEQ ID NO: 266028 - DNA, 340 bp, Unknown
  Bacterial polypeptide expressing nucleotide sequence isolated from the Sargasso Sea
atgacgattaaatcagataagtggataagaaagatggcagttgatcatggcatgattgaaccatttcaagaggatcagataaggtattctgatgacaattcaagactaatatcatatggcctctctagttatgggtatgacgttaggtgcgcaaatgaatttaaagtatttactaatattcattcagcgatagttgacccaaaatcttttgatgaaaaaagctttgtagatattaactcagatgtatgtgtaatacctcctaactcttttgctctagcaagaacagtagaatatttcaggatacccagagatgttctaactatctgtctcggtaaatcaa

SEQ ID NO: 266029 - DNA, 556 bp, Unknown
  Bacterial polypeptide expressing nucleotide sequence isolated from the Sargasso Sea
atgtcggtccaatctgataagtggattatacaaatggccagagaaaacgacatgatctctccttttgaagacaaacaagttagaggagataaaatatcatttggtgtttcatcatatggttatgatgcgagagtttctgatgaatttaaaatttttaccaacgtaaattctgaaattgtagatccaaaaaattttaaatcttcaaattttattacaaagaactcatctgaatgtataattccacctaattcattcgtattagcgagaacagtggaatactttaagatacctaaaaatgttttagttatatgtttaggaaaatctacatatgcaagatgtggaataattgtcaacgtcacacctctcgaaccaggttgggagggacatgtaacattagaattctctaacacaacaccgttaccagcaaaaatatacgccaatgaaggagttgctcaatttgtttttattatgggcaatgaggatccagctgtttcatatgcggatagaaatggtaaatatcaaggtcaaaagggagttacacttccaaaaatatagt

SEQ ID NO: 266030 - DNA, 220 bp, Unknown
  Bacterial polypeptide expressing nucleotide sequence isolated from the Sargasso Sea
atgtggaataattgtcatgttacacctcttgaaccaggctgggagggacatgtgacattagaattttccaatacaactccattaccagcaaaaatttatgccaatgaaggtgttgctcaatttgtttttattaagggcaatgaggatccagctgtttcatatgcagatagaaatggtaaataccaaggtcaaaagggagttacacttccaaaaatataat

SEQ ID NO: 266031 - DNA, 556 bp, Unknown
  Bacterial polypeptide expressing nucleotide sequence isolated from the Sargasso Sea
aatgtcagttctctccgataaatggattagaaaaatgtccaaagaatacaacatgatttcgccttttgaggaaaaacaagtaagaggcaagagtatttcttatggactttcttcttttggctatgatgcaagagtatcagacgagtttaaaatttttacaaatgttaattctgagattgttgaccctaaaaattttaaaccaacaaattttgtaacgaaaaatgtatctgaatgtgttattccaccaaattcatttgttttagcaagaactgtggaaaagtttaaaattccaaatgatgtattggttatttgtctaggtaaatcaacatatgcaagatgtgggatcattgtaaatgtaaccccactagagcctgggtgggaaggatatgttacgcttgaattttcgaacaccacacctttacctgcaaaaatttatgcaaatgaaggtgttgcacaatttattttcttaaaaggaaatgaaaaaccagaagtgacttatgcagatcgagatggaaagtatatgggtcaaactggggtaacattacctaaagtttaa

SEQ ID NO: 266032 - DNA, 212 bp, Unknown
  Bacterial polypeptide expressing nucleotide sequence isolated from the Sargasso Sea
tatagtaaatgttactccccttgaacctgagtgggaaggccatgtcactcttgagttttcaaacacaagcaatttgccagctaaaatatatgcaggtgagggcgtagctcaaatgatatttcatcaatcagatgagcaatgcgaggtaagctataaggatagagatggaaaatatcagggccaaaccggggtgacgctacccaaaacttagt

SEQ ID NO: 266033 - DNA, 556 bp, Unknown
  Bacterial polypeptide expressing nucleotide sequence isolated from the Sargasso Sea
atgtctgttcaatctgataaatggataaaaaaaatggtgaaggaacatggtatgataaaaccatttgaagaagagcaaattagagggaataaaatatcttttggcacttctagttatggttatgatgcaagggttgcttctgagtttaagatttttacaaatgttaattcagagatagttgatcctaaaaattttaaacctacaagttttgtttcaaaaaaaggatcagaatgtattataccaccaaattcttttgctttagcaagtacagttgaatattttaaaattccaaaagatgttttagtaatttgcctaggcaaatctacttatgctagatgtggaataattgtaaatgtaacacccttagagcctgaatgggaaggtcatgttactcttgaattttcaaatacaactccattgccagccaaaatttatgcaaatgaaggtgttgctcagttcattttcttaaaaggaaacgaaatacccgaagtgacttatgccgatagaaaaggaaaatatatgggtcagacaggggtaactttaccaaaagtttagt

SEQ ID NO: 266034 - DNA, 568 bp, Unknown
  Bacterial polypeptide expressing nucleotide sequence isolated from the Sargasso Sea
atgacgattaaatctgataaatggatcaaagaaatggcagcaaatcatgggatgattgaaccttttgctgaatctcagattaggcattcagacggaaacgatctaatctcttacggcacatcaagctttggttacgatgttcgatgtgcaaccgaatttaaagtttttacaaatattaattcagccattgttgaccccaaatcatttgatgaaaatagttttgttaactttgattccgatatatgcatcattcctccaaattcatttgcgttggcaagaaccattgagtatttcaggataccgagaaatgttttgaccatttgcttaggtaaatcaacgtacgcacgttgtggaattattgtgaatgttacacctctggaacctgagtgggaaggtcatgtcactctagagttttcaaatacaacaccattaccagcaaagatatatgcgaatgaaggcgttgcccagatgatatttcttgaatctgatgaagactgcgaggaatcgtatcgagatcgaaaaggaaagtatcagggccaaacaggcgttacattacccaaaacctagt

SEQ ID NO: 266035 - DNA, 568 bp, Unknown
  Bacterial polypeptide expressing nucleotide sequence isolated from the Sargasso Sea
aatgactataaagtctgacaaatggataatagatcaatctgaaaaaaatgatttaataaaaccattcgaacccactcaagtaagagaagttaagggtaaaaaaatagtctcatatggtgtttcaagttatggctatgatgtcagatgtgcaaatgaatttaaaatatttacgaacacacattcttcagtagtagatccaaaaaattttgataagaatagctttatagatgtcaccgcagatgaatgcatcattccgccaaattcatttgcacttgccagaacaattgaatattttaagatacctcgctctgtacttactttatgcttgggtaaatcgacttatgctagatgtggcatcatagtaaatgtaactcccctcgaaccagagtgggaaggccatgttaccttagagttctctaataccactaatttgcctgcaaaaatttatgcaaatgaaggtgttgctcaaatggtcttttttgaagctgatgaaatttgttcaacaagctataaagatagaggcggcaagtatcaaggccaaaaaggtgtcactctgccaaaaacttag

SEQ ID NO: 266036 - DNA, 568 bp, Unknown
  Bacterial polypeptide expressing nucleotide sequence isolated from the Sargasso Sea
tatgacaattaaatctgataactggatcaaaaaaatggcacaaaatcatggcatgattgaaccctttgccgaatctcaaataagacattcagatggaaaagacttaatctcttatggaacttcaagctttggttacgatgttcgatgtgcaaccgaatttaaagtatttacaaatatcaattctgctatcgtagatcccaagtcatttgatgaaaatagttttgtgaattttgattctgatgtttgcatcatccctcccaattcatttgcacttgcaagaacaatagagtacttcagaataccgagaaatgttctgaccatctgtttgggtaaatcaacctatgcacgttgcggaatcattgtaaacgtcacaccacttgagcctgagtgggaaggtcatgtcacgcttgagttttcaaatacaacaccattgcccgctaaaatatatgccaatgaaggtgttgctcaaatgatatttcttgaatcagatgaagattgtgatgagtcatatagagaccgaaaaggaaagtatcaaggacagacaggggtcacattaccaaaaacttag

SEQ ID NO: 266037 - DNA, 250 bp, Unknown
  Bacterial polypeptide expressing nucleotide sequence isolated from the Sargasso Sea
tatttgtttaggtaagtccacttatgcaagatgtggaataattgttaatgtaacacccttagaaccaggatgggaaggtcatgtgacacttgaattttctaacacaactccattaccagccaaaatatatgcgaatgagggtgtggctcaatttatattcttaaaagggaatgagaaacctgacgtttcatatgctgacagaaatggaaaatatatgggccaaaaaggggtaacgcttcccaaaatttaa

SEQ ID NO: 266038 - DNA, 568 bp, Unknown
  Bacterial polypeptide expressing nucleotide sequence isolated from the Sargasso Sea
atgagcatcaaatcggacaagtggattcgccgcatggcccaggaacacggcatgatcgagccttacgtcgagcgccaggtgcgcggtgcagacgacagtcgcgtcatctcctacggtgtttccagctacggctacgacgtacgttgcgccgatgaattcaaggtgttcaccaatatccactcggccatcgtcgacccgaagaatttcgacgagaagagcttcgtcgacatcaagagtgacgtttgcatcattccgcctaactccttcgccctggcccgcacggtcgaatacttccgcattccgcgtgatgtgctgaccatctgcctgggcaagagcacctacgcgcgttgcggcatcatcgtcaacgtcacgccgctggagccggagtgggaagggcatgtgactctggagttttccaacaccaccaacctgccggccaagatctacgccaacgaaggtgtggctcagatgctgttctttgaatccgacgagtcctgcgaaacttcctaccgtgatcgcggtggcaagtatcagggccagcgcggcgttaccttaccgcgcgcctgag

SEQ ID NO: 266039 - DNA, 571 bp, Unknown
  Bacterial polypeptide expressing nucleotide sequence isolated from the Sargasso Sea
atgtcgattaaaccggatgtatggattaaacgaatggctgaatcagagggaatgatcgagcctttttctgagaaccaggtaagagtcgatgaaaatggtaaaaaactcatatcttatggcgtatcaagttttggttatgatgttcgttgtgctaatgagtttaaagtatttacaaacatacactctgctacggtcgacccaaaagtttttgatgatgatagctttgtagatataacctcagatgtatgtgtcattccaccaaattcatttgcacttgcaagaacagttgaatactttcgaattcctagaaatgttctaacgatctgtcttggtaagtcgacttacgcaagatgcggcattattgttaacgttacgccactagagccagaatgggaggggcatgtaacccttgagttttctaatactaccaacttaccagcaaaaatatatgctggagagggcgttgctcaaatgattttcttcgaatcagatgaggactgcgaagttagttacaaagacaggggcggaaagtatcagggacaaacgggtgtcacgctcccaaaaacttaat

SEQ ID NO: 266040 - DNA, 331 bp, Unknown
  Bacterial polypeptide expressing nucleotide sequence isolated from the Sargasso Sea
taccgaatgtataatcccaccaaactcttttgttcttgctagtacagttgaatattttaggattcccaatgatgtattggtgatttgcttgggtaaatcaacatatgccagatgtggcatcatagtaaatgtaacgcccttagaaccatcatggtgtggaaatgttactcttgaattttccaacacaactccattaccagcaaagatttatgctaacgaaggagcatgtcagtttatctttttaaaaggaaatgaaaaacctgagactacatattcagaccgtgagggtaaatatatggatcaaaaaggagttactttgcctaaagtctag

SEQ ID NO: 266041 - DNA, 556 bp, Unknown
  Bacterial polypeptide expressing nucleotide sequence isolated from the Sargasso Sea
catgccagttttgtcagataaatggattaaaaaaatggctttaagtcaagaaatgattaaaccatttgaggaaaaacaaataagaaatggtaatatatcttatggtctatcctcgttcggttatgatgctagagtttctaatgaatttaaaatttttactaatgtaaattccgaaatcgttgatccaaaaaaatttaaaccaagtaattttataaccaaaaatatagatgaatgcattataccgcccaattcatttgttcttgcaagtactgtagaatattttaagataccaaaaaatgttttagttatatgtcttggaaaatctacctatgcaagatgtggtatcatagtcaatgtaactcctttagagccaggatgggaaggtcatgttacgctcgaattttctaatacgactccattgccagctaagatatatgcaaacgagggagtagctcaatttgtttttttagagggtaatgaaaatcctgaagtgtcatactctgacagaaaaggtaaatatatgggtcaaactggggttactttaccaaaagtataa

SEQ ID NO: 266042 - DNA, 394 bp, Unknown
  Bacterial polypeptide expressing nucleotide sequence isolated from the Sargasso Sea
tatcaattctgctactgttgatccgaagaggttcgacgaggatagttttgttgatgttcaaagtgaggtttgcgtaattccacctaattcttttgcgctagctagtactattgaatatttcaaaatccctagaaatgttttaactatttgcttgggtaaatctacatatgcacggtgtgggattatagtgaacgtaactcctctagaaccagaatgggaaggccatgttaccttggagttttccaataccactagcctgcctgctaaaatttatgccaatgaaggcgtggctcagatgctatttttagaatctgatgaagaatgcgaagtcagttacaaagatagaggtggtaaatatcaaggccaaagaggcgtaactttacctaaggcctaa

SEQ ID NO: 266043 - DNA, 385 bp, Unknown
  Bacterial polypeptide expressing nucleotide sequence isolated from the Sargasso Sea
catgaaattagtaaaaaacgaaaataacaaaaatgctgaggttgtaacagacgaagaggcacgtgaagcgtttgttaaaatcttaaaatggctaggtgaagatccatctagagaaggtttattagaaactccaaaaagagttacgaaagcattcaaagagtactttaaaggttacaaagaggatcctaaagaaatcttaagcaaaacttttggggatgttgaaggttacagcgatatggtagttcaaaaaaatatttctgtacaaagtcactgcgaacatcatatggcacctattattggtatcgcacatgttgcttatattccaaatgagagagttgttggactaagtaaaattgcgagagttgtggaagttttttcaaaaagg

SEQ ID NO: 266044 - DNA, 409 bp, Unknown
  Bacterial polypeptide expressing nucleotide sequence isolated from the Sargasso Sea
atgaagatagttaaaaacctaaacactacgattttaaaggaaaaaccagaagtttctgacaaagaagcccaagaagctttcaaaattattttaagatggattggtgaaaatcctgacagagaaggcttacgtgaaacaccaagaagagtaacaaaggcattcaaagaatattttaagggatacaaacaagaaatcacgtccgaattattaaaaacctttggtgatgtcaacggttatgacgacatggttttacaaaaaaatatttcagtacaaagtcattgcgaacatcacatggctccaattataggtgtagctcacgtagcttatcttccaaacaaaagagtagttggtctaagtaagcttgcaagagtcgtcgaagtttactcaaaaagattacaaacacaggaaa

SEQ ID NO: 266045 - DNA, 631 bp, Unknown
  Bacterial polypeptide expressing nucleotide sequence isolated from the Sargasso Sea
attggaagtaattggattatcaaaaatttttaacaataaggatgctgttaaagatatttcttttaaagttaataaaaatgagattattggaatactcggtcctaatggatgtggaaaaacaactactattggaatgattttaggattattaaaaccatcaaatggcaaagtgttaattaatggaattgaaattgaaaagaaaagagttgatttattaaaccatcttaacttcatatcgccatatattgagcttccaaaaaaattaacagtaaaacaaaatcttgaagtatacggaagactctatgatattaaaaacttaaaaaaaaaaatagaaatgctcacagaaaaacttagattgagtgaaataataaacaaacttacaggagagctttcttcaggtcaaaaaaatagagtcagtcttgctaaatcaataattaataatcctgcagttttactgctagatgaaccaacggcatctctagatcctgagacaggtgattttgtgagaagttttttagaaagttatcaaaaagaaaacaaagcgtccatattactagcatcacataatatgtctgaagttgaaagattatgttcttcagtgctgatgatgaataaaggatcaatagttgac

SEQ ID NO: 266046 - DNA, 512 bp, Unknown
  Bacterial polypeptide expressing nucleotide sequence isolated from the Sargasso Sea
catggacaaagaacgtgtgaaaaaactcgtacgtgaattaatcattgaaatcggcgaggatcctactagagaaggtctaaaggatactcctagaagaatcgcagacgcatatactgaaatcttttccgggtatgactctgattctgaattgtctgttcaattttcagaagactctgagatggtagttgcaaaaaatattcaattctattcaatgtgtgaacatcacatgttaccattttatggaacaatacaaattgcatatatcccaaatggtcgtgtctttggaatatctaaactagttagagttgtagaaaaattctcaaagagattgcaaattcaagaaagaattacaaaaaatgttgcagatgagatttatgctcagggtgttaaaggagtagcagtaatggcagaaggtgaacatctctgtatgaaaatgagaggtgtcagaaacgatgctcaaatgacatcttcagcatttagaggagtatttgaggatcaaaaaaccaaagaag

SEQ ID NO: 266047 - DNA, 339 bp, Unknown
  Bacterial polypeptide expressing nucleotide sequence isolated from the Sargasso Sea
attattcgatgtgcgaacatcacatgcttcctttctttggtacaatccaaattgcatacattccaaatggaagagtttttggaatttcaaaactagttagagttgtagaaaaattctcaaagagattacaaattcaagaaagaattacaaaaaatgttgcagatgagatttacgctcaaggtgtaaaaggcgttgcagtaatggcagaaggtgaacatctctgtatgaaaatgagaggtgtcagaaatgacgctcaaatgacatcttcggcatttagaggagtgtttgaggatcaaaaaaccaaagaagagctactcaaagccattcaaaacaagtaga

SEQ ID NO: 266048 - DNA, 250 bp, Unknown
  Bacterial polypeptide expressing nucleotide sequence isolated from the Sargasso Sea
agcaagggtagttgaggtgttttctaaaagacttcaaacccaagaaagacttacaatgcaaattgcatcgacaataatggattcattagatgccaaaggagttgcggtaagtatagattcaactcaccagtgtatgactatgagaggaattaaaaaagaacaagcaacaacagttaccaattattatttaggtaaattcaaagacgatttaagctatcagaatagatacttgcgatttatagcaaaataa

SEQ ID NO: 266049 - DNA, 432 bp, Unknown
  Bacterial polypeptide expressing nucleotide sequence isolated from the Sargasso Sea
aatgaaattagttaaagatatagataataatcaaaattcaaaaaaagtttctgataaagaagctgaagaagcttttaaaacaattttagcctggatgggtgaagatccaaatagagaagggttgttagaaactccaaaaagagtagttaaagcatttaaagaatactttaagggttataaagaagatcctaatcaagttttagataaaacttttggtgatgttgaagggtatgacgatatggttgttcaaaagaatatatctgtccaaagtcattgtgaacatcatatggcaccaattataggaaaagcccatgtagcttatattcctaaaaaaagagttgttggattgagtaaattagcaagagtggttgaagttttttcaaaaagattacaaactcaagagagattaactatgcaaattgcgaatacact

SEQ ID NO: 266050 - DNA, 481 bp, Unknown
  Bacterial polypeptide expressing nucleotide sequence isolated from the Sargasso Sea
aatgagactcaataaatttatttctcataatacaagatattctagacgggaagcagatcaacttatagaagagggcagagttactatagatggaaaagctgttcgtaatatgggtatgcaagtcacggaaaaccataaagtcatgcttgacaaaaaagagattaaagctgataaaaatagaatgtacactgttattgtttacaataaacccaaaggagaattggtcactaaaaatgatcctaaaggtcgtaaaatcatctatgattcactgccatcaaagtataaacacttcttgtgtgtagggcgattagattatgccagtgaaggggtattgcttttaagtgatagtgttgatgtggtcaataaactgatgcactctaatttagaaagagtctacaaaattaaagtcaatggtaccattacaccccaaattgaagaagccatgctcaatggtttggttttggatgatgccaaagctggt

SEQ ID NO: 266051 - DNA, 390 bp, Unknown
  Bacterial polypeptide expressing nucleotide sequence isolated from the Sargasso Sea
tatgaaattagttaaagacattgataaaagttcttcaaaaaagcctgaagtatctgacaaacaagcagaggaggcttttagaacaatactcaaatggattggagaggatccaactagagaaggcctaattgagacacctaaaagagtaataaaagcatttaaagaatattttaaaggataccatcaagatgcagatgctgatttatctaaaacttttggtgatgtagagggatatgatgacatggtggttgaaaaaaatattacactcgaaagtcactgtgagcaccacatggctccaatcataggaattgcccatgttgcttatatcccaaataagagggtagtaggtttgagcaagttagcaagaacagttgagattttttcaaaaag

SEQ ID NO: 266052 - DNA, 503 bp, Unknown
  Bacterial polypeptide expressing nucleotide sequence isolated from the Sargasso Sea
tttcaaaaaaacgccggaaagagcagcgaaatcatgggtggaagaaatttgttctggactaggtgaaaaaaaatttcgccttaccacatttccaattggcgaaaattttgaaccaagcatgattgtacttcagcacatacctgttaaatcggtttgtgctcatcatttgctaccattcattggagaggcgactgtagcttatatccctaacaagatgctttgtggaatttcgaagctttcaagaattgtagattatttttcgagacgtccgcaggtacaggaagaacttaccaatgatattgtcaactatctgtgtgaaaatcttgatcctcaaggggcaggggttattatcaaagcaactcacatgtgtatggcaatgcgtggggtaagtcatgatggggtgatgacaaccagcactctgaaaggatcatttcttaatgaaagcaatgtgcgtgctgaatttatggcattggctcacaaagagagcttaaataaattataag

SEQ ID NO: 266053 - DNA, 163 bp, Unknown
  Bacterial polypeptide expressing nucleotide sequence isolated from the Sargasso Sea
acgccaaaaggtgttgcggtaactgttgatgcagcgcaccaatgtatgacaatgaggggtatcaaaaaagaaaaagccactacagtaactaactattttttaggttcttttagagaagatttaagtatacaaaataggtacttaagatacattgcaaaataga

SEQ ID NO: 266054 - DNA, 175 bp, Unknown
  Bacterial polypeptide expressing nucleotide sequence isolated from the Sargasso Sea
aggtcttgatgcttatggagttgcagttaatattgactctacacatcaatgtatgaccatgagaggaattaaaaaagaaaaagcaactacagtaacaaactattttactggcaagtttaaagaagatttaagtttccaaaatagatttctaagatatatttcggacaaaaattaa

SEQ ID NO: 266055 - DNA, 610 bp, Unknown
  Bacterial polypeptide expressing nucleotide sequence isolated from the Sargasso Sea
tatgacatcagtaattacaaaaaagaactttagacaaaatcttgaaaaatcaatctctagagatgaggcagaaaaggctgttgaaacattaataaggtgggctggtgacgaccctacaagagaaggattaagagatactccaagaagagttatcgatgcctttaatgaattcttttccggatatagcgaatcacccgaggagtatctttcaaaaacctttgaagatgtccaaggctatgaggatattgttatgcttaaagatatttcatttcactctcactgtgaacatcatatggtacctattatcgggaaagctcacattgcttatattccaataaaaaaagttgttggaatttcaaaattggcaagaactttggatatttttgcaaaacgccttcagacacaagaaacaatgactcaacaaattgcaaattgtataaacaaatcactaaaacctaaaggtgtagccgtttatattgaagcctttcatcaatgtatgacaacaagaggtgttcacaaacccaacgtatcaaccatcactagctgttttcttggagaattcaaatctgataaatctctagaaaaaagattcattgattatatcaaataa

SEQ ID NO: 266056 - DNA, 343 bp, Unknown
  Bacterial polypeptide expressing nucleotide sequence isolated from the Sargasso Sea
aatgagtgaggataaatttcttggaaatctctatcaaagatttcccgtaacagttgagaaaggactaggtgcacatgtctgggatatagaaggtaaagaatacattgattgtatgggtgggtatggagtagcattactaggacatcagaataaaagagtcacagacgcattaaagtctcaactagagaaaattattacggtacatagttcgttgtataataaaacacgggaggagtttttggaaaatttattcaaagttgcaccaaaaaatttgtcacaagttcatctgaataatagtggagcagaagcaatagaggcagcaatgaaatttgcacgtaaattt

SEQ ID NO: 266057 - DNA, 428 bp, Unknown
  Bacterial polypeptide expressing nucleotide sequence isolated from the Sargasso Sea
tatggatccagataatttagaatttttaagtgataaaaaacagaaaatcgattttcaaaatgatataaaattaggtatcaataataaaagcgacgaagaaaaaataattgttattgaagaattatttaaaaaaattatgatcgaattagggttggacttgaatgacgatagtttagctggaactcctaagagagtggcaaaaatgtatgttaaagaaatattttctggactaaataaaaagaataaaccaaaaatttctctttttgataatcactttgaatacaaaaagattttattgcaaaaaaacattgaattaacttctacatgtgaacatcattttttgccatttaccggtaaagcacatattggttatatagctaacgataagattataggtctttcaaaattaaataggattgttaattttt

SEQ ID NO: 266058 - DNA, 480 bp, Unknown
  Bacterial polypeptide expressing nucleotide sequence isolated from the Sargasso Sea
tttgacaaataatatttctgaggaagaagcggaacaagcattcaaaaatataattaaatggattggtgaagatccttcaagagaaggacttaagtctactccaaaaagattagtaaaagcatttagagaatattttaagggttataacgaagacccaaaaaaaatattagaaaaaacatttggagatgttcatggttatgacgacatggttattcaaaaaaatatttcagtacaaagtcattgcgaacatcatatggctccaattataggagttgctcatgttgcctatattcccaaagaaagagttgttggtttaagtaaactcgctagggttgtagaagttttttcaaaaagacttcaaactcaagaacgattaaccatgcaaattgctaagactttaatggagtcgttagatgcaaaaggagttgctgtttctattgatgctactcaccaatgtatgactacgagaggaattaaaaa

SEQ ID NO: 266059 - DNA, 460 bp, Unknown
  Bacterial polypeptide expressing nucleotide sequence isolated from the Sargasso Sea
atgaaattagtaaaaaatgaaaacgaaataaacaaagaaaatatatctgataaagaggcagaagaagcatttattaaaattttaaaatggatgggagaagacccatcaagagaaggattgttagaaacacctaaaagagtaacaaaagcttttaaagaatattttaaaggctatcaagaagatccaaaaaaaattcttgaaaaaacttttggagacgtcgaaggatatagcgacatggttgttcaaaaaaatatctcagttcaaagtcattgcgaacatcatatggcaccaattattggtattgcacacgttgcatatattccaaatcaaagagttgttggattaagtaaaatagcaagagtagtagaagttttttcaaaaagactgcaaacccaagaaagattgacagtacagattgctaatactttaatggagtcacttgatgcaaaaggtgtagcgg

SEQ ID NO: 266060 - DNA, 606 bp, Unknown
  Bacterial polypeptide expressing nucleotide sequence isolated from the Sargasso Sea
taggagttgaaactccagttattgataatggtttgtcacgcaaagaaaaaatagacaaaatcgaagatcattttgatcagattgttgcaacgttagggcttgatttaaatgatgatagtcttgtagatacgccaaaacgcgtcgctaaaatgtatgtcaatgaaatcttttgggggctagattacgatgcatttcctaaagcaactgttgttgaaaataaaatgaattacaatgaaatgattgtcgagagaaacatttcagtgcaatctaattgcgaacatcactttgttgttattgatggtctagcaacggttgcatatgttcctaaaaaaaatgtattaggtttgtcaaaaattaaccgtattgttgaatatttttctaagagacctcaaattcaagagcgcttgactgaacaaatttatcatgctctgtcctttatcttagaaacagaaaatgtagcagtaatggttgatgcgcaacattattgcgttaagtctagaggtgttgaagatacaggtagctcaacaattacaagcagactaggtggtagctttaaagagcatcctgaagttagagcagagtttttatctttgattaaggtgtagt

SEQ ID NO: 266061 - DNA, 475 bp, Unknown
  Bacterial polypeptide expressing nucleotide sequence isolated from the Sargasso Sea
atgaaattagttaaagagattggtaaaacaggtcccaaaaaacctgaagtaacagataaacaggctgaagaagcttttaagactatattaacctggatcggagaagatcccagcagagaaggtttgatagaaactccaaaaagagtagtaaaggcctttaaagaatattttaaaggctatcaacaagacgctagtgcagatttattaaagactttcggagatgttgaaggttacgatgacatggtggtagaaaaaaatataactttagaaagtcactgcgaacaccatatggctccgataataggagtagctcatattgcttatattcccaataaaaaagttgttggactaagtaaacttgcaagaacagttgaagttttttctaagagacttcagacacaagaaagacttactatgcagatagctaaaactttaatgacagcacttgacgctaagggtgttgcggtaactatga

SEQ ID NO: 266062 - DNA, 463 bp, Unknown
  Bacterial polypeptide expressing nucleotide sequence isolated from the Sargasso Sea
attggacaaaggtaaagtgcttcagggtatgcaattgctgttggaaggtttgggtgtggatatggatgacaaacattttcaaaaaacgcccgaaagagcagcgaaatcatgggtggaagaaatttgttctggactaggtgaaaaaaaatttcgccttaccacattcccaattggcgaaaattatgaaccaagcatggttgtacttcagcacatacctgttaaatcagtttgtgctcatcatttgctaccattcattggagaggcgactgtagcttatatccctaacaagatgctttgcggaatttcgaagctttcaagaattgtagattatttttctagacgtccacaggtacaggaagaacttaccaatgatattgtcaactatctgagtgaaaatcttgatccccaaggggcaggggttattattaaggcaactcacatgtgtatggcaatgcgtggagta

SEQ ID NO: 266063 - DNA, 460 bp, Unknown
  Bacterial polypeptide expressing nucleotide sequence isolated from the Sargasso Sea
catgtcactaccgcttgaagagcttgccgatcactatcgcgccattatcgatggcctgggagagaactccaaccgcgaaggcctgcaagacacccccatgcgcgccgccaaggccatgcagtttctgacccagggctaccagcaggatctcgggaccctggtgaacaacgccgtattcgagtccgccatggacgagatggtggtggttcaggacatcgaactgtacagcatgtgcgagcaccatgtgctgccctttatcggaaaatgtcacatcgcctacctgccccagggcaaggttctcggactgtcgaaattcgcccgcattgtcgacatgtacgcccgccgcctgcagatccaggaaaacctgacccgccagatcgccgaggccatcgagcaggtcaccggggccaagggtgtggccgtggtgatcgaggcccagcatatgtgcatgatgatgcgc

SEQ ID NO: 266064 - DNA, 553 bp, Unknown
  Bacterial polypeptide expressing nucleotide sequence isolated from the Sargasso Sea
atgagtgctgtagacacaattgttaggtacatagaaggccaaaatggagacttgagagagggcttagccaacaccccaaagagagttgtggaatcatttgatgagatattctcgggctatggtaaagacgcgaaatcaatcttggactcgacattcaacgcagaaggatatgaaggcatagttctcctcaaagatacggaattccacagtacctgcgaacatcacctccaacctttttctggtaggggccatatcgcatacatacccgtagagaggatagtgggaattagcaagcttgccagactattggatatgcattcgaagagacttcagaaccaagagagaataacacaatccgtggcagacgacatcgtggaacatctctcccccttggggtgcgcagtaattcttgaagcccaacatgggtgcatgaagtgcagaggggtaatgaagcaaaatgcaataatgactaccagtgctatgaggggggttttctttgaaaaggccgaggctagggcagaagtactccagctaatgagaagggacaattaga

SEQ ID NO: 266065 - DNA, 468 bp, Unknown
  Bacterial polypeptide expressing nucleotide sequence isolated from the Sargasso Sea
catgaagttagtaaaagatattgataataatctagtaaaagatagtaaagtttctgataaggaagctgaagaagctattgtaaaaattttaaaatggatgggcgaagatccatcaagagagggtttaatagaaactccaaaaagagtaattaaagcattcagagaatatttcaaaggttatggagaggacccagaaaaagttcttaaaaaaacttttggcgacgtgaacggttacgacgatatggtaattcaaaaaaatatatctgttcaaagtcattgtgaacatcatatggctccaataatcggagttgcccacgtagcttatatcccaagcaaaagagttgtgggtttaagtaaattagcaagagtagttgaagttttttcaaaaagacttcaaactcaagagagattaactatgcaaatagcaacaactttaatgaaagcattggatgccaaaggggttgcggt

SEQ ID NO: 266066 - DNA, 367 bp, Unknown
  Bacterial polypeptide expressing nucleotide sequence isolated from the Sargasso Sea
tatgaaattagttaaagatacagataaaagccctataaaaaaagaaataaccgataaacaggcagaagatgcgtttagaactatcctagcatggattggggaggacccaaatagagagggtctagtcgacactcctaaaagagtaataaaggcttttaaagaatattttcaaggttacacacaagatcctactgaggagctaaagaaaacctttggagaagttgagggttacgacgatatggttgttgaaaaaaatattactatggaaagtcattgcgaacatcacatggctcctatgataggcgtagttcatattgcttatttaccaaaagataaagttgtgggattaagcaaattagcgagaaca

SEQ ID NO: 266067 - DNA, 454 bp, Unknown
  Bacterial polypeptide expressing nucleotide sequence isolated from the Sargasso Sea
atgaaattagttaaagatatagacaatattcaaaatcaaaaaaagatttctgataaagaagctgaagaggcctttaaaacgataattacttggatgggagaggatcctaatagagagggtttgttagaaactcccaaaagagtagtcaaagcatttaaagaatattttagaggttataaagaagatccacatcaaattttagacaaaacttttggagatgtggataattatgacgatatggtagttcaaaaaaatatttcagttcaaagtcattgtgaacatcatatggcaccaattattggtaaagcacatgttgcttacattccaaaaaaaagaatagtaggcttaagcaaactagcaagacttgtcgaaattttctctaaaagacttcaaactcaagaaagattaactatgcaaattgcgaatacactaatggattcattagatgcaaaag

SEQ ID NO: 266068 - DNA, 203 bp, Unknown
  Bacterial polypeptide expressing nucleotide sequence isolated from the Sargasso Sea
attaacaatgcaaattgcaaaaacgcttatgagcgctttagatgcaaagggtgtagcagttacaattgatgcagctcatcagtgtatgactatgcgaggaataaaaaaagagaaagcaacaactgttacaaattattttttaggttcttttaaggaggatttaagtattcaaaatagatacctaaaatatattggaaaataga

SEQ ID NO: 266069 - DNA, 481 bp, Unknown
  Bacterial polypeptide expressing nucleotide sequence isolated from the Sargasso Sea
tctactccaaaaagattagttaaagcatttaaagaatatttcaaaggatacaatgaagatccaaaaaaaatattagaaaaaacatttggcgatgttcatggttatgatgatatggttattcaaaaaaatatttctattcaaagtcattgcgaacatcatatggctccaatcataggagttgctcatgttgcctacattccaaaagagagagtcgttggtttaagtaaactcgcaagggttgtagaagttttttcaaaaaggcttcaaactcaagaaagattaaccatgcaaattgctaagactttaatggagtctttagatgcaaaaggggttgctgtctctatagatgccactcatcagtgcatgactacgagaggaattaaaaaagaacaagcgacaacagtaactaattattacttaggtaagttcaaagaagatttaagttatcaaaatagatatttgagatttataagtaaataaa

SEQ ID NO: 266070 - DNA, 412 bp, Unknown
  Bacterial polypeptide expressing nucleotide sequence isolated from the Sargasso Sea
atgaaattagtaaaagacacagacaataaaaatttagataccaaaaaggtctcagatcaagaggctgaggaggctatcagaaccattttatcatggatgggagaagaccctaaaagagaaggattgttagaaactcctaaaagagttgtaaaagcattcaaagaatattttcaaggttacaatgaggatgcaaaaaaagtattagataaaactttcggtgatgtcgagggttatagtgacatggttgttcaaaagaatatttcagtacaaagtcactgcgaacatcatatggctccaattataggaaaagctcatgttgcctacataccaaatgaaagagttgtaggattaagtaaaattgcaagagtagttgaaatattttcaaaaaagattacagacacaagaaagatta

SEQ ID NO: 266071 - DNA, 655 bp, Unknown
  Bacterial polypeptide expressing nucleotide sequence isolated from the Sargasso Sea
atgtcctatgacaaaacaaaaactgaccctgctctagggcaaaaggtacaccagcacttaatttcagtgggagtcgaaactccagtgattgataatggcctatcacgcaaagaaaaaatagaaaaaattgaagatcattttgatcagattgttgcaacattagggctggatttgaaagatgatagcctgatggatactccaaaacgcgtcgctaaaatgtatgtcaatgaaatcttttggggattagattatgatgcattccccaaagcgactgtggttgaaaacaaaatgaattacaatgaaatgattgtcgaaagaaacatttctgttcaatctaattgcgagcatcactttgttgttattgatggtttggcaactgttgcctatgtccctaaaaaaaatgtgttaggtttgtcaaaaattaaccgcattgttgaatatttttctaaaaggcctcagattcaagagcgtttaacggaacaaatatatcacgcactttcatttatcttagatactgagaatgtagcagtgatggttgatgcgcaacattattgcgttaagtcgagaggtgttgaagatacaggcagctcaacgattacaagcagactgggtggaagctttaaagagcatcctgaagttagagcagagttcttat

SEQ ID NO: 266072 - DNA, 451 bp, Unknown
  Bacterial polypeptide expressing nucleotide sequence isolated from the Sargasso Sea
atgaaattagtaaaaaatgaaaaccaaaaaaatctagacatagtctcagataaagaggctgaagaagcatttgtaaaaattttaaaatggataggagaggatccttcaagagaaggactattagaaacacctaaaagagttacaaaagcttttagagaatattttaagggatataaagaagatcctaaagaaattttgagaaaaacttttggagatgttgatggttatgatgatatggtagtgcaaaaaaatatttctgtacaaagtcattgtgaacatcatatggcaccaattataggtgtagctcatgtggcttatattccaaaagatagagttgttggtttaagtaaattagcaagagtagttgaggtgttttctaaaagacttcaaacccaagaaagacttacaatgcaaattgcaaaaacaataatggaatcattagatgccaaag

SEQ ID NO: 266073 - DNA, 562 bp, Unknown
  Bacterial polypeptide expressing nucleotide sequence isolated from the Sargasso Sea
aatgattgaagaatcaataaaaaaaatattgttagaaatagaagatgatgccgcattagacggcaacggagagttaagagaagggctcagaaatacaccaaaaagagtagtagaatcttggagtgaattatattcaggatacaataaagatccaaaggaaattttagatgcaactttcaatggtgaaggatatgatggcatagttcttttgaaagatatagaattttattctacgtgtgagcatcatatgctatcttttacaggtaaagcacatgtagcttacattccaacagaacgaattgttggaatttctaagttggccagaattgtagaagttttctctcgaagattacaaaatcaagaaagaataacaacacaagtggcagacgccttagaagaatatttgaaacctttaggtgcagctataatcattgaagcgaagcacgaatgtatgggttgtcgaggagtaaagaaaggacatgccacaatgacaacatctgcaatgcgcggagtatttttcgataaagcagaagctagagcagaattaatgcaattgataaaa

SEQ ID NO: 266074 - DNA, 241 bp, Unknown
  Bacterial polypeptide expressing nucleotide sequence isolated from the Sargasso Sea
ttcaaaaagattacaaacacaagaaagacttacaatgcagatagccaacactttaatggagtctttagatgcaaaaggagttgcggttacaattgattcaactcatcagtgtatgacaatgagaggtattaaaaaagaacaagcaactacggttacaaattactacttaggccaattcaaagaagatttaagttatcaaaatagatatttacgatttatcagcactacgttaaaagattaa

SEQ ID NO: 266075 - DNA, 517 bp, Unknown
  Bacterial polypeptide expressing nucleotide sequence isolated from the Sargasso Sea
atttattttacttaaagaccttactgataaaagtgatgaagagatagacaaattaacatttaagtttttagatcaaattcaaaaaaaattatctaaaaatagtgaaagtgaattaaattttgaaattcttgataaagctgttcataaccaaccaatttatataaatggaatttcttacattagcttgtgtgaacatcacatgttgccttttcacggatctgtaaatattgcagtttttccaaaaaaaaatatattaggtatatccaaatttagcgatctcgtaagtcacttatcaaacaacttgactttgcaggagaaactaacagaaaaaattgctacgtttatttatgaaattctggatgctgatggtgtatttgtaaaaatgtctggaaaacacctttgctctgatttattaaatgcaaaaaattcttctgaggaagttataacaactttttctgctggtgtttatgaattagatttctctttacgaaatgaagcaattttgaatttttcttaa

SEQ ID NO: 266076 - DNA, 511 bp, Unknown
  Bacterial polypeptide expressing nucleotide sequence isolated from the Sargasso Sea
catggataaagaacgtgtaaaaaaactcgtacgtgaattaatcattgaaatcggagaggatcctactagagaaggtctaaaagacactcctagaagaatcgcagacgcatatactgaaatcttttccggatatgactctgattctgaattatctgttcaattttcagaagactctgagatggtagttgcaaaaaatattcaattctattcaatgtgtgaacatcacatgttaccattttacggaacaatacaaattgcatatatcccaaacggtcgtgtctttggaatatctaaactagttagagttgtagaaaaattctcaaagagattgcaaattcaagaaagaattacaaaaaatgttgcagatgagatttatgctcagggtgttaaaggagtagcagtaatggcagaaggtgaacatctctgtatgaaaatgagaggtgtcagaaacgatgctcaaatgacatcttcagcatttagaggggtatttgaggatcaaaaaaccaaagaa

SEQ ID NO: 266077 - DNA, 512 bp, Unknown
  Bacterial polypeptide expressing nucleotide sequence isolated from the Sargasso Sea
attggacaaaggtaaagtgcttcagggtatgcaaatgttgctggaaggtttgggtgtggatatggatgatgatcattttcaaaaaacgccggaaagagcagccaaatcatggatggaagaaatttgttctggactaggggaaaaaaaatttcgtcttaccacattcccaattggcgaaaattatgaaccaagcatgattgtacttcaacacatacctgttaaatcggtttgtgctcatcatttgctaccattcattggagaggcgactgtagcttatatccctaacaagatgctttgcggaatttctaagctttcaagaattgtagattatttttctagacgtccacaggtacaggaagaacttaccaatgatattgtaagctatctatgtgaaaatcttgatccacaaggggcaggggttattatcaaggcaactcacatgtgtatggcaatgcgtggagtaagtcatgatggtgtaatgacaaccagctctctgaaaggatcatttctta

SEQ ID NO: 266078 - DNA, 225 bp, Unknown
  Bacterial polypeptide expressing nucleotide sequence isolated from the Sargasso Sea
aagacttcaaacacaggaaaagattgacaatgcaaattgcccaaactttaatggagtcgttagatgctaaaggtgttgcagtaagcatagattcaactcaccagtgtatgacgatgagaggaattaaaaaagaacaagcaactacagttactaattattatttaggtcaatttaaagaagatttaagttatcagaatagatacttgcgatttattgcaaaataaa

SEQ ID NO: 266079 - DNA, 511 bp, Unknown
  Bacterial polypeptide expressing nucleotide sequence isolated from the Sargasso Sea
atggacaaagaacgtgttaagaaactagttcgagaattaattattgagctcggcgaagatcctactcgtgaaggtctaaaagatacacctagaagaattgctgatgcatatggagaaatcttttctggatatgactctgattctgaattgtctgttcaattctcagaagactctgagatggtagttgcaaaaaatattcaatactattcaatgtgtgaacatcatatgcttcctttctttggtacaatccaaattgcatacattccaaatggaagagtctttggtatttcaaaactagtaagagttgtagaaaaatattcaaagagactgcaaatccaagaaagaattacaaaaaatattgcagatgagatttacgctcagggtgtaaaaggagttgcagtaatggcagaaggtgagcatctctgtatgaaaatgagaggcgtcagaaatgatgctaaagtgacatcttcagcatttagaggagtatttgaggatcaaaaagccaaagaag

SEQ ID NO: 266080 - DNA, 235 bp, Unknown
  Bacterial polypeptide expressing nucleotide sequence isolated from the Sargasso Sea
gtattttcaaaaagacttcaaacccaggaaagactgacaatgcaaattgccaaaactttgatgcaaggattagaagcaaaaggggtggcggttacaattgatgcagcgcatcaatgcatgacaatgcgaggtataaaaaaagaaaaagcaaccacagtcacaaattattatttaggatcttttaaagaggacttatcaattcaaaatagatatttaagatatatagctaaataga

SEQ ID NO: 266081 - DNA, 448 bp, Unknown
  Bacterial polypeptide expressing nucleotide sequence isolated from the Sargasso Sea
atgaaattagtaaaaaatgaaaacgaaataatcaaagaaaaagtatctgataaagaggccgaagaagcatttgtaaaaattttaaaatggatgggagaaaacccatcaagagaaggtttattagaaactccaaaaagagtaacgaaagcttttaaagaatattttaaaggatatcaagaagacccaaaaaaaattcttgagaaaacttttggagatgttgaaggatatagcgacatggttgttcaaaaaaatatttctgtccaaagtcattgtgaacatcatatggctccaataataggaattgcacatgttgcgtatataccaaatcatagagttgttggattaagtaaaattgctagggtagtagaagttttttctaaaagactccaaactcaagaaaggttgacagttcagattgctaataccttaatggagtcgctagatacta

SEQ ID NO: 266082 - DNA, 346 bp, Unknown
  Bacterial polypeptide expressing nucleotide sequence isolated from the Sargasso Sea
ataagggttgagagttactgtgaacatcatcttgctccaataataggagttgccaaggtgggttatctacccgatggcttggtagtaggaatttcaaaattagttagagtagttgatgcattctctaaaagacttcaaattcaagagaggctaacaagagagataggtttagcaatacatgaagctttaaatccaaaaggagtagcagttgctataaaggctgaacatcattgtatgtgtactaggggtgtcaataaacctggaaccaaaatgcttactagttcatttataggcgaagcagaaaaaaatcttgaatttagaagatcattcttagaattcgattagt

SEQ ID NO: 266083 - DNA, 385 bp, Unknown
  Bacterial polypeptide expressing nucleotide sequence isolated from the Sargasso Sea
caattttcagaagactctgaaacagtagttgcaaaaaatattcaattttattctatgtgtgaacatcatatgttaccattttacggaacaatacaaattgcatacgttccaaatggccgtgtatttggaatttctaaactagttagagttgtagaaaaattctcaaagagactacaaattcaagaaagaattaccaaaaacattgcagacgaattgtactcacaaggtgttaaaggtgtagcagttattgcagatgctgaacacctatgtatgaaaatgagaggtgtaaaaaatgatgccaaagtcacaacatctgcatttagaggaacatttgaggataaaaagatcaaagaagagttactaaaagccattcacaccaaataat

SEQ ID NO: 266084 - DNA, 447 bp, Unknown
  Bacterial polypeptide expressing nucleotide sequence isolated from the Sargasso Sea
aatgaataaaaacaaagtcgaagaaggcatcaagatgatgcttgaggggctgggcgttgacttaaatggatctcatttcaaagatacccccaaaagagcaacaagagcatggactaatgaactatgctcaggtctgggagaacagtcttttgaattaacaacttttgacattgaacctgattatgaaccgagcatggtggtgctccagcatatcccggtcaaatccttatgtgcccatcatcttcttccttttgtcggagaggcaacggtggcctacattccaaataagatgctgtgcgggctttcgaaactggccagagtcgttgactattttgcgagacgtccccaggtccaggaaaagttgacccatgacatcgcaaaatatttacgcagtcagctcgacccacagggtgtcggcgtgatcatcaaggccaaccacatgtgtat

SEQ ID NO: 266085 - DNA, 559 bp, Unknown
  Bacterial polypeptide expressing nucleotide sequence isolated from the Sargasso Sea
ttggacgaagaacgcgtaaaaaaacttgtaagagaactaatcattgaagtaggagaggatccaacacgtgagggattaagagaaacccctaaaagaattgcaagtatgtataaagaaatttttggtggttatgattcagattctgaattatctgtccaattttcagaagattcagatgtagtgattgcacgagatattcagttttattcaatgtgtgaacatcacatgttaccattttatggtaaaattcacattgcttattctcctaacggtagagtttttggaatatcaaaattagttagattagttgagaaatactcaaaaagattgcaaattcaagaacgtgtaactaaaaacattgcagatgagttgtatgctcaaggagttaaaggcgttgcagtttttgccgatgcagagcatctctgcatgaagatgcgtggagtaagaaatgatgcaactctttcttcctcagcatttagaggaatttatgaaaataaagaagaaaaagagggtattttggcactaattagaaaacgctcatcagattcatctttttaaa

SEQ ID NO: 266086 - DNA, 245 bp, Unknown
  Bacterial polypeptide expressing nucleotide sequence isolated from the Sargasso Sea
tttctcaaaaagattacaaacacaagagagacttacaatgcagatagcaaacactttaatggaatcattagatgcaaaaggtgttgccgttacaatagattcaactcaccagtgtatgactatgagaggaattaaaaaagaacaagcaactacagttacaaattactacttgggtcaattcaaagaagatttaagttatcaaaatagatatttacgatttataagcactacgttaaaagattagt

SEQ ID NO: 266087 - DNA, 490 bp, Unknown
  Bacterial polypeptide expressing nucleotide sequence isolated from the Sargasso Sea
cttgggtgaagatccaacaagagagggtctgaaagatacacctagaagaattgctgatgcatacgatgaaatcttttctggatatgattctgattctgaactatctgttcaattctcagaagactctgagatggtagttgcaaagaatattcaatactattcaatgtgcgaacatcatatgcttcctttctttggtacaatccaaattgcatacatcccaaatggacgcgtatttggaatatccaaactagttagagttgtagaaaagtattcaaagagattgcaaatccaagaaagaattacaaaaaatattgcagatgagatttatgctcagggtgtaaaaggcgttgcagtaatggcagaaggtgagcatctatgtatgaaaatgagaggtgtcagaaatgatgctaaagtgtcatcttcagcatttagaggagtatttgagaatcaaaaggcaaaagaagaactcctaaaggccattcagaattag

SEQ ID NO: 266088 - DNA, 418 bp, Unknown
  Bacterial polypeptide expressing nucleotide sequence isolated from the Sargasso Sea
ttccggatacgactctgattctgaattatctgttcaattttcagaagactctgagatggtagttgcaaaaaatattcaattctattcaatgtgtgaacatcacatgttaccattttacggaacaatacaaatcgcatatatcccaaacggtcgtgtctttggaatatctaaactagttagagttgtagaaaaattctcaaagagattacaaatccaagaaagaattacaaaaaatgttgcagatgagatttatgctcagggtgttaaaggagtagcagtaatggcagaaggtgagcacctctgtatgaaaatgagaggtgtcagaaatgatgctcaaatgacatcttcagcattcagaggggtatttgaggatcaaaaaaccaaagaagagctactcaaagccattcaaaacaagtaa

SEQ ID NO: 266089 - DNA, 554 bp, Unknown
  Bacterial polypeptide expressing nucleotide sequence isolated from the Sargasso Sea
attgaataaagttaaagtgcttcagggtatgcaaatgttgctggaaggtttgggtgtggatatggatgacaaacattttcgaaaaacaccggaaagagcagcgaaatcatgggtggaagaaatttgttctggactaggtgaaaaaaaatttcgccttaccacattcccaattggtgaaaattatgaaccaagcatgattgtacttcagcacatacctgttaaatcggtttgtgctcatcatttgctaccattcattggagaggcgactgtagcttatattcctaacaagatgctttgcggaatttcgaagctttcaagaattgtagattatttttctagacgtccgcaggttcaggaagaacttaccaatgatattgtaaactatctttgtgaaaatcttgatccacaaggggcaggggttattattaaggctactcacatgtgtatggcaatgcgtggagtaagtcatgatggtgtgatgacaaccagcactctgaaaggatcattccttaacgagagtaatgtgcgtgctgaatttatggcattggcacaca

SEQ ID NO: 266090 - DNA, 549 bp, Unknown
  Bacterial polypeptide expressing nucleotide sequence isolated from the Sargasso Sea
ccgtagagacccttttgctgtgggcaggcgaagacccgcgacgggaaggtctgatcgatacgccgaaacgcgttgcctcagcctatgaagactggtttagcggttatcgcgaggacccggtcaagtttctcgaaagaacattcgaggaagtggaagggtatgacgaaatgatcgtgctccgcgacatcagctttgagtcacactgcgaacaccacatggcacctatcatcggtgtcgcccacgtcggttacttgcccagtaacaaggttgtcggtatcagcaagctggcacgcgttgtcgaagcattcgcgcgtcgcttccaggtccaggaaaaactgacagcacaaatcgcaaactgcattaaggacgtgctccggccacggggtgtcggcgtcgttatcgatgccagtcatcaatgcatgaccacgcgaggcattcataagtctggtgtatcaatggttacgagtcagatgctcggtgcatttcgaaaggacgcacgaacgcgctccgaatttctgacgatgattggaaagaactcaccggcctgat

SEQ ID NO: 266091 - DNA, 187 bp, Unknown
  Bacterial polypeptide expressing nucleotide sequence isolated from the Sargasso Sea
ccaaatacattaatggagtcactagatgcaaaaggtgtggcagtacaaattgactcaactcaccagtgtatgacaatgcgaggtattaaaaaggaacaagccacaactgttactaatttttatttaggtcaatttaaagacgatcttagttatcagaatagatatttgagatttattgcaaaataga

SEQ ID NO: 266092 - DNA, 237 bp, Unknown
  Bacterial polypeptide expressing nucleotide sequence isolated from the Sargasso Sea
agattttttcaaaaagactacaaacccaagagcgactaaatatgcaaatagctaaaactttaatggaaggcttagaggctaaaggggtggcggtcacaatagatgctgcacatcaatgcatgacaatgagaggaattaaaaaagaaaaagcaactacagttacaaattattatttagggtcttttaaagatgatttaagtattcaaaatagatatttaaggtacatatcaaaataaa

SEQ ID NO: 266093 - DNA, 469 bp, Unknown
  Bacterial polypeptide expressing nucleotide sequence isolated from the Sargasso Sea
atgaaacttgtgaaagatacagatatcaataaacaaaaaaataaaatctcagataaagaagctgaggaggcttttaaaacaatcttagcttggatgggtgaagatccaaacagagagggcttattggaaactccaaaaagagtagttaaagcttttaaggagtactttagaggatacaatgaggatcctaatcaaattttagataaaacatttggagatgttgatggctatgatgatatggtcatccaaaaaaatatttccgtgcaaagtcattgtgaacaccatatggcacctatcataggaaaagcacatgttgcatacattcctaaggatagagtagttggcttaagtaaattggctagagttgttgaagtattctctaaaagacttcaaacacaagagagacttactatgcaaattgcgaatacccttatgcagtctttagatgccaaaaggagtagctgtacaa

SEQ ID NO: 266094 - DNA, 175 bp, Unknown
  Bacterial polypeptide expressing nucleotide sequence isolated from the Sargasso Sea
aatggattcattggacgcaaaaggcgttgctgtatcaattgatgcagctcatcaatgtatgaccatgagaggaattaaaaaagaacaagcaacaactgttacgaactattatctaggtaaatttaaagaagatttaagttatcaaaatagatatttaagatttattagcaaataa

SEQ ID NO: 266095 - DNA, 626 bp, Unknown
  Bacterial polypeptide expressing nucleotide sequence isolated from the Sargasso Sea
catggataaagagcgtgtcaagaaactagttcgagaattaattattgaacttggagaagatccaactagagagggtctaaaagacacacctagaagaattgctgatgcatatggagaaatcttttctggatatgactctgattctgaattgtccgtccaattctcagaagattctgagatggtagttgcaaaaaatattcaatactattcaatgtgtgaacatcatatgcttcctttttttggtacaatccaaattgcatacattccaaatggaagagtctttggcatttcaaaactagtaagagttgtagaaaaatattcaaagcgactgcaaatccaagaaagaattacaaaaaatattgcagatgagatttatgctcagggtgtaaaaggagttgcagttatggcagaaggtgagcatctctgtatgaaaatgagaggcgtcagaaatgatgctaaagtgacatcttcagcatttagaggagtatttgaggatcaaaaagccaaagaagaactactaaaagccatttcaaaactagtaagatcctatcaaaaattaaataatcccccaatcaggaatttatcatgccagcacgaaataacgtacatgttccaagtgaatcatg

SEQ ID NO: 266096 - DNA, 355 bp, Unknown
  Bacterial polypeptide expressing nucleotide sequence isolated from the Sargasso Sea
ctggataaggtttcagataaagaagcagaagaagcttttaaaacaataattaagtggattggtgaagatccaaatagagaaggtttaatagagactcctcgtagagttgtaaaagcatttaaagagtattttaagggatatagccaagaatcatcatcagagttaaataaaacatttggtgacgttgaaggatataacgatatggtattgcaaaaaaatatatccatctcaagtcactgtgaacatcacatggctccaatattaggtgtagctcatgttgcctatataccaaataaaagaatagtcggactaagcaaacttgctagaactgttgaagttttttcaaagagactgc

SEQ ID NO: 266097 - DNA, 175 bp, Unknown
  Bacterial polypeptide expressing nucleotide sequence isolated from the Sargasso Sea
gggtttggatgcttatggagttgctgttactattgactccactcatcaatgtatgaccatgagaggaattaaaaaagaaaaagctacgacggtaacaaattattttaccggaaaatttaaagaagatttaagttttcaaaatagatttttgagatatatttcagataaaaactag

SEQ ID NO: 266098 - DNA, 157 bp, Unknown
  Bacterial polypeptide expressing nucleotide sequence isolated from the Sargasso Sea
ctcatcaataatgcaatgactgaaggcgaatcaaaagatatggttattgttaagaatattgaattttatagtctatgcgaacatcatatgattccattttatggaaaagcgcatataggatatattcctaatgggaaaattattggattatcaaaac

SEQ ID NO: 266099 - DNA, 412 bp, Unknown
  Bacterial polypeptide expressing nucleotide sequence isolated from the Sargasso Sea
ctgaaatcaccattaaaaagtaatgtagaaaaagaagatgctgaagaagcagttagaacacttataaagtggattggagataatcctgaaagagaaggattaattgacacaccaaaaagagttataaaatcgtttcaagagcattttgcaggatattttcaagaccctgaggaaatattgctaaaaacctttgagcagactgaaggttatgacgatatggtgattttaaagaagatcgattttgaaagtcattgcgaacaccacatgttaccaataataggtcaagcaagcattgcatactttcctaacaaaagaattgtaaaaatatcaaagttagcaagaattgtaaatctttatgcaaaaagacttcaaacacaagaagttatgacctctcaaattattattctataga

SEQ ID NO: 266100 - DNA, 457 bp, Unknown
  Bacterial polypeptide expressing nucleotide sequence isolated from the Sargasso Sea
attggtaaaaaacgaaaatcagaaaaatacggaaactatctcagataaagaagcagaagaagcatttataaaaattttacaatggataggagaagatccttctagagaaggattgttagaaacacctaaaagagtaaccaaagcttttaaagaatatttcaaaggctacaaagaagaccctaaagaaattttaaataagacttttggagatgtgaacggatatgatgatatggtggtacaaaaaaatatttcagttcaaagtcattgtgaacatcatatggcaccaattataggagttgcacatgttgcatatattcccaatcaaagagttgttggtttaagtaaattagcgagagttgttgaagttttttctaaaagacttcaaactcaagagagacttacaatgcagattgcaaaaacaataatggagtcattggatgcaaaaggtgttgctgta

SEQ ID NO: 266101 - DNA, 175 bp, Unknown
  Bacterial polypeptide expressing nucleotide sequence isolated from the Sargasso Sea
aatggatgctttagatccaaaaggagtagcagtatcaatagattcaacacatcaatgtatgacaatgcgaggaattaaaaaagaacaagcaacaacagtaacaaattattacttaggtaaatttaaagaagacttaagctatcaaaatagatatttgagatttataagcaaataa

SEQ ID NO: 266102 - DNA, 451 bp, Unknown
  Bacterial polypeptide expressing nucleotide sequence isolated from the Sargasso Sea
atgaatagaacagttatcgaaataattggattccttagtgttgttggttctttggcattcgtaggtgttgagatcagacagaacacgagtgcggtaagaggtgcaacaaatcaagccatctcagatcaggttggtgaacttatgttgacaatcgctactgatgataatttagctgaactggtaaccagattgtatgatggtgaaactcaagatcaatttgacccaatagatgatatgcgtctctatatgactataatgaccggcttacgaagagttgagaatatatttttacaattagaagatggcatattagatgaaagagcatttgataggatcggtttgagtttttatcgatctaattatggtagagagatttggcaagccaatagacaattctttgatcgggaatttgttccgttcttcgatgaacttcttgggcaaaaaccctaag

SEQ ID NO: 266103 - DNA, 604 bp, Unknown
  Bacterial polypeptide expressing nucleotide sequence isolated from the Sargasso Sea
atgaaaaatgtagcagattttaaagcaaaagtgcttgaaaaagtttcaaaagatgaagcagaaaaagcaatcaaggtagtgttgaaatatattggggaaaatcctagcagggaaggactaattgaaaccccaaaaagagtcataaaagcattcgatgaatattttagcggttacagcgaaaatcctgaagaatacttatcaaaaacttttggagatgttgaaggatacgatgatatggttattcaaaaaaatatctcagttcaaagtcattgtgagcatcatatggctccaatattaggtacagcacatgttgcctacatgccagcagagaaagtggtaggtttaagtaaactcgctagagtggttgatctttactcacgtagacttcaaactcaagaaagattaacaatgcaaatagcaaattctatcttcaaaggattaaaagcacatggatcagctgtcagtattgatgctgtacaccagtgtatgactacaagaggtgtaaggaaagaagaagccaagacagtaaccaattattttacaggtgtttttagagatagccacaatcttcaggaaagatttcttcattatatcaaaaaataat

SEQ ID NO: 266104 - DNA, 562 bp, Unknown
  Bacterial polypeptide expressing nucleotide sequence isolated from the Sargasso Sea
gatgcgagaagaagtcgaagatgcggtacggaagttggttacttgggctggggacgaccctgaccgcgagggtcttgtagatacaccgcgccgtgttgttaaggcttatgaggagttcttctctggctatcaggtagatccgactgattatctagaacgaactttcgaagaaacggatggatatgatgagatgattgtcctgcgggatattgcgtttgtatctcattgcgaacaccatatcctgccggtcctcggtaaggcgcatgttgcttatttaccgaaccggcgtgttgtagggattagcaaactcgcgcgtgttgtggaagcatatgcgaggcgcctgcaaattcaagaacgcatgactgcgcaaatcgcgaatgccattgaaacggcgctaaagccccgcgggattgcagttgttgtcgaggcggagcatcaatgcatgacgacgcgcggggttatgaagccaggtgtctcgatggtaaccagccgtatgctgggagcatttcgtgaagatgcgaagaccagattggaattcgaatctataatcggtaaaagatag

SEQ ID NO: 266105 - DNA, 613 bp, Unknown
  Bacterial polypeptide expressing nucleotide sequence isolated from the Sargasso Sea
tatgaaaatagttaaagatatatttaacgaaaaactaaaagattcaaatcaagtgactgatgaagaggccgaacaagcatttactagtattattaaatggttaggagaagatcctgcaagagaaggtcttaaatcaaccccaaaaagattagtaaaagcatataaagaatattttaaaggttatactgaagatccaaaaaaatttttacaaaaaacttttggagatgttcagggctacgacgatatggtagtacaaaaaaatatttccgtacaaagtcactgcgaacaccatatggctccaataataggagttgctcatgtagcttatattcctaaagatagggtagttggtttaagtaaattagcaagagtagtggaagttttttctaaaagactacagactcaggaaagattaactatgcaaatagcaaaatctttaatggaagcattagacgcaaaaggtgtagcagtatcaattgatgcaacgcaccagtgtatgacaacaagaggaataaaaaaagaacaggcaacaactataacaaactattatttaggacagtttaaggacgatttaagttatcaaaataggtatttgcgatttataagcaaataa

SEQ ID NO: 266106 - DNA, 580 bp, Unknown
  Bacterial polypeptide expressing nucleotide sequence isolated from the Sargasso Sea
tatgaaaaaacctacagaaaaagaaattcatgaagcagtaagaaaactacttttatgggccggagatgatcctgatagagaaggattggtaggcacacctgatagagttgctagggcttataaagagttcttcgctggctatgaacaagatccagaagaaatcttaagaacaacatttgaagaagtagaaggttacgacgaaatggtgctagttaaagatattggtgttgaatcacattgtgagcaccatatggttccaattattggaagagcacatatagcttatatacctaacaatagggttgtgggcataagtaaattagctagagttgttgatatttttgcaaaaagattacaaattcaagaaaaaatgacagcacaaattgctaattccattgaaaatgtccttaagcctaaaggtatagccgttgtaattgatgcatctcatcagtgcatgactactcgaggagtaaataaacctgaatcttcgacagtaactagcgcaatgcgtggtgtttttaaagacaatccaagaacaagaaatgaattcttaagtttcattaatttgccaaaattttag

SEQ ID NO: 266107 - DNA, 1390 bp, Unknown
  Bacterial polypeptide expressing nucleotide sequence isolated from the Sargasso Sea
catgatccagtacgggtttgagcgtctggtattgttgggcagtgccgggtatcagagagccgagttgccgctggatgctgccgtctcactcatcgcccccaataacacaggtaaaaccagcctcatcaacgcgctgcagtttttattgatcatcgaccagcgacgcatggactttggcgcccacgatctggagaagtccaaacgattctacttccccaacaacagcgcctacatactgctggaagcctgtctgccagaaacggggaccgtggtgctgggatgtgtcggcaagggggttagccatgactatcagtactttgcctacaagggagcgttggatctggatgattatcggttggacggcggcgctctggtggcggagccccaactggtaaaccacctggccacgcgccagcggctggtgtttgtctacaagagtcccaatgattttcgcgatgccctgtatggtggtcgtcgcaagcgggccgccagcgagcccgatttcaccctctttcatctggagcatcaatcggatgctgctgcctatcgacaggtcctcactcgtaccttacggctggataggctcacctcggccgatgtcaaaaattatctgttggaaatcttcaaacgggacttgtcggatgcggccatcgactttcggcaagagtgggaaaaggcatttagcgaggtcaatagtgaacgggctcagtatcaggcggcggtcaatcagtctgcacggatcctgagcttggccaaacaagtgcaagagcgtttgacgctcagaggcaagctcatcgtctggtgcccacagatagaagaagacctcaagcagtggcactcctactatgagtccacagcagaggaattggcagccaaggtgttgcaatgcgagacggcacaaaagcaatcggggagccgtattcaggagctgagtgtcgaacggctcgtaaaacagcagtcccatactcagctgctggcgctcaatcagcagcaagcggagctggagcgtcggtttaccctgctttcgggacgtgagcaacttgaaacacagctggcggcggtcaaggagaatttggaggctcagatcaccctgctggggcaggtcaagagccgcagcgtagaggacataaggcgagatttacgtcggcaacagcagttgtcgatgagcctgcatcggcagcaggagaccttgaccgacaatctctatcgacacatggctgatcatctgagtgaagaggagttactgcgactaaaccgggtgctccaggccggagtgatgcagctaggaccggcagatttcgaactggatatgccccggttgaaacaacagttgtcacagacgccgggcgagacgctgatgctggctggcctgcgcatcaaccttcatcgg

SEQ ID NO: 266108 - DNA, 580 bp, Unknown
  Bacterial polypeptide expressing nucleotide sequence isolated from the Sargasso Sea
tatgaaaaaacctacagaaaaagaaattcacgaagcagtaagaaaactacttttatgggctggagatgatcctgatagagaaggattagtgggcacacctgatagagttgctagggcttataaagagttctttgctggctatgaacaagatccagaagaaatcttaagaacaacatttgaagaagtagaaggttacgacgaaatggtgctagttaaagatattggtgttgaatcacattgtgagcaccatatggttccaattattggaagagcacatatagcttatatacctaacaatagggttgtgggcataagtaaattagctagagttgttgatatttttgcaaaaagattacaaattcaagaaaaaatgacagcacaaattgctaatgccattgaaaatgtccttaagcctaaaggtatagccgttgtaattgatgcatctcatcagtgcatgaccactcgaggagtaaacaaacctgaatcttcgacagtaactagtgcaatgcgtggtgtttttaaagacaatccaagaacaagaaatgaattcttaagtttcattaatttgccaaaattttag

SEQ ID NO: 266109 - DNA, 619 bp, Unknown
  Bacterial polypeptide expressing nucleotide sequence isolated from the Sargasso Sea
tatgacaattatagatagtgcaaatgctcttctaaaagataaagaagatgagaagccaactagagaagaagctgaaaaagctgtaaaagttttaattgaatgggcaggtgatgacccatccagagaaggtttagttgaaactcccaagaggtttgttaaagcttttgaggaatattttgctggttacagtaaaagtccaaaaaatattttagaaaaaacattttttgaaacaggaaattaccaagattttgtaatgttgaaaaatattgagtttcgaagccactgtgaacatcatttagctccaataattggttatgcttccgttgcttacatcccagatggtaaagttgtaggaatatcaaaattagctagaatagttgatgtttttgctaaacggcttcagacccaagaaacaatgacatcacaaatagctaatagtattcaaaacaacctcaatccaaaaggagttgctgtatttattagtgctgagcatcattgtatgagtagtaggggtgtaaagaaagcacacgtggacatgactaccacattttttactggagactttaaagagagccagaacttgcaaaacagatttcttaattctttgactaataaataa

SEQ ID NO: 266110 - DNA, 415 bp, Unknown
  Bacterial polypeptide expressing nucleotide sequence isolated from the Sargasso Sea
atgaaaatagttaaaaatacagataatgctgttttaaaagataaaccagaagtttcagacaaagaagcagaggaagcttttagaactatattacgatggattggtgagaacccaaacagagaagggttgttagaaactcctagaagagtaacaaaagcttataaagaatattttaagggttataatcaagaaattacctcagaactattaaaaacttttggtgacgttaatggttacgacgacatggtactacaaaaaaatatttctgtacaaagtcattgtgagcaccatatggcaccaataattggagtagctcatgttgcttacataccaaataaaagagtagtaggtttgagcaagctagcaagagttgttgaagtttattctaaaagattacaaacacaagaaagattaa

SEQ ID NO: 266111 - DNA, 163 bp, Unknown
  Bacterial polypeptide expressing nucleotide sequence isolated from the Sargasso Sea
gacgcaaaaggcgtggcagtaacaatagattcaactcatcagtgtatgacaatgagaggaattaaaaaagagcaagcgaccactgtcacaaattattacttaggtcaatttaaagatgatctgagttatcaaaatagatatttaagatttattgcaaaataaa

SEQ ID NO: 266112 - DNA, 255 bp, Unknown
  Bacterial polypeptide expressing nucleotide sequence isolated from the Sargasso Sea
tagttgaaatattttcaaaaagattacaaacacaagagagattaaccgtacagatagcaaacagcttaatggaagcgttagatgcaaaaggtgttgctgttacaatagattcaactcatcagtgtatgactatgaggggtataaaaaaagaacaagcaacaactgtaactaatttttacttaggtcaatttaaagaagatttgagttatcaaaatagatatttacgatttatcagcactgagttaaaagactagt

SEQ ID NO: 266113 - DNA, 425 bp, Unknown
  Bacterial polypeptide expressing nucleotide sequence isolated from the Sargasso Sea
catgaaattagtaaaaaacgaaaatgagttacacaaagataacatctcagataaagaggctgaagaagcatttgtaaagattttaaagtggatgggagaagaccctggtagagaagggttattggaaacacctaaaagggtagtcaaagcttttaaagaatattttaaaggttataaagaagatcctaaagaaattttgaataaaacctttggagatgtagatggttatgacgatatggttattcaaaaaaatatttctgtgcaaagtcattgcgaacatcacatggcaccaattattggtatagctcatgtagcatacattcctaaagatagagtagttggtttaagtaaactcgccagagtagttgaagtattttcaaaaagacttcaaactcaagaaagacttacaatgcagatagccacaa

SEQ ID NO: 266114 - DNA, 394 bp, Unknown
  Bacterial polypeptide expressing nucleotide sequence isolated from the Sargasso Sea
ttgcaaaataatgtctctgacaaagaggctgaagatgcattcaggacaatcttaaaatggatgggagaagaccccaatcgagaaggattgttagaaacacccaaaagagtagtaaaagcttttaaagaatattttaagggttacagcgaagatccaaaatcaattttagaaaaaacttttggagatgtagagggttatgacgacatggttgttcaaaaaaatatttcagtgcaaagtcattgcgagcatcatatggctccaataattggaattgcacacgtagcttatattccaaaagaaagagttgttggtctaagcaaactagctagagttgttgaagtattttctaaaagactacaaacccaagagagattaacaatgcaaatcgcgacaa

SEQ ID NO: 266115 - DNA, 259 bp, Unknown
  Bacterial polypeptide expressing nucleotide sequence isolated from the Sargasso Sea
aagtaaacttgcaagagtagttgaggtattttcaaaaaggttacaaactcaagaaagacttactatgcaaatagctacaactttaatggaatctttggatgcaaaaggtgtagctgttacaatagattcaactcaccagtgtatgactatgagaggaataaaaaaagagcaagcaacaactgttactaattactacttaggtcaatttaaagaagatctgagttatcaaaatagatatttaagatttatcgcaaaataa

SEQ ID NO: 266116 - DNA, 610 bp, Unknown
  Bacterial polypeptide expressing nucleotide sequence isolated from the Sargasso Sea
aatggataaaaattcaaaaattacaagtttatcgagggccccctccataccctctagagaagaagctgaagatgctgtaaggactatactcgcttggatcggtgaagatccaggtagagaaggcctgctcgaaacaccgcgaagattcatcgatgcatacaaggagtttttcaagggttataatgaagatggtgtagacgttttatccaaaaccttcagcgaagttggtggttatgatgacctcgtactccttaaggatattcaatttaactcattttgtgagcaccacatgataccatttattggtaaggctcacgttgcatatttaccatcgaatcgtgtcgttggaatttcaaaaattgcaagacttgttgatatatacgcgcagcgtcttcaaacacaagaaacaatgacagctgaaattgcaaacgctctcagccaatctcttaatcctaggggtgtcgcaataattctagatgcagagcatatgtgtatgtctcttagaggcgtaaagaaagaccaagtatcaacaatcacaacacggtttacaggggaatttgagacaaatgaagcgctcagggatcgctttatgaaactaacaaataactag

SEQ ID NO: 266117 - DNA, 269 bp, Unknown
  Bacterial polypeptide expressing nucleotide sequence isolated from the Sargasso Sea
aagtaaattagcaagagtggttgaggttttttctaaaagacttcaaacacaagaaagattgactatgcaaattgcgaatacactaatggagtcactagatgctaaaggtgtggcagttactatagactcaactcatcagtgtatgactatgagaggaattaaaaaagaacaagcttcaacagtaacaaattattatttaggtcaatttaaagaagatttaagttatcaaaatagatatttaagatttattagtatatcaaaagattaaa

SEQ ID NO: 266118 - DNA, 580 bp, Unknown
  Bacterial polypeptide expressing nucleotide sequence isolated from the Sargasso Sea
tatgagcaaaccaacagaaaaagaagtacatgaagctgtaagaaaattactgttatgggcaggagatgatcctgatagagaaggattggtaggtacgcctgatagagtagctagagcctataaagagttctttgctggttatgaacaggatccagaagaaatcttaagaacaacatttgaagaagtagaaggttacgatgaaatggtgctagttaaagatattggtgttgagtcacattgtgagcatcatatggtgccaatcataggaagagcacatattgcttatataccgaataatagagttgtaggaataagtaaattagctagagttgttgatatatttgctaagagattacagattcaagaaaaaatgaccgcacaaattgctaattccattgaaaatgtgcttaaacctaaaggtatagctgtagtaattgatgcatctcatcaatgcatgactacgagaggagtaaataaacctgagtcatcaacagtaaccagcgcaatgcgtggagtttttaaagataatccaagaacaagaaatgaattcttaagtttcattaatttgccaaaattttag

SEQ ID NO: 266119 - DNA, 465 bp, Unknown
  Bacterial polypeptide expressing nucleotide sequence isolated from the Sargasso Sea
taaaggacactcctagaagaatcgcagatgcatatactgaaatcttttccggatatgactctgattctgaattgtctgttcaattttcagaagactctgagatggtagttgcaaaaaatattcaattctattcaatgtgtgaacatcacatgttaccattttacggaacaatacaaattgcatatatcccaaatggtcgtgtctttggaatatctaaactagttagagttgtagaaaaattctcaaagagattacaaattcaagaaagaattacaaaaaatgttgcagatgagatttatgctcagggtgttaaaggagtagcagtaatggcagaaggtgagcacctctgtatgaaaatgagaggcgtcagaaatgatgctcaaatgacatcttcagcatttagaggggtatttgaggatcaaaaaaccaaagaagagctactcaaagccattcaaaacaagtaag

SEQ ID NO: 266120 - DNA, 538 bp, Unknown
  Bacterial polypeptide expressing nucleotide sequence isolated from the Sargasso Sea
atggataaagaacgtgtcaaaaaactagttcgagaattaattattgagcttggcgaagatcctactcgtgaaggtctaaaagacacacctagacgtatcgctgatgcatatggagaaatcttttctgggtatgactctgattccgaattatccgttcaattttcagaggactctgagatggtagttgcaaaaaatattcaatactattcaatgtgtgaacatcatatgcttccattctttggtactatccaaattgcatacattccaaatggaagagtctttgggatttcaaaactagtaagagttgtagaaaaatattcaaagagactgcaaattcaagaaagaattacaaaaaatattgcagatgagatttacgctcaaggtgtaaaaggagttgcagtaatggcagaaggtgagcatctctgtatgaagatgagaggtgtcagaaatgatgctaaagtgacatcttcagcatttagaggagtatttgaggatcaaaaagccaaagaagaactactaaaagccattcaaaactagt

SEQ ID NO: 266121 - DNA, 202 bp, Unknown
  Bacterial polypeptide expressing nucleotide sequence isolated from the Sargasso Sea
tatgcagattgcaaaatctctaatggatggtttggatgcccatggagttgcagttacaatagactcaactcatcaatgtatgactatgagaggtattaaaaaagaaaaagcaactacaatcacaaattattttttaggtaaattcaaagacgatcttagttttcagaatagatttttgaaacatatttctgataataattag

SEQ ID NO: 266122 - DNA, 217 bp, Unknown
  Bacterial polypeptide expressing nucleotide sequence isolated from the Sargasso Sea
acaaacacaagaaagactaaccatgcaaatcgccctttctttaatggaatctttagaagcaaaaggtgttgctgtatcaattgatgctacccatcagtgtatgacaatgagaggtattaaaaaagaacaagcaacaacagtcactaattattatttaggaaaatttaaagaagatctaagttatcaaaatagatatttaagatttataagtaaataa

SEQ ID NO: 266123 - DNA, 174 bp, Unknown
  Bacterial polypeptide expressing nucleotide sequence isolated from the Sargasso Sea
tagaacaaactcaagcagcaggcgctgcagtcacgatagaagccaaacatatgtgcatgatgatgcgaggtgtggagaagcagaattctgttatgacaacttcttgcatgctaggcatttttagaaccaaggccagcactcgcaatgagtatttatctttggtgagtaaatagc

SEQ ID NO: 266124 - DNA, 522 bp, Unknown
  Bacterial polypeptide expressing nucleotide sequence isolated from the Sargasso Sea
taaaactcgtacgtgaattaatcattgaaatcggcgaggatcctactagagaaggtctaaaggacactcctagaagaatcgcagacgcatatactgaaatcttttccggatatgattctgattcagaactatctgttcaattttcagaagactctgagatggtagttgcaaaaaatattcaattctattcaatgtgtgaacatcacatgttaccattttacggaacaatacaaattgcatatatcccaaatggtcgtgtctttggaatatctaaactagttagagttgtagaaaaattctcaaagagattgcaaattcaagaaagaattacaaaaaatgttgcagatgagatttatgctcaaggtgttaaaggagtagcagtaatggcagaaggtgagcacctttgtatgaaaatgagaggcgtcagaaatgatgctcaaatgacatcttcagcatttagaggggtatttgaggatcaaaaaaccaaagaagagctaatcaaagccattcaaaacaagtaag

SEQ ID NO: 266125 - DNA, 251 bp, Unknown
  Bacterial polypeptide expressing nucleotide sequence isolated from the Sargasso Sea
agctagagtagttgaagttttttctaaaagacttcaaactcaagaaagacttacaatgcaaattgcaaaaacaataatggaatcgctggatgcaaaaggtgttgctgtaagcatagattcaactcaccagtgtatgactatgagaggaattaaaaaagaacaagctacaactgttacaaattattatttaggtaaatttaaagaagatttaagttatcagaatagatacttgcgattcattgcaaaataaa

SEQ ID NO: 266126 - DNA, 412 bp, Unknown
  Bacterial polypeptide expressing nucleotide sequence isolated from the Sargasso Sea
ttggttaaaaacgaaaacgaaaaaacacaacaaatctccgataaagaagctgaggaggcattcagagtaattcttaaatggatgggtgaggatccttcaagagaaggtttattagaaactccaaaaagagttgtaaaagcttttaaagaatattttaaaggatatggcgaggatccaaaagctattttagagaaaacttttggagatgtagaaggttacgatgatatggttgttcaaaagaatatttcagttcaaagtcattgtgaacaccatatggcacctataatcggaattgctcatgtcgcgtatatacctaaagacagagttgtaggtttaagtaagttagctagagtagtagaagttttttcaaaaaagattacaaacccaagaaagattaactatgcaaatagca

SEQ ID NO: 266127 - DNA, 610 bp, Unknown
  Bacterial polypeptide expressing nucleotide sequence isolated from the Sargasso Sea
atgaaattagtaaaagacacagacaataaaaatttagagactaaacaagtttcagataaagaagctgaagaagctttgattaagatattaacttggattggtgaggatccaaatagagaaggtttgttagaaacaccaaagagagtaataaaagcatataaggaattttttagtgggtataaagaggatgctaataaagttttagaaaaaacttttggtgacgttgaaggatataatgacatggtaattcaaaagaatatatctgtgcaaagtcattgcgaacatcatatggttccaatattgggtatggcacacgttgcatacataccaaaagaaagagttgtaggactaagtaagctagcaagggttgttgatgtatttgcaaaaaggttgcaaacacaagaaagattaacactacaaattgctaaatcaattatgactgctcttgatgctaagggtgttgcagtaacaatcgatgcagctcatcaatgtatgactactagagggataaaaaaagaaagagcatctacagttactaattactttttaggtcaatttaaggacgatctttctattcagaatagatacttacgatttattaaagaataga

SEQ ID NO: 266128 - DNA, 1327 bp, Unknown
  Bacterial polypeptide expressing nucleotide sequence isolated from the Sargasso Sea
ctgattctcttttgtggatctcttttctttacgatctatcacaaatggctcaacattcgtggtttcaaacatgccatcgacatcacacgtggaagatacgacaacccaaacgatcctggggaaatctcacactttcaggctcttacctccgctctcagtgcaactgttgggcttggtaatattgctggcgttgctgttgccattcacacaggtggtcccggtgctgttatctggatgatgctgatcggcctcctcggtatgactgcaaaatttaatgaatgcaccctcgcaatggtttaccgaaaggttcgtcctgatggcacagtcgatggtggcccgatgcactatcttgaaattggtctgcaggagcgtgggtttccttttcctgttgcaaaggctttcggtcttgtctttgcccttttctgcatcggcggttctttcggtgggggcaatatgtttcaggcaaaccaagccacatcagctgtccgtggaatgctaggcgatgttgcaggaattaattgggtttttggtagcgttctcgcctttctggttggccttgtcattattggtggaattaagcgcattgggcaggtgactgaaaaaattattcctcttatgtgcgggatttatgtcttggctgggcttgtcattctcgtgattcacataaagcaagttcctgatgccgctgttctcattgtgcgatcctgcgtgtcaccagaggcagcatacggaggctttatcggcgtacttgtgcaaggcattcgtcgagcagttttctcgaatgaagccggggtcggatctgctgcgattgctcatgcagcagcaaaaacagacgaaccggtccgtgaggggctcgtggctatgcttggaccgttcattgacacggttgttatctgcacaatgacggcactcgttgtcattgtgagtggggcctataacacaccagaagctggtcaaggagttgaaatgactcgttgggcattctctgagacacttagttggtttcccacaattctcaacatatccgtatttctatttgcatactcaacaatgatcagctggtcatactacggagagaaggcctggcaatatatcttcggaacaacacgaacagctattattatttatcgaattatttttctcgggttcatcatacttggagccgttgcgtccttagataacgttatcgagttctcagatcttatgattctgtctatggctttcccaaatattatcgggggggtcattcttgcgccccgtgtgaagactctgttggaagactattggcgacgatataaaaacaacgaatttgttgtctatgactaat

SEQ ID NO: 266129 - DNA, 718 bp, Unknown
  Bacterial polypeptide expressing nucleotide sequence isolated from the Sargasso Sea
attggaagtaattggattatcaaaaatttataataataaagatgctgtaaaagatatttcttttaaagttaataaaaatgaaattattggaatactaggtcctaatggatgtggaaaaacaactactattggaatgattttaggattattaaaaccatcaaatggtaaagtgttaataaatggaattgaaattgaaaagaaaagagttgatttattaaaccaacttaacttcatatcaccttatattgaacttccaaaaaaattaacggtaaaacaaaatcttgaagtatatggaagactctatgatgttaaaaacttaaaaaaaaaaattgaaatgctctcagagaaacttagattgagcgaaataataaacaaacttacaggggagctctcttcaggtcaaaaaaatagagtcagtcttgctaaatcaataattaataatcctacagttttgctgttagatgaaccaacagcatctctagatcctgaaacaggtgattttgtgagaagttttttagagagttatcaaaaagaaaataaagcatctatcttactagcatcacataatatgtctgaagttgaaagattatgttcttcagtactgatgatgaataaaggatcaatagttgacagtggtaaaccagaacaattaatcaaaaaacatgggcgaaaaaatatggaagaagtttttttgaaaattacaagagaaagaatatga

SEQ ID NO: 266130 - DNA, 634 bp, Unknown
  Bacterial polypeptide expressing nucleotide sequence isolated from the Sargasso Sea
gatggctaaaaagaagtccgcgcggcctgaaccagccgcatcccgcccgagccgtgaagaagcggaagacgccgttcgcgtgctgttgcgctgggccggcgacgatcccgcgcgcgaaggcctggtcgacacgcccgcacgggtcgtgcgcgcctatgagcagttcttcgccggctatgcgctggagccgcgcgacatcctcgcgcgcacgttcagcgaagtcgacggctacgacgaaatgatcgtgctgaaggacatccgcttcgagagctactgcgagcaccacatggtgccgatcatcggccgcgcgcacgtcgcgtatctgccgaatcatcgcgtggtcggcatctcgaagctcgcgcgcctcgtcgacgcgttcgcgaagcgcctgcagatccaggaaaagatgaccgtgcagatcgccgacacgctgttcgacgtgctgcagccgaagggcgtcggcgtgatcctcgaagccgcgcaccagtgcatctcgacgcgcggcgtgcacaagccgggcgtcgagatggtgacgtcgcgcatgctcggcacgttccgcaccgatccgtcgacgcggcgcgaattcctgtcgatcgtcgccaatccttcttcagtcaacctgacgaatacgtaa

SEQ ID NO: 266131 - DNA, 409 bp, Unknown
  Bacterial polypeptide expressing nucleotide sequence isolated from the Sargasso Sea
tcttgttggctccttagcatttgttggtgttgaaattagacagaatacgagcgcagtaagaggagcgacaaatcaagccatctcagatcaggttggtgaacttatgttaacaatcgcgaccgatgataatttagctgaactggtaaagagactgtatgacggtgaaactcaaaatcaatttgacccagtagatgacatgcgtctctttatgactatcatgactggcttacgaaggattgagaatatatttttacaaatagaggatggtatattagacgatagagcgtttgatcggatcggcttgagtttttatcgttcgaattacggtcgagaaatctggctggccaatagacagttctttgatcgtgaatttgttccattttttgatgaacttatcaataaggaatga

SEQ ID NO: 266132 - DNA, 622 bp, Unknown
  Bacterial polypeptide expressing nucleotide sequence isolated from the Sargasso Sea
tatgaaattagtaaaagacactgatgacaaaagtttagatgcaaagcaggtttcagacaaagaagctgaagacgcttttagaactatcctttcttggatgggtgaagatccaagtagagaaggtttattagaaactcctaagagagtggtaaaagcttttaaagaatatttcaagggttacaaagaagatccaaataaaatcttagacaaaacttttggtgatgttgaaggttatgatgacatggttgttcaaaaaaatatttcagtgcaaagtcattgtgaacatcatatggctccaattattggaaaagcacacgtagcttatattccaaaagaaagagttgtaggattaagtaagttagcaagagtagttgaagttttctcaaaaagattacaaacacaagagagacttacaatgcagatagcaaacactttaatggaatcattagatgccaaaggagttgcagtaactattgattcaactcatcagtgtatgacaatgagaggtattaaaaaagaacaagcaaccacggttacaaattactacttaggccaattcaaagaagatttaagttatcaaaatagatatttacgatttatcagcactacgttaaaagattag

SEQ ID NO: 266133 - DNA, 580 bp, Unknown
  Bacterial polypeptide expressing nucleotide sequence isolated from the Sargasso Sea
aaaaaggtttcagacaaagaggctgagaaagccattagaaccattttatcttggatgggtgaagatcctaaaagagagggcttgttagaaactcctaaaagagttgtaaaagcgtttaaagaatattttcaaggttacaatgaggatgcaaaaaaagtattagataaaacttttggtgatgtcgaaggttacagtgatatggttgttcagaaaaatatctcagtacaaagtcactgtgaacatcatatggctccaattataggaaaagctcatgttgcctatatacctaatgaaagagttgtaggattaagtaaaattgcaagagtagttgaaatattttcaaaaagattacaaacacaagaaagattaactgtccaaattgcgaattcattaatggaagctttagatgcaaaaggtgtagctgtcacaatagattcaacccatcagtgtatgaccatgaggggtataaaaaaagaacaagcaacaacagtaactaatttttacttaggtcaatttaaagaagaccttagttatcaaaatagatatttacgatttatcagcactgagttaaaagactagt

SEQ ID NO: 266134 - DNA, 622 bp, Unknown
  Bacterial polypeptide expressing nucleotide sequence isolated from the Sargasso Sea
tatgaaattagtaaaaaacacaaacaacaagttaaatgaaaataagcaaatttcagataaagatgctgaagaagcttttaaaacaattttaacatggatgggtgaagacccaaatagagaaggtttattagaaactccaaaaagagttgttaaagcatttaaagaatattttaaaggttacaaagaagatccagataaaattttggataaaacttttggtgatatagagggatatgatgacatggttgtccagaaaaatatttctgttcaaagtcattgcgaacatcacatggcaccaattattggaaaagctcatgttgcttatattccaaaagaaagagttgtaggtttaagtaaacttgcaagagtagttgaagtattttctaaaagacttcaaactcaagaaagacttacgatgcaaattgcaaatactttaatggaatcattagatgcaaaaggtgttgcagtaacaatagattcaactcatcagtgtatgactatgagaggaattaaaaaagaacaagcaactacggtaacaaattattatttaggtcaattcaaagaagatttaagttttcaaaatagatatttacgatttattagcactacgctaaaagattaa

SEQ ID NO: 266135 - DNA, 613 bp, Unknown
  Bacterial polypeptide expressing nucleotide sequence isolated from the Sargasso Sea
atgaaattagttaaagacgtagatcatttaaataaagccaaaaataaagtttctgatgagaaagctgaagaagctgttaaaacaattatacaatggattggtgaagaccctacaagagaaggattacaatcaaccccaagaagagtcataaaagcatttaaagaatattttggtggatatacacaagacccaagtaaatttttggcaaaaacttttacagaggtggagggttacgatgatatggtaatagaaaaaaatattagcatacaaagtcattgcgaacatcatatggcacccatagtaggcgtggcacatgttgcttacattccatcaagtaaagttgttggtctgagcaaacttgctagagtcgtagaagttttttcaaaaagattgcaaacacaagagcgcttaactatgcagatagcaaaaaccataatggatgttttacaaccaagaggtgttgctgtaactattgatgcatcacatcaatgtatgacaaacagaggcgttaagaaagaaaacacaacaaccgttaccaattacttccttggagcttttaaagacgatttaagttttcaaaatcgttacttgagatatattaataaagagtaat

SEQ ID NO: 266136 - DNA, 371 bp, Unknown
  Bacterial polypeptide expressing nucleotide sequence isolated from the Sargasso Sea
atatggtggtcaaaaaaatatatcagtgcaaagtcactgtgagcaccacatggcgcctataattggaattgcgcatgttgcatatattccaaatcaaagagtagtagggctcagtaaaattgctagagtagttgaagtattctcaaaaagattacaaactcaagaaagactaacagttcaaatagccaatacattaatggaagcattagatgctaaaggagttgcggtaaccatagattcaactcatcagtgtatgactatgagaggtattaaaaaagagcaggctacaacagttactaatttttatttaggtcaatttagagacgatttaagttatcaaaatagatatttgagattcatcgcaaaataat

SEQ ID NO: 266137 - DNA, 604 bp, Unknown
  Bacterial polypeptide expressing nucleotide sequence isolated from the Sargasso Sea
tatgaaattagtcaaaaatgaaaataacaacataaaaaaccctatctctgatcaagaagcagaggaagcttttattaaaattttaaaatgggtaggcgaagacccttcaagagaaggtttaattgaaacaccaaaaagagttatgaaagcttttaaagagtattttaatggttacagccaagatgcaaaaaaagatttagaaaaaacttttggagatgttgaaggttatgatgacatggttgttcaaaaaaatatttcggtccaaagccattgtgaacaccatatggcaccaataataggagttgctcatgttgcgtatatacctaatgaaagagttgttggactgagtaaactagcaagagttgtagaaattttttctaaaaggctgcaaacgcaagaaagattgactatgcaaatagcatcgacaattatggaagctttagatcctaaaggagttgcagtttcgatcgatgcaacccatcaatgtatgactatgaggggtattaaaaaagagcaggcaacaactattacaaattattatttaggaaaatttaaagacgatctaagttatcaaaatagatatttaagatttattgctaaataa

SEQ ID NO: 266138 - DNA, 518 bp, Unknown
  Bacterial polypeptide expressing nucleotide sequence isolated from the Sargasso Sea
catgaaattagtaaaaaacgaaaacgataaaaatagagagagtattacagataaagaggctcaagaagcgtttgtcaaaatcttaaaatggataggtgaagatccatctagggaaggtttattagaaacaccaaaaagagttatgaaggcttttaaagaatattttaaaggctaccacgaggatccaaaggctgttctagataaaacttttggtgatgtagaaggttatagtgatatggttgttcaaaaaaacatatcagtacaaagccattgtgaacatcatatggcaccaataattggtattgctcatgttgcgtatattccaaatcaaagagttgttggattaagtaaaattgcaagagtggttgaagtattttctaaaagattacaaacacaagaaagacttacagttcaaatagcaaatactttaatggagtcattagatgcaaaaggtgttgctgttaccatagattcaactcaccagtgtatgactatgagagggattaaaaaagagcagg

SEQ ID NO: 266139 - DNA, 589 bp, Unknown
  Bacterial polypeptide expressing nucleotide sequence isolated from the Sargasso Sea
tatgaaaattgtaaaaaacctagaaaaattcatccaaaaagacaaagatgaggttacagataaacaggcagaagaggcctttagaacaattattaagtggattggagaaaatccaaatagagagggattgttagaaacccccaagagagtaacaaaagcatttaaagagtacttcaaaggctataagcagaacgcaacttccgatcttttaaaaacattcggagatgtagagggatatgatgatatggtgttacaaaaaaatatatctgtctctagtcattgcgaacaccacatggctccaattataggagttgctcacgttgcctatttaccaaataaaaatgtagttggactaagcaaacttgcaagaacagtcgaagttttttctaaaagactacaaacgcaagagagattaacaatgcaaattgcacaagcattaatgaaaggacttgatgcgcatggagttgcggtaacaatcgatgccacacatcagtgtatgacaatgagaggcataaaaaaaagaaaagctacaacagtaacaaattattttttaggaaaatttaaaaacgatctaagctatcaaaaatag

SEQ ID NO: 266140 - DNA, 469 bp, Unknown
  Bacterial polypeptide expressing nucleotide sequence isolated from the Sargasso Sea
agagttgtaaaagcatttaaagaatacttcaaaggtataaacgaagatccaaaaaaaatattagataaaacatttaaagatgttgaaggttatgatgacatggtaatacaaaaaaatatttcagttcaaagtcactgtgaacatcatatggctccaataattggagttgcacatgtagcatacattcctaaagatagagttgttggtctaagtaagcttgctagagtagtagaagtattttcaaaaagacttcaaacacaagaaagacttactatgcaaatagctaatgtgttaatggagtcattagatgctaaaggagttgcagtatctatagattcaactcaccagtgtatgacaatgcgtggtattaaaaaagaacaagcaacaacagtcacaaattattatttaggtaaatttaaagaagatttaagttttcaaaatagatatttaagatttataagtaagtaaa

SEQ ID NO: 266141 - DNA, 274 bp, Unknown
  Bacterial polypeptide expressing nucleotide sequence isolated from the Sargasso Sea
gttggcttaagtaagcttgctagagttgtagaagtattttcaaaaagattacaaactcaagagagattaacaatgcaaatcgcagaaacgttgatgaaaggtttagatgcacacggtgttgctgttacaatagactctacacatcagtgtatgacaatgagaggcattaaaaaagaaaaggcaaccacaattacaaattattttttaggtaagttcaaaaatgatttaagctttcaaaatagatttttgaattatatttcacaaaagcgttaat

SEQ ID NO: 266142 - DNA, 514 bp, Unknown
  Bacterial polypeptide expressing nucleotide sequence isolated from the Sargasso Sea
gatgggagaagatccttccagagaaggtctaatagagacaccaaaaagagtaattaaagcgtttaaagaatattttaaaggatataacgaagatccaaaaaaaattttagaaaaaacttttggagatgttgagggttatgatgatatggttattcaaaaaaatatatctgtacaaagccattgcgaacatcacatggcaccaataattggagtagctcatgttgcatatattcctaacaatagagtggtcggattaagcaaactcgcaagggttgtagaggtattctcaaaaaggcttcaaacacaagaaagattaactatgcaaattgcaaatacgttaatggactcattagatgctaaaggagtagcggtttcaatagattcaacgcaccattgtatgacaatgagaggaattaaaaaagaacaagctacaactgtaacaaattactacttaggaaaatttaaagaagatttaagttgtcaaaatagatatttaagatttattagcaaataa

SEQ ID NO: 266143 - DNA, 613 bp, Unknown
  Bacterial polypeptide expressing nucleotide sequence isolated from the Sargasso Sea
catgaaattagtaaaagacttagatcagttaaataaaaataagcacaaggtctccgacgaaacagctgaagaggccgttaaaacaattattcagtggataggggaagacccttcaagagaaggtttaaaatcaactccaaaaagagtaataaaggcttttagagaatactttagtggttatacacaagatccaaataaatttttgcaaaaaacttttacagaggtggaaggatacgatgatatggtaatagaaaaaaatattagtttccaaagccattgtgaacatcatatggctccaattattggagtggcacacgttgcttatataccttcagctaaagtagttggtttaagcaagttagcaagagtcgtagaagtttttgctaaaagattacaaacacaagaacgtttgacaatgcaaattgcaaaaacaataatggaagttttacaacctcgaggtgttgccgtaacaatagatgcttctcatcagtgtatgactagcagaggtgtaaaaaaagaaaatactttaactgtaactaattattttcttggtgcatttaaagatgatttaagttttcaaaatagatacttaagatatattaataaaggttaa

SEQ ID NO: 266144 - DNA, 319 bp, Unknown
  Bacterial polypeptide expressing nucleotide sequence isolated from the Sargasso Sea
tataggcaaagctcatgtcgcttatattccaaacgaaagagttgttggtttaagtaaacttgcaagagttgtagaagtattttcaaaaagattacaaactcaagaaagactaactatgcaaattgcaaaaactctaatggaatcattggatgcaaagggagtagcagtgacaattgactctactcatcaatgtatgaccatgcgaggtattaaaaaagaacaagcatctactgttactaattattacttaggtcagtttaaagaagatcttagttatcaaaataggtatttaagatttattagtattgcaaaagattaa

SEQ ID NO: 266145 - DNA, 616 bp, Unknown
  Bacterial polypeptide expressing nucleotide sequence isolated from the Sargasso Sea
aatgaaacttgttaaaaatactctagataacaaagatcttaaaaaagtctcagataaggaggccgaagatgcttttcgaacaattttatcttggatgggtgaagatccagccagggaaggtttgatagaaactccaaaaagagtagttaaggcatttaaggagtattttaaaggatacaaagaagatccaaatcaaattttagacaaaacatttggtgatgtagaaggttatgacgatatggtaatccaaaaaaatatttcagttcaaagtcattgtgaacatcatatggcaccgatcataggaaaagctcacgtagcttatattccaaaagatagagttgtaggtctaagtaaattagcaagagtggttgaagttttctcaaaaagactgcaaactcaggaaagattaactatgcaaattgcgaatacacttatggagtctttagatgctaaaggagtagcggtgactatagactctacccatcaatgtatgactatgcggggcattaaaaaagaacaagctacaactgttacaaattattatttaggtcaatttaaagaagatcttagttgtcaaaatagatatttgagatttattagtattgcaaaagaataa

SEQ ID NO: 266146 - DNA, 547 bp, Unknown
  Bacterial polypeptide expressing nucleotide sequence isolated from the Sargasso Sea
catgaaattaataaaaagtgaaaatgagaagaatttagataataagatttcagatgaagaagctgaacaagcttttgttaaaataattaaatatataggtgaggacccaacaagagaaggtctacaatcaacacctaaaagattagttaaagcatttaaagaatattttaaaggctataaagagaatccagaaaaaattttagaaaaaacctttggagatgttgaaggatatgatgatatggttgttcaaaaaaatatttcactacaaagccattgtgaacatcatatggcaccaatcattggagtagctcatgttgcttatattccaggcgaaagagtagttggattaagtaaactcgcaagggttgtagaggtattttcaaaaagattacaaactcaagaaagactaactatgcaaattgcaaaaactctaatggaagcacttaatgctaaaggtgttgcggtttcaatagacgcaactcatcaatgtatgactatgagaggaattaaaaaagaacaggctttcactgttactaatattatttag

SEQ ID NO: 266147 - DNA, 604 bp, Unknown
  Bacterial polypeptide expressing nucleotide sequence isolated from the Sargasso Sea
acagataacaataatttagaaacaaaaaaggtttcagataaagaggcagaagaggctattagaacaattttgtcctggatgggagaagatcccaaaagagaaggattgctggaaacccctaaaagagttgtaaaagcatttaaagaatattttcaaggctataacgaggacgcaaataaagtgttagataaaacttttggtgatgttgaaggttacagtgacatggttgttcaaaaaaatatttcggtgcaaagtcactgcgaacatcatatggctccaattattggaaaagctcatgttgcctatataccaaatgaaagagttgtgggattaagtaaaattgcaagagtagttgaaatattttcaaaaagattacaaacgcaagaaagattaactgttcagattgcaaattctcttatggaagcgttagatgcaaaaggtgtagctgttacaatagattcaacccatcagtgtatgactatgaggggtattaaaaaagaacaagcaacaactgtaactaatttttacttaggtcaatttaaagaagatctgagttatcaaaatagatatttacgatttatcagcactgagttaaaagactagt

SEQ ID NO: 266148 - DNA, 397 bp, Unknown
  Bacterial polypeptide expressing nucleotide sequence isolated from the Sargasso Sea
tttggggatgttgaaggttacagcgatatggtagttcaaaaaaatatttctgtacaaagtcactgcgaacatcatatggcacctattattggaatcgcgcatgttgcttatattccaaatgaaagagttgttggactcagtaaaattgcaagagttgtggaagttttttcaaaaaggcttcaaacacaggaaagattaacagttcaaatcgcaaatacattaatggaatcattagatgcaaaaggtgttgcagtaacaattgactcaactcatcagtgtatgactatgcgaggtattaaaaaggaacaagctacaactgttactaatttttatttaggtcaatttaaagatgatcttagttatcagaatagatatttgcgatttattgcaaaataga

SEQ ID NO: 266149 - DNA, 619 bp, Unknown
  Bacterial polypeptide expressing nucleotide sequence isolated from the Sargasso Sea
tatgaaaatagttaaaaatcttaacaccacaattttaaaggaaaaacctgaagtttctgataaagaagcccaagaagctttcagaactattttaagatggattggtgaaaatcctgacagagaaggattacgtgaaactccaagaagagttacaaaggcttttaaagaatattttaaagggtacaaacaagaaattacttcagaattattaaaaacttttggtgacgtaaatggttatgatgatatggttcttcaaaaaaacatatcagtgcaaagtcattgtgagcatcatatggccccaattatcggtgtagctcatgttgcttatcttcctaacaaaagagttgttggtttaagtaagcttgctagagttgtagaagtattttcaaaaagattacaaacacaagagagattaacaatgcaaatcgcagaaactttaatgaaaggtttagatgcacacggtgttgcagttacaatagactctacacatcagtgtatgacaatgaggggaattaaaaaagaaaaggcaacaacaattacaaattattttttaggtaagttcaaaaatgatttaagctttcaaaatagatttttgaattatatttcacaaaagcgctaa

SEQ ID NO: 266150 - DNA, 355 bp, Unknown
  Bacterial polypeptide expressing nucleotide sequence isolated from the Sargasso Sea
acgttttattcccactgtgagcatcacttcgtgccaatttatgggaaagcgcatgtggcttattttcctaatggtaaagttataggtctttctaagatcaataggatcgtgcagtattatgccaaaagacctcaggtccaagagcgtttgaccattcaaatcgccaatgagctaaaaaagacactgcatactgaacacattgccatcgtattagatgctacgcacatgtgtgtatccagcagaggggtaaatgataccaatagtcagacagggacagcttacttcagtggaaagtttgaagaccaacagttcaaatccgaattcctgaattacatcaattcaaccacaaaataag

SEQ ID NO: 266151 - DNA, 406 bp, Unknown
  Bacterial polypeptide expressing nucleotide sequence isolated from the Sargasso Sea
agaaaaaacttttggagatgtggaaggttatgatgatatggttattcaaaaaaatatatctgtacaaagccattgcgaacatcacatggcgccaataattggagtagcccatgttgcatacattcctaataatagagtagttggattaagcaaactcgcaagagttgtagaagtattttcaaaaagacttcaaacacaagaaagattgacaatgcaaatagcaaatacattaatggagtcattaaatgctaaaggagtagcagtttcaatagattcaacgcaccattgtatgacaatgagaggaattaaaaaagaacaagccacaacagttacaaattactacttgggtaaatttaaagaagatttaagttgtcaaaatagatatttaagatttattagcaaataa

SEQ ID NO: 266152 - DNA, 607 bp, Unknown
  Bacterial polypeptide expressing nucleotide sequence isolated from the Sargasso Sea
tatgaagttagtaaaaaacgaaaacgataaaataccgcaaaaaatttcagataaagatgctgaggaagcatttataaaaattttacaatggatgggtgaagatcctggtagagaaggtttgctggaaactcctaaaagggttgtaaaagcttttaaagaatattttaagggttacaaagaagatccaaaggagattttgaataaaacatttggagatgtaaatggttacgacgatatggtggttcagaaaaatatttcagttcaaagtcattgtgagcatcatatggctccaattattggagtggctcatgtagcatatattccaaaagatagagttgttggattaagtaaattagctagagttgttgatgtgttttcaaaaagacttcaaactcaagaaagactaaccatgcagatcgctcaaacattaatgcaatccttagatgcaaaaggtgtagctgtgagtatagattcaactcatcagtgtatgactatgagaggaattaaaaaagagcaagcaacaacagttaccaattactatttgggaaaatttaaagaagatttgagttatcaaaatagatatttacgctttatacaaaatagatta

SEQ ID NO: 266153 - DNA, 448 bp, Unknown
  Bacterial polypeptide expressing nucleotide sequence isolated from the Sargasso Sea
atactttagtggttatgatgaaaatccagcagattatcttaaaaaaacttttaaagaagtagatggctatgatgatatggtaatagaaaaaaatattagcattagaagtcattgcgagcatcacatggcgccaattataggtgttgctcatgttgcatacatccccaaagaaaaagtagttggcttaagtaaattagcaagagttgtagaagcttttgcaaaaagattacaaacccaagaaagattaactatgcaaatagctaaaacaattatgggagttctacaacctaggggagttgctgttactatagatgcagttcaccaatgcatgacaagtagaggtataaaaaaagaaaatacgaaaactgtaacaaactattttctcggggcttttaaagacgatttaagttttcaaaatagatacttaagatatattaataaagattaa

SEQ ID NO: 266154 - DNA, 619 bp, Unknown
  Bacterial polypeptide expressing nucleotide sequence isolated from the Sargasso Sea
atgaaattagtaaaagatactgacaacaaagtaattgaaaattctgatgtttccgacaaggaggctgagcaagcctttagaactattttaacttggttaggtgaagatcctaatagggaaggccttttagaaactccaaaaagagtaatgaaagcatacaaagaatattttggtggatataaagtcgatccaaataaaatattagacaaaacttttggagatattgatggttatgacgacatggttatacaaaaaaatatttccgttcaaagtcattgtgagcatcatatggctccaattattggaaaagctcatgttgcatatattccaaaagaaagagttgtaggtttaagtaaacttgcaagagttgtggaagtcttttcaaaaagactacaaacacaagaaagattaacaatgcaagtagccaaaactttaatggagtctttagatgcaaaaggtgtagctgtaacaatagattctactcatcagtgtatgactatgagaggaattaaaaaagaaaatgcaacaactgtaacaaattattacttaggtcaatttaaagatgaccttagttaccaaaatagatatttaagatttataagtataccaaaagattaaa

SEQ ID NO: 266155 - DNA, 286 bp, Unknown
  Bacterial polypeptide expressing nucleotide sequence isolated from the Sargasso Sea
attccaaatcagagagttgtaggattaagtaaaattgcaagagtagttgaagtattttctaaaagattacaaacacaagaaagacttacagttcagatagctaatactttaatggaatgtttagatgcaaagggtgttgctgtgacaatagattcaactcaccagtgcatgactatgagagggattaaaaaagagcaagcaacaacagttacaaatttttatctaggtaaattcaaggacgatttaagttttcagaatagatatttgcgatttattgcaaaataat

SEQ ID NO: 266156 - DNA, 504 bp, Unknown
  Bacterial polypeptide expressing nucleotide sequence isolated from the Sargasso Sea
gatcctggcagagaaggttaattgaaactcctaaaagagtaacaaaagcattcaaagaatattttaaaggatataaagaggatcctatctcaatcctatccaaaacttttggtgatgttaatggatacgatgatatggttattcaaaaaaatatatcggtacaaagtcactgtgaacatcatatggctccaataattggaatagctcatgttgcttacataccaaatcaaagagttgttggattaagtaaactagctagggttgtagaagtattctcaaaaagactacaaactcaagaaagactaacaatgcaaattgcaaacactctaatggaagcgttgaaacctaaaggagtggccgtttcaatagactcaactcatcaatgcatgactatgagaggaattaaaaaagaacaagcaacaacagtcacaaattactatctgggtcaattcaaagaagacctcagctatcaaaatagatatttaagatttataagtaaataaa

SEQ ID NO: 266157 - DNA, 574 bp, Unknown
  Bacterial polypeptide expressing nucleotide sequence isolated from the Sargasso Sea
atgaaattggtaaaaaaccctaacgaaaaagaattagctaagaaagtcacagacaaagaagcagaagaggctattgtcaaaattttggactggatgggggaagattcatctagagaaggtttgttagaaactcctaaaagagtaataaaagcatttaaagaatatttcaaaggttacagtgaagatccaaaaaaaatattagaaaaaacattcggtgatgtagaaggttatgatgatatggtaatacaaaaaaatatttctgttcaaagtcactgtgagcatcatatggcaccaatcataggtgtagctcatgttgcatatatacctaaagagagagtggtaggtttaagtaaacttgcaagagttgtagaagtattctctaaacgtcttcaaactcaagaaaggttaacaatgcaaatagcaaatacattaatggagtcgctagatgcaaagggtgttgcagtatcaatagactcagctcatcaatgcatgacaatgcgaggtataaaaaaagaacacgccacaacggtaactaattattacctaggtaagtttaaagaagatttaagttacc

SEQ ID NO: 266158 - DNA, 325 bp, Unknown
  Bacterial polypeptide expressing nucleotide sequence isolated from the Sargasso Sea
gcaccaattcttggtgtcgcgcatgttgcatatataccaaacaaacgtattgtaggactaagcaaactggcacgaacagttgaaattttttctaaaagattacaaacacaagaaagacttacaatgcaaattgcaaacgctcttacagagggcctcgatgctcatggtgttgcggtaaatatcgattccacgcaccaatgtatgaccatgagaggaattaaaaaagaaaaagcaactacagtaacaaactattttacaggaaagttcaaagaagatttaagttttcaaaatagatttctaagatatatttctcataaaagctaat

SEQ ID NO: 266159 - DNA, 610 bp, Unknown
  Bacterial polypeptide expressing nucleotide sequence isolated from the Sargasso Sea
tatgaaattagtcaaagatttagaaaaaccatcgataaatcagagtggagttactgataaagaagcagaggatgctttcaagactattctgaagtggataggcgaaaatccagatagagaaggtcttaaagaaacacctaaaagagtggtcaaagcatttaaggagtatttcagtggatatcatcaagatgccagcaaagttctaaataaaacttttggagatgttgatggatatgatgacatggttttagaaaaaaatatttcttttgagagtcattgtgagcatcacatggctccaattatcggtgtaattcatatcgcttatattccaaataaaaaagttgttggtttaagtaaactagctagaaccgttgaagtttatgctaagagattacaaactcaagaaagattaaatatgcaaatagctaagactttaatgagtggattagaagcaaaaggtgtagccgtaactatagatgcctcccatcagtgtatgactatgcgaggtattaaaaaagaaaaagcgatgactcttacaaattattttttaggaacattcaaagaagatctttctcttcaaaatagatatttaaaacatatcggaaaataa

SEQ ID NO: 266160 - DNA, 595 bp, Unknown
  Bacterial polypeptide expressing nucleotide sequence isolated from the Sargasso Sea
actccactaagaaaagacgcatttgagatgtctgatgatgaaaaaatttctatcatccaaaaaaatgtacaggaaatcttacaaactttaggtatggatatgaaagatgatagcttgaaagggaccccactaagggttgctaaagcgtatgtaaaagaaatattcggaggtttgaatcctagaaatttaccaaaagcatcaacgtttgataataagtaccaatacggagagatgttagttgaaaaaaatattactgttttttcaacatgtgaacatcaccttcttccaatatacggaaaagctcatgtagcatacttttcaaatggaaatgtaataggattgtctaaaatgaatagaattgtggattactttgctagaagaccacaggttcaggaaagattaaacattcaaatagtaagaaaattacaacaattcttaaacacagaagatgttgcatgtgtaatagatgcaaaacacatgtgtgtaaattccagaggaattagacatatcgattgtagtacagttactggagaattcggaggaaaatttaaagataagttaataaaaagggaatttttagattatattcgttaag

SEQ ID NO: 266161 - DNA, 586 bp, Unknown
  Bacterial polypeptide expressing nucleotide sequence isolated from the Sargasso Sea
ttgaatggtaaatccgaggtttctgataaacaagcagaggaagcatttagaactattattcgttggattggtgaaaaccctgatagggaaggcttggttgaaacaccaagaagagttactaaggcatttaaagaatattttaagggatacaaacaggagattacgtcagaactattaaaaacttttggagatgttaatgggtatgatgatatggttttacaaaaaaatatttcagtatcaagccattgcgaacatcatatggctccaattataggtgtcgctcatgtagcttacctgcctaacaagagagtggttgggttaagcaaacttgcaagagtcgttgaagtttactcaaaaagactccaaacacaggaaagattgacaatgcagatcgcagacagtcttatgaaaggtttggatgcacatggggttgcagttacaattgattctacccatcaatgtatgaccatgagaggaattaaaaaagaaaaagccacaacaattacaaattattttttaggtaagtttaaaaatgatttaagttttcaaaatagatttttaagatatatttcggataaaaattaat

SEQ ID NO: 266162 - DNA, 559 bp, Unknown
  Bacterial polypeptide expressing nucleotide sequence isolated from the Sargasso Sea
catgaaattagtaaaaaacgaaaaccaaaaaaatactgatgccgtctcagataaagaggccgaagaagcatttgtaaaaattttgcaatggataggagaagatcctacaagggagggattattagaaacacctaaaagagttgtaaaagcttttaaagaatattttaaaggttacaaagaagatccacatgaaattttaaacaaaacttttggagatgtaaacggttatgatgatatggttgttcaaaaaaacatatctgtgcaaagccactgcgaacatcatatggcgccaattattggtgtagctcacgttgcttatattccaaaagatagagttgtaggtttaagtaaattagccagagttgttgaagtattttcaaaaagacttcaaactcaagaaagacttactatgcagattgcaaaaacgctaatggagtctttagatgcaaaaggtgttgccgtaagtatagattcaactcaccagtgtatgactatgagaggaattaaaaaagagcaagccacaactgttaccaattattatctaggtaaatttaaggaa

SEQ ID NO: 266163 - DNA, 599 bp, Unknown
  Bacterial polypeptide expressing nucleotide sequence isolated from the Sargasso Sea
catgacagccattgcctacgacgcgcctgcgcgcgcccattcctccgaagatgtcgccataggcgctaaacccagccgcgcggaggccgaagccgccgtgcgcacgcttatccgctgggctggcgacgacccaacgcgcgagggcctcatcgacacgcccaaacgtgtcgtaaaggcttacaccgaatggttcgccggctatgagcaagaccccgaagccctgctcgcccgcaccttcgaagagaccgagggctatgacgatatcgtcgcgatgaaaggcatccgccttgagagctattgcgagcatcacattgcgcccgtcgtcggcgtcgcccatgtggcgtacctgccgtcgaaccgcgtggtcggcatttccaagcttgcgcgcctcgtcgaggcgtacggcaaacgcctgcagattcaggaaaaactgaccgcccagattgcggacacgattgaaaaagtcctgcagccgcgcggcgtcgccgtgatgatcgcagccgagcatcactgcatgaccacccggggcatcagcaaaccgggcgtcgacacgataacgacccgtttcaccggcgcctttaaagacgatccgcgtatgg

SEQ ID NO: 266164 - DNA, 588 bp, Unknown
  Bacterial polypeptide expressing nucleotide sequence isolated from the Sargasso Sea
tatgaaattagttaaagacacagataaagctagctcaaaaaaacccgagattacagataatcaggcagaggaagcttttagaacaatactatcttggataggtgaaaaccctaatagagagggattagtagaaactccaaaaagagtcgttaaagcattcaaagaatactttaaaggatatcatatgaatgcaagttctgatttattaaaaacttttggagacgtagaaggctacgatgatatggtagttgaaaaaaatattagttttgaaagtcattgtgaacatcatatggctccaattattggagtggctcacattgcatatattccaaataaaaaagtagttggattaagtaaacttgcaagaacagtagaagtattttcaaagagacttcaaacacaagaaagattaactatgcaggtagctaagacattaatgtcagcccttgatgcaaagggtgtagcagtaactatagatgcttcacaccaatgcatgactatgagaggtattaaaaaagaaaaagcaacaactgtcacaaactattatttgggagcttttaaagaagatcttagttatcaaaatagata

SEQ ID NO: 266165 - DNA, 513 bp, Unknown
  Bacterial polypeptide expressing nucleotide sequence isolated from the Sargasso Sea
atccaaatagagaaggattattagaaactccaaaaagagtagttaaagcgtttaaagagtattttaagggttacaaagaggatccaaatcaaatcttagacaaaacgtttggcgatgttgagggttatgatgatatggttgttcaaaaaaatatttcagttcaaagtcattgtgaacatcatatggcaccaattatcggcaaagcacacgttgcttatatccctaaaaaaagggtagtaggattaagtaaattagcaagagttgtggaagttttttcaaaaagattgcaaactcaagagagattaactatgcaaattgcgaatacactaatggagtctttagatgcaaaaggtgtggcagtaacaatagattcaactcatcagtgcatgacaatgagaggaataaaaaaagaacaagcaacaacagtaacaaattattatttaggtcaatttaaagaggatcttagttatcaaaatagatatttgagatttatcagtatagtaaaagaataaa

SEQ ID NO: 266166 - DNA, 604 bp, Unknown
  Bacterial polypeptide expressing nucleotide sequence isolated from the Sargasso Sea
tatgaaattagtaaaagaaacagctaaagatattaatcaaaaggttacagataaagaagcagaagaagcgtttatcaaaatcttaaattggatgggagaggatcctggtagagaaggtcttctagaaactcctaaaagagttattaaagcatttaaagaatattttaaaggttacaacgaggatccaaaaaaggttttagaaaaaacttttggagatgttgaaggttatgacgatatggttattcaaaaaaatatttccgtgtttagccattgtgagcatcatatggcaccaatcattggggtcgctcatgtagcttatattccaaaagatagagttgtaggtttgagtaaacttgcaagagtagttgagatattttcaaaacgacttcagacacaagaaagactgactatgcaaattgcaacgacattaatggaatccttagatgcaaaaggagttgctgtttcaatagattcaactcatcagtgtatgactatgagaggtattaaaaaagaacaagcaacaactgttactaattattatttaggtcaatttaaagaagatcttggttttcaaaatagatatttaagatttattagtaagtaa

SEQ ID NO: 266167 - DNA, 599 bp, Unknown
  Bacterial polypeptide expressing nucleotide sequence isolated from the Sargasso Sea
catgaaattagtaaaaaacgaaagtgaaattagaagaggcaagaaagtttctgacaaagaggcagaagaagctatcataaaactattagactggatgggcgaggatccatcaagagagggtttattagaaacaccaaagagggttgtaaaagcatttaaagaatactttagaggttatagcgaagatccaaaaaaaatattagagaaaacatttggagatgttgagggctatgatgacatggtaatacaaaaaaatatttcagttcaaagccactgcgaacatcatatggctccaattattggagttgctcatgtagcatacattcctaaagatagagtagttggtttaagtaagcttgctagagttgtagaggtattctcaaaaagacttcaaacacaagaaagacttactatgcaaattgctaatgtattaatggaatctttagatgcaaaaggagtggcagtatctattgattcaacccaccagtgtatgacaatgagaggtattaaaaaagaacaagcaacaacagtcacaaattattatttaggaaaatttaaagaggatttaagttttcaaaatagatatttaagatttataa

SEQ ID NO: 266168 - DNA, 604 bp, Unknown
  Bacterial polypeptide expressing nucleotide sequence isolated from the Sargasso Sea
atgaaattagtaaaaaacgaaaacaatgatttaggtaataaaatttctgataaggaagcagaagatgcatttgtcaaaattttaaaatggattggtgaagatccatccagagaggggctagttgaaactccaagaagagtaatgaaagcttttaaagaatattttaaaggatataacgaagatggcaaaaaagtactagagaaaacatttggagatgtcgaaggatatgacgatatggttgtacaaaaaaatatttctgtacaaagtcattgtgaacatcatatggcgccaataatcggagttgctcatgttgcatatataccaagtgaaagagttgttggtttaagtaaactagcaagagtcgttgaagttttttctaaaagattacaaactcaagaaagattaacaatgcaaatagcttcaactataatggaagctttagacgctaaaggggtagctgtatcgattgattcaacccatcaatgtatgacaatgagagggattaaaaaagagcaagcttcaacagttacaaattattatttaggcaaatttaaagacgatttaagttatcaaaacagatatttaagatttattgctaaataaa

SEQ ID NO: 266169 - DNA, 376 bp, Unknown
  Bacterial polypeptide expressing nucleotide sequence isolated from the Sargasso Sea
aatgaagttagttaaagacgcagataaaacatcctcaaaaaagcctgaagtctccgataaacaggccgaagaagcatttaaaactattcttaaatggataggagaagatccaaacagagaaggtcttgttgagacaccaaagagggtaattaaagcatttaaggaatattttaaaggttaccatcaagatgctgaagctgatttatctaagacgtttggagatgtggagggttatgatgatatggtagtggaaaaaaatatcacacttgaaagtcattgcgagcatcatatggcacctataattggagtagcacatgttgcctatattcctaataaaaaggtagtaggtttaagtaagttagcgagaacggtagaa

SEQ ID NO: 266170 - DNA, 514 bp, Unknown
  Bacterial polypeptide expressing nucleotide sequence isolated from the Sargasso Sea
atgaaattagtaaaaaatgaaaatcaaaaaaacttagaaactgtctcagataaagaagcagaggaggcatttataaaaatcttaagatggattggagaagatccaatgagagaggggttattagaaacaccaagaagagtcacaaaagcttttaaagaatattttaaaggttactctgaagatcccaaaaaaattttaaataaaacctttggagacgtagacggctatgacgatatggttgtacaaaaaaatatttcagttcaaagtcactgcgaacatcatatggcacccataataggtgtagcgcatgtagcgtatataccaaaagaaagagttgttggtttaagtaaattagcaagagttgttgaagtgttttctaaaagacttcaaacccaagaaagacttacaatgcaaattgcatctacaataatggattcattagatgccaaaggagtagcagtaagcatagattcaactcaccagtgtatgactatgagaggaaaaaaaaagaaca

SEQ ID NO: 266171 - DNA, 496 bp, Unknown
  Bacterial polypeptide expressing nucleotide sequence isolated from the Sargasso Sea
gttgttagaaactccaaaaagagttgtcaaagcatttaaggagtattttaaaggttataaggaagatcctattcaagttttagataaaacctttggtgatgtggatgggtatgatgacatggtcattcaaaaaaatatctcagttcaaagtcattgcgaacatcatatggcaccaataattggtaaagctcacgtagcttacatacctaatgagagggttgttggattaagtaaattagcaagagtagttgaggttttttccaaaagattacaaactcaggaaagattaactatgcagattgcgaatacactaatgcaatctttagatgccaaaggagtagcagttacaatagactcaactcatcaatgtatgactatgagagggattaaaaaggaacaagctacaacagtcacaaattattatttaggtcaattcaaagaagatttaagttatcaaaatagatatttaaggttaataagtaattcaaaagattaa

SEQ ID NO: 266172 - DNA, 577 bp, Unknown
  Bacterial polypeptide expressing nucleotide sequence isolated from the Sargasso Sea
tatgaaattagtcaaagacttagaaaaatcatcgataaatcagagcggagtcactgataaagaagcagaagatgctttcaagactattctgaagtggataggtgaaaatccagatagagaaggtctaaaagaaacaccaaaaagagtagttaaagcatttaaggagtatttcagtggataccatcaagatgccaacaaagttcttaataaaacttttggagatgttgatggatatgatgacatggttttagaaaaaaatatttcttttgagagtcattgtgaacatcacatggctccaattatcggtgtaattcatatcgcttatattccaaataaaaaagttgttggtttaagtaaattagctagaaccgtagaagtttatgctaagagattacaaactcaagaaagattaaatatgcaaatagctaagactttaatgagtggattagaagcgaaaggtgtagctgtaactatagatgcttcccaccagtgtatgactatgcgaggtattaaaaaagaaaaagcgatgactcttacaaattattttttaggaacatttaaagaagatctttcactt

SEQ ID NO: 266173 - DNA, 604 bp, Unknown
  Bacterial polypeptide expressing nucleotide sequence isolated from the Sargasso Sea
atgaaattagtaaaaaatgaaaatcagaagaagttagacactatctcggataaagaagctgaagaagcttttataaaaattttacaatggttaggagaagacccttcaagagaaggattattagaaacacctaaaagagtcacaaaagcatttaaggaatattttaaaggatacaaggaagatcctaaagaaattttaagtaagacctttggtgatgtaaatggatatgacgatatggtaattcaaaaaaatatatcagttcaaagtcactgtgaacatcatatggcaccaatcataggcgtagctcatgtagcgtatattccaaaagatagagttgttggtttaagtaagttagcaagagtagttgaagtgttttctaaaagactacaaactcaagaaagacttacaatgcaaattgcaacaacaataatggagtcactggacgcaaaaggtgttgcagtaagtatagattcaactcaccagtgtatgactatgagaggaattaaaaaagaacaagctacaacagttaccaattattatttaggtaaatttaaagaggatttaagctatcagaatagatacttgagatttatcgcaaaataaa

SEQ ID NO: 266174 - DNA, 409 bp, Unknown
  Bacterial polypeptide expressing nucleotide sequence isolated from the Sargasso Sea
tttgttaaaaacatttggggatgttgaaggttacgatgatatggtagtagaaaaaaacattactttagaaagtcattgcgaacatcatatggctccgataattggagttgcgcatattgcttatattccaaatcacaaagttgtaggtttaagtaaacttgctagaaccgtagaagttttctcaaaaaggcttcaaacgcaggaaagattaactatgcagatagctaagactttaatgagcgcccttgatgcgaaaggcgttgctgtaactattgatgctgctcaccaatgtatgacaatgagaggaattaaaaaggaaaaagctacaactgttacgaattattatttaggtagcttcaaagatgatttaagttttcaaaacaggtacttgcgttacatagcaaaataa

SEQ ID NO: 266175 - DNA, 331 bp, Unknown
  Bacterial polypeptide expressing nucleotide sequence isolated from the Sargasso Sea
tatggcaccaattataggtaaggcacacgtggcttatattccaaaagagagagtagttggtttaagcaaattagctagagtcgtagaagtattttcaaaaagactacaaacacaagaaagattaactatgcaaattgcaaatacattaatggaatcattagatgcaaaaggagtggctgtaactattgactccacacatcaatgtatgactatgagaggtattaaaaaagaacaagcttccactgttactaattattatttaggtcaatttaaagaagatctttcttatcaaaatagatatttaagattcattagtatagcaaaagaataa

SEQ ID NO: 266176 - DNA, 520 bp, Unknown
  Bacterial polypeptide expressing nucleotide sequence isolated from the Sargasso Sea
tatgaaattagtaaaagaaacttctaaagtagttgagcaaaaaatatctgataaagaagcagaagaggcatttattaaaatattaaactggatgggtgaggacccaagcagagaaggccttattgaaacacccaaaagagttataaaagcctttaaagaatatttcaaaggttacaatgaggatccgaaaaaagtattagaaaaaacttttggagatgttgaaggttatgatgacatggtcattcaaaaaaatatttcagtgttcagtcattgtgaacaccacatggcaccaatcattggagtagctcatgttgcatacattccaaaagatagagttgtaggactaagtaaacttgcaagagtagttgaaattttttcaaaaagacttcaaacacaagaaagacttacaatgcaaatagcaacaactcttatggaagcgctagatgcaaaaggtgttgcagtatcaattgattcaacccatcagtgtatgacaatgaggggaattaaaaaagaacacgct

SEQ ID NO: 266177 - DNA, 619 bp, Unknown
  Bacterial polypeptide expressing nucleotide sequence isolated from the Sargasso Sea
atgaaaattgttaaaaatatagacaaagtaatagaaagtaacaaatctgaggttaccgacaaacaagctgaagaggcttttaggactataatcaaatggatcggtgaggatcctactagagaaggtttgatgtcaactcccaaaagagttgtaaaggcatttaaagaatattttaaaggatatggtcaggactataaatcagaattaggaaaaactttcggtgatataaaaggatatgacgatatggtactgcaaaaaaacatatctatatcaagtcactgtgaacaccatatggctcccattattgggatagctcatgtagcttacttaccaaacaagagaatagttggcttaagcaaacttgcaagaactgtagaggttttttctaaaaggcttcaaacccaggagagacttacgctgcagatcgcagatgccttaatgaaaggtcttgatgcagggggagtagcagttacgatagatgcaacacatcaatgtatgactatgagaggaattaaaaaagaaaaagctactaccgtcacaaactgttttctaggaaaatttaaaagtgatctaagttatcaaaatagatttttaagctatattgcagataaaaattagt

SEQ ID NO: 266178 - DNA, 451 bp, Unknown
  Bacterial polypeptide expressing nucleotide sequence isolated from the Sargasso Sea
caaggttataatgaggacgcaaaaaaagtattagataaaacttttggtgatgtagaaggttatagcgatatggtggttcaaaaaaatatttcagtgcaaagtcattgtgaacatcatatggctccaattattggaaaagcacatgttgcttatataccaaatgagagagttgtgggattgagtaaaattgcaagagtagttgaaatattttcaaaaagattacaaacacaagagagattaacagttcagatagcaaacagcttaatggaagcgttagatgcaaaaggcgtagctgttacaatagattcaactcatcagtgtatgactatgaggggtataaaaaaagaacaagcaacaactgtaactaatttttacttaggtcaattcaaagaagatttgagttatcaaaatagatatttacgatttatcagcactgagttaaaagactagt

SEQ ID NO: 266179 - DNA, 420 bp, Unknown
  Bacterial polypeptide expressing nucleotide sequence isolated from the Sargasso Sea
caaaagaagatttatcaaagactttcggtgacgttgaaggttacgatgatatggtaattgaaaaaaatataactttagaaagtcattgcgagcatcacatggccccaataataggcgttgcacatgtttcttatattccaaataaaaaagttgtaggtttaagcaaattggctagaacagttgaaattttttcaaaacgactgcaaacacaagagagattaacaatgcaaattgcaaaaacgcttatgagcgctttagatgcaaagggtgtagcagttacgattgatgcagctcatcagtgcatgactatgcgaggtataaaaaaagagaaagcaacaactgttacaaattattttttaggttcttttaaggaagatttaagtattcaaaatagatacctaaaatatattggaaaataga

SEQ ID NO: 266180 - DNA, 582 bp, Unknown
  Bacterial polypeptide expressing nucleotide sequence isolated from the Sargasso Sea
tatgaaattagttaaagacattaacagaaaaccacttgaaaaagaaataagtgaggctgatgtagagaaagctttgaaaactatattaacttggattggtgaagacccaagtagagagggtttggtggacacaccaaaaagagtaattaaagcatttaaagaatattttaagggctacaatctagacgctcaaaaaggtttaaccaaaacttttacagaggtagacggctatgatgatatggtggtagaaaaaaacataacttttgaaagccattgcgaacaccatatggcgcctattataggagttgtacatattgcgtatttgccaaaaaataaagtagttggacttagtaaattagctagaacagtagaagttttttctaaaagattacagacgcaggaacgattaacagttcaaattgcttctactttaatgaatgctcttgaagctagaggcgttgcagtaactatcgatgctgctcatcaatgtatgactatgcgtggagttaaaaaagagaaatcaacaactgtaacaaattattttttaggtgttttcaaagatgatttaagctatcaaaatag

SEQ ID NO: 266181 - DNA, 568 bp, Unknown
  Bacterial polypeptide expressing nucleotide sequence isolated from the Sargasso Sea
atgaagttagttaaagatatagataataacgtaaaacctaagagcgtttcggataaagatgcggaggaggcattcaaaacaattttaacttggatgggggaggatcctcacagagaaggacttttagaaacccctaagagagttgtgaaggctttcaaagagtattttaaaggttataaagaggatccaaaacaaattctcgataaaaccttcggagacgttgatggttacgatgacatggttgttcaaaaaaatatttcagttcagagtcattgcgaacatcatatggcaccaataattggaaaagctcatgtagcctacatcccaaaagagagagtggttggtttaagcaaactagcaagagttgtagaagttttttctaaaagattacaaactcaagagagacttactatgcaaatagcgaataccttaatggagtcgttggatgccaagggtgtcgccgttactattgattcaactcatcagtgtatgacaatgagaggtataaaaaaggaacaagccacaacagttacaagttattatttgggtcagtttaaggaagatttaa

SEQ ID NO: 266182 - DNA, 133 bp, Unknown
  Bacterial polypeptide expressing nucleotide sequence isolated from the Sargasso Sea
tcactactgcgttaaggcccgcggcgtgcgtgatgcgaccagtgcaaccaccacgacctcgctcggcggtctgttcaaatccagccagaacactcgccaggagttcctgcgcgccgtgcgtcaccataactaa

SEQ ID NO: 266183 - DNA, 556 bp, Unknown
  Bacterial polypeptide expressing nucleotide sequence isolated from the Sargasso Sea
ttgggatcaggaaaaatcagcaaaaatattagtgagattcttcaagaattagggcaagaccctaactctgctaacttgagagatacaccagaaagagtagctcaaagcttgaagtttttaacctcgggttaccaagaaaagctaagctctatcaccgacaaagctctttttgaagctcaatataacgaaatggtagtcgtacaaaatattgagttctatagcatgtgtgaacaccacctcttgccattttttgggcgttgccatgttgcatatattcctaataaaaaaattattgggatttcaaaaattccacaaattatagatatgttcgcacgtcgtttacaattacaagaaaacctaactaaagaaattggagaaagcctcgatcgttgccttcagcctaaaggttgcgcaataattatggaagctcagcatttgtgcatgatgatgagaggcgttcaaaaacaaaactcattcataacaactcaatataagagtaaagattttaaaaacgaaaaggaatttcaaacgttttatagtcagattcgtacttagc

SEQ ID NO: 266184 - DNA, 569 bp, Unknown
  Bacterial polypeptide expressing nucleotide sequence isolated from the Sargasso Sea
ggccgaagaagccgtgaggacattattccgatgggctggcgacaatcccaaccgtgaaggattactcgaaacaccccatcgagtggtcaagagctacgatgaattctttgttggttatgatcaaaaccctgcagatattttagcaaagacttttgaagagactgacgactatgacgagatggttgtgttgaaaaacatgcgttttgagtctcattgcgaacaccatatggtgcccattattggcaaagcgcatgttggataccttccctcgggaaaagttgttggaattagcaagctagccagactagtggatttatatgccaaacgtcttcaaatacaagagaagcttactgcgcagattgcagatacattggatgctgccctcaagcctagaggggtggcggttgtaatagaagcttttcatcagtgtatgacaactagaggggtgcataaacctgggactgcaacggtaaccagccgcatgctagggtctttcaggagcgatccaaccactaggagagaatttctcagcatcattcacgctggctccgtggacttttcagattaag

SEQ ID NO: 266185 - DNA, 466 bp, Unknown
  Bacterial polypeptide expressing nucleotide sequence isolated from the Sargasso Sea
agttgtaaaagcatttaaagaatattttaaaggttataaagaaaatccccaagaaattttaaataaaacatttggagatgtaaatggctatgacgatatggtagtacaaaaaaatatttctgttcaaagtcattgcgaacatcatatggctccaattattggtgttgctcatgtagcatatattcctaaagatagagtggttggtctaagtaaattagctagagttgttgaagtattttcaaagaggcttcaaacacaagagagacttacaatgcagattgcacaaacattaatggattcattagacgcaaaaggtgttgctgtaagcatagattcaactcatcagtgtatgacaatgagaggaataaaaaaagaacaagctacaacagttaccaattattatttaggtcaattcaaagaagatttaagttatcagaatagatacttgcgatttattgcaaaataa

SEQ ID NO: 266186 - DNA, 595 bp, Unknown
  Bacterial polypeptide expressing nucleotide sequence isolated from the Sargasso Sea
atgaaattagttaaagatacagaccagatacaaaaaaaagatcaagaaatatctgatgaaaaagctgaagcagctgtaaaaacaatattacagtggataggtgaaaacgcagaacgagaaggtttaaaatctacacctaaaagagttgtaaaggcttttaaagaatattttcaaggttataaagaaacaccagcaaattatcttaaaaaaacatttaccgaagtcgaaggttacgatgacatggttatagaaaaaaatattagcattcgtagtcattgtgaacatcatatggcgccaattataggggtagctcatgtagcatatattccacataaaaaagttgttggattaagcaagcttgcaagggtggttgaggcattttctaaaagattacaaactcaagaacgtctaactatgcaaatagcaaaaacaataatggaagtattgcaacctagaggagttgcagtaactatagacgcaacacatcaatgtatgactgatagaggtataaaaaaagagaacgcatcaacagttactaattattttctagaagctttcaaagacgatttaagttttcaaaatcgttacttaagat

SEQ ID NO: 266187 - DNA, 402 bp, Unknown
  Bacterial polypeptide expressing nucleotide sequence isolated from the Sargasso Sea
actgccgaccaacaaaagtaaagaggaacacattgtgtcaccagacgaccacataagccctaaaagctcgccaagcaacgctagcgaaaacacacaccctactcgttcagaggcagaagaagccgtaagaacccttataaagtggatgggtgatgacccaactagagaaggattaatcgatacgccaaagcgtgttattaactcatacgctgaactttttaatggatatactcaagaccccagtgaaatattggaacgcacgtttgaagaaaccgatggttacggcgacatagtactactaaaagatataagagttgaatcctattgtgagcaccacttgatacctattactggcgtggctcatgtggcatatataccagaaaatcgtgtggtcggaataag

SEQ ID NO: 266188 - DNA, 607 bp, Unknown
  Bacterial polypeptide expressing nucleotide sequence isolated from the Sargasso Sea
gttaaagatatagataataaccaagattctaagagtatttctgataaagaagcagaagaagcttttaaaactattttagcttggatgggtgaagacccaagtagggagggacttttagaaactccaaaaagagttgtaaaggctttcaaagagtattttaaaggctacaaagaagatccaaaaaaaattctagataaaacttttggagatgttgatggctatgacgatatggttgtacaaaaaaatatttctgttcaaagtcattgtgaacatcatatggcaccaataataggaaaggctcatgtagcctacattccaaaagagagggtagtagggttaagcaaattagcaagagttgtagaagttttttcaaaaagattacaaactcaagagagacttactatgcaaattgcgaataccttaatggaatctttggatgcgaagggtgtggctgttactatagattcaacccatcagtgcatgacgatgagaggtataaagaaagagcaggctacaacggtaacaaattattatttaggtcagtttaaggaagatttaagttatcaaaatagatatttaagatttataagcatcacaaaagattaaa

SEQ ID NO: 266189 - DNA, 616 bp, Unknown
  Bacterial polypeptide expressing nucleotide sequence isolated from the Sargasso Sea
catgaaacttgttaaagatactaatcttaaaaaagaattaaaaaatgttagtgactctgaggctgaagaagcatttaaaactattctttcttggatgggcgaagatccaaacagagaaggattattagaaactccaaaaagagttgttaaagcttttaaggaatacttcaaaggatataaagaggatccacttcaaatattggaaaaaacttttggagatgttgagggttatgatgatatggtaattcaaaagaatatttctgtacagagtcattgtgaacatcatatggcaccaataattggaaaagctcatgttgcttatattcctaaagaaagagtggttggtctgagtaaactcgcaagagtagttgaggttttttcaaaaagactgcaaacacaggaaagacttactatgcaaattgcgaataccttaatggaggctttagacgctaaaggagtagcagtaacaattgactcaactcaccaatgtatgaccatgagaggaattaaaaaagagcaagcaacaactgtaactaattattatttaggtcaatttaaagaagaccttagttaccaaaatagatatttaagatttattagtatttcaaaagattaa

SEQ ID NO: 266190 - DNA, 253 bp, Unknown
  Bacterial polypeptide expressing nucleotide sequence isolated from the Sargasso Sea
tgctcgtatagtcgatatgtttgcacgtcgtttacaaattcaagaaaacattaccttggaaattgcccaagctattcaaagtgtaaccaatgccgctggtgtgggagttgttattgaggctaaacacatgtgcatgatgatgcgtggagtagaaaaacaaaactcagcaatgatttcatccgttatgctaggggaatttcgtgattctagcaggactcgtcaggagttcttacagttgatagggcgtaattaa

SEQ ID NO: 266191 - DNA, 451 bp, Unknown
  Bacterial polypeptide expressing nucleotide sequence isolated from the Sargasso Sea
attgggatttctaagtaaaaaaatagaaaatactaggtcaattgaagaagtatttacaccattaaattcagtagctcactctgaaccaatatttgttaaaggtataaggtttatatctttatgcgaacaccatttagttcctttttttggctttgtaaatatagccattattccagaaaaaaaaattgcaggattatcaaagtatgcagatttagtggaatattattcaaactcacttcagatacaggaaagatttactacacaaattggaaataaaattcatgaagtgctcgactcgcaaggtgtttatataaaagttgtggggaaccatatttgcgctgaagtaggtgaagtaaagaacaatatctcagaattaataactacccattctacgggtttgtactctatggacgggttattaagagaagaagccttgaaacattttagttaa

SEQ ID NO: 266192 - DNA, 598 bp, Unknown
  Bacterial polypeptide expressing nucleotide sequence isolated from the Sargasso Sea
ttggttaaaaatgaaaatgaaaaacttcaaaataacgtctctgacaaagaggctgaagaagcattcaagacaatcttaaaatggatgggagaagatccttccagagaaggtttgttagaaacaccaaaaagagtagtaaaagcttttaaagaatattttaagggttacagtgaagatccaaaatcaattctagaaaaaacttttggagatgtagagggttatgacgacatggttgtccaaaaaaatatatcagtacaaagtcattgcgaacatcacatggctccaataattggaattgcacatgttgcttatattccaaaagaaagagttgttggtctaagtaaactagctagagttgttgaagtattttctaaaagactacaaacccaagagagattaacaatgcaaatcgcaacaacattaatggagtctcttgatgcaaaaggtgtagctgtaacaattgattcaactcaccagtgtatgacaatgagaggaataaaaaaagagcaagcaacaacagtaacaaattattatatgggtcaatttaaagaagacctaagttatcagaatagatatttgagattcatagcaaaataat

SEQ ID NO: 266193 - DNA, 415 bp, Unknown
  Bacterial polypeptide expressing nucleotide sequence isolated from the Sargasso Sea
tgaagatatctcttctgtgctgaaatccttcgaaaatagttatggatacaaaggaatggtgattgaaaaggacatcctctttcaaagtcactgcgaacaccaccttcttccaatcctgggtcgtgccgctatcgcttacattcctgaagacagggtactcggtttaagcaaattgaaccgaattctgcatcatttcgcccgacgtccccaggttcaggaacgcttgaccatgcaggtggcagatacgctcagtgaaactctgcaaaccgacgatgtggcagtcattctggaagcacgtcacctctgcgtagagatgcgcggagtacgagatagtggtgctgaaaccagcaccatgatattgagaggtagatttgagaaggaactgaaggaggattttttcagacagttaaactga

SEQ ID NO: 266194 - DNA, 465 bp, Unknown
  Bacterial polypeptide expressing nucleotide sequence isolated from the Sargasso Sea
ttgtaaaagctttaaaagaatatttcaaaggctacagagaagatcctaaagaaattttgaagaaaacttttggagatgtaaatggttatgacgatatggttattcaaaaaaatatttctgttcaaagtcattgcgagcatcatatggcaccaattattggtattgctcatgtggcgtatattcctaaagatagagttgttggtttaagtaaacttgctagagtagtagaggtattttcaaaaagacttcaaactcaagaaagacttacaatgcaaatagccaacacattaatggaatcattagatgccaaaggtgttgctgtaagtatagattcaactcatcagtgtatgaccatgagaggaattaaaaaagagcaagcaacaacagttactaattattatttaggtaaatttaaagaagatttaagttatcagaatagatacttgcgatttattgcaaaataaa

SEQ ID NO: 266195 - DNA, 607 bp, Unknown
  Bacterial polypeptide expressing nucleotide sequence isolated from the Sargasso Sea
atgaaattagtaaaaaacgaaagcgatattagacaaggtaaaaaagtttctgacagagaggcagaagaagctattataaaattgttagattggatgggagaagatccatctagagaaggtttgctagaaacaccaaaaagagtagtaaaagcatttaaagaatatttcaaaggttataatgaagatccaaagaaaatattagagaaaacgtttggagatgttgagggttatgatgacatggtaatccaaaaaaatatttcagttcaaagtcattgtgaacatcatatggctccaataattggagttgcacacgtagcatatattcctaaagatagagttgttggtttaagcaagcttgctagagtagtagaagtattttcaaaaagacttcaaacacaagagagacttaccatgcaaattgcaaatgtattaatggaatcattagatgctaaaggagtggcggtatctattgattcaacccatcagtgtatgacaatgagaggtattaaaaaagagcaagcaacaacagtcacaaattattatttaggaaaatttaaagaggatttaagtttccaaaacagatatttaagatttataagtaagtaaa

SEQ ID NO: 266196 - DNA, 379 bp, Unknown
  Bacterial polypeptide expressing nucleotide sequence isolated from the Sargasso Sea
atggttgttcaaaaaaatatttcagtacaaagtcattgtgagcatcatatggctcctattattggaaaagctcatgtagcttatattccaaaagaaagagtagttgggttaagtaaattagcaagagttgttgaagtattttcaaaaagattgcaaacccaggaaagattaactatgcagattgcgaatacccttatggaatctttagatgcaaaaggtgtagctgtaacgatagattccactcatcagtgtatgactatgagaggtattaaaaaagagcaagctacaacagtaacaaactattacttaggtcaatttaaagaagaccttagttatcaaaacagatacctaagatttatcagcataacaaaagattaaa

SEQ ID NO: 266197 - DNA, 565 bp, Unknown
  Bacterial polypeptide expressing nucleotide sequence isolated from the Sargasso Sea
aatgacagaaaaaattgatcatattgaaaaattaaccaaagatcttttgaaaacgattggggaagatcccgaacgtgaaggattattgaaaacacccaaacgtgtgggcaaagcatgggaatatttttctcaagggtactgggaaaacctggatgatatcatcaatgaggcagttttccatgaggattgcagtgaaatagtggtggtaagggatattgaattcttctccatgtgcgaacaccatatgattccctttttcggtcgagcacatgtgggctatttgcctaatggcaaggttatcggattatctaagattcctagaatagtagatatgttttcacggcgacttcaattacaggaacggcttacatctcaagtagccaatacaatccaagatattttagatccgatcggtgttgcggtagtcatggaagggcgtcacctctgcatgcaaatgcggggcgtggaaaaacagaacagttatgcatccacttcggccatgttgggccagtttagaaagtccgccgaaacgcgggcagaattcttgagcatcatcggtaaatga

SEQ ID NO: 266198 - DNA, 580 bp, Unknown
  Bacterial polypeptide expressing nucleotide sequence isolated from the Sargasso Sea
gaaaaaataaaccaagctgtttctgacaaagaagcagaagaggcatttgttaaaattttaaaatggataggtgaagacccttcaagagaaggattattggaaactcctaaaagagtaacaaaggcttttaaagaatattttaaaggttatacggaagatccaaaagaaattttaaataaaacttttggagatgtagatggttatgatgatatggttgttcaaaaaaatatttctgtacaaagccattgcgaacatcatatggctccaataattggtgtagctcacgtagcctatattcctaaagatagagtagtaggtttaagtaaattagctagagttgttgaagtattttccaaaagacttcaaacccaagaaagacttacaatgcagattgcaactacaataatggagtcgttagacgcaaaaggtgttgcggtaagcatagattcaactcaccagtgtatgacaatgagaggaattaaaaaagaacaagcaactacagttactaattattatttaggtaaattcaaagacgatttaagctatcagaatagatacttgagatttattgcaaaataaa

SEQ ID NO: 266199 - DNA, 265 bp, Unknown
  Bacterial polypeptide expressing nucleotide sequence isolated from the Sargasso Sea
gctgggcctgtccaggtcgcccgcatcgtcgacatgttcgcccgccgcctgcagatccaggaaaacctcagccggcagatcgccgaggccatcgagcaggtcaccggcgccctgggtgtcgccgtggtgatcgaagcgcagcacatgtgcatgatgatgcgcggcgtggagaagcagaactcctccatggtcacctcggtgatgctcggcgagttccgcgagaacccggccacccgtggcgagttcctcaatctggttcgctaag

SEQ ID NO: 266200 - DNA, 405 bp, Unknown
  Bacterial polypeptide expressing nucleotide sequence isolated from the Sargasso Sea
tatggcgtttgacaaaacaaaaacggatcctgttctaggaaaaaaagtacacgaacatttaatgttagttggggtagagactccagttattgataatggtctatcacgtaaagaaaaaattgacatgatcgagaacaattttaaagagattgttacaacattgggacttgatttagaagatgatagtctctcagatacaccaaagcgtgttgcaaaaatgtatgttaatgaaattttttggggacttgattacgcagcttttccaaaagtaacagtagtagataacaaaatgcaatataacgaaatggtagtagaaaaaggcatttctgttcaatcttattgtgagcatcatctcgttaacattgatggactggcaacagttggatatattcccaacaacaaggt

SEQ ID NO: 266201 - DNA, 592 bp, Unknown
  Bacterial polypeptide expressing nucleotide sequence isolated from the Sargasso Sea
taataatcaaaatccgaagaagatttctgacaaagaagcagaggaagcttttaagactattttgtcgtggatgggtgaagaccctaatcgtgaaggattattagaaactccaaaaagagttgttaaagcatttaaggagtattttaaaggttataaggaagatcctattcaagttttggataaaacttttggcgatgtagatggatatgatgacatggttattcaaaaaaatatttctgttcaaagtcattgtgaacatcatatggcaccaataattggtaaagctcatgtagcttacatacctaatgaaagagttgttggattaagtaaattagcaagagtagtagaggttttttctaaaagattacaaacccaagaaagattaactatgcagattgcgaatacactaatgcaatctctagatgccaaaggagtagctgttacaatagactcaactcatcaatgtatgactatgagaggcattaaaaaggaacaagctacaacagtcacaaattattatttaggtcaattcaaagaagatttaagttatcaaaatagatatttaaggttaataagtaattcaaaagattaa

SEQ ID NO: 266202 - DNA, 555 bp, Unknown
  Bacterial polypeptide expressing nucleotide sequence isolated from the Sargasso Sea
aagccgaggaagccgtaagacttttaattaggtggatgggtgacgatcctactagggaaggcctgatcgatactccaaagcgcgttataaattcgtacaccgaactttttaatggatataccaaagacccaaaagaaatattggaaagaacttttgaggaaaccaacggttatggggatatcgtattattgaaggatataagagttgaatcttattgcgaacatcatcttatccccattatcgggacagcacacgtcgcctactatcctgaaaatcgcgtcgttggaataagtaagctcgctcgaacagtagaactattttcaaaacgtttgcaaattcaagaaaaattaacttcgcaaattgcaaatgcaattaacgaaacattaaaaccaaaaggcgtagctgtgctgatagaagccgagcacggatgtatgaccacacgtggtgttcacaaacctggagttaatatggttacaaaaacgctactgggatgcttccaggaaaacaaccatttacggtccgaatttttatctttgataaaaaaacaagcctaat

SEQ ID NO: 266203 - DNA, 523 bp, Unknown
  Bacterial polypeptide expressing nucleotide sequence isolated from the Sargasso Sea
gatgggtgaagatcctaatcgtgaaggattgttagaaactccaaaaagagttgttaaagcatttaaggagtattttaaaggttataaggaagatcctattcaagttttagataaaacttttggcgatgtagatgggtatgatgacatggttattcaaaaaaatatttctgttcaaagtcattgcgaacatcatatggcaccaataattggtaaagctcatgttgcttacatacctaatgaaagagttgttggattaagtaaattagcaagagtggtagaggttttttctaaaagattacaaactcaagaaagattaactatgcaaattgcgaatacattaatgcaatctttagatgcaaaaggggtagctgttacaatagactcaactcatcagtgtatgactatgagagggattaaaaaagaacaagctacaacagtcacaaattattatttaggtcaattcaaagaagatttaagttatcaaaatagatatttaaggttaataagtaattcaaaagattaa

SEQ ID NO: 266204 - DNA, 536 bp, Unknown
  Bacterial polypeptide expressing nucleotide sequence isolated from the Sargasso Sea
tttgtcatggatgggagaagatccaaaaagagaaggattgttggaaacccctaaaagagttgtaaaagcatttaaagaatattttcaaggctataatgaagacgcaaaaaaagtattagataaaacttttggtgatgtagaaggttatagcgatatggtggttcaaaaaaatatttcagtacaaagtcattgtgaacatcatatggctccaattattggaaaagcacatgttgcctatataccaaatgagagagttgtgggattgagtaaaattgcaagagtagttgaaatattttcaaaaagattacaaacgcaagaaagattaactgttcagattgcaaattctctaatggaagcgttagatgcaaaaggtgtagctgttacaatagattcaactcatcagtgtatgactatgaggggtattaaaaaagaacaagcaacaactgtaactaatttttacttaggtcaatttaaagaagatctgagttatcaaaatagatatttacgatttatcagcactgagttaaaagactagt

SEQ ID NO: 266205 - DNA, 607 bp, Unknown
  Bacterial polypeptide expressing nucleotide sequence isolated from the Sargasso Sea
atgaagttagttaaagacgcagttaaaagctcatcaaaaaagcctgaagttaccgataaacaggcagaagaggcatttaaaactattcttaaatggataggggaagatccaaacagggaaggacttatcgagacgcctaagagagtaattaaagcattcaaggaatattttaaaggttatcatcaagacgctgaagctgatttatccaaaacgtttggagacgtggagggttatgacgatatggtagtggaaaaaaatataacacttgaaagtcattgtgagcatcatatggcacctataattggagtagcgcatgttgcttatattccaaataaaaaagttgtaggattaagcaaattagcaagaacggtagaaatattctcaaaaagacttcaaactcaagagagacttacaatgcagatcgctaaaactttaatgaattcattagacgctaaaggagtagcagtcactattgatgctgctcatcaatgcatgactatgagaggtgtcaaaaaagagagagcgacaacagttactaattattttttaggttctttcagagaagacttaggtattcaaaatagatatttaagatatattaaaaaat

SEQ ID NO: 266206 - DNA, 613 bp, Unknown
  Bacterial polypeptide expressing nucleotide sequence isolated from the Sargasso Sea
catgacgcattcaggcgtagcaaacgagaaagtcaaagatctaagttcagccgcaaaatcaatcaaacataaacgcattgaaaatgctgttgaagaaatcctggatgccttaggactggacctgagcaatgacagccttcgtgaaactccgacaagggttgccaaaatgtatctgaatgaaattttcggaggactcaatgaagatatctcttctgtgctgaaatccttcgaaaatagttatggatacaaaggaatggtgattgaaaagaacatcccctttcaaagtcactgcgaacatcacctccttccaatcctgggtcgtgccgctatcgcttacattcctgaagacagggtactcggtttaagcaaattgaaccgaattctgcatcatttcgcacgtcgtccccaggttcaggaacgcttgaccatgcaggtggcagatatgctcagtgaaactctgcaaaccgacgatgtggcagtcattctggaagcacgtcacctttgcgtagagatgcgcggagtgcgtgacagtggtgctgaaaccagcaccatggtattgagaggtaggtttgagaaggaactgaaagaggattttttcagacagttgaactga

SEQ ID NO: 266207 - DNA, 606 bp, Unknown
  Bacterial polypeptide expressing nucleotide sequence isolated from the Sargasso Sea
aattagttaaagacattaataaggagtcatcaaataaacctcaagtcagcgataaagaggctgaagaggcaataaaaaaattattagcctggatcggcgaagatccaagtagagaaggcttacaagagactccaaaaagagtagtgaaagctttcaaagagtattttaaaggatatcatcaaaacgcagaagaggatttatcaaagactttcggcgatgttgaaggttacgatgatatggtaattgaaaaaaatataactttagaaagtcattgtgagcatcacatggccccaattataggcgttgctcatgtttcttatattccaaataaaaaggttgtaggtcttagcaaattggcaagaacagttgaaattttttcaaaacgattgcaaacgcaagagagattgacgatgcaaatagcaaaaacgcttatgagtgctttggatgcaaagggcgttgcagttacaattgatgcagctcatcaatgcatgactatgcgaggtataaaaaaagagagagcaacaactgttacaaattattttttaggatcttttaaggaagatttaagtattcaaaatagatacctgaaatatattggaaaataga

SEQ ID NO: 266208 - DNA, 295 bp, Unknown
  Bacterial polypeptide expressing nucleotide sequence isolated from the Sargasso Sea
accaaatgagagagttgtaggattgagtaaaattgcaagagtagttgaaatattttcaaaaagattacaaacacaagagagattaacagttcaaatagcaaatactctaatggaagcgttagatgcaaaaggcgtagctgttacaatagattcaactcatcagtgtatgactatgaggggtataaaaaaagaacaagcaacaactgtaactaatttttacttaggtcaattcaaggaagatctgagttatcaaaatagatatttacgatttattagcactgagttaaaagactag

SEQ ID NO: 266209 - DNA, 621 bp, Unknown
  Bacterial polypeptide expressing nucleotide sequence isolated from the Sargasso Sea
caattgaaacaccgttaagagaagatgcttttgaactttcagatcaagaaaaaatagatttaataaaaaagaatgtaggcgaaatactccatacacttggtatggacatgactgatgatagccttaaaggaacgcctttaagagttgcaaaagcatatgttaatgaaatatttggaggtcttaatcctaaaaatttaccaaaaggttctacgtttgataataaatataaatacaaagaaatgttagttgaaaaaaacataactgttttttcaacttgtgaacaccatttattaccaatatatggaaaagctcatgttgcttatttttccaatggaaatgttattgggctttcgaaaatgaatagaattgttgactattatgccagaagaccacaagtacaagaaagattgaatattcaaattgttagaaaattacaagattttctagacacagaggatgtagcttgtgttatagatgcaaaacatatgtgtgttaattcaagagggattagacacattgattgcagtacagtaaccggtgaatttggtggtaaattcaaggacaaatcaataaaaagagaatttttagattatattcgttctgatagccaattaaaataat

SEQ ID NO: 266210 - DNA, 513 bp, Unknown
  Bacterial polypeptide expressing nucleotide sequence isolated from the Sargasso Sea
taggagaagatccaaacagagaaggtcttgttgagacaccaaaaagagtaattaaagcatttaaggaatattttaaaggttatcatcaagatgctgaagctgatttatccaaaacgtttggagacgtggagggttatgacgatatggtagtggaaaaaaatatcacacttgaaagtcattgcgagcatcatatggcaccaataattggagtagcgcatgttgcttatattcctagcaaaaaggttgtaggactaagtaaattagcgagaacggtggaaatattctctaaaagacttcaaactcaagaaagacttacaatgcagatcgctaaaactttgatgaattcattagacgctaaaggtgtggcggttactattgatgctgcacatcaatgtatgactatgagaggtgtcaaaaaagagagagcgacaacagtgactaactattttttaggtacttttagagaagacttaggtattcaaaatagatacttaagatatattaaaaaataaa

SEQ ID NO: 266211 - DNA, 526 bp, Unknown
  Bacterial polypeptide expressing nucleotide sequence isolated from the Sargasso Sea
tatgaaaatagttaaaaacttaaacactacaattttaaaggaaaaatcagaagtttctgataaagaagctcaagaagcttttagaactattttaagatggatcggtgaaaatcctgacagagaagggttacgtgaaacaccaagaagggtaacaaaggcttttaaagaatattttaaagggtacaaacaagaaattacttcagaattgttaaaaacttttggcgacgtaaatggttatgatgatatggttctgcaaaaaaatatttcagtgcaaagtcattgcgaacatcatatggctccaattataggtgtggctcacgtggcttatcttccaaacaaaagagttgttggtttaagtaagcttgctagagttgtagaagtattttcaaaaagattacaaactcaagagagattaacaatgcaaatagcagaaactttgatgaaaggtttagatgcacacggagttgctgttacaatagactccacacatcagtgtatgacaatgagaggaattaaaaaagaaaaa

SEQ ID NO: 266212 - DNA, 496 bp, Unknown
  Bacterial polypeptide expressing nucleotide sequence isolated from the Sargasso Sea
gaaggattagcttcaactcctaaaagagttgtaaaagcctttaaagaatatttcaaaggctatactcaagatccaaataaatttctatctaaaacttttacagaagtggaaggttatgatgatatggtcatagagaaaaatatcagtgttcaaagtcattgtgaacatcacatggcgcctatcattggctatgcccatgttgcgtatattccatctgataaagttgttggtttaagtaagctagcaagagtagtagaagtgtattctaaaagactacaaacacaagaacgtttaacaatgcaaatagcaaaaacaataatggatgttttgcaacctcgtggtgtcgctgtaactattgatgcatctcatcagtgtatgacaaacagaggtataaaaaaagaaaacgcgacaacagtaactaattattttcttggtgcgttcaaagacgatttgagttttcaaaatagatacttaagatatattaataaagaatagc

SEQ ID NO: 266213 - DNA, 479 bp, Unknown
  Bacterial polypeptide expressing nucleotide sequence isolated from the Sargasso Sea
aagaagagtagcaaaggcatttaaagaatattttaagggatacaatcaggaaattaattcggaaatattgaaaacctttggagatgtaagtggttacgatgatatggtgcttcaaaaaaatatttcagttcaaagtcattgcgaacatcatatggcacccattattggtgttgctcatgtcgcatacttaccaaataaaagagtagtcggtctaagtaaacttgcgagagttgttgaagttttttctaaaagattacaaacgcaggaaagattgacaatgcaaatcgcaaataccttaatgaacggtctagacgcccatggagttgcagtaactatagattcaacacatcaatgtatgacaatgagaggaattaaaaaagaaaaagcaacgacaattacaaattattttttaggtaaatttaaaagtgatttaagcatccagaatagatttttaaaatttatttcagataaagattaat

SEQ ID NO: 266214 - DNA, 502 bp, Unknown
  Bacterial polypeptide expressing nucleotide sequence isolated from the Sargasso Sea
gaagggccttttagaaactccaaaaagagtaatgaaggcatacaaagaatattttgttggatataaagtcgaccctactaaaattttagataaaacttttggagatgtcgacggttatgacgatatggttatacagaaaaatatttctgttcaaagtcattgcgagcatcatatggctccaattattggaaaagctcatgttgcttatattccaaaagaaagagttgtaggtttaagtaaacttgcaagagttgtggaagttttttcaaaaagactgcaaacacaagaaagattaacaatgcaagtagctaaaactttaatggagtctttagatgcaaaaggtgtagcagtaacaatagactctactcatcagtgtatgactatgagaggaattaaaaaagaaaatgcaacaactgtaacaaattattatttaggtcaatttaaagaggaccttagttatcaaaatagatatttaagatttataagtatacctaaagattaa

SEQ ID NO: 266215 - DNA, 469 bp, Unknown
  Bacterial polypeptide expressing nucleotide sequence isolated from the Sargasso Sea
atgaaattagtaaaagattcagatcaattaaggaaaaataagagttcaatttccgatgaaaaggctcaagaggctattaaaactataattgaatggataggtgaaaatcctgatagagaaggtttaaaatcaacacctaaaagagttattaaagcgttcagagaatatttcaaaggttatactgaagatgctactaaatttttgtctaaaacttttacagaagttgaaggttatgatgatatggttattgaaaaaaatattagtttccaaagtcattgtgaacatcatatggctccaattattggagttgcgcatgttgcatacattccatcaagtaaagttgtaggattgagtaaattagcaagagtcgttgaagttttttcaaaaagattacaaacacaagaacgtctaacaatgcaaattgcaaaaacgattatgaatgttttgcaacctagaagggtgttgccgt

SEQ ID NO: 266216 - DNA, 538 bp, Unknown
  Bacterial polypeptide expressing nucleotide sequence isolated from the Sargasso Sea
acaatattatcttggatgggtgaggacccaaatagagaaggattattagaaactcctaaaagagtcgttaaagcctttaaagaatattttaaaggatacaaagaagatccttctaagattttagataaaacctttggagacgtagatggttatgacgatatggtaattcaaaaaaatatttccgttcaaagtcattgtgaacatcatatggcacctattataggtaaagcccatgtagcatatattccaaaagatagagttgttggtttgagtaagttagctagagtagtggaagttttttcaaaaagattacaaactcaagaaagattaactatgcagattgcgaataccttaatggagtctttagatgcaaaaggagtagctgtaacaatagactcaacccatcaatgtatgactatgagaggtataaaaaaagaacaagctacaactgtaacaaattattatttaggtaaatttaaagatgatcttagttatcaaaatagatacttaagatttattagtatttcaaaagattaaa

SEQ ID NO: 266217 - DNA, 576 bp, Unknown
  Bacterial polypeptide expressing nucleotide sequence isolated from the Sargasso Sea
tgaataaagacaaagtcgaagaaggtatcaagatgatgctggaggggttgggtgttgatttaaatggatcccatgtcaaagatacccccaaaagagcaacaagagcatggactaatgaactatgttcaggtctgggagaacagtcttttgaattaacgacttttgacatcgaacctgattatgaaccgagcatggtggtgctccagcatatcccggtcaaatccttatgtgcccatcatctgcttccttttgtcggagaggcaacggtggcctacataccaaataagatgctttgcgggctttcgaaactggccagagtcgttgactatttcgcgagacgtccccaggtccaggaaaagctaacccatgacattgcaaaatatttacgcagtcagctcgacccccagggtgtcggtgtgatcatcaaagccaaccacatgtgcatgcaaatgaggggagtcaatcatgacggaacgatgaccaccagctctctgaaaggaactttcatcaaggaaggtccggttcgagctgagtttatggcccttgcccattcccaaaccttaaagaaagtctagg

SEQ ID NO: 266218 - DNA, 604 bp, Unknown
  Bacterial polypeptide expressing nucleotide sequence isolated from the Sargasso Sea
atgaattttctagatccaaaaactaacaaaactttttccaaaccaacaaaaaaagaggcggaggaagcggttaaagtactgctaagatgggctggagatgatccctccagggagggtttgcaggatacgccgcgaagagtagtgaaggcatacaaggagtggttcgcaggttacgatcaggatccaaaaaaattgctttctcggacatttaaagaagtggaaggctactctgaaatcgtcacattaggaaatataaggtttgagagcttttgtgagcatcatctagcaccaattatcggtaaagcgcatgtggcttaccttccttccagccggatagttggaatttcaaaaatagcgagactggtaaatgcgtactcaaagcggttgcaagttcaggaaaaaatgacctctcaaattgctaatagtttgcaggaaattcttaaacctaagggcgtaggtgttttgcttgaaggagagcatcattgtatgtgtactcgaggagttcacaaggatagttctaagatggtcacaagcgcatttaccggagattttaaggatcgagcagaaattagggatgaattttttagactgattaatcaataaa

SEQ ID NO: 266219 - DNA, 601 bp, Unknown
  Bacterial polypeptide expressing nucleotide sequence isolated from the Sargasso Sea
atggttaaagatattcaaaaacaacaatctacctccaaaattactgataaagaggctgaagaagctataaaaacaattttgaaatggatgggtgaagacccaaatagagagggtttattagaaactcctaaaagggtggttaaagcatttaaagaatattttaaaggatactcagaagatccaaatcttgtactagaaaaaacttttggtgatgtagaaggttatagtgatatggtagttcaaaaaaatatttctatacaaagtcattgcgaacatcatatggctccaataattggcaaggctcacgtagcatacattccaaaccaaaggattgttggactgagtaaaattgctagagttgtagaaattttttcaaaaagattgcaaactcaggaaagactgactgttcaaatagcaaaaacattaatggaaagtttaggtgcaaaaggagttgcagtaacaatagattcaactcaccattgtatgacgatgaggggaattaagaaagaacaagcaacaactgttacaaatttttatttaggtcaatttaaagacgacttaagttatcaaaatagatatttgcgattcattgcgaaataat

SEQ ID NO: 266220 - DNA, 556 bp, Unknown
  Bacterial polypeptide expressing nucleotide sequence isolated from the Sargasso Sea
aatgcctaaaaacgaagattttaatttagaaattggtgataatcatattggaacctctactaacacacctctaagagctgatgcttttgtactctccgacgaagaaaaaattgagtctattaaaaaagatgtagaaaacattttaaacactcttggaatggatttaacagacgatagcttaaaaggaactcctaaccgagtggctaaaatgtttgttaaagaaatttttggtggtttaaatccatctaaaaaaccaagttcatctacctttgaaaataaatacaagtataacgaaatgttagttgaaaaaaacattgtcgtttattctacatgtgaacatcatttacttcctattgtgggtagagcgcatgtagcttatatttctaatggaactgttgttggtttgtctaaaatgaatagaattgttgattattttgccaaaagacctcaggttcaagagcgtttaaatattcaaattgtagaagaattgcagaaagttttaggaactgaagacgttgcttgtgttattgacgctaaacatttgtgcgtaaatcaa

SEQ ID NO: 266221 - DNA, 304 bp, Unknown
  Bacterial polypeptide expressing nucleotide sequence isolated from the Sargasso Sea
atagctcacgtagcatatattcctaaagatagagtagttggtttaagtaaactagctagagtagtcgaagtattttcaaaaagacttcaaactcaagaaagacttacaatgcagatagctacaacattaatggaatcattagatgctaaaggtgttgctgtaagtatagattcaactcatcagtgtatgactatgagaggcattaaaaaagaacaagcaacaacggttactaattattatttaggtcaatttaaagaagatttaagttatcagaatagatacttgcgatttattgcaaaataaa

SEQ ID NO: 266222 - DNA, 289 bp, Unknown
  Bacterial polypeptide expressing nucleotide sequence isolated from the Sargasso Sea
cttatattccaacaaaaaggttgttggtctaagtaaattagctagaaccgtagaagtttatgctaagagattacaaacccaagaaagattaaatatgcaaatagctaaaactttaatgagtggattagaagcgaaaggtgtagccgtaactattgatgcttcccatcagtgtatgactatgagaggtattaaaaaagaaaaagcgatgacactcacaaattattttttaggaacatttaaagaagatctttcacttcaaaatagatatttaaagcatatcggaaaataa

SEQ ID NO: 266223 - DNA, 535 bp, Unknown
  Bacterial polypeptide expressing nucleotide sequence isolated from the Sargasso Sea
aattttaacttggatgggagaagatcctaacagagagggacttttagaaactcctaaaagagttgtaaaggctttcaaagagtattttaaaggctataaagaagatccaaatcaaattctggacaaaacttttggagatgttgatggttatgatgacatggtggtacaaaaaaatatttctgttcaaagtcattgcgaacatcatatggcaccaataattggaaaagctcacgtagcctatattccaaaagaaagggtagtaggtttgagtaaattagcaagagttgtggaagttttttctaaaagattacaaactcaagagagacttactatgcaaattgcgaataccttaatggagtctttggatgctaaaggtgtagccgttactattgattcaactcatcagtgtatgacgatgagaggtataaaaaaagaacaagctacaactgtaacaaattattatttaggtcaatttaaagaggatctaagttatcaaaatagatatttgagatttataagcatcacaaaagattaa

SEQ ID NO: 266224 - DNA, 322 bp, Unknown
  Bacterial polypeptide expressing nucleotide sequence isolated from the Sargasso Sea
tatggcacctattattggtatcgcgcatgttgcttatattccaaatgagagagttgttggactaagtaaaattgcaagagttgtggaagttttttcaaaaagacttcaaacacaggagagattaacagttcaaatcgcaaatacattaatggagtcactagatgcaaaaggcgttgcggtaacaattgactcaactcaccagtgtatgactatgcgaggtattaaaaaggaacaagccacaactgttactaatttttatttaggtcaatttaaagacgatcttagttatcagaatagatatttgcgatttattgcaaaatag

SEQ ID NO: 266225 - DNA, 610 bp, Unknown
  Bacterial polypeptide expressing nucleotide sequence isolated from the Sargasso Sea
atgaaatctgaaaaaaataaaattatagattttaaagatagctcaataatcacagataaagaagcagaggatgctatcaaaactattttaaaatggattggtgaagagccttcaagagaaggactaattgaaactcctaaaagagttacgaaagcttttaaagaatattttaaaggttataaagaagatccatacaaaatattggaaaaaacatttggagatgttgagggttacgacgacatggttgtccaaaaaaatatttcagtccaaagtcattgcgaacatcatatggcaccaattattggcactgcacacgtagcatatattcctagaaatagagtggtaggtttaagtaaattagcaagagtagtagaagtattttcgaaaagacttcaaacccaagagagactaacaacccaaattgctaaaactttaatggaaactttggatgctaaaggtgttgcagttacaatagactcaacccaccagtgtatgaccatgagaggaattaaaaaagaacaagcgacaaccgtaacaaatttttacttagggttatttaaagaagacctcagctatcaaaatagatatttgcgatttatcagtaaataat

SEQ ID NO: 266226 - DNA, 503 bp, Unknown
  Bacterial polypeptide expressing nucleotide sequence isolated from the Sargasso Sea
tcgtgaaggacttattgaaacacctagaagagttgttaaggcatttaaagaatactttaaaggatataaccaggaacctacaacagaattaaaaaaaacttttggggatgtcgaaggatacgatgatatggttttgcaaaaaaatatatctgtctcaagtcattgcgaacatcatatggcacctattattggtgttgctcatgttgcatacattccaaacaaaagaatagttggactaagcaagttagcacgtactgtggaagttttttcaaagagactacaaacacaagaaagactaactatgcaaattgcaaatactttaactaaaggtcttgatgcaaaaggagttgcagtaacaataaatgcaacacatcagtgtatgactatgcgaggaatcaaaaaagaaaaagctactacggtaacaaattattttaccggtaaatttaaagaagatttaggttttcaaaatagatttttaaaatttatttctgaaaaaaattaat

SEQ ID NO: 266227 - DNA, 504 bp, Unknown
  Bacterial polypeptide expressing nucleotide sequence isolated from the Sargasso Sea
catgaaattagttaaaaatgaaaatcagaagaagatagactctatctcggataaagaagctgaagaagcatttataaaaattttacaatggataggagaagatccttcaagagaaggattattagaaacacctaaaagagtcacaaaagcatttaaggaatattttaaaggatacaaagaagatcctaaagaaattttaagtaagacctttggtgatgtaaacggatatgacgatatggtaattcaaaaaaatatatcagttcaaagtcattgtgaacatcatatggcaccaatcataggcgtagctcatgtagcgtatattccaaaagatagagttgttggtttaagtaagttagcaagagtagttgaagtgttttctaaaagactacaaactcaagaaagacttacaatgcaaattgcaacaacaataatggagtcactggacgcaaaaggtgttgcggtaagtatagattcaactcaccagtgtatgactatgaggggaaa

SEQ ID NO: 266228 - DNA, 616 bp, Unknown
  Bacterial polypeptide expressing nucleotide sequence isolated from the Sargasso Sea
atgaaacttgttaaaaatactgaagataataaagaattaaaaaaagtctctgataaagaagctgaagaagcttttaaaacaattttatcatggatgggtgaagaccctaatagagaaggtttattagagacgccaaaaagagttgtaaaagcatttaaagaatattttaaaggatacagagaagacccaaatcaaattttagataaaacttttggtgatgtcgaagggtatgatgatatggttgttcaaaaaaatatttctgttcaaagtcattgcgaacatcacatggcaccaattattggtaaagcacatgttgcatatattccaaaagacagagttgtaggtttaagtaaattagctagagttgttgaagtattctctaaaagacttcaaactcaagaaagattaactatgcaaattgcgaatacattaatggagtctttagatgcaaaaggagttgcggtaacaattgattcaactcaccaatgtatgactatgcgaggaataaaaaaagaacaagctacaacagtaacaaattattatttaggtcaatttaaagatgatcttagttatcaaaatagatatttaagatttattagtatagcaaaagaataaa

SEQ ID NO: 266229 - DNA, 397 bp, Unknown
  Bacterial polypeptide expressing nucleotide sequence isolated from the Sargasso Sea
gatgtaaatggatacgacgatatggtttgcaaaaaaaatatatccatacaaagtcattgcgaacatcatatggcaccaattattggtgtcgcacatgttgcttatttaccaaacaaaagagttgtcggtttaagcaaactagctcgtgtagtagaagtttattcaaaaagacttcaaacccaggaaaggttaacaatgcaaatagctgatactttaatgaagggtttagacgcacatggtgttgcagtgacaattgactcaacacaccaatgtatgacaatgagagggattaaaaaagagaaggcgactactataacaaattattttttgggcaaatttaaaaatgatttaagtttccaaaatagatttttaaaatatatatcagacaataattaat

SEQ ID NO: 266230 - DNA, 471 bp, Unknown
  Bacterial polypeptide expressing nucleotide sequence isolated from the Sargasso Sea
aaagggtagtaaaagcctttaaagaatattttgggggttacgataaagatgccatacagatgttacagaaaacatttggagatgtagaaggttacgacgatatggtagtagaaaaaaatatttcgttggaaagccattgcgaacatcacatggcaccaataattggtgtagtgcatatagcgtatattccaaataaaaaggtagtaggtttaagcaaacttgcaaggaccgttgaggtattctataaaagacttcaaactcaagaaagacttaacatgcaaatagccaaaactttgatgaaaggcttggaagcaaaaggcgtagcagtaacaattgatgctgctcatcaatgtatgacaatgagagggataaaaaaagagagagcaacaacagtcaccaattattacttagggtcatttaaagaagatttgtcattacaaaatagatatttaagatatatagcaaaataaa

SEQ ID NO: 266231 - DNA, 310 bp, Unknown
  Bacterial polypeptide expressing nucleotide sequence isolated from the Sargasso Sea
catggttgcctatataccaaatgagagagttgtgggattaagtaaaattgcaagagtagtcgaaatattttcaaaaagattacaaacacaagagagattaacagtacagatagcaaacagcttaatggaagcgttagatgcaaaaggtgtagctgttacaatagattcaacccatcagtgtatgactatgaggggtattaaaaaagaacaagcaacaactgtaactaatttttacttaggtcaatttaaagaggatctgagttatcaaaatagatatttacgatttatcagcactgagttaaaagactag

SEQ ID NO: 266232 - DNA, 583 bp, Unknown
  Bacterial polypeptide expressing nucleotide sequence isolated from the Sargasso Sea
agaaattaaaaaagtttccgataaagatgcagaggaagctttcaaaacaattttaacttggatgggagaagatcctaacagagagggacttttagaaactcctaaaagggttgtgaaggcttttaaagagtattttaaaggttataaagaagatccaaatcaaattctggataaaacttttggagatgttgatggttatgatgacatggtggtacaaaaaaacatttctgttcaaagccattgcgaacatcatatggcaccaataattggaaaagctcatgtagcctatattccaaaagaaagagtagttggtttgagtaaattagcaagagttgtagaagttttttctaaaagattacaaactcaagaaagacttactatgcaaattgcgaataccttaatggagtctttggatgctaagggtgtagccgttactattgattcaactcatcagtgtatgacgatgagaggtataaaaaaagaacaagcaacaacagtaacaaattattatttgggtcaatttaaagaagatctaagttatcaaaatagatatttaagatttataagcatcacaaaagattaa

SEQ ID NO: 266233 - DNA, 511 bp, Unknown
  Bacterial polypeptide expressing nucleotide sequence isolated from the Sargasso Sea
catgaaattagttaaagatatagataataatgaaaattctaaaaagatctcagacaaggaagctgaagaagcatttaaaactattttagcttggatgggtgaagatccaagcagagaggggttattagagacgccaaaaagagttgttaaggcatttaaagagtattttaaaggatataaggaagatcctattcaagttctagataaaacttttggtgatgtggatgggtatgatgacatggtcattcaaaaaaatatttctgttcaaagccattgtgaacatcacatggcacctatcattgggaaagcccacgtagcttatattcctaatgaaagagttgttgggttaagtaaattagcaagagttgtagaagttttctctaaaagattgcaaactcaggaaagattaaccatgcaaattgcgaatacactaatgagggctttggatgctaaaggagtagcagtgacaatagactcaactcatcagtgtatgactatgagaggaattaaa

SEQ ID NO: 266234 - DNA, 616 bp, Unknown
  Bacterial polypeptide expressing nucleotide sequence isolated from the Sargasso Sea
catgaagttagttaaagacatagataataatcaaaattcaaaaaaaatttctgataaagaagcagaagaagcttttaaaactattttatcatggatgggtgaaaaccctaatcgtgaaggattattagaaactccaaaaagagttgttaaagcctttaaggagtattttaaaggttataaggaagatcctgttcaagttttagataaaacttttggagatgtggatggttatgatgacatggttattcaaaaaaatatttctattcaaagtcattgtgaacatcatatggcaccaataattggtaaggctcatgtagcttacatacctaatgaaagagttgtaggattaagtaaattagcaagagtggtcgaggttttttctaaaagactacaaactcaggaaagattaactatgcagattgcgaatacactaatgcaatctttagatgccaaaggggtagctgttacaatagactcaactcatcaatgtatgactatgagaggtattaaaaaggaacaagctacaacagtcacaaattattatttaggtcaattcaaagaagatttaagttatcaaaatagatatttaaggttaataagcaattcaaaagattaa

SEQ ID NO: 266235 - DNA, 445 bp, Unknown
  Bacterial polypeptide expressing nucleotide sequence isolated from the Sargasso Sea
tagtggattagacccaaaaaataagccaaaagcctcaaccttccaaaataagtacaaatatggtgaaatgcttgtagagaaaaatattactcttttttcaacttgtgaacaccatatgctacctattattgggaaggcacatgtcgcttatatatcaaatggaactgtggttggtttatcaaaaatgaatcgaatagttcaatactacgcacaaagaccacaagttcaagaaaggcttaccttacaaatagtagaagaaatgcaaaatgtcttaaaaactaaagatgttgcttgcgtaattgatgctaaacatatttgtattaattcaagaggagtttgtgatccaaattcaagtaccataacatctgagtttgatggtgctttcaaaaatgagggaagaaaaaatgaatttttagattacattaaaattgaaacagagttttaa

SEQ ID NO: 266236 - DNA, 607 bp, Unknown
  Bacterial polypeptide expressing nucleotide sequence isolated from the Sargasso Sea
tatgaaattagtaaaagatacagacaaaaaccctattaaaaaagaggttagcgataaacaggctgaggaagcctttagaactattttaacctggataggagaagatccatatagagagggtttagttgagacaccaaaaagaatagtaaaagcttttaaagaatattttcaaggttacaaacaagatccttctcaagaattaaagaaaacatttggtgaagtagaaggttatgacgatatggtagtcgagaagaatattacatttcaaagtcactgcgaacaccatatggcaccaataattggggtagtacatattgcttatcttcctaaagataaagttgtaggattaagtaagttagctcgtacagtagaaattttttctaagaggctacaaacacaagaaagattaaccatgcaaattgccaaaacattaatggattctcttaatgctagaggagtggctgtaactatcgatgcgtctcatcaatgtatgacaatgcgaggtataaaaaaagaaaaatctactacagtaactaattactttttaggcacatttaaagatgatcttagttatcaaaatagatatttgagatatattgctaaatga

SEQ ID NO: 266237 - DNA, 284 bp, Unknown
  Bacterial polypeptide expressing nucleotide sequence isolated from the Sargasso Sea
agtcgtgggattgagtaaaattgcaagagtagttgaaatattttcaaaaagattacaaacacaagaaagactgactgttcaaatagcaaacactctaatggagtctttagatgcaaaaggtgtagctgttacaatagattcaactcatcagtgtatgactatgagaggtattaaaaaggaacaagcaacaacagtaacaaatttttacttaggtcaatttaaagaggatctaagttatcaaaatagatatttacgatttatcagcactacgttaaaagactagt

SEQ ID NO: 266238 - DNA, 604 bp, Unknown
  Bacterial polypeptide expressing nucleotide sequence isolated from the Sargasso Sea
atgaaattagaaaaaaacgaaaacctaaaaaacatcagctctgtatcggataaggaagcagaagaagcattcataaaaatattaaaatggataggtgaggatccttcgagagaaggattaatagaaacacccaaaagagtaacaaaagcttttaaggagtatttcaaagggtacaaagaagatcctaaagaaattttaagaaaaacttttggagatgtaaacggctatgacgatatggtagtacaaaaaaatatatccgttcaaagtcattgcgaacatcatatggctccaattatcggaattgcacatgtagcatatattccaaaagatagagttgtgggtttaagtaaattagcaagagtggttgaggtattttctaaaagattacaaacacaagaaagactaactatgcaaatagcctcaacattaatggaggcattagatccaaaaggagtagcagtaacaatagattcaactcatcagtgtatgacaatgagaggaattaagaaagaacaagcaacaactgttacaaattattatttaggtaaatttaaagacgacttaagttatcaaaatagatatttaagatttgtaagtaagtaat

SEQ ID NO: 266239 - DNA, 610 bp, Unknown
  Bacterial polypeptide expressing nucleotide sequence isolated from the Sargasso Sea
gatgaaatctgaaaaaaataaaattgtcgattttaaagagagtaccactatatctgacaaagaagctgaagaggctttcataaaaatacttaaatggattggagaagatccaactagagaaggactaatcgaaactccaaaaagagttacaaaagcatttaaggaatactttaaaggatataaagaggatccgaataaaattttagacaaaacttttggagatgtagacggctatgatgatatggttgtgcaaaaaaatatctcagtgcaaagtcattgtgaacatcatatggcgcctattataggaatagcgcatgttgcatatatacctaatgagagggttgtaggattaagtaagcttgcaagagtagttgaagtattttcaaaaagactccaaacccaagagagattaacaatgcaaattgctaccactttaatggaaactttagatgcaaaaggcgtagcagtaactatagactcaactcaccagtgcatgactatgcgtgggataaagaaagagcaggctaccacagttacaaattattatcttggtcaatttaaagaagacttaagttatcaaaatagatatttgcgattcataagcaaataa

SEQ ID NO: 266240 - DNA, 604 bp, Unknown
  Bacterial polypeptide expressing nucleotide sequence isolated from the Sargasso Sea
catgaaattagtaaaaaatgaaaatcaaaaaaacgtagaaactgtctcagataaagaggcagaagaggcgtttataaaaattctaagatggattggagaagatccaatgcgagagggattactagaaacaccaagaagagtcacaaaagcttttaaagaatactttaaaggttactctgaagatcctaaagatattttaagcaagacatttggagacgtagacggctatgacgacatggttgtacaaaaaaatatttcagttcaaagtcactgcgaacaccatatggcaccaataataggtgtggctcatgtagcctatattccgaaagaaagagttgttggattaagtaaattagctagagtagttgaagttttttctaaaagacttcaaactcaagaaagacttacaatgcagatcgcaaaaacaataatggaatcgttggatgcaaaaggtgttgctgtaagtatagattcaactcaccagtgtatgactatgagaggaataaaaaaagagcaagctacaactgttaccaattattatttaggtaaattcaaagaagatttaagctatcagaatagatacttgcgatttattgcaaaataa

SEQ ID NO: 266241 - DNA, 358 bp, Unknown
  Bacterial polypeptide expressing nucleotide sequence isolated from the Sargasso Sea
tttaaaagatgtaagcttccaagtttttgcgaacatcacttttgccccaattataggaaaggttcatattggctatatcccaaataacaaagtagtagggctatcaaaactcgccagactaattgagatgtttgcaagacgtttacaggtgcaggaaaaaatgactgccgagatcggtaatactttacaaactcacctcgattgtttaggtgtaggggttgtagttgaagctgaacaccactgcatgtgttcaagagggataaaaaaacagggagcggtgatgaaaacgatgcactttaccggtgcaatcctcaatgatttagaaaaaaagaatgagtttatgagatccgtaagctga

SEQ ID NO: 266242 - DNA, 391 bp, Unknown
  Bacterial polypeptide expressing nucleotide sequence isolated from the Sargasso Sea
atgataaacaacgaagaatttttagacgaaataggagataatcatttcagcagtaacgcaaagaaccctttaagagcggatgcatttgatataactgatgaagaaaaaatagaaaaaattaaaaaagatgttgaaagcattctacaaactcttggaatggatttgacagacgacagcattaaaggtactccaaaccgagttgctaaaatgtttgtaaaagaaatttttggcggtcttaacccagcaaaacagccaaaagcttctacttttgataataattacaaatatggcgaaatgcttgtagagaaaaacattacggtttattctacttgcgaacaccatttattgccaattataggacgtgctcacgtggcttatatctcaagcggac

SEQ ID NO: 266243 - DNA, 574 bp, Unknown
  Bacterial polypeptide expressing nucleotide sequence isolated from the Sargasso Sea
tctgcaaaatcaaatttctgaaaaagaggctgaagaggcatttgtaaaaattttgaaatggatgggtgaagacccttcaagagaaggtctaatagaaactccaaagagagtaattaaagcatttaaagaatattttaaagggtataacgaggatccaaaaaaaattttagaaaaaacttttggagatgttgaaggttatgatgatatggttattcaaaaaaatatatcagtacaaagtcattgtgagcatcacatggcaccaataattggagtagctcacgttgcatacattcctaacgatagagtagttggattaagcaaactcgcaagagttgtagaggtattctcaaaaagacttcaaacacaagaacgattaactatgcaaattgctaatacattaatggactcattaaatgctaagggtgtagcagtttcaatagattcaacgcaccattgtatgacaatgagaggaataaaaaaagagcaagctacaactgttacaaattactacttaggaaaatttaaagaagatttaagttgtcaaaatagatatttaagatttattagcaaataa

SEQ ID NO: 266244 - DNA, 559 bp, Unknown
  Bacterial polypeptide expressing nucleotide sequence isolated from the Sargasso Sea
atgaaacttgttaaagacacaaatactgatcaagaagttaaaaaaatttcagataaagatgctgaggaagcttttaaaacaattttatcctggatgggagaagatccatctagggaaggtttattggaaacaccaaaaagagtagttaaggcatttaaagaatattttaaaggttacaaagaggacccaaatcagattttagataaaacgtttggagatgtagatggctacgatgatatggtagttcaaaaaaatatttctgtacaaagtcattgtgagcaccatatggctcctattataggaaaagctcatgtagcctatattccaaaagatagggtcgttggcttaagtaaactagccagagttgttgaagttttctcaaaaagactacaaactcaagagagactaaccatgcaaattgcgaatacattaatggaatcgttagatgcaaaaggtgtagcggtaacaatagactctactcatcaatgtatgaccatgagaggtattaaaaagaaacaagccacaactgtaacaaattattatttaggtcaatttaaag

SEQ ID NO: 266245 - DNA, 367 bp, Unknown
  Bacterial polypeptide expressing nucleotide sequence isolated from the Sargasso Sea
gttgtgcaaaaaaatattttctgttcaaagtcattgtgaacatcatatggctccaattattggagtagctcatgtagcttatattccaaaagatagagtagttggtttaagtaaattagctagggttgttgaagtattttctaaaagacttcaaactcaagaaagacttacgatgcagattgcaacgacaataatggactcgctagacgcaaaaggtgttgcggtaagtatagattcaactcatcagtgtatgactatgagaggtataaaaaaagaacaagcaactacagttacaaattattatttaggtaaattcaaagacgatttaagctatcagaatagatacttgagatttattgcaaaataa

SEQ ID NO: 266246 - DNA, 670 bp, Unknown
  Bacterial polypeptide expressing nucleotide sequence isolated from the Sargasso Sea
atgtcttttgataaaacaaaagctgaccctgctcttgggcaaaaagtacatcaacatttagtctcagttggggtagaaaccccagtcattgataatggcttgtcgcgaaaagaaaaaattgacaagattcaggataactttgatgagatagttacaacattagggcttgatttaaaagatgacagtcttatagatacaccaaagcgtgtagcaaaaatgtatgtcaatgaaattttttggggtctagattacgctgcttttcctaaagtcaccgtggttgaaaataaaatgcaatacaatgaaatgattgtagaaaaaggtatttctgttcaatcttattgtgagcatcacttggttaatattgacgggctggcaacagttgcatatatcccaaacaataaagtgctgggattatcaaagatgaatcgtattgttgaatatttttctagaagaccgcaaatacaagaacgcctcacagagcaaatatatcacgcactgtcctttatcttagaaacagagaatgtagcactaacaattgatgcaaaacatttttgtgtgaagtctagaggagtagaagatactgaatgttcaacagttactagcagactagggggaaacttcaaagcgcaccctgaagtcagagcagaatttttagcattgcttaagtagt

SEQ ID NO: 266247 - DNA, 304 bp, Unknown
  Bacterial polypeptide expressing nucleotide sequence isolated from the Sargasso Sea
tggaaaagctcacatcgcatatattccaaatggaaaaattgttgggctaagtaaaatcccaagaattgtggatgcctatgcaagaagattacaagttcaggaaagactttgtgttgaaattagagactgtattcaaagaaccttaaatccaataggagttgctgttgtgatggattgcgcacacatgtgcatgcaaatgcgaggagtgcaaaaacaaaattcaaccactactactagtgcatttactggcatatttctagaaaatgattcaacacgaaaagaatttattaacttagtaaaataa

SEQ ID NO: 266248 - DNA, 341 bp, Unknown
  Bacterial polypeptide expressing nucleotide sequence isolated from the Sargasso Sea
aagtcactgtgaacatcatatggcgccaattatcggagttgttcacattgcttatattccaaacaaaaaagttgttggtttaagcaagttggctagaacagtagaggtttatgcaaagagattgcaaacgcaggagaggttaaatatgcaaatagcaaaaactttgatgagtggattagaagctaaaggggttgcggtcacaattgatgcatctcaccaatgtatgaccatgagaggtataaaaaaagaaaaagcgatgactctaacaaattattttttaggaacatttaaagaggatctttcacttcaaaataggtatttaaaacatatcgggaaataat

SEQ ID NO: 266249 - DNA, 610 bp, Unknown
  Bacterial polypeptide expressing nucleotide sequence isolated from the Sargasso Sea
atgaaactagtaaaagacattgaaaataaaaaaagtgaaatacaaaaggtatccgacaaagaagctgaagaagctttcgtgaaaatattagaatggatgggtgaagaccctggtagggaaggtttattagaaaccccaaaaagagttgttaaggcatttaaagaatatttcagaggatatactcaagacccaaaaaaagaattagaaaaaacttttggagatgtcgacggttacgacgatatggttattcaaaaaaatatatctgtacaaagtcattgcgagcatcacatggcaccaattatcggtgtagctcatgttgcttatattccaagagaaagggttgtaggtttaagtaaacttgcaagagttgtagaaatttattcaaaaagattacaaactcaagaaagattaaacatgcaaattgcaaaaaccttaatggaagttttagacgcaaagggtgttgcggtttcaatcgattcaactcatcagtgtatgactatgcgtggaattaaaaaagaacaagcaacaacagttacaaactattttttaggtgagtttaaagaagatctgagtattcaaaatagatatttgagatttatagcaaaataat

SEQ ID NO: 266250 - DNA, 607 bp, Unknown
  Bacterial polypeptide expressing nucleotide sequence isolated from the Sargasso Sea
atgaaaaaaaataaactaagaaaacctactcaaagtgaagcagaagaagcggttcgtacattaattaagtgggctggggacgatgtaacacgcgaaggtttacttgacacgccgaaaagagtagccaaggcatacaaggactggttttctggatatgatgaagatccaaaagaaattttaaaaagaacattttcagagacaggtggttacgatgaagtcattatgttaaaagacattagaattgaatcacattgtgaacatcatattgcgccatttattggaaatgctcacgttgcatatcttcctaacaaaagagttgttggcatcagtaaattagcaagaattaccaatatatttgctaagcgaatgcaggttcaagaaaagctaacttctgagatcgcaacatgtatacaggattgtttgaagcctaaaggagttgcagttgtggttgaagcacaacatgagtgtatgaccactagaggagtgcatatgccaggcatatcaatggtcaccagtaaacttctaggaaaatttagaacagatgcctctacacggagagaattctatagtatgctaaatcaaggtcccatacttaaaaaaagctaat

SEQ ID NO: 266251 - DNA, 604 bp, Unknown
  Bacterial polypeptide expressing nucleotide sequence isolated from the Sargasso Sea
atgaaattagttaaaaacgaaaacgaaaatttaaataataaaatatccgataaggaagcagaagaagcctttgtcaaaattttaaaatggataggtgaagatccatctagagagggactagttgaaacccctagaagagtaatgaaagcttttaaagaatattttaaaggatacaacgaagatggaaaaaaagtattagagaaaaccttcggagatgttgatggatatgatgatatggttgtacaaaaaaatatttcagtccaaagtcattgcgaacatcatatggcaccaattattggagttgcacatgttgcctatattcctggcgaaagagttgttggcttaagcaagctagcaagagtagttgaagttttttctaaaagattacaaactcaagaaagattaacaatgcaaatagctacaactataatggaagctttggacgcaaaaggagtagctgtatcaattgattcaactcaccaatgtatgacaatgagaggaattaaaaaagagcaagcaacaacggtcacaaattattatttaggcaaatttaaagaagatttaagttatcaaaatagatatttaagatttattgctaaataaa

SEQ ID NO: 266252 - DNA, 610 bp, Unknown
  Bacterial polypeptide expressing nucleotide sequence isolated from the Sargasso Sea
aatgaaattagttaaagacgcagataaaagcacctcacaaaagcctgaagtttcagataaacaggcagaagaagcattcaaaactattcttaaatggattggagaagatccaaatagggaaggtcttattgagacgcctaggagagtaatcaaagcttttaaggaatattttaaaggttatcatcaggatgctgaagctgatttatccaaaacgtttggagacgttgaaggttatgacgatatggtagtagaaaaaaacatatcacttgaaagtcattgcgaacatcatatggcacctataattggagtagctcatgttgcttatattcctaacaaaaaggttgtaggattaagtaaattagcgagaacggtggaaatattctctaaaagacttcaaactcaagaaagacttacaatgcaaatcgcaaaaactttgatgaattcattaaacgctaaaggagtggcagttactattgatgctgcgcatcaatgtatgactatgagaggtgttaaaaaggagaaagcgacaacagttacaaactattttttaggctcttttagagaagacttaggtattcaaaatagatacttaagatatataaaaaaataa

SEQ ID NO: 266253 - DNA, 628 bp, Unknown
  Bacterial polypeptide expressing nucleotide sequence isolated from the Sargasso Sea
aatgagtaaaattgaaaaaataaataacttaaagaaaattaaagatattagaccatcgcagcaggaagctatggatgcagttaaaacattaataagatgggctggtgataatccacaacgtgaaggtctaaaagaaacgccttcaagagttgttagatcctacaaagattttttttctggttacgatttagatccaagagagattttatctaaaaaatttaaagaagttgaaggttacgatgaaataattattcttaaagatattagactagaatctcattgtgaacaccatatggttccttttgtaggcacagctcatgttggatatttaccaaaaaataaagttgttggattaagtaaacttgcacgattagtcgaggtatttgccaagcgtttgcaaattcaagaaaaacttaccgctcaaatagctaatgcagttgatgaagttttacagccaaaaggtgtaggtgtaattattgaagcctcacatctttgcgttgctacaaggggtattcgtaaacctgaatctagaatggttacaagcagaatgttaggtagttttagaactgatgaaggcactagaaaagaatttctcgatttagtaggatataataaatctaaattttaa

SEQ ID NO: 266254 - DNA, 610 bp, Unknown
  Bacterial polypeptide expressing nucleotide sequence isolated from the Sargasso Sea
atgaaattagtcaaagacttagaaaaatcatcgataaatcagagcggagtcactgataaagaagcagaagatgctttcaagactattctgaagtggataggcgaaaatccagatagagaaggtcttaaagaaacaccaaaaagagtagttaaagcatttaaggagtatttcagtggataccatcaagatgccaacaaagttcttaataaaacttttggagatgttgatggatatgatgacatggttttagaaaaaaatatttcttttgagagtcattgtgaacatcacatggctccaattatcggtgtaatccatatcgcttatattccaaataaaaaagttgttggtttaagtaaattagctagaaccgtagaagtttatgctaagagattacaaactcaagaaagattaaatatgcaaatagctaaaactttaatgagtggattagaagcgaaaggtgtagctgtaactatagatgcttcccaccagtgtatgactatgcgaggtattaagaaagaaaaagcgatgacacttacaaattattttttaggaacgtttaaagaagatctttcacttcaaaatagatatttaaagcatatcggaaaataat

SEQ ID NO: 266255 - DNA, 622 bp, Unknown
  Bacterial polypeptide expressing nucleotide sequence isolated from the Sargasso Sea
atgaaattagtaaaagacacagataacagtaatttagaaacaaaaaaggtttcagataaagaagctgaggaagctatcagaacaattttatcctggatgggagaagatcccaagagagagggactgttggaaacacctaaaagagttgtaaaagcatttaaagaatattttcaaggttataatgaggacgcaaaaaaagtattagataaaacttttggtgatgtggaaggttatagcgatatggtggttcaaaaaaatatttcagtacaaagtcattgcgaacatcatatggctccaattataggtaaagcacatgttgcatatataccgaatgagagagttgtaggattgagtaaaattgcgagagtagttgaaatattttcgaaaagattacaaacacaagagagattaacagttcagatagcaaacagcttaatggaagccttagatgcaaaaggcgtagctgttacaatagattcaactcatcagtgtatgactatgaggggtataaaaaaagaacaagcaacaactgtaactaatttttacttaggtcaattcaaagaagatctgagttatcaaaatagatatttacgatttatcagcactgagttaaaagactagt

SEQ ID NO: 266256 - DNA, 610 bp, Unknown
  Bacterial polypeptide expressing nucleotide sequence isolated from the Sargasso Sea
aatgaagttagttaaagacgcagataaaacatcctcaaaaaagcctgaagtttcagataaacaggccgaagaggcatttaaaactattcttaaatggataggagaagatccaaacagggaaggtcttgttgagacaccaaagagagtaattaaagcatttaaggaatattttaaaggttatcatcaagatgctgaagctgatttatccaaaacgtttggagacgtggagggttatgacgatatggtggtggaaaaaaacatcacacttgaaagtcattgcgagcatcacatggcacctataattggtgtagcgcatgttgcatatattcctaaaaaaaaggttgtaggtttaagcaagttagcgagaacggtggaaatattctccaaaagacttcaaactcaagaaagactcacaatgcagatcgctaaaactttaatgaattcattagacgcgaaaggagtagcagttaccattgatgctgctcatcaatgtatgaccatgagaggtgtcaaaaaggagagagcgacaacagttactaactattttttaggttctttcagagaagacttaggtattcagaatagatatttaagatatattaaaaaataa

SEQ ID NO: 266257 - DNA, 664 bp, Unknown
  Bacterial polypeptide expressing nucleotide sequence isolated from the Sargasso Sea
tatgaaatacaataaattccttgaagaacttgaacaaatagacgcagatcacaaaaagttttcaattgaaactccactaagaaaagacgcgtttgagatgtctgacgatgaaaaaatttctatcatccaaaaaaatgttcaggaaatcttacaaacgttaggtatggatatgaatgatgatagcttgaaaggaaccccactaagggttgctaaagcctatgtaaaagaaatattcggaggtttgaatcctaaaaatttaccaaaagcgtcaacatttgataataagtaccaatacggagagatgttagttgaaaaaaatattactgttttttcaacatgtgaacatcatcttcttccaatatacgggaaagctcatgtagcatacttttctaatggaaatgtaataggattgtctaaaatgaatagaattgtggattactttgctagaagaccacaggttcaggaaagattaaacattcaaatagtaagaaaattacaaaaattcttaaacacagaagatgttgcatgtgtaatagatgcaaaacacatgtgtgtaaattccagaggaattagacatatcgattgtagtacagttactggagaattcggaggaaaatttaaagataagttaataaaaagggaatttttagattatattcgttaa

SEQ ID NO: 266258 - DNA, 619 bp, Unknown
  Bacterial polypeptide expressing nucleotide sequence isolated from the Sargasso Sea
tatgaaattagttaaagatactgacaataaaataattgaaacacctgatgtttctgacaaagaggctgaacaggcatttaaaacaattttgaaatggttgggtgaagatcctaatagagaaggactacttgaaactccaagaagagtaatgaaggcatacaaagaatattttgggggatataaagttgatccgaataaaattttagataaaacttttggtgatgtcgatggttatgacgacatggttatacaaaaaaatatttcagtacaaagtcactgcgagcatcacatggctccaattattggaaaagctcatgttgcttatattccaaaagaaagagttgtaggattaagtaaacttgcaagagttgttgaagtattttcaaaaagattacagacacaagaaagattaacaatgcaagttgctaaaactttaatggagtctttagatgccaaaggtgtagcggtaacaatagattctactcatcaatgtatgactatgagaggtattaaaaaagaacaagcaaccactgtaactaattattatttaggtcagtttaaagaggaccttagttatcaaaatagatatttaagatttattagcataccaaaagattaa

SEQ ID NO: 266259 - DNA, 607 bp, Unknown
  Bacterial polypeptide expressing nucleotide sequence isolated from the Sargasso Sea
atgaaattagtaaaaaacgaaaacgagaaaaatattaataatgaagttaccgacaaagaagcggaagaagcttttgtcaaaatacttaaatggttaggtgaggatcctacaagagaaggtttattggaaactccaaaaagagttacaaaggcatttaaggaatacttcgcaggatacaaagaagatcctaaagcaattttagataaaacatttggcgatgttgaaggctatagcgatatggttgttcaaaaaaatatttcagtccaaagtcattgcgaacatcacatggcaccaattataggaattgctcatgtagcatatattccaaatgaaagggtagttggactaagtaaaatagcaagagtagtagaagtattttcaaaaagattacaaacacaagaaagattaactgttcagatagctaatactttgatggattctttggatgcaaaaggggttgctgtaacaatagattcaactcatcagtgtatgactatgagaggtataaaaaaagaacaagctactacagttacaaatttttatcttggtcagtttaaagacgatttaagttatcaaaatagatatttgcgatttattgcgaaataat

SEQ ID NO: 266260 - DNA, 610 bp, Unknown
  Bacterial polypeptide expressing nucleotide sequence isolated from the Sargasso Sea
atgaagttatttaaagacacagataaaacatcctctaaaaagcctgaagtttcagataaacaggctgaagaggcatttaaaactattcttaaatggataggagaagatccaaatagggaaggtcttgttgagacacctaaaagagtaatcaaagcatttaaggaatattttaaaggttatcatcaagatgctgaagctgatctatccaaaacttttggagacgttgagggttatgacgatatggtggtagaaaaaaatatcacacttgaaagtcattgcgagcatcatatggcacctataattggggtagcacatgttgcctatattcccaataaaaaggttgtaggattgagtaaattagcgagaacagtagaaatattctctaaaagacttcaaactcaagaaagacttacaatgcagattgctaaaactttaatgaattcgttagacgctaaaggagtagcagttactattgacgctgctcatcaatgtatgactatgagaggcgttaaaaaagagagagcaacaacggttactaattattttttaggttctttcagagaagacttaggtattcaaaatagatatttaagatatattaaaaaataaa

SEQ ID NO: 266261 - DNA, 616 bp, Unknown
  Bacterial polypeptide expressing nucleotide sequence isolated from the Sargasso Sea
atgaaaattgttaaaaataccgagaataataatgatcccaagaaagtatctgacaaggatgctgaagatgcatttaaaacaattttaacatggatgggagaagaccctagcagagaaggattgttagaaactccaaaaagagttgtaaaagcctttaaagaatattttaagggttacaaagaggatcctaaccaaatattggacaaaacttttggtgatgttgagggatatgacgatatggttatacaaaaaaatatttcagttcaaagccactgcgaacaccacatggctccaattataggtaaagcacatgttgcatacatcccaaaagatcgagtagttgggttaagtaaattagcaagagtggtggaagttttttcaaagagattacaaactcaggagagattaactatgcaaatagcgaatacccttatgcaatctcttgatgcaaaaggtgttgctgtaacaatagattcaactcatcaatgtatgacaatgaggggcataaaaaaagaacaagcttcaacagtgacaaattattatttaggtcaatttaaagaggatcttagttatcaaaatagatatttaagatttatcagtataagcaaagaataaa

SEQ ID NO: 266262 - DNA, 622 bp, Unknown
  Bacterial polypeptide expressing nucleotide sequence isolated from the Sargasso Sea
tatgaaattagtaaaagacacagacgataaagaattactttctaaagaagtatctgacaaagaagcagagcaagcatttagaactattttatcttggataggtgaagatcctaatagagaaggtttattggaaactcctaagagagtaatgaaagcatttaaagaatattttaaaggatataaggaggatgctagcaaagttttagataaaacttttggtgatgttgaaggttatgatgacatggttgttcaaaaaaatatttcagtacaaagtcattgcgaacatcatatggctccaattataggaaaagcacatgtagcttatattccaaaagaaagagttgtaggtttaagtaagttagcaagagtagttgaagttttttcaaaaagactacaaacacaagaaagacttacaatgcagatagctaatacgttaatggactctttagatgcaaaaggagttgcagtaactatagattcaactcatcagtgtatgacaatgagaggtattaaaaaagagcaagcaacaacagttactaattattatctgggtcagtttaaagaagatttaagttatcaaaatagatatttacgatttatcagcactacgctaaaagattag

SEQ ID NO: 266263 - DNA, 610 bp, Unknown
  Bacterial polypeptide expressing nucleotide sequence isolated from the Sargasso Sea
tatgaaggttaaaaaagatcaagttaatatagatcagaataaaccaacacgtgaagaagctatggaagcagttaaaactcttatttcatgggcaggcgatgatccatatagggaaggtttaattgatactccaaaaagagttgttaaagcttatgaggagttcttcgctggatataataaagatccgatagcaagtttaagtaaaacatttgaggaagttcagggatatgatgacatagtatttctaagagatataaatatagaaacacactgtgagcatcatatggttcctattttaggcgttgctcatgtagcctatttacctaaaaataaagttgttggtatttcaaagctggctagggtaattgatatttttgcaaaaagattacaaactcaagaaacaatgactatgcaaatcattgagactatagacgaagcacttgaccctcttggaaccgcaataatgatagacgcgaaacatcaatgcatgaccactagaggtatcagcaagcctaatgtctcaacagttactacaaaattctcaggattatttgccgaagactctgagctaagggaaagatttattcgcctaactcaggcaaaaggttaa

SEQ ID NO: 266264 - DNA, 604 bp, Unknown
  Bacterial polypeptide expressing nucleotide sequence isolated from the Sargasso Sea
atgaaattagtaaaaaacgaaaataacaaaaatactgagattgtaacagacgaagaagcacgtgaagcgtttgttaaaatcttaaaatggctaggtgaagatccgtctagagaaggtttattagaaactccaaaaagagttacgaaagcattcaaagagtactttaaaggttacaaagaggaccctaaagaaattttaagcaaaacttttggtgatgttgaaggctacagcgatatggtagttcaaaaaaatatttctgtacaaagtcactgcgaacatcatatggcacctattattggtatcgcacatgttgcttatattccaaatgagagagttgtcggattaagtaaaattgcaagagttgtggaagttttttcaaaaagacttcaaacacaggaaagattaacagttcaaatcgcaaatacattaatggaatcgctagatgcaaaaggcgttgcagtaacaattgactcaactcaccagtgtatgactatgcgaggtattaaaaaagaacaagctacaactgttactaatttttatttaggtcagtttaaagacgatcttagttatcagaatagatatttgagatttattgcaaaataga

SEQ ID NO: 266265 - DNA, 607 bp, Unknown
  Bacterial polypeptide expressing nucleotide sequence isolated from the Sargasso Sea
tatgaaattagtaaaagatacagacaaaaaccctgtaaaaaaagaggttagcgataaacaggctgaggaagcttttagaactattttaacatggataggtgaagatccgtatagagagggtttagttgagacaccaaaaagaatagtaaaagcttttaaagaatattttcaaggctacaaacaagatccttctcaagagttaaagaaaacattcggtgaagtagaaggctatgacgacatggtagtcgagaagaatattacatttcaaagtcattgcgaacaccatatggcaccaataattggagtggtacatattgcttatcttcccaaagataaagttgtaggactaagcaagttagcccgaacagtagaaattttttctaagagacttcaaacacaagaaagattaaccatgcaaattgccaaaacattaatggactctcttaatgctagaggagtggctgtaactatcgatgcatctcatcaatgtatgacaatgcgtggtatcaaaaaagagaaatctactacagttaccaattactttttaggtacatttaaagatgatcttagttatcaaaatagatatttaagatatattgctaagtaa

SEQ ID NO: 266266 - DNA, 607 bp, Unknown
  Bacterial polypeptide expressing nucleotide sequence isolated from the Sargasso Sea
tatgaaattagttaaagacattgaaaaagatctacagaaagaaaagatttcagaaaaggaagctgaagaagcatttgtaaaaattttaaaatggattggagaaaatccagacagagaaggtcttaaatcaacacccaaaagattagttaaagcatttaaagaatattttaaaggttatagtgaagatgcaaatttaattttgcaaaaaacatttggagatgttcaaggatatgacgacatggttattcaaaaaaatatttcactacaaagccattgtgaacaccatatggctccaataattggagttgcacatgtttcttatattcccaaagaaagagtagtaggattaagcaaattagcaagagtagttgaagttttttcaaaaagattgcaaactcaagaaagattaacaatgcaaatagcaaccactttaatgcaagccttggatgctaaaggtgttgctgtatctatcgatgcaacacaccaatgtatgactatgagaggaataaaaaaagaacaagcaacaacaattacaaattattatttaggaaaatttaaggaagatttaagttatcaaaatagatatttaagatttataagtaagtaa

SEQ ID NO: 266267 - DNA, 610 bp, Unknown
  Bacterial polypeptide expressing nucleotide sequence isolated from the Sargasso Sea
catgaaattagttaaaaatatacatagtaaatctacaaaaaacagcaatgtttctgacaaggaagcagaagaagctgttattaaaattttagaatggatgggagaagacccttcaagagaaggattaatcgaaacacctaaaagagtagttaaggcatttaaagaatattttaaaggttataacgaagatccaaaaacaattttaaataaaacttttggggacgttgatggttatgacgatatggttattcaaaaaaatatatcagttcaaagtcattgtgaacatcatatggcacccatcattggggttgctcatgtagcttatataccaaataaaagagtcgttggacttagtaaactcgctagagttgtagaagttttttcaaaaagacttcaaacacaggaaagacttacaatgcaaattgcaaaaacgttaatgagcgcactagacgcaaaaggtgttgctgtttctatagattcaacacatcagtgtatgactatgagaggtattaaaaaagaacaggcaactactgttacaaattactatctaggtagctttaaagatgatttaagttaccaaaatagatatttgagatttattagtaagtaa

SEQ ID NO: 266268 - DNA, 610 bp, Unknown
  Bacterial polypeptide expressing nucleotide sequence isolated from the Sargasso Sea
tatgaaagttgataaaaatcaaatcgatttagatcaagagaagcctacgagggaagaagctatggatgcagttaaaacccttatatcatgggctggtgataatccatctcgtgaagggttgatagacacacctaaaagagttgtgaaagcttatgaagaattttttgcaggctataatcaagatcctctatcaactctaagtaaaacatttgaggatgttcagggttatgacgatattgtctttctaagagatattaatatagaaactcattgtgaacaccatatggtaccaattctaggtgttgcacatgtggcctatttacctagagataaagtggttggtatctcaaaactagcaagagtaattgatatttttgcaaagaggcttcaaactcaagaaaccatgacaatgcaaattcttgaaaccattgatcaagcactagatcctctcggtacagctataatgattgatgctaagcatcaatgtatgacgacaagaggcattagcaagcctaatgtatcaacagttactaccaagttttcaggattatttgctgaagatagtgagctaagacagagatttatgggcctaacacaagcaaaaggttaa

SEQ ID NO: 266269 - DNA, 577 bp, Unknown
  Bacterial polypeptide expressing nucleotide sequence isolated from the Sargasso Sea
aatgaataaagacaaagtcgaagaaggtatcaagatgatgctggaggggttgggtgttgatttaaatggaccccatttcaaagatacccccaaaagagcaacaagagcatggactaatgaactatgctcaggtctgggagaacagtcttttgaattaacaacttttgacatcgagcctgattatgaaccgagcatggtggtgctccagcatatcccggtcaaatccttatgcgcccatcatctgcttccttttgtcggagaggcaacggtagcctacattccaaataagatgctgtgcggactttcaaaattggccagagtcgttgactatttcgcgagacgtccccaagtccaggaaaagttgacccatgacatcgcaaaatttttacgcagtcaactcgatccccagggtgttggcgtgatcatcaaggccaaccacatgtgcatgcaaatgcggggagtcaatcatgacggaacgatgatcaccagctctctgaaaggatcttttatcaaggaaggtccggttcgggctgagtttatggcccttgcccattcccaaactttaaaaaaggtctag

SEQ ID NO: 266270 - DNA, 604 bp, Unknown
  Bacterial polypeptide expressing nucleotide sequence isolated from the Sargasso Sea
catgaaattagtaaaaaacgaaaataataaaaatcccgaaagtgtttccgatgaggaggctagagaggcatttataaaaattttaagatggataggagaggatcctaatagagagggcttgctagaaactcctaagagagtaacaaaagcatttaaagaatactttaaaggctaccaagaagatccaaaagaaatcttaagcaaaacatttggagatgtagaaggatatagcgatatggtagttcaaaaaaacatatctgttcaaagtcactgtgaacatcatatggctcctataattggtattgcacatgtagcatacattccaaatgagagagttgtaggacttagtaaaatagcaagagtagtagaagtattttcaaagagacttcaaacacaagaaagactaaccgttcaaatagcgaatacattaatggaatcattagatgctaaaggtgttgctgtaacaatagactcaactcaccagtgtatgactatgaggggaattaaaaaagaacaagcaacaacagtaactaacttttacctaggtcaattcaaagatgatcttagctatcaaaatagatatttgagatttatagcaaaatag

SEQ ID NO: 266271 - DNA, 359 bp, Unknown
  Bacterial polypeptide expressing nucleotide sequence isolated from the Sargasso Sea
ggtgcaaagtcactgcgaacaccatatggctccaattataggaaaagctcatgttgcctatataccaaatgaaagagttgtaggattaagtaaaattgcaagagtagttgaaatattttcaaaaagattacaaacacaagaaagattaactgttcagatagcaaatactttaatggaagttctagatgcaaaaggtgtagcagtaaccatagattcaactcatcagtgtatgactatgagaggtattaaaaaagaacaagcaacaacagtaactaatttttacttaggtcaatttaaagaagaccttagttatcaaaatagatatttacgatttatcagcactgagttaaaagactagt

SEQ ID NO: 266272 - DNA, 610 bp, Unknown
  Bacterial polypeptide expressing nucleotide sequence isolated from the Sargasso Sea
atgaaattagttaaagacgcagataaaacatcctcaaaaaagcctgaagtttccgataaacaggcagaagaggcgtttaaaaccattcttaattggataggtgaagatccaaacagggagggtctagttgagacaccaaagagagtagtaaaagcttttaaggaatattttaaaggttatcatcaggatcctgaagctgatttatctaaaacatttggagacgtagagggttacgacgatatggtagtggaaaaaaatataactcttgaaagccactgcgagcatcatatggcacctataattggagttgcgcatgtcgcctatattccaaacaaaaaagttgtaggattaagcaaattagcaagaacagtagaaatattttctaaaagacttcaaactcaggaaagactcacaatgcaggttgctaaaactttgatgagttcattagacgctaaaggagtagcagtcaccatcgatgccgctcatcaatgtatgaccatgagaggtgtcaaaaaggagaaagcgacaacagttactaactattttttaggctctttcagagaagacttaggtattcaaaacagatatttaagatatattaaaaaataga

SEQ ID NO: 266273 - DNA, 610 bp, Unknown
  Bacterial polypeptide expressing nucleotide sequence isolated from the Sargasso Sea
tatgaaagttgataaaaatcaaatcgacttagatcaagataagccaacaagggaagaggcaatggatgcggttaaaacccttatatcatgggctggcgataatccttatcgcgaaggcttaatagacactcctaaaagagttgtgaaagcttatgaagaattttttgcaggttataatcaagatcctttatcaactctaagcaaaacatttgaggatgttcagggttacgacgatattgtctttctaagagatattaatattgaaactcattgtgaacaccatatggtaccaattctaggtgttgcacacgtagcctatttaccaaaagataaggtggttggtatctcaaaactagcaagagtaattgatatttttgcaaagaggcttcaaactcaagagaccatgacaatgcaaattcttgaaactattgatcaagcgctagatcctcttggtacagctataatgattgatgcgaagcatcaatgtatgacgacaagaggaattagtaagcctaatgtatcaacagttactaccaaattttcagggttattttctgatgacagtgagttaagacaaagatttatgggcctaacgcaagtaaaaggttaa

SEQ ID NO: 266274 - DNA, 607 bp, Unknown
  Bacterial polypeptide expressing nucleotide sequence isolated from the Sargasso Sea
atgaaattagttaaagaaataaacaaaactaatatagaaaacgaaatatctgataaagaagcagaagaagctttcgtcaaaattttaaaatatattggtgaagatcctggtcgagagggcttactagaaactccaaaaagagttagaaaagcattcaaagaatatttcaaaggttatcaagaggatccatataaaattttatcaaaaacatttggggatgttgatggatataatgatattgtaatccaaaaaaacatttctgttcaaagtcactgcgaacatcatatggcaccaataattggtatagctcatgtagcttacattcctaatgagagagttgtgggattaagtaagttagcaagagtagtagaagctttttctaaaagacttcaaactcaagaaagattaactatgcaaattgctaaaactgttatggaagcgctagatgcaaaaggtgttgctgtaacaatagactctaatcatatgtgtatgactatgaggggagtaaaaaaagagcaagcaacaacagtaactaattactatttaggccaattcaaagaagatctaagttaccaaaacagatatttaagatttataagcaaataaa

SEQ ID NO: 266275 - DNA, 610 bp, Unknown
  Bacterial polypeptide expressing nucleotide sequence isolated from the Sargasso Sea
tatgaaattagtcaaagatttagaaaaatcatcgataaatcagagcggagtcactgataaagaagcagaagatgctttcaagactatactgaagtggataggcgaaaatccagatagagaaggtctaaaagaaacaccaaaaagagtcgttaaagcatttaaggagtattttagtggatatcatcaagatgccaacaaagttcttaataaaacttttggagatgttgatggatatgatgacatggttttagaaaaaaatatttcttttgagagccattgtgaacatcacatggctccgattatcggtgtaattcatatcgcttatattccaaataaaaaagttgttggtttaagtaaattagctagaaccgtagaagtttatgctaagagattacaaactcaagaaagattaaatatgcaaatagctaagactttaatgagtggattagaagcaaaaggtgtagctgtaactatagatgcttcccaccaatgcatgactatgcgaggtattaaaaaagaaaaagcgatgactcttacaaattattttttaggaacatttaaagaagatctttcacttcaaaatagatatttaaagcatatcggaaaataa

SEQ ID NO: 266276 - DNA, 604 bp, Unknown
  Bacterial polypeptide expressing nucleotide sequence isolated from the Sargasso Sea
atgaaattagtaaaaaacgaaaataacaaaaatactgagattgtaacagacgaagaggcacgtgaagcctttgtcaaaatcttaaaatggataggtgaagatccatctagagaaggtttattagaaactccaaaaagggttacgaaagcattcaaagagtactttaaaggttacaaagaggatcctaaagaaattttgagcaaaacttttggcgatgttgaaggttacagcgatatggtagttcaaaaaaatatttctgtacaaagtcactgcgaacatcatatggcacctattattggaatcgcacatgttgcttatattccgaatgagagagttgttggactcagcaaaattgcaagagttgtggaagttttttcaaaaaggcttcaaacacaggaaagattaacagtccaaatcgcaaatacattaatggagtcactagatgcaaagggcgttgcggtaacaattgactcaactcaccagtgtatgactatgcgaggtattaaaaaggaacaagctacaactgttactaatttttatttaggtcaatttaaagacgatcttagttatcagaatagatatttgcgatttattgcaaaataga

SEQ ID NO: 266277 - DNA, 616 bp, Unknown
  Bacterial polypeptide expressing nucleotide sequence isolated from the Sargasso Sea
atgaaattagttaaagatagagatattatcgaaaattcaaaaaaaatttctgataaagaagctgaagaggcctttaagacaattttatcttggatgggtgaggaccctaatagagaaggtttactggaaactcctaaaagagttgtaaaagcatttaaagaatattttaaaggttataacgaggatcctaaaaaaattttagataaaacttttggagatgttgatggttatgacgacatggtaatacaaaaaaatatttctgttcaaagtcattgcgaacatcatatggctccaattataggtaaagctcatgtagcttatattcccaaaaaaagagttgtaggtttaagcaaattagcaagagtggttgaagttttttcaaaaagattacaaacacaagaacgattaactatgcagattgcgaataccctgatggagtctttagatgccaaaggagtggcagtaactattgattctacccatcaatgtatgactatgagaggaattaaaaaggaacaagcaacaactgttactaattattatttaggtcaatttaaagaagatctaagttatcagaatagatatttaagatttataagcatatcaaaagattaaa

SEQ ID NO: 266278 - DNA, 604 bp, Unknown
  Bacterial polypeptide expressing nucleotide sequence isolated from the Sargasso Sea
atgaaattagttaaaaatgaaaaccagaagaagacagacactatctcagacagagaagctgaagaggcatttataaaaattttacaatggataggagaagaccctttaagagaaggcttattagaaacacctaaaagagttacaaaagcttttaaagaatattttaaaggatacagagaagatcctaaagaaattttaagcaagaccttcggagatgtaaacggatatgacgatatggtaattcaaaaaaatatctcagttcaaagtcattgcgaacatcatatggcaccaattataggtgtagctcatgtagcatatattccaaaagatagagttgttggtttaagcaaattagcaagagtagttgaagtgttttctaaaagacttcaaacccaagaaagacttacaatgcaaatcgcaacaacaataatggaatctcttgatgcaaaaggtgttgctgtaagtatagattcaactcaccagtgtatgactatgagaggaattaaaaaagaacaagctacaactgttaccaattattatttaggtaaattcaaagaagatttaagctatcagaatagatacttgcgatttattgcaaaataaa

SEQ ID NO: 266279 - DNA, 412 bp, Unknown
  Bacterial polypeptide expressing nucleotide sequence isolated from the Sargasso Sea
tctaaagtctttgaagagattgaaggatacgatgaaattgttttagtaaaagacattcctctgcagtcacactgtgaacatcatatggtgcccattataggcaaagcacatgttgcttacctgcctgatcaaagagtcgtgggattaagtaaattggcaagagtagtagatatgtttggtaaacgactccaaactcaagaaactatgacagcacaaattgctgatactattaatgatgtccttcaacccaaaggcgttgcagttgtaatagatgcagaacatcaatgtatgagcagtagaggggtaaacaaacatggttctagcacgataacaagtcgaatgattggagtattcagagaaaatcagaaatctcgcatggaattcttgaacttaatctctagtaaactataga

SEQ ID NO: 266280 - DNA, 610 bp, Unknown
  Bacterial polypeptide expressing nucleotide sequence isolated from the Sargasso Sea
tatgaaattagtcaaagatttagaaaaaacgtcaataaatcagagcggcgttacagataaagaggccgaagaggctttcagaaagattctgaggtggataggagaaaatccagatagagagggtttaaaagaaacaccgaaaagagttgttaaagcatttaaagaatattttagtggctaccatcaagacgcgaacaaatcactaaataaaacatttggagatgtagatggatatgatgatatggtccttgaaaagaatatttcattcgaaagtcattgtgaacatcatatggcgccaattataggggtaatccatatagcatacattccaaataaaaaagtagttggattaagcaaactagcaagaactgttgaagtctttgctaaaaggttacaaacccaagaaagattaaacatgcaaattgctaaaactttaatgagcggattagaggctaagggagttgcagtaactattgatgcatctcaccaatgtatgaccatgagagggataaaaaaagaaaaggcaatgactttaacaaattactttttaggaacatttaaagaggatctttcacttcaaaatagatatttgaagcacattggtaagtaa

SEQ ID NO: 266281 - DNA, 616 bp, Unknown
  Bacterial polypeptide expressing nucleotide sequence isolated from the Sargasso Sea
atgaaattagttaaagatatagataataatcaaaattctaaaaagatttctgataaggaagctgaagaagcttttaaaactattttagcttggatgggtgaagatccaagtagagaaggattattggaaacaccaaaaagagtggtcaaagcattcaaagagtatttcaaaggttataaagaggatcctatccaagttttagataaaacatttggtgatgtcgatgggtatgatgacatggttattcaaaagaatatttctgttcaaagtcattgtgagcatcacatggcacctattatagggaaagctcatgtggcttacattcccaatgaaagagttgttgggttaagtaaattggcaagagttgttgaggttttctcaaaaagattgcaaactcaggaaagattaactatgcaaattgcgaatacactaatgggggcattggatgctaaaggagtagcagtgacaatagactcaactcatcagtgtatgactatgagaggaattaaaaaagaacaagcaacaacagttacaaattattatttaggtcaattcaaagaagatctaagttatcaaaatagatatttaaggttaattagcaattcaaaagattaaa

SEQ ID NO: 266282 - DNA, 616 bp, Unknown
  Bacterial polypeptide expressing nucleotide sequence isolated from the Sargasso Sea
catgaaattagtaaaagatacagatagcaaagaaatctcaaataaggtttctgataaagaagctgaggaagcttttaaaaagatattatcttggatgggtgaagacccaaatagagaaggattgttagaaactcctaaaagagtggttaaagcctttaaggaatattttaaaggatacaaagaagaccctactaaaattttagataaaacctttggagatgtagatggttatgatgatatggtaattcaaaaaaatatttctgttcaaagccattgcgaacatcatatggcacctattataggtaaagctcatgtagcatacattccaaaagatagggttgtaggtctaagcaagttagcaagagttgtagaagttttttcaaaaagattacaaacacaagagagattaaccatgcaaatagcaaataccttaatggagtcattagatgcaaaaggagtagcagtaacaattgactcaactcatcagtgtatgaccatgagaggtataaaaaaagaacaagctacaacagtcacaaattattatttaggtcagtttaaagaggatcttagttatcaaaatagatatttaagatttattagtattacaaaagattaa

SEQ ID NO: 266283 - DNA, 619 bp, Unknown
  Bacterial polypeptide expressing nucleotide sequence isolated from the Sargasso Sea
tatgaaattagtaaaaaatactgacaataaaattgttgaaacaagcgaagttactgacaaagaagctgaacaagctttcaaaactattttaacttggttgggtgaagatccaaacagagaaggacttttagaaactccaaaaagagtaatgaaggcttacaaagagtattttggtggctacaaagttgatccaaataaaattttagataaaacttttggagatgtagatggatatgatgacatggttattcaaaagaatatttcagttcaaagtcattgtgaacaccatatggccccaattattggaaaagctcatgttgcttatattccaaaagaaagagttgtaggcttaagtaaacttgcaagagttgtcgaagtattttcaaaaagactgcaaacacaagaaaggttgacaatgcaaatagctaaaactttgatggagtctttagaagccaaaggagtagcggtaacaatagactcgactcatcaatgtatgactatgagaggaataaaaaaggaacaagcaacaacggtaacaaattattatttaggtcaatttaaagaagacctaagttatcaaaatagatatttaagatttataagtataccaaaagattaa

SEQ ID NO: 266284 - DNA, 622 bp, Unknown
  Bacterial polypeptide expressing nucleotide sequence isolated from the Sargasso Sea
atgaaattagtaaaagacactgacaataaagaattactttcaaaagaagtttctgacaaagaagcagagcaagcatttagaactattttatcttggataggcgaagatccaaatagagaagggttattagaaactcctaaaagagttatgaaagcatttaaagaatattttaaaggatataaggaggatgcaagcaaagttttagataaaacttttggggatgttgaaggttatgatgacatggttgttcaaaaaaatatttcagtacaaagtcattgcgaacatcacatggctccaataataggaaaagcacacgtagcttatattccaaaagatagagttgtaggtttaagtaagttagcgagagttgttgaagtgttctcaaaaagattacaaacacaagaaagacttacaatgcaaatagcgaacactttaatggagtctttagatgcaaaaggagttgcagttacaattgattcaactcatcagtgtatgacaatgagaggtattaaaaaagaacaagcaactacggttactaattactacttaggtcaattcaaagaagatttaagttatcaaaatagatatttacgatttatcagcactacgttaaaagattaat

SEQ ID NO: 266285 - DNA, 619 bp, Unknown
  Bacterial polypeptide expressing nucleotide sequence isolated from the Sargasso Sea
atgaaaatagttaaaaacctaaacactgcaattttaaaggaaaaacaagaagtttctgacaaagaggcccaagaagctttcaaaactattttaagatggattggtgaaaatcctgatagagaaggtttagttgaaacaccaagaagagttacaaaggcatttaaagaatattttaaaggatacaaacaagaaatcacttctgaattattgaaaacttttggagatgtaaacggttatgatgatatggttctgcaaaaaaatatttcagtacaaagtcattgcgaacatcacatggctccaattataggtgtagctcacgtagcttatcttccaaacaaaagagtagttggtctaagcaagcttgcaagagttgttgaggtatattcaaaaagattacaaacacaagaaagattaacaatgcagatcgcggaaagtataatgaagggtttagatgcacacggtgttgcagtaacaattgactcgacacatcaatgtatgacaatgagaggcattaaaaaagaaagagcaactacaattacaaattattttttaggtaaatttaaaaatgatttaagttttcaaaatagatttttgaattatatttcgcaaaaacgttaat

SEQ ID NO: 266286 - DNA, 616 bp, Unknown
  Bacterial polypeptide expressing nucleotide sequence isolated from the Sargasso Sea
atgaagttagttaaagacatagataataatcaaaattcgaagaagatttctgacaaagaagcagaggaagcttttaaaactattttatcttggatgggtgaagatcctaatcgagaaggattattagaaactccaaaaagagttgttaaagcatttaaggagtattttaaaggttataaggaagatcctattcaggttttagataaaacttttggcgatgtcgatgggtatgatgatatggttattcaaaaaaatatctctgttcaaagtcattgcgaacatcatatggcaccaataattggtaaagctcatgtagcatacatacctaatgagagagttgttggattaagtaaattagcaagagtagtagaggttttttctaaaagattacaaactcaagaaagattaactatgcagattgcgaatacactaatgcaatctctagatgccaaaggggtagcagtcacaatagactcaactcatcaatgtatgactatgagaggaattaaaaaggaacaagctacaacagtcacaaattattatttaggtcaattcaaagaagatttaagttatcaaaatagatatttaaggttaataagtaattcaaaagattaaa

SEQ ID NO: 266287 - DNA, 598 bp, Unknown
  Bacterial polypeptide expressing nucleotide sequence isolated from the Sargasso Sea
atgaaattagtaaaaaatgaaagcaaaaatattcaagtaaaagatgaagaagtagaagaggctttcaaaacaattcttacatggataggtgaagacccgaatagagagggccttatagaaacaccaaaaagagttgtcaaagcatttagagaatattttaaaggctataaagaagatcctaaaaaaatattagaaaaaacttttggtgatgtccatggttatgacgacatggtaattcaaaaaaatatatcagttcaaagccactgcgagcatcatatggcacctattattggttttgctcatgttgcatacattccaaatgaaagagtagtaggattgagtaaacttgcaagggtagttgaagttttttcaaaaagacttcaaacacaagaaagattgaccatgcaaatagcaaagtgtttgatggaatctttggatgcaaaaggagttgcggtatcaattgattcaactcaccagtgtatgaccatgagaggaattaaaaaagaacaagcttcaactgtaacaaattactacttaggaaaatttaaagaggatttagcttatcaaaacagatatttgagatttataagtaagtaat

SEQ ID NO: 266288 - DNA, 601 bp, Unknown
  Bacterial polypeptide expressing nucleotide sequence isolated from the Sargasso Sea
aaatatagataataatcaaaattctaaagaggtttctgataaagaagcagaggaagcttttaaaactatcttaacttggatgggtgaagatccaactagagaaggattattggaaacaccaaaaagagtggttaaggcatttaaagaatattttaaaggttataaagaagatcctatccaagttttagataaaacatttggtgatgtagatgggtatgatgacatggttattcaaaagaatatttctgttcaaagtcattgtgaacatcacatggcacctattataggtaaagcgcacttagcttatatccccaatgaaagagttgttgggctaagtaaattagctagagttgttgaggttttctctaaaagattgcaaactcaggagagattaactatgcaaattgcgaatacacttatgggagctttggatgcaaaaggagtagcagttactatagactcaactcatcaatgtatgactatgagaggaataaaaaaagagcaagcaacaacagttacaaattattatttaggtcaattcaaagaagatctaagttaccaaaatagatatttaaggttaattagcaattcaaaagattaa

SEQ ID NO: 266289 - DNA, 604 bp, Unknown
  Bacterial polypeptide expressing nucleotide sequence isolated from the Sargasso Sea
atgaaattagttaaaaatgaaaatcagaaaaagatagatactatctcggataaagaagctgaagaagcatttataaaaattttacaatggttaggagaagacccttcaagagaaggattgctagaaacacctaaaagagtcacaaaagcatttaaggaatattttaaaggatacaaagaagatcctaaggaaattttaagtaagacttttggagacgtaaacggatatgacgatatggtaattcaaaaaaatatttcagttcaaagtcactgtgaacaccatatggcaccaattataggtgtggctcatgtagcatatattccaaaagaaagagttgttggcttaagtaagttagcaagagtagttgaagtgttttctaaaagacttcaaactcaagaaagacttacaatgcaaattgctaaaacaataatggattctttagatgcaaaaggggttgctgtaagtatagattcaactcaccagtgtatgactatgagaggaattaaaaaagaacaagctacaactgttactaattattatttaggtaaatttaaagaagatttaagttatcagaatagatacttgcgattcattgcaaaataaa

SEQ ID NO: 266290 - DNA, 246 bp, Unknown
  Bacterial polypeptide expressing nucleotide sequence isolated from the Sargasso Sea
ctcaatcgtatagtgaggtttttgcgcagcggccgcaggtgcaagagcgtttaactcagcaaattcaagtgtctttgcaggccttgttgggtgtgaaagacgtggcggttagcattaatgcggtgcattactgtgtgaagtcccgtggtgtgatggataccagttccagcaccaaaaccatggctttgggtggtgcgtttaaaaccgacgctgcaactcgatctgagtttttatcgaatttttaaa

SEQ ID NO: 266291 - DNA, 604 bp, Unknown
  Bacterial polypeptide expressing nucleotide sequence isolated from the Sargasso Sea
catgaaattagtaaaaaacgaaaatgacaaaaagcccgaaagcgtttccgatgaggaggctagagaggcatttattaaaattttaagatggataggagaggaccctactagagagggtttactagaaactcctaaaagagtaacaaaagcgtttaaagaatattttaaaggctaccaagaagatccaaaagaaatcctaagtaaaacatttggagatgtagaaggatatagtgatatggtagttcaaaaaaacatatctgttcaaagtcattgcgaacatcatatggctccaattattggtattgctcacgttgcttatattccaaatgagagagttgtaggtttgagtaaaattgcacgagttgttgaagttttttctaaaagacttcaaactcaagaaaggttaacagtacaaattgcaaatacattgatggagtctttagatgcaaaaggtgttgctgtaacaatagattcaactcaccagtgtatgactatgagaggtataaaaaaagaacaagctacaacagttactaacttttatctgggtcaatttaaagatgatcttagctatcaaaatagatatttgagatttatagcaaaatag

SEQ ID NO: 266292 - DNA, 593 bp, Unknown
  Bacterial polypeptide expressing nucleotide sequence isolated from the Sargasso Sea
aaaaaacgaaaaccaaaaaaatatagattctgtatcagataaagaggcagaagaagcgttgttcaaaatattaaaatggataggcgaagatccatcaagagaaggtcttcttgaaactccaaaaagagtaaccaaagcttttaaagaatattttaaaggctaccaagaggatccaaaagcaattttagaaaaaacatttggagatgtagaaggatacagcgatatggtcgttcaaaaaaatatttctgttcaaagtcattgtgaacatcatatggcaccaataataggtgttgctcacgttgcttatattccaaatcaaagagttgttggattaagtaaaatggcaagagtagttgaagtattctctaagagacttcaaactcaagaaaggttaacggttcaaatcgctacaactttaatggaaaccttggacgccaaaggagttgcggtaactatagattcaactcatcagtgcatgaccatgagaggaattaaaaaagaacaagcaacaacaattacaaattattatttaggtcaatttaaagatgatctaagttttcaaaatagatatttgagatttatcgcaaaataga

SEQ ID NO: 266293 - DNA, 619 bp, Unknown
  Bacterial polypeptide expressing nucleotide sequence isolated from the Sargasso Sea
aatggcgaaacaacataaagaaaaaaatgtaacggaagttttttcaaaaccttctagaaaagaagcagaggaagctgttaaaaccttgattaagtgggcaggagataatcctgaaagagaaggtttacttgatactccaaaaagagttgttaaggcttatgaagaattttttgagggctatgagcacaatccaactgaaatattatctagaacttttgatgatgtagaaggatatgatgaaatggtcatagtaagagatataagaattgaatctcattgtgaacaccatatggttcctattataggaattgcacacattggttatattcctaatcaaagagtagtaggaattagtaaactggcaagagtagctgatgtattttctaaaaggttgcaaactcaagaaactatgactgctcaaattgctgatattattgatgaggtattacaacctaaaggagtagctgtagttgtagactcaaaacacatgtgcatgacaacaagaggagtgcataaacctgaaagcagcactataaccagtaggatgttaggactctttaggactaattcaaatactagaaatgaatttatgaatctcataaattcatcgaaagactaa

SEQ ID NO: 266294 - DNA, 322 bp, Unknown
  Bacterial polypeptide expressing nucleotide sequence isolated from the Sargasso Sea
tatggctcctattattggcgttgttcatattgcctatattccaaataaaaaagtagtaggtctaagtaaacttgcaaggactgtagaagttttttctaaaagactacaaacacaagagagacttactatgcagatagctaaaactttaatgagttcgcttgaagcaaaaggagttgcagtaactattgatgccgcccatcagtgtatgactatgagaggtattaagaaagaaagagctactaccgtaacaaattattatcttgggaccttcaaagaagatcttagctatcaaaatagatatttgagatatatagcaaaataa

SEQ ID NO: 266295 - DNA, 525 bp, Unknown
  Bacterial polypeptide expressing nucleotide sequence isolated from the Sargasso Sea
catgaaattagtaaaaaatgaaaatcagaagaagttagacactatctcggataaagaagctgaagaagcttttataaaaattttacaatggttaggagaagacccttcaagagaaggattattagaaacacccaaaagagtcacaaaagcatttaaggaatattttaaaggatataaagaagatcctaaagaaattttaagtaagacctttggtgatgtaaatggatatgacgatatggtaattcaaaaaaatatatcagttcaaagtcactgtgaacatcatatggcaccaatcataggcgtagctcatgtagcgtatattccaaaagatagagttgttggtttaagtaagttagcaagagtagttgaagttttttctaaaagactacaaactcaagaaagacttacaatgcaaattgcaacaacaataatggagtcactggacgcaaaaggtgttgcagtaagtatagattcaactcaccagtgtatgactatgaggggaattaaaaaagaacaagctacaac

SEQ ID NO: 266296 - DNA, 604 bp, Unknown
  Bacterial polypeptide expressing nucleotide sequence isolated from the Sargasso Sea
catgaaattagtaaaaaacgaaaacgaaaaaaaaattaacgaagtaacagacaaggaagctgaagaagctttcgttaaaattcttaagtggttaggtgaagatcctaccagagaaggtttattggaaactccaaaaagagtaacaaaagcatttaaagaatattttaagggatataaagaagatccaaaagcagttttagacaaaacatttggtgatgttgaaggctatagcgatatggttgttcaaaaaaatatttcagtccaaagtcattgtgagcatcacatggcaccaattataggaattgctcatgtagcatatattccaaatcaaagagttgtaggattaagtaaaatagcaagagttgtagaagtattttcaaaaagattacaaacacaagaaagattaactgttcagatcgctaatactttaatggagtcgttggatgcaaaaggagttgcggtaacaatagattcaactcatcagtgtatgactatgagaggtataaaaaaagagcaagctaccacagttacaaatttttatcttggacagtttaaagacgatttaagttatcaaaatagatatttgcgatttattgcaaaataa

SEQ ID NO: 266297 - DNA, 261 bp, Unknown
  Bacterial polypeptide expressing nucleotide sequence isolated from the Sargasso Sea
tatggaaaataaattagaagaaattacaaaagagttaattacagaaattggtgaggatcccaaccgagaaggtttacttaagacccctaaaagggttgcaaaagcatggcaatttttctcaaaagggtataaccaaaaaattgatgatgttataaacgaggctatttttaatgaggatgcagaagatatggttattgtcagagatattgaatttttttccctttgtgaacatcatctaataccattttttggtaaagcaca

SEQ ID NO: 266298 - DNA, 559 bp, Unknown
  Bacterial polypeptide expressing nucleotide sequence isolated from the Sargasso Sea
atgaaattagtaaaaaacgaaaatgagttacgaaaagataacatctcagataaagaggctgaagatgcatttgtaaaaattttaaaatggatgggggaagaccctggtagagaagggttattggaaacacccaaaagagtagtcaaagcttttaaagaatatttcaaaggttataaagaagatcctaaagaaattttgaataaaacctttggagatgtaaatggttatgatgacatggttattcaaaaaaatatttctgtgcaaagtcattgcgaacatcacatggcaccaattattggtatagctcatgtagcatacattcctaaagatagagtagttggtttaagtaaactagctagagtggttgaagttttttcaaaaagacttcaaactcaagagagacttacaatgcaaatagctacaacattaatggaatcattagatgccaaaggtgttgctgtaagtatagattcaactcaccagtgtatgactatgagaggcattaaaaaagaacaagcaacaacagttactaattattatttaggtcaattcaaagaag

SEQ ID NO: 266299 - DNA, 559 bp, Unknown
  Bacterial polypeptide expressing nucleotide sequence isolated from the Sargasso Sea
aatgagttctaaaaatgaaactaagagcaatattgagattgctcttttcgaatttttaaaaacaaagactgacaaatcagaagaggaaataatgaaactttccaaaaagtttcttgagcaaatagagttaaaattacacaaatcgcacttaccatctgaaattttaagtaatcttgacaacgtagaacataatcaacctatctacttaaaaggaataaattttgttagcttatgtgagcatcaccttcttcctttttcaggcttggtcaatatagctgtttatccaaatagcaaaatagctggagtttctaaatttagtgaacttgtaaatattctttcaaataatttaactttgcaggaaactctaacaaaaaatatagcaattgaaatccaaaatgcactagatcctaaaggtgtaatggtaaaaataagtgcaaatcacatgtgttcaagtttgttaaatattgaaaattcacaaactgaatttgaaacaacttacagtactggaatctacgaaatcgaccatacgcttcgtaacgaagccttattaaatttttag

SEQ ID NO: 266300 - DNA, 577 bp, Unknown
  Bacterial polypeptide expressing nucleotide sequence isolated from the Sargasso Sea
aatgaataaagacaaagtcgaagaaggcatcaagatgatgcttgaggggttgggtgttgatttaaatggatcccatttcaaagacacccccaaaagagcaacaagagcatggactaatgaactatgctcaggtctgggagataagtcttttaaattaacgacttttgacatcgagcctgattatgaaccgagcatggtggtgctccagcatatcccggtcaaatccttatgtgcccatcatctgcttccttttgtcggagaggcaacggtggcctacattccaaataagatgctgtgcgggctttctaaactggccagagtcgttgactatttcgcgagacgtccccaggtccaggaaaagttgacccatgacatcgcaaaatatttacgaagccagctcgaccctcaaggtgttggcgtgatcatcaaggccaaccacatgtgcatgcaaatgaggggagtcaatcatgacggaacgatgaccaccagctctctgaaaggaactttcatcaaggaaggtccggttcgggcggagtttatggcccttgcccattcccaaaccttaaagaaagtctag

SEQ ID NO: 266301 - DNA, 616 bp, Unknown
  Bacterial polypeptide expressing nucleotide sequence isolated from the Sargasso Sea
ttgaatattgtggaaaaaaatcttaccggatctgcggaacaggagtttaggaacggcgtgtcaagtgatgatgcaaaaaaggcgctcgagttgctattgacatggattggtgagaacccagatagggaagggcttaaagagaccccgaaaagggttttaaaggcctacaaggagtggtttgctgggtacaaccagaaccctgtagaaattcttgataaaacttttaaagaagtagaaggttacaaagaaatgattagtcttaaagacgtgagcttccacagtttctgcgaacatcattttgctccaattgtaggaaaagttcacattggctatattccaaataataaagtagtgggcctatcaaaacttgctcgactgattgaagtgtttgcaagacgcttacaggtgcaggagaagatgacggctgagataggtaattgtttacaaactcacttagattgtttaggggtaggagttataattgaagcagaacatcattgtatgtcttcgagaggtgtaaaaaaacatggatccgtcatgagaacgatgcacttcactggcgttttccttaatgattcagaaaaaaagaatgagtttatacgatcggccagctgaa

SEQ ID NO: 266302 - DNA, 604 bp, Unknown
  Bacterial polypeptide expressing nucleotide sequence isolated from the Sargasso Sea
catgaaattagtaaaaaacgaaaacgataaaataattcaaaatgtttcagataaagaagctgaagaggcatttatcaaaattttaaaatggataggcgaagacccatctagagaaggtttaattgaaactccaagacgagtaatgaaagcttttaaggagtattttaaaggatacaatgaagatgcaaaaaaggcactggagaaaacttttggagatgttgatggttatgacgatatggttgtgcaaaaaaatatctcagttcaaagtcattgcgaacatcatatggcaccaatcattggagttgcgcatgttgcgtatattcctaatcaaagagttgttggcttaagtaaacttgcaagagttgtcgaagttttttctaaaagattgcaaacccaagaaagattaacaatgcaaatagctacaactataatggaagctttaaacgcaaaaggagtagctgtatcaattgattcaacccaccaatgtatgaccatgagaggaattaaaaaagaacatgcaacaactgttactaattattatttgggcaaatttaaagaagatttaagttatcaaaatagatatttaagatttattgctaaataa

SEQ ID NO: 266303 - DNA, 616 bp, Unknown
  Bacterial polypeptide expressing nucleotide sequence isolated from the Sargasso Sea
atgaaacttgttaaagatacagataacaaaaatcaaaacaagcaaatctcagataaagaagctgaggaggcatttaaaactatattatcttggatgggtgaggatcctaatagggaaggattgctagaaacaccaaaaagagttgttaaagcatttaaagaatattttaaaggatacaaagaagatccaaatcaaattttagataagacttttggcgacgttgatggatacgacgatatggttattcaaaaaaacatttccgtacaaagtcattgcgaacaccatatggcacctattattggaaaagctcatgtagcctatatcccaaaagatagagtagttggtcttagtaaattagcaagagtggtagaagtattttctaaaagattacaaacacaagaaagacttactatgcagattgcgaatacccttatggagtctttagacgctaaaggagtagctgtaacgatagactcaactcatcaatgtatgacaatgagaggaataaaaaaagaacaagcaacaacagttactaattattatttaggtcaatttaaagatgatcttagttatcaaaatagatatctaagattcataagtataccaaaagattaaa

SEQ ID NO: 266304 - DNA, 403 bp, Unknown
  Bacterial polypeptide expressing nucleotide sequence isolated from the Sargasso Sea
aagaacctttggagatgtaaacggatatgacgatatggtaattcaaaaaaatatttcagttcaaagtcactgcgaacatcatatggcaccaattataggtgtagctcatgtagcatatattccaaaagatagagttgttggtttaagtaaattagcaagagtagttgaagtgttttctaaaagacttcaaacccaagaaagacttacaatgcaaatagcaactacaataatggactcactggatgcaaaaggcgttgctgtaagtatagattcaactcaccagtgtatgacaatgagaggaattaaaaaagaacaagctacaacagttaccaattattatttaggcaaattcaaagaagatttaagctatcagaatagatacttgagatttatcgcaaaataa

SEQ ID NO: 266305 - DNA, 616 bp, Unknown
  Bacterial polypeptide expressing nucleotide sequence isolated from the Sargasso Sea
tatgaaaatagataaaaaactagaagaggttttattaactaaagacgaagaattggatcatccgttaagttcaaaagaaaccccaattcgtaaagatgcttttaataaaactgatgatgaaaaaatttcgttaataaccgataaggtaaatgatatactccatattttagggatggatctgacagatgatagtatcaaaggtactccaaaccgagttgcaaaaatgtttgttaatgaaatatttggtggcctaagccccaaaaaaaaacccaaagcatcagtttttgataataaatataaatatggtgagatgttagttgaaaaaaatattaatctttattctacatgtgagcaccatttattaccaattgttggaaaagctcatgttgcatatgtatccaatgggactgttgttggcctttcaaaaatgaatagaatcgttgattattttgcaaaaagaccacaagttcaggaaagactaacattacaaattgttgaagaattacaaaaggtgttaaatactcaagatgtagcatgtgtaattgatgcaaaacatttatgtgtaaattcaagaggaattggtgatattggttgtagtacaataactagtgaattc

SEQ ID NO: 266306 - DNA, 979 bp, Unknown
  Bacterial polypeptide expressing nucleotide sequence isolated from the Sargasso Sea
taaactcgcgagagtggcagaagtctacgcgagacgattgcagaccccggatgggttggcgcacgcggtcgcgcacgcgctgcacgacgtcgcatcaccgctcggcgtgggggtgatgtttacgggcgttcatctcggccctttcgggacgcgcgaaaccgcggggagagcgtcgacgggatgcttcgcctcgccaaactcggtgtggtgggaagaatttagcgctttagtagagcacggtggtggcccatcggagctttctcggggattatggggtgatgatgtgcgctgcttaccgtgcgacaacgacgagaacgccagttcgcgagggccggcggagacgttcgtcgacgcggcggcgacggatgcggcgcagagcgagagcgtcgacgaatccgtgcgcgagtctgtgatgaatttatttcgcgagctggacgtcgaaaagtcggtgcgagacgcgacgaacggcaaatcgtcggccgaagacaccgcgcgacagttttcgcgtcttctctcagccatgagatcgggatcagacgtgccttttgacccgattgaagagtcggcggcacgagacttgtcccgtcgcgtcgacgccgatgacgacgcgaggggcgacgacggcgtggtagtcgtgcgaaacttgcgcatgtccacggtgtgcgaacatcatctcttaccgttccacggaacggtgagcgtcgcctacatcgcgaatccgacggcgggagcgttgagccgcgatacgctgcaggctctggtgagccgtcactctcgtcgtctgcaggtgcaagagcgtctgacgcgcgatgtggcggaagagatcagtgcgctcaccgggggcatcggtgtgatggtcgccgctcgcgccgcacatctgtgcatggtgagtcgaggcgtagaaaagccgggaagttcgacgtgcacggtgacaaagctcgggagactcgccgccgagcccgcgctgcgatcaagcgtg

SEQ ID NO: 266307 - DNA, 607 bp, Unknown
  Bacterial polypeptide expressing nucleotide sequence isolated from the Sargasso Sea
atgaaattagtaaaaaatgaaaatcagaagaatttagataacaaagtctcagaagaagaggcagaacaagcttttattaaaatcattaagtacataggtgaagatccatcaagagaaggccttaaatcaactccaaaaagaatagttaaagcatttagagaatattttaaaggttatagcgaagatccaaaaaaaattttagaaaaaacatttggagacgttttaggttatgatgacatggtaattcaaaaaaatatttcattacaaagtcattgtgaacatcatatggctccaattattggagtagctcacgtagcttatattcctaataataaagtagtaggattaagtaaactcgctagggttgtagaagtttattcaaaaagactacaaacacaagaaagattaactatgcaaatagccactactttaatggaagcactggatgcaaaaggagtcgctgtttctattgatgccactcatcagtgtatgactatgagaggtatcaaaaaagaacaagctacaactataacaaattattatttaggtaaatttaaagaagatctaagttatcaaaatagatatttaagatttataagtaaataaa

SEQ ID NO: 266308 - DNA, 646 bp, Unknown
  Bacterial polypeptide expressing nucleotide sequence isolated from the Sargasso Sea
tatgttaactgaatctgctttagtggtacgcggcgctctggaagctgctggattggaaactcctatgttggacaatggcttgtccaatgatcagaaaaaacagcgtttaactgaattaatgactcaggtagtgcaaacccttgggttggatttaacagacgatagtctggctgaaactcctgcccgtattgcaaaaatgtatgtggatgaagtgttttctggtttggattacagcacttttccaaagatttcgatgatcgacaataaaatgcgtgctgaagaaatggtgaaggtgcaaaacatcagttttaccagcacttgcgaacatcattttgtcactatagatggcactgctactgtggcttacatacctggcaaaaagattattggtttgtcgaaactgaatcgtattgtgaagttttttgcgcagcggccgcaggtgcaggagcgtttaactcaacaaattcaggtgtctttgcaggcattgttgggtgtaaaagacgtggctgtcagcattaatgctgtgcattattgtgtgaagtctcgtggtgtgatggataccagttccagcactaagaccatggcgctgggcggtgcttttaaaactgatgctgccacacgttctgagtttttatcgagtttttaa

SEQ ID NO: 266309 - DNA, 424 bp, Unknown
  Bacterial polypeptide expressing nucleotide sequence isolated from the Sargasso Sea
taaaccaaaatcatcaacttttgaaaataaatataaatatggtgagatattaattgaaaaaaatattactttatattctacttgcgaacatcatcttctcccaatatatggtaaagctcatgtcggttatatatctaacggtaatgtagtaggattatcaaaaatgaacagaatagttgattatttttcaagaagacctcaagtgcaagaaagactcacccttcaaatagtagaggaactacaaaaagttttaaacactaaagatgttgcctgtgtaattgacgctaaacatatgtgtgtgaattcaagaggtataaatgacataagtagtagtactattacatcagaatttggtggaaaatttaaaaacaaacaaactaaaagagaatttttagattttttaaaaatcgagactgaattttaa

SEQ ID NO: 266310 - DNA, 547 bp, Unknown
  Bacterial polypeptide expressing nucleotide sequence isolated from the Sargasso Sea
gctgaggaagcttttaagacaattcttaaatggattggcgaaaatcctgaaagagaaggtctgaaagaaaccccaaaaagagtagtaaaggcttttaaagagtattttagcggctatcatcaagatgttaataaagctttaagtaaaacattcggtgatgttgatggatacgatgatatggtacttgaaaaaaatatttcttttgaaagtcattgtgagcatcatatggcgccaattatcggggtaattcatatagcttatattcctaataaaaaggttgtaggtttaagtaaattagcacgaacagtagaagtttatgctaaaagattacaaacacaagaacgactaaatatgcaaatagccaaaacattgatgagcgggttagaagcaaaaggtgtagctgtaacaattgatgcatcccaccaatgtatgactatgagaggaataaaaaaagaaaaagcaatgacactcacaaattactttttaggaacatttaaagaagatttatcacttcaaaacagatatttgaagcatattggaaaataat

SEQ ID NO: 266311 - DNA, 562 bp, Unknown
  Bacterial polypeptide expressing nucleotide sequence isolated from the Sargasso Sea
atgaaggatctaaataatctagagcaattaacccattccttattggaagaaataggtgaaaatccaaaaagagaaggattattaaaaacaccggcacgtgtagcgaaagcatgggaatttttctccaagggttataatcagaatttagacgaagtaattaataatgcaattttctgtgaagatgcaaaagatatggtgattgtaagagatatagaatttttttctttatgtgaacatcacttattaccattttttggaaaagcgcatgttggttatataccgaatggtaaagtaataggcctttcaaaaattccgcgcataattgatatgttttcgaggcgtctgcaagttcaagagcgcctcactcatcaagttgcagaagccatacaggaagtattaaatccattaggtgtagcagtagttatggaaggtattcatatgtgtatgcaaatgagaggtgtagagaaacaaaacagctttgcatctaccagttccatgttgggattattcagaaaatccgctgaaacacggacagaattcctaagtattacaagcaaatgaa

SEQ ID NO: 266312 - DNA, 649 bp, Unknown
  Bacterial polypeptide expressing nucleotide sequence isolated from the Sargasso Sea
tttgccaggcaactgctcaccagaggccaacttagttaaagaggcattggttttaaaaggactagaaactcccacgatagaaaatggtctatcccgtgacgaaaaatatagtcgaatcaaagcctcgatgaccgacgttgtggcaactttaggcttggatctaaatgatgacagcctagcagaaacaccccatcgaattgctaaaatgtacgtggatgaggttttcggcggccttgactatcgcaatttccccaaaataactgccatagctaataagatgcgtgtcgaagaaatgatcaaagttgacaacattagcgtgacaagtacctgcgaacaccattttgttacgattgatggcgcctctaaagtggcatacattcctagcgataaaatcataggcttatctaagattaacagaatagtgcgattttttgctcaaagaccgcaagtccaggaaagattgacgcagcaaatattagtggcgctgcaaacattgctcggaacaaatgatgttgcggtcacgatagacgcgacgcatcactgtgtaaagtcccgtggcgtcatggatacaaattcgtcaactcaaaccacagcgcttggcggccggttcaaggatgatcatagaacccgagaagagtttatgagatag

SEQ ID NO: 266313 - DNA, 625 bp, Unknown
  Bacterial polypeptide expressing nucleotide sequence isolated from the Sargasso Sea
atgaaactccaagaaactatgcagaatatcccgtctaaaattcaggaggaaatatttgatgaaataggagatagtcattattctacaagtattgaaacaccaatgattgaaggagcttttgatattgatgacagtcaaaagaaaaaagtaattgcataccacttttcagagatcatgaaaactatgggattggatctaacggatgattcactgaaaggaacacctaatcgggtggctaaaatgtttatagaggaaattttttctggactagatccaaaaaataagccaaaagtttcattgtttgaaaacaagtatcaatacaatgagatgcttttagaaaaagacatctcattttattccaattgtgagcatcattttgtacctattatagggaaggcgcatgtggcttataaatccagtggaaaagtaattggactttcaaaaataaatcgaattgtccagtacttcgcaagacgtcctcaagtccaagagcgtctcacaaaccaaattgctgatgaattgaaaaatattttagaaacagaagatatcgcagttttaatttacgcaaagcatctatgcgtcgcatcaagaggaataaaggacgacacttctgaaacttttacag

SEQ ID NO: 266314 - DNA, 592 bp, Unknown
  Bacterial polypeptide expressing nucleotide sequence isolated from the Sargasso Sea
atgagcacgagtcgtaaagaatcagaagatcccacatcaatcgcctctgggcagggaggtgccactcaagtcgttgaccatcaaagaatagaggccgctgttcgggaaattcttactgcgataggtgaagatccagatcgggaaggattgcttgaaacaccggctcgtgttgctcgcatgtatgcggaaatgttcagtggattacatgatgatccacggcgtcatctgggaaaggcattcactgagaagtacgatgaactcgtcttagttcgtgacattgcctttcatagtatgtgtgagcatcatctgttgccttttatggggcacgcacacattggatacataccgaatggtcgcgtgttgggtctcagtaagttggcaagagtggttgaggcagtgtcccataagccacaggtccaagagcgtatgactgaacaaattgctgatttactcgagcatgatcttggggcgaagggagtcgctgttgttctggaggcatctcacacatgcatgactattcggggagtgcgaaaaccaggaagtctttgtgtgacttcagccgtgaaaggaattttccgagcaaatatctcca

SEQ ID NO: 266315 - DNA, 514 bp, Unknown
  Bacterial polypeptide expressing nucleotide sequence isolated from the Sargasso Sea
attgtgcgaagacccaactagagaaggcttacaatctaccccaaaaagattagttaaagcttttaaggaatattttaaaggatattacgagaatccaaaaaaaattttagaaaaaacgtttaaagatgttcaaggttatgacgatatggttattcaaaaaaatatttcacttcaaagtcattgtgaacatcatatggctccaattattggggtagcccatgtagcttatattccaaataataaagtggtaggattaagtaaactcgctagagttgtagaagttttttcaaaaaggctgcaaacacaggaaagattaactatgcaaattgcttcaactttaatggaagcattagacgcaaaaggtgttgcagtctctattgatgccacccaccagtgcatgactatgagaggtattaaaaaggaacaagctacaacagttacaaattattatttaggaaaatttaaagaagatctaagttatcaaaatagatatttaagatttataagtaaataa

SEQ ID NO: 266316 - DNA, 556 bp, Unknown
  Bacterial polypeptide expressing nucleotide sequence isolated from the Sargasso Sea
gttggtggctgaaataatcacaagactaggcgatgatcccgagagggagggcctgagtcgaactccacaacgagttaaaaagtctctagaattcttgaccagcggatataggacagatatcgataacgttataaatggagctctttttgaagagtcccacaaaaatatggtgttggtcaagcagatagaagtctactctttatgtgagcatcaccttttacccttctttgggaaagtgcacatcggttacgtcccaaacggaaagattgtgggattatccaagatggcgcgcatagtcgaagtttttgctaggagactgcaagttcaagagcgtttgacagaacaaatagcgcaagctgtgtgggacttgatagagcccgttggtgtgggggtggtcatcgaagcacaacatttatgcatgatgatgaggggtgtccaaaaacagaattccaaaacggttacttctgccatgagagggacgtatttagatgattcgatgacccgcacagaatttttaaggttgtgtgggaccgactatagttcagtatcttcgtaa

SEQ ID NO: 266317 - DNA, 502 bp, Unknown
  Bacterial polypeptide expressing nucleotide sequence isolated from the Sargasso Sea
tcgagatggattattagatacccctaaacgagttgcacgtatgtatgaggaagtaacttccggaattagatgtgagcctgcagaagagctgaataagtgctttgaagtcaaccatgatgagatggttatggttcgtgatatttctttgtattctctgtgtgagcaccatttagtgccttttatagggcaagcacacattgcgtatatacctagaacaaatggatcaatagtagggctctcaaaattggcccgtttggttgacggttatgcgaagagactacaagtgcaggaaagactcacatctcaaatagcagatgctcttcaaagaaagctcaatccgataggagcactcgtagttatagaagctgagcatctttgtatgtctatgaggggaataaaaaaacccggttcttctaccgttacatcagccgttcgaggtattttccgtgacgatgtgtctgctcgaagtgaagcaatgagatttttagaccattcacgctga

SEQ ID NO: 266318 - DNA, 563 bp, Unknown
  Bacterial polypeptide expressing nucleotide sequence isolated from the Sargasso Sea
aatgaaattacaagaattacttgataaagaaatagattctattggtgataatcacattgggtcagacaatgaagaaacaccactaaaggaaggggcatttaatgtacctgataacgaaaaaataagctttatacaagaaaaggtatacgaaatattagatatgctcggtatggacttgactgatgatagtttaagaggtactccaagaagggttgctaaaatgtttgttaatgagattttttctggattaaatccaaaaaataggcctgaaatgtcaacgtttgaaaataaatataattacggagaaatgttagttgaaaagaacatcacattgtattctacatgcgaacatcatcttcttccaatagttggtctagctcatgttgcttacatttcaaatggtaatgtagttggattatcaaaaataaatagaattgtaaaatattatgcagaaagacctcaagttcaggaaagattaacaatacaaattgttagagatcttcaaaaagttctcaatacagatgatgttgcttgtgtgatagatgctaagcacctttgtgtta

SEQ ID NO: 266319 - DNA, 577 bp, Unknown
  Bacterial polypeptide expressing nucleotide sequence isolated from the Sargasso Sea
tatgacagacagtggtgctatcgacctttccggtgtcgaattcgaagatctagttgcagaaatgattcgcaggtgtggtgactcacctgaccgggaagggatggcgaagaccccggaacgcgttgcaaaggcgatgagcttccttaccaaggggtatggagaaactcctgaggaggtagtcgggggtgcgatctttcccgaggctcatgagagtatggtcctggtaaaggacattgagctgtattctatgtgtgaacaccacctgctccctttctttggaaaggcccatgtagcatacattcccaacggtagtgtgatggggctgtccaaggtggctcgcctagtggaagtgttcgctcggcgtttccaagtgcaagagcgtctcaccgaacagatagctcaggctgtcctggaagttagcgaggcccggggtgtggcggttgtgatagaagcgcatcatctctgtatgatgatgcgtggagttcaaaaacagaactcgaagaccctgacttctgccatgcgaggggacttcgtggaggaccgtagtctgcgcgatgaatttatgtggatggtatcg

SEQ ID NO: 266320 - DNA, 670 bp, Unknown
  Bacterial polypeptide expressing nucleotide sequence isolated from the Sargasso Sea
aatgtcatcactcagtaaagaagcggcactggttcatgaagcgctggttgcgcgtggtctcgaaaccccgctgcgcccgcccgtgcaagagatggataacgaaacacgcaaacgtcttatctctggccatatgaccgagattatgcaattgctcaatctcgatttgagcgatgacagtctgatggaaactccgcatcgcattgcgaaaatgtatgtcgatgagattttctccggcctcgattacgccaacttcccgaaaatcaccgtcattgaaaataaaatgaaggtggacgagatggtcacggtccgcgatattacgctgaccagcacctgcgaacaccactttgtcactatcgatggcaaagcgacggtggcgtatattccgaaagattcggtcattggtctgtcgaagattaaccgcattgtgcagttcttcgcccagcgcccacaggtacaggaacgcctgacccagcaaattctcaccgcgctgcaaacgctgctcgggacgaataatgtggcggtgtcgattgatgcggtgcattactgtgtgaaagcgcgcggcattcgtgatgcgaccagtgcgaccaccaccacttctcttggtggattgtttaagtccagccagaacacgcgtcaggaatttctgcgcgcagtacgtcatcacaactga

SEQ ID NO: 266321 - DNA, 373 bp, Unknown
  Bacterial polypeptide expressing nucleotide sequence isolated from the Sargasso Sea
catcgttaaaaatattgagttttacagtctttgcgaacatcatatgattcccttctatggaaaagctcacattggatacatcccagatggtaaaatcattggactttcaaagctcgcaagaattacagatcttttttctcaaagacttcaagttcaagaacgtttaacaaatcaaattgcacaatgtctgcaagaagtattaaatcctcgaggtgttgcagtagttttagagggtaaacacttttgtatgcttagtagaggtgttcaaaaacaaaatagcatcgcaacaagtagttcgatgttaggtatttttagagaaaaagaatcaacaagaaacgaatttcttaaactaatagaaatgaataacatttag

SEQ ID NO: 266322 - DNA, 541 bp, Unknown
  Bacterial polypeptide expressing nucleotide sequence isolated from the Sargasso Sea
aatgaacgacgataaacgaaaaaaattagaagctaatacaaaaaatttattagagcttttaggagaagatccttcaagagaagggttgataaatacacctaaaagagtggcaaaagcttgggatttcttaacaaaaggttattctgaaaatcttgacgaattaattaataacgcaatatttgaaggtgaatcaaaagatatggttattgttaagaacattgagttttatagtctttgtgaacatcatatgattcctttttatgggaaagcccatattggttatgttccagacggaaaaattattggactttctaaacttgctagaattacagatcttttttctcaaagacttcaagtacaagagagattaactatgcagattgcacagtgtcttcaagaagtcctaaacccgcgcggcgttgcagtagtgttagaaggtaaacatttttgtatgctgagtagaggcgttcaaaaacaaaatagcattgcatcaagtagctctatgttaggaatttttagagaaaaaagaatcaacaagaaa

SEQ ID NO: 266323 - DNA, 523 bp, Unknown
  Bacterial polypeptide expressing nucleotide sequence isolated from the Sargasso Sea
ttgcttcaagttattggagaagatcctaaacgggagggccttttagatacaccgcgaaggtatatagatgcatttaaggaatttttgtcacctcctgaatttaacatgacaacttttgatgttgaaaatactgatgaaatgattgtacagttagatattcccttctactctttttgtgagcaccaccttttaccgttttttggaaaaggatacgtcgcatatgttccaaataagaaaattgttggtctaagtaagctcgccagaaccctagagacattttctagaagattacagaatcaagaaagaataaccaatcaagtcgctgaacatcttcagtctaatcttcaagccaaaggtgtagctgttgttctaaaagctaggcatatgtgtatggaaatgagaggtgtaaagacatcagatacccatacaataaccagtaagcttcttggtagctttagaagcgatgaaaggacaagagcggaatttttaaatctaattggaaatcataggaatcttgtataat

SEQ ID NO: 266324 - DNA, 610 bp, Unknown
  Bacterial polypeptide expressing nucleotide sequence isolated from the Sargasso Sea
tatgaaattagttaaagactctgacaataagattgtagatataaagaaagtttctgacaaagaagctgaagaagcttttagaactatattatcttggatgggtgaagatcctgatagagaaggattgctagaaacaccaaaaagagtgactaaagcattcaaagaatattttaaaggttattctgaagatccaaaagcagttttagataaaacatttggagatgttgatggatacgatgatatggtagttcaaaaaaatatttctgttcaaagtcattgtgagcatcatatggcaccaattattggcactgctcacgttgcttatatccctaaagatagagtggttggattaagtaaacttgcaagagttgttgaaattttttctaaaagattacaaactcaagaaagactaactatgcaaatagcaacaactttaatggaatctttagacgcaaaaggagtagcagtgactatagattcaactcatcagtgtatgaccatgagaggaattaaaaaagaacaagctacaactgtaacaaactactatttaggtcagtttaaggaagatcttagttatcaaaatagatatttgcgatttatagcaaagtaa

SEQ ID NO: 266325 - DNA, 652 bp, Unknown
  Bacterial polypeptide expressing nucleotide sequence isolated from the Sargasso Sea
gatggcattaagtgaagcagcagtaaaagtacaagccgccctacaagaacgcggacttgaaacccccatgctccccaatgtgtttacgcctgaagagcgtaaggacaagattgaattccatatgaaggaaatcctgacgctaatgtcattggatctttcggacgacagtcttgtcgacacgccacgccgcatcgccaaaatgtatgtcgatgagattttctccggcctcgactacgagaacttccctaaaataacggttatcgataacaaaatgggcttcgatgaaatggtgcgcgtgcaggacattagcctaacgagcacctgtgagcatcacttagtcactatcgatggcacagcgacgatcgcttatattcctcgtaagaaaattatcggtttatcaaagattaaccgcatagtacgcttcttctcccagcgtccacaggtgcaagagcgcttaactcaacaagtgttagttgccttgcaaaccctgctcgaaaccaaagacgtagccgtgaaaatggatgcggtgcattactgcgtcaaatcccgcggcgtgatggactccaccagctccaccacgaccaccgccttagggggcatttttaaatctaaccccgccacccgtgccgagtttttaaatcaatccaaataa

SEQ ID NO: 266326 - DNA, 562 bp, Unknown
  Bacterial polypeptide expressing nucleotide sequence isolated from the Sargasso Sea
aatgtttgaaaatgaaaaaatagcagatttaacaaagttactacttaaggaaataggcgaagatccgaacagagagggtttaatcaaaactccgtcccgcgtttcaaaagcgtggagttttttctcccgcggttacaatcaagatgtagatgaaataataaatgatgcaattttcaatgagaatgcaaaagatatggtggttgtcagagatgtggaattttttagtttgtgtgagcatcaccttattccgttttttggtaaagcccacgtagcatacattccaaatgggaaggtagttggtttgtcaaagataccaagaataattgatatgttttcgcgaaggttgcaggtgcaagagcgactgacaaggcaaattgcagaaacaatacaggatgtgttagaacctattggcgtagccgttataatggaggggcaacatatgtgtatgcaaatgagaggtgttgaaaagcaaaatagtctaacaacaacctcatcaatgcttgggaaatttagacagtccgacagaactagagccgagttcctttctattattggattataa

SEQ ID NO: 266327 - DNA, 565 bp, Unknown
  Bacterial polypeptide expressing nucleotide sequence isolated from the Sargasso Sea
aatgaaagataaaattgatgatatttcaaaaataactaaagaattaattacatcgattggtgaagatcttaatcgtgaaggcctagaaaggacgccaatgcgagttgctaaggcttgggattattttacccaaggttactccgccaatatagatgaaattattaatgaagcgatttttgatgaagaatgtaacgatatggttgtggtaagagatattgagttcttttcaatgtgtgaacatcacatgattccattttttggaaaagcgcacgtagggtatatacctaatggaaaagttataggtctttcaaaaattccaagaattattgatatgttttcaaggagattgcaagttcaagaaagattaacgcatcaagttgcagatacaataaaagatagtttggaccctataggagttgctgtagttatggaaggaaggcatttatgtatgcagatgcgcggtgttgcaaaacaaaatagctttgcaacaacctctgcaatgcttggacagtttagaaagtctagggaaaccagagcggaatttttgagttttataggtaaatga

SEQ ID NO: 266328 - DNA, 685 bp, Unknown
  Bacterial polypeptide expressing nucleotide sequence isolated from the Sargasso Sea
atgttagcaaaagaagcggtaattgtgcgcgacgcactagacccctctatttcagagccagcacaacgtgtacgagaagcattagaagccaaaggtttagaaacacctatggtggctaatggtcttactgacgagcaaaagcgcaaacgaattgaaagtgctatgcgtgacgtaatggacacgcttggccttgatctaactgacgacagtttgtgtgatacgcccacgcgaatcgctaaaatgtatgttaatgaaatcttcggtggattggactaccgcaaatttcctaagattactgccattgaaaacaagatgcagattgaccagcctgtacaggtatctgatataagcctgaccagcacctgcgaacaccactttgttactattgatggcacggcaaccgtttcttatattccaaaagatacagtaatcggcctttcaaagattaaccgtcttgtgggtttctttgctcaacgtccacaggtacaagagcgtttaactcaacaagtgttagttgcgttgcagacgttgaccaatactgaagacgtagcggtgagcattaacgccacgcactattgcgttaaggcgagagggatccgtgatactaattcatatacgaaaacgtctgcgctcggcggccgtttccttactgataatgaattgaaacgagagttctttcggtagt

SEQ ID NO: 266329 - DNA, 550 bp, Unknown
  Bacterial polypeptide expressing nucleotide sequence isolated from the Sargasso Sea
aaacagcgtttaaccgaattaatgactcaggtcgtgcatactcttggcctggatttaacagacgacagtctggcggaaactccggcccgtattgccaaaatgtatgtcgatgaagtgttttccggcttggattacagcacttttccaaagatttcgatgatcgacaataaaatgcgtgctgaagaaatggtcaaggtgcaaaacatcagctttaccagcacctgcgagcaccattttgtcactatagacggcactgctactgtggcttatataccgggcaaaaagattattggtttgtcgaaactgaatcgtattgtgaagttttttgcccagcgcccacaggtgcaggagcgtttaactcaacaaattcaggtgtctttgcaagccttattgggcgtaaaagacgtggctgtcagtatcgatgctgtgcattattgtgtgaagtcccgtggtgtaatggataccagttccagcactaagactatggctttgggcggtgcttttaaaaccgacccagcgactcgctccgagtttttatcaaagttttaaa

SEQ ID NO: 266330 - DNA, 643 bp, Unknown
  Bacterial polypeptide expressing nucleotide sequence isolated from the Sargasso Sea
gatggcattaagtgaagcagcagtaaaagtacaagccgccctacaagaacgcggacttgaaacccccatgctccccaatgtgtttacgcctgaagagcgtaaggacaagattgaattccatatgaaggaaatcctgacgctaatgtcactggatctttccgacgacagtcttgccgatactccacgccgcatcgccaaaatgtatgtcgacgagattttctctggcttagactatgagaacttcccgaagatcactgtcattgataataaaatgggcttcgatgagatggtgcgcgtgcaggatatcagcctgaccagtacctgtgagcatcacttagtcactatcgatggcacagcgacgatcgcttatattccacgtaagaaaattatcggcttatcaaagattaaccgcatagtacgcttcttctctcagcgtccacaggtgcaagagcgcttaactcagcaagtgttagtagccttgcaaaccctgctcgaaaccaaagacgtggctgtgaaaatggatgcggtgcattactgcgtcaaatcacgcggcgtgatggactccaccagctccaccacgaccaccgccttagggggcatttttaaatctaaccccgccacccgtgccgagtttttaaatcaa

SEQ ID NO: 266331 - DNA, 742 bp, Unknown
  Bacterial polypeptide expressing nucleotide sequence isolated from the Sargasso Sea
atgattttagcaggtttctttaatgcaaataatattgcaaatccagaggatgcagatttaattctagatgacataatagactctggattaacaaaaaagaagtataagaaattattccctaaaaagaaatttatagctttatttgagaaagattccaaggttgattgggtcaattttccatttgaaaaaaatattgaagatgatcaaagtgatactgttgtaaggctacttcaaattataggggaaaaccctaaaagagaagggcttttggatactccaagaagatatttaagcgcgttcgaagaatttttaaatccaccagtttttaatatgacaacatttgatgcagagagcacagacgaaatgattgtacagttagacattcctttctattctttttgtgaacaccatttgcttccattttttggtaaggggtacattgcatacattcctgataagaaaattgttggattgagtaaattggcaagaacactcgaaacatttgcaagaagacttcaaaaccaagaaagaataactaatcaagttgcagattatcttcaagaaaatctagaggctaagggggtagcagtagttttgaaggcaaggcatttatgtatggaaatgaggggtgttaaaacgtcagacacaaatactataactagtaagctacttggctattttaggactgatgaaagaacaagggctgaatttttaaaccttattggtaatcacaggaattagt

SEQ ID NO: 266332 - DNA, 973 bp, Unknown
  Bacterial polypeptide expressing nucleotide sequence isolated from the Sargasso Sea
ctgggccggcaacggcgtgcaggacggtcagatgcgcaagctcaagctgggccagattccgttcgacggcagcctcgatctgcacggcatgagcgtcgagaaagcgcgcgacacgctgtgggagtttctcgccgaagccaccaagttggagattcgctgcgtacgcgtcacccacggcaaggcggtgcgcatggatgggcgcaaaccgatgatcaagagccatgtgaacacctggctgcgccagcacccgcaggtactgggcttcagctcctgcctggccaagcacggcggtaccggcgcggtgtatatcatcctcaagcgcaccatgatggatggtcgcgacgagtaatcagagaacctggcactcttgccaggcccctgtcggcgccctaccctgcgcccattcgatacccaacaggattttccatgtccctggaacaacagtacaccgcgatccttggccagcttggcgaggacgtttcccgcgaaggcctgctggacacgcccaagcgcgccgccaaggccatgcagtacctctgccgtggctaccagcagacgctggaagaggtcaccaacggcgcgctgttcagctccgacaacagcgagatggtgctggtcaagaacatcgagctgtattcgctgtgcgagcatcacctgctgccgttcatcggcaaggctcatgttgcctacatccccaacggcaaggtgctcggcctgtccaaggtagcgcgcatcgtcgacatgtacgcccgccgcctgcagatccaggaaaacctcagccggcagatcgccgaagccattgagcaggtcaccggcgcactcggcgtggcggtggtcatcgaagcgcagcacatgtgcatgatgatgcgcggcgtggagaagcagaactcctccatggtcacctcggtgatgctcggcgaattccgcagcaacccggcgacccgcggcgaattcctcaatctggttcgttgag

SEQ ID NO: 266333 - DNA, 658 bp, Unknown
  Bacterial polypeptide expressing nucleotide sequence isolated from the Sargasso Sea
gatgacgagcttaagtcgggaagccctgttggtcagggccgccctcgaggccgagggcctcgaaacacctctggtggccaatgcactggacggtcagcagaagcgggagaagatcgaaggccacatgcgcgccatcatggagacgctggggctggatctggccgatgacagtctggcggagacgccgcaccgcatcgccaagatgtacgtcaacgagatcttctccggcctcgattacgccaccttccccaaggtgacggtgatcgagaacaagatgaaggtggacgagatgatcatggtgcgggacatcagcctcaccagcacctgcgagcaccacttcgtcaccatcgacgggctggcccacgtggcctacatcccccgtggcaaggtgatcgggctctccaagatcaaccgcatcgtgcagttctttgcccgccgtccccaggtgcaggagcgactgacccagcagatcctgctggcgttgcagaccctgctcggcaccaaggatgtggccatcagcatcaaggcgacccacttctgcgtgaaggcgcgtggcgtgatggactccacctcctacaccaccaccacctccctcggtggggtgttcaagacccagcctgatacccgcgccgaattcctggccggcctgaagcgctga

SEQ ID NO: 266334 - DNA, 577 bp, Unknown
  Bacterial polypeptide expressing nucleotide sequence isolated from the Sargasso Sea
aatgaacgaagataaacgtaaaaaattagaagctaatacaaaaaatttattagagcttttaggagaagatccttctagagaagggttagtaaatacacctaaaagagtagcaaaagcatgggattttttaacaaaaggttataatgaaaatcttgatgatttaatcaataacgcgatttttgaaggcgaatccaaagatatggttattgtaaagaatattgagttctatagtctatgtgaacatcatatgataccattttatggaaaagctcatattggatatattccagatggtaaaattataggattgtctaaacttgctaggattactgatcttttttcacaaaggcttcaagttcaagaacgtttaactaatcaaatcgcacaatgtcttcaagaagttctaaaacctcgcggtgttgcagtggttttagaaggaaaacatttttgcatgcttagcagaggtgttcaaaaacaaaatagcattgctacaagcagttcaatgttgggtatctttagagagaaagaatctacaaggaatgaatttttaaaactgattgaaatgaataacatttag

SEQ ID NO: 266335 - DNA, 652 bp, Unknown
  Bacterial polypeptide expressing nucleotide sequence isolated from the Sargasso Sea
atgtcattaagtgaagcagcagtaaaagtacaagccgccctgcaagagcgcggacttgaaacccccatgctccccagtgtgtttactcctgaagagcgtaaggacaagattgaacaccatatgaaggaaattctgacgcttatgtcactggatctttctgatgacagtcttgccgataccccacgccgcatcgccaaaatgtatgtcgacgaaatcttctccggtctagattatgctaacttcccgaagatcactgtgattgataacaaaatgggctttgatgaaatggtgcgcgtacaggatattagcctgaccagtacctgtgaacatcaccttgtcactattgatggcacagcaaccattgcgtatcttccacgtaaaaaaattattggtttatcaaagattaaccgcattgtacgtttctttgcccaacgtcctcaggtacaagagcgtttgactcagcaagtgttagtcgcgctgcagaccttgctcgaaactaaagatgttgcggttaaaatggatgcggtgcattactgcgtaaaatcccgcggcgtaatggactccactagctccaccaccactacggccttaggtggcatttttaaatccaaccccgcgacccgcgccgagtttttacaccagtcgaagtaag

SEQ ID NO: 266336 - DNA, 607 bp, Unknown
  Bacterial polypeptide expressing nucleotide sequence isolated from the Sargasso Sea
tatgaaattagtaaaaaacattgaaaaggatttagttaaaaataacgtttctgacaaagaagcggaggaagctttcaaaaaaatattgaaatggataggtgaagatcctgatagagagggactagtagaaacaccaaaaagattagttaaagcttttaaagaatattttggtggatatgatgttgatgctatatctttattatcaaaaacttttggagatgtggaaggttacgatgatatggtgatacaaaaaaatatatctctacaaagtcattgcgaacaccatatggcaccaataattggagttgtccatgttgcttatataccaaaaaataaagttgtaggattaagtaaattagcaagactagtcgaagtttatgcaaaaagattgcaaacacaagaaaggctaacaaaacaaatagccacaacattgatggaggcgttagatgcaaagggtgttgccgtttccgttgatgcagcccatcaatgcatgactatgagaggcattaaaaaagaacaagcaacaacagtgactaactattatttaggacaatttaaagaagatttaagttttcaaaatagatatttgagatttataagtaaataa

SEQ ID NO: 266337 - DNA, 571 bp, Unknown
  Bacterial polypeptide expressing nucleotide sequence isolated from the Sargasso Sea
tatggaaaacaatgagaaattagaaaatttaacttatcaattacttcaagaaataggtgaggatcctaaaagagaaggcttagcccgaacgccaactagagtatcaaaggcatggcagtatttttcacaaggttatggtcaagatttggaagtgattgttaataatgcaatctttaacgaatcctcaaaagatatggttgttgtccgtgatgtagaattctttagtttatgtgagcatcatttattaccattttttggaaaagcacatgtaggatacataccagatggaagaataattggattatcaaaaataccaaggatcatcgatatgttttctcgcaggttacaagttcaagaaaggttaactcatcaaatagctgatgcaattcatcttgtattgaaacctattggtgtagctattgtaatggaaggaagacatatgtgtatgcaaatgcgtggtgttgaaaaacagaatagtttagcaacaacttccaccatgttagggaaatttagagagtcagtaagaacacgtaatgaattcatgtctttaattaatcggataagtgtttga

SEQ ID NO: 266338 - DNA, 610 bp, Unknown
  Bacterial polypeptide expressing nucleotide sequence isolated from the Sargasso Sea
atgaaatctgaaaaaaataaaattgttagctttaaagaaaattcaaaaatttctgatcatgaagcagaggaagcttttaagacaatacttaaatggattggtgaagatccatcaagagaaggtttattagaaactccaaaaagagtagctaaggcttttaaagaatatttcaaaggatacaatgaagatcctcacaaaattttagataaaacgtttggtgatgttgaaggttacgatgacatggttgttcaaaaaaacatatcggtacaaagtcattgtgagcaccacatggcgcctataattggaattgcacatgtagcgtatattccaaatcaaagagttgttggtttaagtaaacttgcaagagttgtagaggttttttcaaaaagacttcagacacaagagagacttacaatgcaaatagcgacaactttaatggatacattagacgcgaaaggagttgcagtaactatagactcaactcatcagtgcatgacaatgcgtggaataaaaaaagagcaagcgactactgttacaaactattacttaggacaattcaaagaagatttaagctatcaaaatagatatttgcgattcatcagtaaataat

SEQ ID NO: 266339 - DNA, 556 bp, Unknown
  Bacterial polypeptide expressing nucleotide sequence isolated from the Sargasso Sea
atgcataacgaattaaaagacagctaccaaaaaattataaccgccgtaggcgaagacgctgaacgcgaaggtttattagacacaccaaaacgtgctgcaaaagcaatggaatacctaacacaagggtatcgccaaacgcttgatgaaattactaataatgccgtatttacctctgatgcagacgacatggtacttgtgcaagatatagaactttactctatgtgtgagcatcacttgctaccatttattgggcgctgccatattgcttatattccaaacggcaaggtgctggggttatctaaatttgcgcgtattgttgatatgttttcgcgtcgctttcaaatacaagaacagttaacacatcaaattgccaaagccgttgaagaagtgactggtgcaaaaggtgtaggcgttattgttgaagctaagcacatgtgcatgatgatgcgcggtgtagaaaagcaaaactcaagcatgcgtacatcagtaatgctgggtaactttagaagcgaccctaaaacacgcaacgaatttttgcagcttattaaagggtaat

SEQ ID NO: 266340 - DNA, 580 bp, Unknown
  Bacterial polypeptide expressing nucleotide sequence isolated from the Sargasso Sea
attgcaggaggttaacatttcagatattgataaagatataatagaaagttctataaaagcaattttagatagtttgggagataaaatagacaaaaatggaactatgaaaactcctacgagagttgcaaaggcatacgaagaacttcttgaaggttataacacggacatagattcattaataaataatgctttatttgatgtagagtatgatcaaattgtaactgtaaaaaatattagcttttactctttatgtgaacatcaccttttacccttttttggcacaatccatataggatatctacctaaggataaaatcataggactatctaaattacctagaatagctctaatgtttgcgagaagattacaggtccaagaaagacttacagaacaaataggtgaagctatatataaaaaaactaatgccttaggagcaggtgttgtagtaactgctcaacatatgtgctcaagtatgaggggtgtaaaaatgcctggtacaaatatggttacaagctccctatttggtagttttaagtctgacagttcaactaggaatgaattcttagacttaatcagataa

SEQ ID NO: 266341 - DNA, 685 bp, Unknown
  Bacterial polypeptide expressing nucleotide sequence isolated from the Sargasso Sea
aatgaaactacaagaattattagacaaagagattgatgcaattggtgatgatcacattggatcaaataatgaagagacacctcttaaagaaggagcttttgatttacctgatcctgagaaggtaagtctgatccaaaaaaaggtttatgaaattttggatatccttggtatggatttgactgatgatagtctaaaaggaacaccaagaagagttgctaaaatgtttgttaatgaaattttctctggtataaatccaaagaataaaccagagatgtcaacatttgaaaacaaatataattacggagagatgcttgttgaaaagaatatcacattgtattctacatgtgaacatcatctacttcctattgtaggactggctcatgttgcatatatatctaatggtaatgttattggactttccaaaataaacagaatagtgaggtattttgctgaaagacctcaagtacaagaaagattgacaatacagatagttagagagcttcaaaaagctttaaacactgatgatgttgcatgcgtaattgatgccaagcacttatgtgtaaactctagaggtattaaagacattaattctagcactgttacttctgagtttggaggtaaatttaaaaaagagaaaatcaaaagagagtttttagactatattaaacttgagtctgaactttaa

SEQ ID NO: 266342 - DNA, 519 bp, Unknown
  Bacterial polypeptide expressing nucleotide sequence isolated from the Sargasso Sea
aatgaataacaatattgataaaataaaatcattaatagcagaattaatcgaattaattggtgaagacgtaagtagagaaggaattaaaaaaactccacttcgagttgcaaaatcatgggattttttttctcagggatataggcaaaaagtaagcgatgtaattaatgatgcaatatttactgaagattccaaagatatgattgtagttcgagatattgagtttttttctttatgcgagcatcatatgattccattttttggaagagctcatgtaggatatattccaaatggtaaaataattggactgtcaaaaattccaagaattgtagatttattttcacgaaggcttcaagtgcaagaaagattaaccgatcaaattgcaaataccatccaagatgtgctgaatcctataggagttgctgtcgtaatggaaggaaggcatctatgtatgcagatgcgtggcgtggaaaagcaaaatagtttagcatcaacatcagcaatgttagggcaatttagaaa

SEQ ID NO: 266343 - DNA, 682 bp, Unknown
  Bacterial polypeptide expressing nucleotide sequence isolated from the Sargasso Sea
tatgaaattagaagatattttaaaaagagaattagattcaattggagatgatcatcatagctcaaaccaagagaacccaattagagaagatgcatttgatgtatcagattctgaaaaaattaaactaattgaagtaaaggttcgcgatatattagaaatattgggtatggaccttactgatgatagtttaaaaggaactcctttaagagttgcaaaaatgtatgtaaatgaagtttttggaggactaaatcctgaaaagaaacctgttccttcaaccttcgataataaatataaatatggtgaaatgttagtagaaaaaaacattacactatattctacctgtgagcatcacctactacctattattggttttgctcatgttgcttatgtttcaaatgggacagttgtaggactttccaaaattaatagagtagttaattattactctaaaaggcctcaggttcaagaaagattaacaattcaagttgttaaagagttacaaaaaatactaaatactgatgatgttgcatgtgttatagatgcaaaacatttatgcgttaattctagaggtattaacgatatatcatgtagtactgtaactgctgaatttggaggtaaatttaaagaccttaaatttagaagagattttttagattatataaaacttgaaacagatatttaa

SEQ ID NO: 266344 - DNA, 577 bp, Unknown
  Bacterial polypeptide expressing nucleotide sequence isolated from the Sargasso Sea
atgaacgaaaagaaacaaaaagaattagaaaaaaatacaagaaatttacttgaattgcttggagaagatccagatagagaaggtttgattaatacacctaaaagggtagctaaagcatggaatttcttaacaaaaggttatactgaaaaccttgatgatctaataaataatgcaatttttgaaggcgaatcaaaagatatggttattgttaagaatattgaattttatagtctatgcgaacatcatatgattccattttatggaaaagcgcatataggatatattcctaatgggaaaattattggattatcaaaacttgcaagaattacagatctttttgcacaaagacttcaggttcaggagcgcttaactaaccaaatagctcaatgtcttcaagaggttcttaatccaagaggagttgcagtagttttagaaggaaaacatttttgtatgttaagtagaggcgttcaaaaacaaaatagtattgcaaccagtagttcaatgttaggtatttttagggaaaaagaatctactaggaatgaatttttaaagttaattgaaatgaacaacatttagg

SEQ ID NO: 266345 - DNA, 378 bp, Unknown
  Bacterial polypeptide expressing nucleotide sequence isolated from the Sargasso Sea
actacctgctcaaaactaaagaaattctcatgcatggctatatgaatgtagaggctttgaagttaactattgaaacaaaagaagcgcactattggagcagatcaagaaagcaaatttggcacaagggtaaaactagtggatttgtgcaaatagttaaagaaattagaattgatgatgatcaagattctgtgtggctaactgttgatattggtgatggtgctagctgtcacgtcggttatagatcttgtttttatagatcaataccattaggtgaaattaaaaatggaaaacaagttgaaatgaaatttgaagaaaaagaaaaaaagtttgatccagacgaagtttacaaaggacaacccaatccaacaaaaatataat

SEQ ID NO: 266346 - DNA, 940 bp, Unknown
  Bacterial polypeptide expressing nucleotide sequence isolated from the Sargasso Sea
acggacggagacggcctgcacgacggcctggacaccgacgatgacggcgacgggatcggcgacgacaacgacgccttcccgctggactcatccgaggacaccgacaccgacggcgacgggacaggcgacaacgccgacaccgacgacgacggcgacggcaccgcggactccgacgactgggcaccccttgacgactcggaggacaccgacaccgacggagacggtacaggcgacaacgccgacaccgacgacgacggcgacggggtcgacgactccgccgaggacgctggctgcgacctgctcgtagactgcgacggagacggcgtcaacgacgacacggacgccttcgacaccgatgccaacgagtcggcagacgctgacggcgacggtatcggggacaacgcggacgagttcgactcggacgcgaccgaggacacagacaccgacggcgacggcgtgggcgacaacggggacgctttccccgatgacgccagcgagtcagctgacacggacggcgacggcgtgggcgacaacggggacgcattccccagcgacgcctccgagaccaccgacaccgacggcgacggcgtgggcgacaactcagactggaacgccacagactccaccgagtccaacgacaacgacggcgacggagtgggcgacaacgcggacaccgacgacgacgacgacggcgtcctggacgttgacgaggactccaacgcgaccctcgactgcagcatcctatccgactgcgacggagacggggtcggtgacgccactgatgccttcgacgtggacccagaggcatgggacgacctggacggtgacggccttgccgacaccttcccgaacctgcttgtgaacagctacgagacgatccagctgtgcgctcccgagggtgggacggagtggtacgatgccaccacctactcggatgggc

SEQ ID NO: 266347 - DNA, 424 bp, Unknown
  Bacterial polypeptide expressing nucleotide sequence isolated from the Sargasso Sea
tatgtttaaaaaaagagaaaatgtcgctgatatagaggaaggtaacctattatctccaaaattcgataatgatggtttaattcctgtaattacaacatgtgcagaaactaaagagattctaatgcacggttatatgaatgttgaagctttaaaattaacaatagaaacaaaagaagctcactactggagcaggtcaagaaaagagatttggcataaaggaaaaactagtggcttcactcaaaaagtaaaagaaataagaattgacgatgatcaagatgcagtttggataactgtagacattggtgatggtgcaagttgccatgttggttacagatcatgtttttatcgatcagtgcctacaggtaaaattgaaaatggacgtaaagtagaaatgaaatttgaagaagaaaagaaaaaatttgat

SEQ ID NO: 266348 - DNA, 460 bp, Unknown
  Bacterial polypeptide expressing nucleotide sequence isolated from the Sargasso Sea
tatgaacgaaaaattaataaaaattattaaatttaataaagatggattagttcctgccatagctcaacagcatgatacaggagaagtattaatgctagcttggatgaataaagattctatccaagaaacacttactactaatcaagtatgttattggtctagatctcgacaaaagctttggcgtaaaggagaaacatcaggaaatacacaacgacttatagagtttcgttatgactgtgatgaagatactattttattaataatagatcaaactggcgcagcttgtcacacaggtagaaggaactgtttctacagagtagcaaaaaatgaatctggagaaatagaaacgactctaactgaaaagaaaaatatcaccccaaaaagtaaatttgatcccaatttaaataaaaaattaaatccaagctcgattagagaggaagatgttttaagtattcaaaag

SEQ ID NO: 266349 - DNA, 469 bp, Unknown
  Bacterial polypeptide expressing nucleotide sequence isolated from the Sargasso Sea
atgtttaaaaaaagagaaaatgtcgctgaaatagaggaaggtaagttactttcaccaaaatttgataatgatggattgattcccgtgattactacatgttcaaaaactaaagaaatcttgatgcatggttacatgaatgttgaggcatttaaattaacaatagaaacaaaagaagctcattattttagtagatcaagaaaacaaatttggcacaaaggtaaaacaagtggttttgttcaaaaggttaaagaaatacgaattgatgacgatcaagatgctgtttggataacagttgatattggtgagggagcgagttgtcatgttggatatagatcctgtttttatcggtctgttccaatgggaaaaattgataacgcaagaaatatagaaatgaagtttgaagaagataaaaaaaaatttgatccagagaaagtttacaaaggccagccaaatccaactaaaatataga

SEQ ID NO: 266350 - DNA, 469 bp, Unknown
  Bacterial polypeptide expressing nucleotide sequence isolated from the Sargasso Sea
catgttcaaaaagagagaaagcgtttttgaggtagaagagggaaaatttctatctcctaaatttgataaagatggacttattccagtaaccacctctgacagtggctccggtgaattattaatgcatggttacatgaatgaagaagctctaaaaaaaacaattgaaactaaagaagctcattattggagtagatctagaaaagatatatggcacaaaggaaaaacaagcggttttgtacaaaaagttattgatctaagaatagatgatgatcaagatgcattgtggatgtcagtagatataggaaacggatcaagctgccatgtaggatataaatcatgcttttacagatcaatacctttgggaaaaattaaaaattctgaagaaattaaattagaatttaaagaaaaagaaaaaaaatttgatcctgaaaaagtttataaaggtcaacccaacccaacgaaactttaa

SEQ ID NO: 266351 - DNA, 652 bp, Unknown
  Bacterial polypeptide expressing nucleotide sequence isolated from the Sargasso Sea
ctggacatcgacgagtcagtcgacacggacggcgacggcgtctgcaacggcgacgacgctgacgacgacggcgacggcgtggacgacgcggacgaggccgacggatcaggcctggctaccgctacggactgcactctagtcacggactgcgacggggacggcgtggacgactcggccgaggccgacggatccgcactggacctggacggagacggcacagctgacgggatcgactgcgcggtcgacacggactgcgacgacgacggcacagccgacgacgcagacgcattcccagtcgacgcatccgagaccaccgacaccgacggcgacggaaccggcaacaacgccgacaccgacgacgacggagacggatactcggacgctgacgagacgaccaactgcggcgatggcaccaccaccaccgcatactcgtcctccagcgacccgctagactcgaccgacacgcccgacgacatggacggcgacggcatatgcgactacaccgacaccgacagggacggcgacggactggccaacggctgggacgcatgccccgatgacggatcgggatacaccgacacggacggcgacggagcctgcgacgagtccgacacggacgacgacgacgacggcaccctagacgccgacgacg

SEQ ID NO: 266352 - DNA, 841 bp, Unknown
  Bacterial polypeptide expressing nucleotide sequence isolated from the Sargasso Sea
tatgaacgaacaattaataaaaattattaaatttaatagagacggattagttcctgccatagctcaacaacatgatacaggagaagtattaatgttagcttggatgagtaaagattctataaaacaaacactaactactaatcaagtatgttattggtctagatctcgccaaaagctttggcgtaaaggggaaacatccggaaatacacaaagacttatagagtttcgctatgattgtgatgaagatactattttattagtggtagatcaaactggttcagcttgtcacacaggtagaaggaactgtttctacagagtagcaaaaaatgaatctggagaaatagaaacaactctgactgaaaagaaaaatatcaccctaaaaagtaaatttgataccaattcaaataaaaaatttaattcaactacgattagagaggaagatgttttaagtattcaaaaggaatgggcagattcaattatctcaattgggaagatatttttagataaaggtaattacagactggaagcagaaaaaacattaaaaaaactatatgcatttgatataagtaatgtgcttttcaaaccaacttttgcttctcaaaatcaatttcgtaatagttttgaagatgctttatcttatttcgttggtggaaatattaaggaggataatggttttgccattaaaccatggttcaaaataagattttctgaaaataaaattgttatttctcgtgataatgccattgcaatgggaaattactattttacttcagtagaggataaaaaaaatgaaactaaggtagaatatacctttggatatataaaagataaaaaaggtaat

SEQ ID NO: 266353 - DNA, 391 bp, Unknown
  Bacterial polypeptide expressing nucleotide sequence isolated from the Sargasso Sea
aatgtttaaaaaaagagaaaatgtcactgatattgaagaaggaaactttttatcgcctaaatttgataatgatggcttaattccagttgttacaacttgtgttaataccaaggaaattttaatgcacgggtacatgaatgttgaagcgttaaggcttacaatagagacaaaagaggctcattattggagtagatctagaaaagaaatttggcacaaaggcaaaacaagtggttttgtacaaaaagttaaggaaataagaatcgatgatgaccaagattcagtttggttaagtgtagacttaggaggtggtgctagttgtcatgtaggatataaatcttgcttttatagatcaataccacttggaaaaattgataatggaagaaaaagttga

SEQ ID NO: 266354 - DNA, 469 bp, Unknown
  Bacterial polypeptide expressing nucleotide sequence isolated from the Sargasso Sea
tatgtttaaaaaaagagaaaatattgaagaaattgaagaagggaaattgctgtcccctaaatttgataatgatggattaatacctgttgttaccacatgttataatacaaaagaaatattgatgcatggatatatgaatgttgaagcattaaaattatcaattgaaactaaagaagctcattattggagtagatcaagaaaacaaatttggcataaaggaaaaacaagtggttttgttcaaaaaattaaagaaatcagaattgacgatgatcaagactctgtctggatgtcagttgatattggtgacggtgcaagttgtcatgttggatataaatcttgcttttatagatcaatacctttgggtaagataagtaatgctagacaaattgaaatgaaatttgaagaaaaagaaaaaaaatttaatccagaagaagtttataaaggacaacctaatccaacaaaaatataa

SEQ ID NO: 266355 - DNA, 328 bp, Unknown
  Bacterial polypeptide expressing nucleotide sequence isolated from the Sargasso Sea
tgaagctttaactaagacaatagaaaccggagaagctttctattggagccgtagcagaaaagtgctgtggcacaagggcgcaacaagtggattaacccaaaaaattatagaaatgcgaattgatgacgatcaggatgcaatatggctgcgtgtcacggtcagcggcaacggtgcttcttgccatgtaggctatcggtcttgcttttatcggtccataccaactggggctgtgcctgaaaacccaatcgagctaatttatgaggaaaccgaaaagaccttcgaccctgaagaggtttacggagatgccccaaacccgacaaaactttga

SEQ ID NO: 266356 - DNA, 469 bp, Unknown
  Bacterial polypeptide expressing nucleotide sequence isolated from the Sargasso Sea
atgtttaaaaaaagagaaaatgtagcagaaattgaagaaggcaagcttttatctcctaaattcgacaatgatggattgattccagtcattacaacatgctcaaaaacaaaagaaatattaatgcatgggtatatgaatgttgaagcctttaagttaactattgaaaccaaagaagcacattactggagtagatcaagacaatcaatttggcataaaggaaaaacaagtgggtttgttcaaaaagtaaaagagattcgaattgatgatgatcaagatgcagtgtggatgactgtagatattggtgaaggttctagttgccacgttggctacagatcctgtttttatagatctgtccctttgggtaaaattgataatgcaagacaaatcgaaatgaaatttgaagaagaagaaaaaaaatttgatccagaggttgtttataaaggacaacctaatccaacaaaaatataaa

SEQ ID NO: 266357 - DNA, 469 bp, Unknown
  Bacterial polypeptide expressing nucleotide sequence isolated from the Sargasso Sea
atgttcaaaaaaagagaaaatgtacttgaaattgaggaagggaatctcctttcaccaaaatttgataatgatgggcttattccagtcattacaatgtgctctaaaacaaaagagattttaatgcacggatatatgaatgttgaagctttaaaaaaaacaattgaaacaaaagaagctcattattttagtagatcaagaaatgcgctatggcataaaggtaaaacaagcggctttacacaaaaagttactgaaattagaattgatgatgatcaggactcaatatggttaactgttgatattggagagggatcaagctgccatgtgggttatcgatcttgtttttatagatctatacctttaggaccaatagataatggtagagaagtagaaatgaaatttactgaaaaagaaaaaaaatttgatccagaaaaagtttataaaggtcaacctaatccaacaaaaatttgat

SEQ ID NO: 266358 - DNA, 469 bp, Unknown
  Bacterial polypeptide expressing nucleotide sequence isolated from the Sargasso Sea
atgtttaaaaagagagaaaatgtcgctgatatagaagagggaagcttattatcacctaaatttgataatgatggccttattccagtaattacaacttgttctaaaactaaagaaattcttatgcatggctatatgaatatggaagctttaaagttaacaatagaaacaaaagaagctcattattggagcagatctagaaaacaaatttggcataaagggaaaacaagtggatttgtgcaaaaagttaaggaagtaagaattgatgatgaccaggattctgtatggctaactgtcgatataggcgatggcgcaagttgtcatgttggttatcgttcttgcttttatagatctgtgcctttaggaaaaattgataacgctagacaaatagaaatgaaatttgaagaaaaagaaaaaaagtttgatccaaaaaaagtttataaagacgaacctaatccaacaaaaatttaat

SEQ ID NO: 266359 - DNA, 469 bp, Unknown
  Bacterial polypeptide expressing nucleotide sequence isolated from the Sargasso Sea
tatgtttaaaaaaagagaaaatgtcgctgagatagaagagggaaatctactatcgccaaaatttgacaacgatggcttgattccggttgtgacaacttgttccacaactaaagaaattttaatgcatggctatatgaatgttgaggcctttaaattaacaatagaaactaaagaagctcattattggagcagatccagaaaacaaatttggcacaaaggcaaaacaagtgggtttgttcaaaaagttatcgagattagaattgatgatgatcaagatgcagtctggttaagtgttgatattggagatggtgccagttgccatgttgggtacagatcttgtttttacagatcaataccacttggaaaaattgagaatggtagaaatgttgaaatgaaatttgaagaaaaagaaaaaaaatttgatccagataaagtttacgaaggtcagcctaaccccactaaaatctaa

SEQ ID NO: 266360 - DNA, 430 bp, Unknown
  Bacterial polypeptide expressing nucleotide sequence isolated from the Sargasso Sea
atgtttaaaaagagagaaaacgtatttgaagtagaggagggaaatcttttatcacctaaatttgataaagaaggacttattcctgtgactacaactgacagcagttcaggtgatttattgatgcacggctatatgaatgacgaagctttaaaaaaaacaattgaaactaaagaagctcactactggagtagatctcgaaaagacatatggcataaaggaaaaacaagtggatttatacaaaaggtaatagacttaagaatagatgatgatcaagatgctttatggatgtcggttgacattggtaatggtgctagttgtcacgttggttataaatcatgtttctatagatctatacctttagggcaaataaaaaaccctgaaaatataaaattagaatttaaagaaaaagaaaaaaaattgatccaaaaaa

SEQ ID NO: 266361 - DNA, 469 bp, Unknown
  Bacterial polypeptide expressing nucleotide sequence isolated from the Sargasso Sea
tatgttcaaaaaaagagaaaatgtacttgaaatcgaggaaggaaatctcctttctccaaaatttgataatgatgggcttattccagtcattacgatgtgcgctaaaacaaaagaaattttaatgcacgggtacatgaatgttgaagctttaaaaaaaacaattgaaacaaaggaagctcattattttagtagatcaagaaatgcattatggcataaaggcaaaacaagtggctttacacaaaaagttactgaaattagaattgatgatgatcaagactcaatatggttaactgttgatattggggaaggatcaagctgccatgtaggttatcgatcttgtttttataggtcaatccctttaggaccaatagataatggtagagaagtagaaatgaaatttactgaaaaagaaaaaaaatttgatccagaaaaagtttataaaggtcaacctaatcctacaaaaatataa

SEQ ID NO: 266362 - DNA, 262 bp, Unknown
  Bacterial polypeptide expressing nucleotide sequence isolated from the Sargasso Sea
ctggacaccaccctgaaaaccggcgaagcgcactattggtctcgctcgcgcgcagagctatggcacaagggcgcaacgtccggccacgtgcaaagggtccatgaggtgcgcgtcgactgcgatcaggacgtgatcctgatgaaagtcgatcaaaccggcggcgcctgccacacacaccgcaaaagctgtttctatcgcatcgcgagcgccgccgacgcacctctcgtttttgacgagactttgccgcgaccaacggaataat

SEQ ID NO: 266363 - DNA, 469 bp, Unknown
  Bacterial polypeptide expressing nucleotide sequence isolated from the Sargasso Sea
atgtttaaaaaaagagaaaatgtcgctgatatagaggaaggtaacctattatctccaaaattcgataatgatggtttaatccctgtaattacaacatgtgcagaaactaaagagattctaatgcacggttatatgaatgttgaagctttaaaattaacaatagaaacaaaagaagctcactactggagcaggtctagaaaagaaatttggcataaaggaaaaactagcggatttactcaaaaagtaaaagaaataagaattgacgatgatcaagatgcagtttggataactgtagatattggtgatggtgcaagttgtcatgttggttacagatcatgtttttatcgatcagtacctacaggaaaaattgaaaatggacgtaaagtaaaaatgaaatttgaagaagaaaagaaaaaatttgatccagaagttgtttataaaggacaacctaatcccactaaaatttaat

SEQ ID NO: 266364 - DNA, 469 bp, Unknown
  Bacterial polypeptide expressing nucleotide sequence isolated from the Sargasso Sea
atgtttaaaaaaagagagagcgtttttgagatagaagagggaaaatttctttctccaaaatttgatgaaaaaggtcttatacctgtaactacgactgaccataaatcaggagaagttttgatgcacggatatatgaaccaagaggccttaaaacttactatagaaaaaaaagaagcttgctattggagtagatctagaaacactttatggcacaaaggtaaaacaagtggatttgttcaaaaagttgtagatataagaattgatgatgatcaagactcattatggttgactgtagatattggtgatggggctagttgtcatgtgggttataaatcttgtttttatagatcgattcctttaggaaaaataaataattctgaggaaataaaacttgaatataaagagaaagaaaaaaaatttgatccagaaaaagtatacaaaggtcaacctaatccaacgaaattataac

SEQ ID NO: 266365 - DNA, 469 bp, Unknown
  Bacterial polypeptide expressing nucleotide sequence isolated from the Sargasso Sea
atgtttaaaaaaagagagagtgtttttgagatagaggaaggaaaatttctttctccaaaatttgacgaaaaaggtcttatacctgttactaccactgaccataaatcaggagaagttttaatgcacggttatatgaaccaagagtctttaaaactaactattgaaaaaaaagaggctttttattggagcagatcaagaaacgctttatggcacaaaggaaaaacaagtggatttgttcaaaaagttttagatataagaatagatgatgatcaagattctttatggatgacggtagacataggtgatggagcaagttgtcatgttggatataaatcatgtttttataggtctattcctcttggtaaaataagtaactctgaagaagtaaaacttgaatttaaagaaaaagaaaaaaaatttgatccagaaaaagtatataaaggtcaaactaatccaactaaattataaa

SEQ ID NO: 266366 - DNA, 469 bp, Unknown
  Bacterial polypeptide expressing nucleotide sequence isolated from the Sargasso Sea
atgtttaaaaaaagagaaaatgtcgcggatattgaagagggtaatttactttcaccaaaatttaacaatgatgggcttatacctgtcataacaactgattttaaaaccaaggaagttttaatgcaaggtttcatgaattctgaagctcttaaaaaaactattgaaactaaagaagctcattattggagcagatcaagagaagaagtttggcacaaaggtgagacaagtggttttgttcaaaaagttattgagatgagaatagatgatgaccaagattctatatggatgagtgtagatataggcgacggagcaagttgccacgttggttacaaatcctgtttttatagatcaattactcttggaaagattgaaaacaccgaaaaggttaaaatagattttaaggaaaaaaagaaaaaatttgatcctaaagtaatttataaaaacaaaccaaatccaacaaaaatctagt

SEQ ID NO: 266367 - DNA, 469 bp, Unknown
  Bacterial polypeptide expressing nucleotide sequence isolated from the Sargasso Sea
tatgtttaaaaaaagagatagtgtttttgaggtagaagaaggaaaatttttatctccaaaatttgatgatcaaggcttaattccggtagtaactacggatagtaaaactggtgaagttttaatgcatggatatatgaattctgaagctttaaaaaaaactatagaaacaaaagaagcccattattggagtagatcaagaaaatctatttggcacaaaggaaaaacaagtggatttactcaaaaagtaattcaaataagaatagatgacgatcaagactctgtttggttgaatgtcgatattggagatggtgcaagttgccatgtgggttacaaatcatgtttttatagatcgatcccgttaggtaaaatagatcagtctgagaaagttgaaatgaaatttgaagaaaaagagaaaaaatttgatccagaaaaagtttataaaggacaacctaatccaactaaactttaa

SEQ ID NO: 266368 - DNA, 469 bp, Unknown
  Bacterial polypeptide expressing nucleotide sequence isolated from the Sargasso Sea
tatgttcaaaaaaagagaaaatgtagttgaaattgaagagggaaatcttctttcaccaaaatttgataatgatggtctaattccagtaataactatgtgcgctaaaacaaaagaaattttaatgcatggttatatgaatattgaagcattacaaaaaactatagaaactaaagaggctcattattttagcagatctagaaaatctatttggcataaaggtaaaacaagtggttttgttcaaaaggtcaccgaaattagaatagatgatgatcaagactctatttggttaactgttgatattggggatggtgcaagttgccatgtaggttatcgttcatgtttctatagaacaattccattaggaccaattgaaaatggtagaaaagttgaaatgaaatttacagaaaaagaaaaaaaatttgatccaaagaaagtttataaaggtcagcctaatccgacaaaaatttaa

SEQ ID NO: 266369 - DNA, 403 bp, Unknown
  Bacterial polypeptide expressing nucleotide sequence isolated from the Sargasso Sea
taatgatggtttaatccctgtaattacaacatgtgctgaaaccaaagagattctaatgcacggatatatgaatgttgaagctttaaaattaacaatagaaacaaaagaagctcactactggagcagatctagaaaagaaatttggcataaagggaaaactagtggctttactcaaaaagttaaagaaattagaattgatgacgatcaagatgcagtttggataactgtagatattggtgatggtgcaagttgtcatgttggttacagatcatgtttttatcgatcagtgcccacaggtaaaattgaaaatggacgtaaagtagaaatgaagtttgaagaagaaaagaaaaaatttgatccagaagttgtttataaaggacaacctaatccaacaaagatataa

SEQ ID NO: 266370 - DNA, 469 bp, Unknown
  Bacterial polypeptide expressing nucleotide sequence isolated from the Sargasso Sea
atgtttaaaaaaagagaaaatgtagcagaaatagaagaaggcaagcttttatctcctaaattcgacaatgatggattgattccagtcattacaacatgctcaaaaacaaaagaaatattaatgcatgggtatatgaatgtcgaagccttcaagttaactattgaaaccaaagaagcacattactggagcagatcaaggcaatcaatttggcataaaggaaaaacaagtgggtttgtacaaaaagtaaaagagattcgaattgatgatgatcaagatgcagtgtggatgactgtagatattggcgaaggttctagttgccacgttgggtacagatcctgtttttacagatctgttcctttgggtaaaattgataatgcaagacaaatcgaaatgaaatttgaagaagaagaaaaaaaatttgatccagaggttgtttataaaggacaacctaatccaacaaaaatataaa

SEQ ID NO: 266371 - DNA, 475 bp, Unknown
  Bacterial polypeptide expressing nucleotide sequence isolated from the Sargasso Sea
atgacagaaatattcaaaaagagaaagacagtagagcaagttgaagaagggaatgaacttgctcctaaattcgacgaaaacggtttaatgcctgtagtgacaaccgatgctaaaactggagatgtattaatgcttggttaccaaaatgaagaggccgttaagcttactattgaaaccggtgaagcttattattggagtagaagtagaaaatgtttgtggcacaaaggagcgacaagcggtctgatacaaaaagttatagatataagaattgatgacgatcaagatgcaatttggctcaaggttgagttacaaggattagaagctagctgccatgtcggatacaaatcttgcttctatagaagcataccaactggcaatataaaagaagatataaaattaatatataaagaagataaaaaagcatttaaaccggaagaagtatacggagatgcaccaaatcctacaaaactataat

SEQ ID NO: 266372 - DNA, 469 bp, Unknown
  Bacterial polypeptide expressing nucleotide sequence isolated from the Sargasso Sea
aatgtttaaaaaaagagaaaatgtcgcggaaatagaagagggaaacctattgtctccaaaatttaataacgatggtcttataccggtcataacaactgatcacaaaacaaatgaagtattaatgcaaggatttatgaatgaagaagctctaaaaaaaacaatcgaaacaaaagaagctcattattggagtagatctagaaaagaagtttggcacaaaggtgagaccagtggttacgttcaaaaagtcgttgaacttagaattgatgacgatcaagactcaatatggatgaccgtaaatattggtgatggcgctagttgccatgtcgggtataagtcttgtttttatagatcagtaccccttggaaaaattgaagatagtgaaaaaataaaaatggaatttaaagaaaaaaagaaaaaatttgatcctaggaaagtttataaagataaaccaaatccaactaaaatttaa

SEQ ID NO: 266373 - DNA, 469 bp, Unknown
  Bacterial polypeptide expressing nucleotide sequence isolated from the Sargasso Sea
atgttcaaaaaaagagaaaatgtagttgaaattgaagaaggtaatcttctttcaccaaaatttgataatgatggtctaatacccgttattacaatgtgctttaaaactaaagatattttgatgcatagttatatgaatgttgaagcattaaaaaaaacaattgaaacaaaagaagcacattattttagcaggtcaagaaatgctatttggcacaaaggtaaaacaagtggttttattcaaaaagtaattgaaattagaattgatgatgaccaagattcaatttggttaactgttgacataggtgatggagcaagttgtcatgttggatatagatcatgtttttatagatctttaccactagggccaatagataacgcaaaaaaaattgaaatgaagtttttagaaaaagaaaaaaagtttgaccccaaaaaagtttataaaggacaaccaaatccaactaaaatttaat

SEQ ID NO: 266374 - DNA, 490 bp, Unknown
  Bacterial polypeptide expressing nucleotide sequence isolated from the Sargasso Sea
tatgtgctacataatcactcctatgttcaaaaaaagagagaatatctacgatattgaggaaggaaatcttctttcgcctaaattcgacaatgatggtctaattccagttatcactatgtgctcaaaaactaaagatattttaatgcatggatatatgaatgtagaagcttttaaaaaaacaattgaaactaaagaagcacattattttagcagatctagaaaaactatttggcacaaaggtaaaacgagtgggtttactcaaaaagttactgaaattaggattgatgacgatcaagactcagtttggttaacagttgatattggtgatggagctagttgtcacgttggatatcgatcttgcttttatagatctattcctatgggaccaatagataatggaagaaaagttgagatgaaatttcttgaaaaagaaaaaaaatttgatcctgaagaagtttataagggacaaccaaatccaacaaaaatttaa

SEQ ID NO: 266375 - DNA, 499 bp, Unknown
  Bacterial polypeptide expressing nucleotide sequence isolated from the Sargasso Sea
aatggtcttaaaaataggaaagaaagtggaaacaataaattttgctgaaaggtcatctatagaatttgtagaagaagggaatgctttagcacccaaatttaattctgaaggaatcatacctgtaatagttactgaaagtagttctgatttggttctgatgcttggttatatgaacaaagaagcattagataaaactattttgactagagaaggacattattggagtagaagcagagagcttctttggaaaaaaggggaatccagcggaatgactcatagagtagacgaaatacttatagatgatgatcaagattcagtatggcttaaggtctcgattgatggattaggagctagttgccatgttggatataaatcatgcttctataggtctgtagaatctgtagatcaaggaaatgttgttttgaattttactgaatcagaaaaagtctttgacccagaagttgtttatccgggggcagataacccaacaaaactttaa

SEQ ID NO: 266376 - DNA, 448 bp, Unknown
  Bacterial polypeptide expressing nucleotide sequence isolated from the Sargasso Sea
tatgtttaaaaagagagaaaatgtcgctgatatagaagaaggaagcttattatcccctaaatttgataatgatgggcttattccagtaattacaacatgttctaaaactaaagaaattctgatgcatggctacatgaatgtggaagctttaaaattaacaattgaaacaaaagaagctcattattggagtagatctagaaaacaaatttggtacaaaggaaagacgagtggatttattcaaaaagttaaagagattagaattgatgacgatcaagattctgtatggctaactgttgatataggtgaaggtgcaagttgtcatgttggttatcgttcttgtttttatagatctgtgcctttaggaaaaattgataatgctagacaaatagaaatgaaatttgaagaaaaagagaaaaagtttgatccagaaaaggtttataaagatgaa

SEQ ID NO: 266377 - DNA, 469 bp, Unknown
  Bacterial polypeptide expressing nucleotide sequence isolated from the Sargasso Sea
atgtttaaaaaaagagaaaatatagctgatatagaagagggtaatttattatcaccaaaatttgataatgatggactaataccagttgtgacaatgtgtcaaaaaactaaagaaattttaatgcatggatatatgaatgttgaagctttaaaaaaaactattgaaacaaaagaagctcattattggagtaggtctagaaaagaaatatggcacaaaggaaagacaagcggctttattcaaaaagtcaaagaaattagaattgatgatgatcaagattcattatggttaacagttgatattggagacggatcaagttgtcatgtaggttatagatcttgtttttatagatcagttccactaggtaaaattgataatgcaagaaaaatagaaatgaagtttgaagaaaatgaaaaaaaatttgatcctgataaagtttataaagggcaaccaaacccaactaaaatataat

SEQ ID NO: 266378 - DNA, 320 bp, Unknown
  Bacterial polypeptide expressing nucleotide sequence isolated from the Sargasso Sea
aaaaaaaaccatggaaacaaaggaagctcattactttagtaggtcgcggaatactatctggcacaaaggtcaaacaagtggttttgtacaaagagtaaaagaaattaaaatagacgatgaccaagactctatttgtctaacagttgatattggagatggggctagctgtcatgttggttatcgatcttgtttctacagatctattccgcttggaccaattgaaaatggacgaaaaattaagatgaaattcactgaaaaggaaaaaaaatttgatccagaaaaagtttacaaaggtcaaacgaacccaacaaaaatataaa

SEQ ID NO: 266379 - DNA, 391 bp, Unknown
  Bacterial polypeptide expressing nucleotide sequence isolated from the Sargasso Sea
attcctgttgttactacagattataataccggtgaggtattgatgcatggatacatgaactcagaagctttaaaaaaaactatagaaactaaagaagcttactattggagcaggtcaagaaaagaaatttggcacaagggtgaaacaagtggttttgtgcaaaaagttgttgaattaagaattgatgacgatcaagactctatttggatgaatgtagatattggaaatggagcaagctgtcacgtcggatataaatcttgtttttatagagctgttccacttggaaaaattcaaaatgctgaaaagattgaaatgaaatttaaagataaaaaaaagaaatttgatccagaggtagtttataaaggcaaacccaaccccacaaaaatataaa

SEQ ID NO: 266380 - DNA, 457 bp, Unknown
  Bacterial polypeptide expressing nucleotide sequence isolated from the Sargasso Sea
aagagagagtgtatttgaggtagaagagggaaaatttctatctcttttatttgataaagatggacttattccagtaacaacttctgacagtagctctggagagcttttaatgcatggttacatgaatgaagaggcattaaaaaaaacaatagaaacaaaagaagctcattattggagtagatccaggaaagatatttggcataaaggaaatacaagtggttttgtacaaaaggtcattgatttaagaatagatgatgatcaggatgcattgtggatgtcagtagatataggaaacggatcaagctgtcatgtaggatacaaatcatgcttttatagatcaatacctttaggaaaaattaaaaattctgaagaaataaaattagaatttaaagaaaaagaaaaaaaatttgatcctgaaaaagtttataaagatcaacctaacccaacaaaactttaa

SEQ ID NO: 266381 - DNA, 357 bp, Unknown
  Bacterial polypeptide expressing nucleotide sequence isolated from the Sargasso Sea
aaattttaatgcatggatatatgaatactgaagctctaaaaaaaacattagaaactaaagaagctcactattggagtagatcaagaaaacaaatatggcacaaaggtaaaacaagtggttttgttcaaaaagttgtagaatttagaattgatgatgatcaggatgcagtttggttaacggtggatattggctcaggatcgagttgccacgttggttatagatcttgtttttatagatcagttacacttggaaaaattggtaatgctagtgaaattaaaatgaaatttgaggaaattgaaaaaaagtttgatcctgatatagtttacaaggatcaatcaaacccaacaaaaatataat

SEQ ID NO: 266382 - DNA, 425 bp, Unknown
  Bacterial polypeptide expressing nucleotide sequence isolated from the Sargasso Sea
aatgttcaaaaagagagaaagcgtatttgaggtagaagagggaaaatttctatctcctaaatttgataaagatggacttattccagtaaccacctctgatagtagctccggtgaattattaatgcatggttacatgaatgaagaggctctaaaaaaaacaattgaaactaaagaagctcattattggagtagatctagaaaagatatatggcgcaaaggaaaaacaagcggttttgtgcaaaaagttattgatttaagaatagatgatgatcaggatgcattatggatgtcagtagatattgggaacggagcaagttgccatgtaggatataaatcgtgcttttacagatcaataactttaggaaaaattgaaaattctgaagaaattaaattagaatttaaagaaaaagaaaaaaaatttgatc

SEQ ID NO: 266383 - DNA, 409 bp, Unknown
  Bacterial polypeptide expressing nucleotide sequence isolated from the Sargasso Sea
tatgtttaaaaaaagagaaaatgtcgctgatatagaagaaggttctttattatcaccaaaattcgataatgatggcttaataccagtaattacaacatgctcaaaaactaaggaaattttgatgcatggatacatgaatgttgaggctttaaaattaacaattgaaactaaagaagcacattattggagcagatctagaaaacagatttggcataaaggtaaaaccagtggatttgttcaaaaagtaatagaaatcagaattgatgacgatcaagattctgtttggcttactgtcgacataggtgatggctctagttgccatgttggttacagatcttgtttttatagatcaattcccttaggtgaaattataaatggaagagaagttgaaatgaaatttgaagaaaaa

SEQ ID NO: 266384 - DNA, 469 bp, Unknown
  Bacterial polypeptide expressing nucleotide sequence isolated from the Sargasso Sea
tatgtttaaaaaaagagaaagtgtcacagagattgaagaaggaagcttcttatcaccaaaatttgataacgatggtttaattccagtcgtgaccacttgtgtaaatactaaggagattttaatgcttggttatatgaatgttgaggcatttaaaaaaacaattgaaactaaagaagctcattattggagtagatcaagaaagcaagtttggcacaaaggtaaaacaagtggttttatacaaaaggtaaaagaaataagaattgatgatgaccaagactcggtttggctaagcgttgatattggaaatggctctagttgtcatgtaggatacagatcctgtttttatagatctatacccttaggaaaaatcgaaaacgcaagagaaattaaaatgaaatttgaggaaagtaaaaaaaaatttgaccctgaaaaagtttataaaggacaaccaaaccctactaaaatttga

SEQ ID NO: 266385 - DNA, 469 bp, Unknown
  Bacterial polypeptide expressing nucleotide sequence isolated from the Sargasso Sea
atgttcaaaaaaagagaaaatatctacgatattgaagaaggaaatcttctatcaccaaaatttgataatgatggattgattccggtcataaccatgtgttcaaaaacaaaggatattttaatgcatggatatatgaatgtggaagctcttaaaaagacaatcgaaacgaaagaagcacactattttagcagatcaagaaaagctatttggcacaaaggtaaaacaagtggttttacacaaaaggtaactgaaataagaattgatgatgatcaagactcagtatggttaacagttgatattggtgatggagctagttgccatgttggttatagatcatgtttctatagatcaattcctatggggccaatagagaatggaagaaaagttaaaatggattttcttgaaaaagaaaaaaaatttgatcctgaaaaggtttataagggtcaacccaacccaacaaaaatttaaa

SEQ ID NO: 266386 - DNA, 469 bp, Unknown
  Bacterial polypeptide expressing nucleotide sequence isolated from the Sargasso Sea
aatgttaaaaaaagagaaaatgtcacagatattgaagagggagatttattttcacctaaatttgataatgatggattaataccagtcgttacaacttgttcaaataccaaagaaattttaatgcatggatatatgaatactgaagctttaaaaaaaacaatagaaactaaagaagctcactattggagtagatcaagaaaacaaatatggcacaaaggcaaaacaagtggtttcgttcaaaaagttactgaaattagaattgacgatgatcaggattctgtatggctagttgttgatattggcacaggctcgagctgtcatgttggttatagatcttgtttttatcgctctgtcccacttggtaaaattaataatgccaaagaaataaaaatgaaatttgaggaaaaagaaaagaaatttgatcctgaagaagtgtataaaggtcaatcgaacccaacaaagatataat

SEQ ID NO: 266387 - DNA, 370 bp, Unknown
  Bacterial polypeptide expressing nucleotide sequence isolated from the Sargasso Sea
tatgtttaaaaaaagagaaaatgttaaagaaattgaagagggggacttattgtcgcccaaattcgataatgatggattgatcccagtagtaaccacctgcttcgatactaaagaaatacttatgcacggctatatgaatgttgaagcttttaaattaactattgagactaaagaagctcattattggagcagatcaagaaaatcaatttggcataaaggcaaaacaagtggatttgttcaaaaagttaaggcaattagaattgatgatgatcaagatgcagtctggttaacagttgatattggcaaagggtcaagctgccatgtcgggtatagatcatgtttctatagatcagttccacttggaaaaata

SEQ ID NO: 266388 - DNA, 469 bp, Unknown
  Bacterial polypeptide expressing nucleotide sequence isolated from the Sargasso Sea
tatgtttaaaaaaagagaaaatgttaaggatatagaagagggaaatcttttatcaccaaaatttgataatgatggtttaattcctgttataactacatgctataagactaaagaaatattaatgcatggttatatgaatacagaggcctttaaactaactattgaaactaaagaagctcattattggagtagatcaagaaaacaaatttggcacaaaggcaaaacaagtggatttgttcaaaaagttaaagaagttagaatagatgacgatcaagattcaatttggctagtggtagatattggggatggcgcaagttgccatgtaggttatcgttcatgtttttatagatcaataccaatgggtaaaataaatgatgcaaaaaatattgaaatgaagtttgaagaaaataaaaagaaatttgatccagatattgtttataaagatcaacctaatccaacaaaaatttaa

SEQ ID NO: 266389 - DNA, 469 bp, Unknown
  Bacterial polypeptide expressing nucleotide sequence isolated from the Sargasso Sea
atgtttaaaaagagagaaaatgtcgctgatatagaagaaggaagcttattatcccctaaatttgataatgatggtcttataccagtaattacaacatgttttaaaactaaagaaattcttatgcatggttatatgaatatggaagctttaaaattaacgatagaaactaaagaagctcattattggagcagatcaagaaaacaaatttggcataaagggaaaacaagtgggtttgtacagaaagttaaagaaataagaattgatgatgaccaggattctgtatggctaactgtcgacataggcgatggtgcaagttgtcatgttggttatcgttcttgcttttacagatctgtacctttaggaaaaattgacaatgcaagacaaatagaaatgaagtttgaagaaaaagaaaaaaagtttgatccaaaaaaggtttataaagatgaaccaaatccaacaaagatttaat

SEQ ID NO: 266390 - DNA, 368 bp, Unknown
  Bacterial polypeptide expressing nucleotide sequence isolated from the Sargasso Sea
catgtttaaaaaaagagaaagtgtatttgaagtagaagaaggaaaatttctttcgccgaaattcgacgcagatggtttaattccggttgtaacaaccgattctaaaaccggcgatgttttgatgcatggtttcatgaataaagaggctctgaaaaaaactatagaaactaaagaagcatattattggagtagatcaagaaaagttttatggcacaagggcaaaaatagcggttacattcagaaaattatcgaaattagagtagatgatgatcaagactctatatggataaaagtcgatataggtgatggtgcaagttgtcacgtaggttacaagtcttgtttttatagatcagttcctctcggaaaaa

SEQ ID NO: 266391 - DNA, 469 bp, Unknown
  Bacterial polypeptide expressing nucleotide sequence isolated from the Sargasso Sea
atgtttaaaaaaagagaaaatgtcgctgatatagaagaaggaattttattatcaccaaaattcgataatgatggattaattcctgttgtgacaacttgttccacaacaaaagaaattttaatgcatggctacatgaatgtggaatccttaaaattaactattgaaactaaggaagcacattattggagcagatcaagaaaacaaatttggcataagggtaaaaccagtggttttgttcaaaaagttgtagaaattagaattgatgatgatcaagattcagtttggcttactgttgatattggtgatggtgctagttgccacgttggatataaatcttgtttttatagatcaataccattaggtgagattaaaaatggtagagaagttgaaatgaaatttgaagaaaaagaaaaaaaatttgatccggaaaaagtatataaaggacagcctaacccaacaaaaatttaat

SEQ ID NO: 266392 - DNA, 469 bp, Unknown
  Bacterial polypeptide expressing nucleotide sequence isolated from the Sargasso Sea
tatgtttaaaaaaagagaaaatgtcgctgatatagaggaaggtaacctattatctccaaaattcgataatgatggtttaattcctgtaattacaacatgtgcagaaaccaaagaaattctaatgcacggttatatgaatgttgaagctttaaaattaactatagaaacaaaagaagctcactattggagcaggtctagaaaagagatttggcataaaggaaaaactagtgggtttactcaaaaagtaaaagaaataagaattgatgatgatcaagatgcagtttggattactgtagatattggtgatggcgcaagttgccatgttggctacagatcatgtttttatcgatcaatacctacaggaaaaattgaaaatggacgtaaagtagaaatgaaatttgaggaagaaaagaaaaaatttgatccagaagttgtttataaaggacaacctaatcccactaaaatttaa

SEQ ID NO: 266393 - DNA, 445 bp, Unknown
  Bacterial polypeptide expressing nucleotide sequence isolated from the Sargasso Sea
cgctgaaatagaagaaggtaatcttttatctcctaaatttgataatgatggtctaatccctgttgtaacaacgtgcgctaatacaaaagaagttttaatgcatggatatatgaatgttgaggctctgaagcttactatagaaactaaagaagctcattattggagtaggtctagaaaacaaatctggcacaaaggtaaaacaagtggatttttacaaaaagttaaagaaattagaattgatgatgatcaagactcaatttggttaagtgtagatataggagatggtgctagttgccatgtaggatacaaatcttgtttttatagatccataccgcttggaaaaattgataatggaagaaaagtggaaatgaaattcgaagaaaaagaaaaaaaatttgaccctgaaaaagtttataaaggacaaccaaatcctaccaaaatttaa

SEQ ID NO: 266394 - DNA, 395 bp, Unknown
  Bacterial polypeptide expressing nucleotide sequence isolated from the Sargasso Sea
tatgttcaaaaaaagagaaaatatctatgatattgaagaaggaaatcttctttcacctaaatttgataatgatggattgattccagtaattaccatgtgctcaaagactaaggatattttgatgcatggatatatgaatgtggaagctcttaaaaaaacaattgaaactaaagaggcacactattttagtagatcgagaaaaactatctggcacaaaggtaaaacaagtggttttacgcaaaaggttaccgaaataagaattgatgatgatcaagattctatatggttaacagttgatattggtgacggagctagttgtcatgttggttataggtcatgtttttatagatcagttcctatgggaccaatagaaaatggaagaaaagttgaaatgg

SEQ ID NO: 266395 - DNA, 334 bp, Unknown
  Bacterial polypeptide expressing nucleotide sequence isolated from the Sargasso Sea
aatggtggaagcatttaaaaaaacaattgaaactaaagaagctcattattttagtagatcaagaaaagcaatttggcacaaaggtaaaactagcggctttgtacaaaaagtaattgaaattagaattgatgatgatcaagattcagtttggctaacagttgatattggggatggagctagttgccacgttggttatcgatcttgtttttatagatctattcctttaggtcaaattgatgatggtagaaaaatcgaaatgaaatttttagaaaaaaacaaaaaatttgatccagaaaaaatttacaagggacaacctaacccaacaaaaatttga

SEQ ID NO: 266396 - DNA, 469 bp, Unknown
  Bacterial polypeptide expressing nucleotide sequence isolated from the Sargasso Sea
tatgttcaaaaaaagagaaaatgttcaagaaatagaagaaggtaaacttctatcaccaaaatttgacaataatggtcttatacctgtaattacaatgtgttcaaaaactaaagatattttaatgcatggttatatgaacgtagaagctcttaaaaaaacaattgaaacaaaagaagcgcactatttcagtagatcacgtaaagcaatttggcataaaggtaaaacaagtggatttactcaaaaagtaactgaaattagaattgatgatgatcaagactctatttggttaactgttgacataggtgatggagcaagttgccatgttggatatcgatcgtgtttttacagatctgttccattgggaacaattgacaatggaagaaaaattgaaatgaaatttttagaaaaagaaaaaaaattcgaccccgaggaaatttacaaagaccagcctaaccctactaaaatttaa

SEQ ID NO: 266397 - DNA, 377 bp, Unknown
  Bacterial polypeptide expressing nucleotide sequence isolated from the Sargasso Sea
tatgtttaaaaagagagaaaatgtcgctgatatagaagaaggaagcttattatcccctaaatttgataatgatggccttatcccagtaattacaacctgttttaaaactaaagaaattcttatgcatggttacatgaatgtagaggctttaaaattaacaatagaaactaaagaagctcattattggagtagatctagaaaacaaatttggcataaaggaaaaacaagtggatttatacaaaaggtaaaagaaataagaattgatgatgaccaggattctgtatggctagctgtcgatataggcgatggtgcaagttgtcatgttggttatcgttcttgcttttacagatccatacctttaggaaaaattgaaaatg

SEQ ID NO: 266398 - DNA, 469 bp, Unknown
  Bacterial polypeptide expressing nucleotide sequence isolated from the Sargasso Sea
atgtttaaaaaaagagaaaatgtcgctgatatagaagaaggacctttattatcaccaaaatttgataatgatggtttaattcctgttattacaacttgctcaaaaactaaagaaattttgatgcatggctatatgaatgtagaagctttgaaacttacaatcgaatctaaagaagctcattattggagtagatcaagaaaacaaatttggcacaaaggtaaaacaagtggtttcgttcaaaaagttattgaaatcagaatagacgatgatcaagatgctgtttggttaaccgtagatattggagacggtgcaagttgccatgtaggttatagatcatgtttttatagatcaattccattaggtgaaataaaaaatggacgtgaaattgaaatgaagtttgaagaaaaagaaaaaaaattcgatccagaaaaagtttacaaaggacaaaccaatccaacaaaaatttaat

SEQ ID NO: 266399 - DNA, 349 bp, Unknown
  Bacterial polypeptide expressing nucleotide sequence isolated from the Sargasso Sea
tatgcatggatacatgaatgaagatgctttaaaaaaaacaattgaaactaaggaagctcattattggagtaggtctagaaagactctatggcacaaaggaaagtctagtggttttatccaaaaagttattgagcttagaatagatgatgaccaagactcggtttggattaaagttgacataggtaatggtgcaagttgccacgtaggttataaatcttgtttttatagatctgttcctcttggaaaaatagagaatgataaacagattaaaatggattttaaagagaaagaaaaaaaatttgatccaaaaaaagtttacaaagatcagtctaacccaactaaactataa

SEQ ID NO: 266400 - DNA, 349 bp, Unknown
  Bacterial polypeptide expressing nucleotide sequence isolated from the Sargasso Sea
atgcatggatatatgaatgttgaagcattaaagcttacaatcgaaacaaaagaagctcactattggagtagatctagaaaagaaatttggcacaaaggtaaaacaagcggttttgtacaaaaagttaaagaaatacgaatagatgatgatcaagatgctgtatggttgtcagtagatattggcaaaggttcaagttgccatgttggatatcgatcatgtttttacagatctgttccacttggtgaaattgataatgcaagacagattaaaatgaaatttgaagaaaaagaaaaaaaatttgatcctgagattgtttataaagaccaacctaatccaactaaaatttaaa

SEQ ID NO: 266401 - DNA, 391 bp, Unknown
  Bacterial polypeptide expressing nucleotide sequence isolated from the Sargasso Sea
atgacttatcaaaacgttttatcgtctattaatttcgacgagcgaggattggttcctgcaattgcacagcaatttgatagcggtgaggtcttaatgatggcttggatgaatgcagaatcattaaccgaaaccctcaataccggccaggtatgctattggtcccgctcacggaaaatgctttggtttaaaggtgaaacgtcaggacaaacacaatcgctcaaagagcttattgttgattgtgattacgatacattgcttctgaaagtcgatcaattaggtgtcgcttgccatacagggcgacaatcttgtttctttaatgcctttcgtgataattctctcgtcacgatcaaagaacaaattgttgacccgtccgatctataccgatcataaa

SEQ ID NO: 266402 - DNA, 391 bp, Unknown
  Bacterial polypeptide expressing nucleotide sequence isolated from the Sargasso Sea
tatgtttaaaaagagagaaaatgtcgctgatatagaggaaggaagcttattatcacctaaatttaataatgatggccttattccggtagtgacaacatgttctaaaactaaagaaattcttatgcatggctacatgaatgtggaagctttaaaattaacaatagaaactaaagaagcgcattactggagtagatctagaaaacaaatttggcacaaaggaaagactagtggatttgtccaaaaagttaaagaaattagaattgacgatgatcaagactcagtatggctgactgttgatattgctgatggtgcaagttgccatgttggttatcgttcttgtttttatagatctgtacctctaggtaaaattgataatgctagacaaatagaa

SEQ ID NO: 266403 - DNA, 370 bp, Unknown
  Bacterial polypeptide expressing nucleotide sequence isolated from the Sargasso Sea
ttcaaaaactaaagaaatcctaatgcatggttatatgaatgtcgaagcattgaaattaactattgaaactaaagaagctcattattggagcagatcaagaaaacaaatatggcataaaggtaaaacaagtggttttgttcaaaaagttatagaaatcagaattgatgatgatcaagactctgtttggcttaccgttgatattggtgatggtgcaagttgtcacgtgggatatagatcttgtttttatagatcaataccattaggtaaaattaaaaatggaagagaagttgaaatgaaatttgaagaaaaagaaaaaaaatttgatccggaaaaagtatataaaggacagcctaatccaacaaaaatttaa

SEQ ID NO: 266404 - DNA, 301 bp, Unknown
  Bacterial polypeptide expressing nucleotide sequence isolated from the Sargasso Sea
aaggaggctcattactggagtagatcaagaaatgaaatttggcacaaaggtaaaactagtggatttgttcagaaaattaaagaaatcagaattgatgatgatcaagattctatttggttaagtgttgatattggaaatggagctagttgtcatgtaggttacaaatcgtgcttttatagatctgttcctctcggaaaaattgacaatgctaaagaaataaaaatgaaatttgaagaaaaagaaaaaaaatttgatcctaaaatagtttataaaggaaaagccaacccaacaaaaatataaa

SEQ ID NO: 266405 - DNA, 469 bp, Unknown
  Bacterial polypeptide expressing nucleotide sequence isolated from the Sargasso Sea
atgttcaaaaaaagagaaaatgtgcaggaaattgaagaaggaaatcttttatccccaaaatttgataatgatggcctaattcctgtaataactatgtgttctcaaacaaaagatattcttatgcacggttatatgaacgtagaagcattaaaaaaaacaatagagactaaagaagctcattattttagtagatcaagaaaagctatttggcacaaaggtaagactagtggttttactcaaaaggttactgaaatcagaattgatgatgatcaagattctatttggttgactgttgatataggagatggcgctagctgtcatgttggctatcgatcatgtttttatagatctataccaatgggtccaattgaaaatggtcgacaagttgagatgaaatttttagaggatgaaaaaaaatttgatcctgaagaagtttataaagatcaaccaaatcccaagaagatttaga

SEQ ID NO: 266406 - DNA, 469 bp, Unknown
  Bacterial polypeptide expressing nucleotide sequence isolated from the Sargasso Sea
atgtttagaaagagagaaagcatatttgaggtagaagaaggaaaatttctatctcctaaatttgataaagatggacttattccagtaaccacctccgacagtggctccggtgaattattaatgcatggttatatgaatgatgaagctcttaagaaaacaattgaaactaaagaagctcattattggagtagatctagaaaaaatatatggcacaaaggacagacaagtggttttgtgcaaagagttgttgatttaagaatagatgatgatcaggatgcgttgtggatgtcagtagatataggaaacggagcaagctgccacgtaggatataaatcatgcttttatagatcaatacctttaggaaaaattgaaaattctgaagaaattaaattagaatttaaagaaaaagaaaaaaaatttgatcctgaaaaagtttataaaggtcaacctaaccctacaaaactttaat

SEQ ID NO: 266407 - DNA, 425 bp, Unknown
  Bacterial polypeptide expressing nucleotide sequence isolated from the Sargasso Sea
atttttatcacctaaatttgataatcaaggcttaattccagtaattactacagacagtaaaactggagaagttctaatgcatggatatatgaattcagaagctttgaaaaaaactatagaaacaaaagaagctcattattggagtaggtcaagaaaatctatttggcataaaggaaaaactagtgggttcactcaaaaagttattcagataagaatagacgacgatcaagattctgtttggctaagcgttgacataggaaatggcgctagttgccatgtaggttacaaatcatgtttttatagatcgattccattaggtaaaatagatcattctgaaaaagttgaaatgaaatttgaagaaaaagagaaaaaattcgaccctgaaaaagtttataaaggacaacctaatccaacaaaactttaaa

SEQ ID NO: 266408 - DNA, 469 bp, Unknown
  Bacterial polypeptide expressing nucleotide sequence isolated from the Sargasso Sea
atgttcaaaaaaagagaaaatatctttgaaattgaagaaggtaaccttctttcaccaaaatttgataataatggtttaattccagttataacaatgtgttcaaaaactaaggatattttaatgcatggatatatgaacgtggaagcattgaaaaaaacgattgaaactaaagaagcacattattttagtagatcccgaaatgcaatttggcataaaggcaaaacaagtggatttattcaaaaagttaatgagattcgaattgatgacgatcaagactcaatctggctatctgttgatattggcgaaggttctagttgccatgttggataccgttcatgtttttatagatctattcctttgggacgaatagataatggaagaaaaattgaaatgaaatttctagagaaagaaaaaaaatttaatccagaagaagtttataagaatcagcctaatccaaccaaaatttaaa

SEQ ID NO: 266409 - DNA, 280 bp, Unknown
  Bacterial polypeptide expressing nucleotide sequence isolated from the Sargasso Sea
taccattgcctgggaaaaaaccttggaaactggaaaagcatggttttacagtcgatcacgggacaaacaatggatgaagggggaagaaagcggcaacgttcaaatcgtaaaagaagtgtttgtcgattgcgatgatgatactgtgctcttgaaagtagaacaggtaggtaaagcagcttgtcataaaggttataccagttgtttttttagaaaagtcaacggtgatgtggaagttatagaagagaaaatttttgatccagagaaagtttataaaaaataa

SEQ ID NO: 266410 - DNA, 469 bp, Unknown
  Bacterial polypeptide expressing nucleotide sequence isolated from the Sargasso Sea
atgtttaaaaaaagagataatataaaagaggttgaagaaggcaagtatttagagccaaaatttgatgaaaatggcctaatcccagtaataactacagattttaaaaccggcgatatattgatgcatggatacatgaatgatgaatctctaaaaaaaacaatagagacaaaagaagcgcattattggagccgatcaagaaaaaaaatatggcataagggtcaaattagtggatttgtacaaaaagtaaaagaaataagaattgatgacgatcaagattctatatggttgtcagtagatataggaaacggcgctagttgtcatgtaggctatcgttcctgtttttatagatctattcctttgggaaaaattaaaaatgttgaagaaatagaaatggaatttaaagaaaagaaaaaaacttttaatccaaaaaaaatatataaagacgaaccaaatccaacaaaattataat

SEQ ID NO: 266411 - DNA, 469 bp, Unknown
  Bacterial polypeptide expressing nucleotide sequence isolated from the Sargasso Sea
atgtttaaaaaaagagaaaatgttaaggatatagaagagggaaatcttttatcaccaaaatttgataatgatggtttaattcctgttataactacatgctataagactaaagaaatattaatgcatggttatatgaatacagaggcctttaaactaactattgaaactaaagaagctcattattggagtagatcaagaaaacaaatttggcacaaaggcaaaacaagtggatttgttcaaaaagttaaagaagttagaatagatgacgatcaagattcaatttggctagtggtagatattggggatggcgcaagttgccatgtaggttatcgttcatgtttttatagatcaataccaatgggtaaaataaatgatgcaaaaaatattgaaatgaagtttgaagaaaataaaaagaaatttgatccagatattgtttataaagatcaacctaatccaacaaaaatttaat

SEQ ID NO: 266412 - DNA, 393 bp, Unknown
  Bacterial polypeptide expressing nucleotide sequence isolated from the Sargasso Sea
ttataccggtcataacaactgatcaccaaacaaatgaagttttgatgcaaggatttatgaatgaagaagctttaaaaaaaacaatcgaaacaaaagaggctcactactggagtagatctagaaaagaagtttggcacaaaggagaaacaagcggcttcgtacaaaaagtcgttgaactaagaattgatgacgatcaagactcaatatggatgaccgtgaatattggtgatggcgctagttgccatgtcggatataagtcttgtttttatagatcaataccccttggaaaaattgaagatagcaaaaaaataaaaatggaatttaaagaaaagaagaaaaaatttgatcctaataaaatttataaagataaaccaaatccaactaaaatttaaa

SEQ ID NO: 266413 - DNA, 382 bp, Unknown
  Bacterial polypeptide expressing nucleotide sequence isolated from the Sargasso Sea
tatgtttaaaaaaagagaaaatgtcactgatatagaagaaggctctttattatcaccaaaatttgataatgatggtctaattcctgtaattaccacttgttcaaaaactaaagaaatcctaatgcatggctatatgaatgtagaagccttaaaattaaccattgaaactaaagaagctcattattggagcagatcaagaaaacaaatttggcacaaaggtaagaccagtggttttgttcaaaaagttatagaaatcagaattgatgatgatcaggattcagtttggctgactgttgatattggagatggcgctagttgtcatgttggttatagatcttgtttttatagatcaataccattaggtgaaattaaaaatggaaga

SEQ ID NO: 266414 - DNA, 469 bp, Unknown
  Bacterial polypeptide expressing nucleotide sequence isolated from the Sargasso Sea
atgttcaaaaaaagagaaaatatctatgatattgaagaaggaaatcttctatcaccaaaatttgataatgatggattaatcccagttatcaccatgtgttcaaaaacaaaagatgttttgatgcatggatatatgaatgtagaagctcttaaaaagacaattgaaactaaagaggctcactattttagtagatcgagaaaagctatatggcacaaaggtaaaacaagtggttttacacaaaaggttactgaaataagaattgatgatgatcaagactcaatatggctaacagttgatatcggtgatggagctagttgtcatgttggttatagatcatgtttttatagatctattcctatgggaccaatagaaaacggaagaaaagttaaaatggaatttcttgaaaaagaaaaaaaatttgatcctgaagaagtttataaaggacaacctaatccaactaaaatataaa

SEQ ID NO: 266415 - DNA, 469 bp, Unknown
  Bacterial polypeptide expressing nucleotide sequence isolated from the Sargasso Sea
tatgttcaaaaaaagagaaaatatctacgatattgaagaaggcaatcttctttcaccaaaatttgataatgatggactaatccctgtcataaccatgtgctcaaaaactaaagatattttgatgcatggatacatgaatgtggaagcgttaaaaaaaacaattgaaactaaagaagcgcattattttagcagatccagaaaagctatttggcataaaggtaaaacgagtggatttacccaaaaagttattgaaataagaattgacgatgatcaagactctgtatggttaacggttgatattggtgatggcgctagttgtcatgttggttatagatcgtgtttttatagatcaatacctatgggaccaatagaaaacggaagaaaagttgaaatggaatttcttgaaaaagaaaaaaaatttgatcctgaagaagtttacaaaggtcaaccaaatccaactaaaatttaa

SEQ ID NO: 266416 - DNA, 469 bp, Unknown
  Bacterial polypeptide expressing nucleotide sequence isolated from the Sargasso Sea
tatgttcaaaaaaagagaaaatgtagctgaaatagaagaaggaaatctactttcaccaaaatttgataatgatggtctaattccagttatcactatgtgttctaagactaaggatattttaatgcatggttatatgaatgtagaagcattaaagaaaaccattgaaacaaaagaggctcattattttagtagatcaagaaaagcagtatggcataaaggaaaaactagtggatttgtccagaaagttaaagaaattagaatagatgatgatcaagactctatttggttaacagtagatataggggatggtgctagttgtcatgtaggatatagatcatgtttttatagatcagtgccattaggaaaaatagataatggaagagaaattgaaatgaagtttttggaaaaagaaaaaaaatttgatcctgaagaagtatataaagatcaacctaatccaactaaaatataa

SEQ ID NO: 266417 - DNA, 469 bp, Unknown
  Bacterial polypeptide expressing nucleotide sequence isolated from the Sargasso Sea
atgttcaaaaaaagagaaaatgtacaagaaattgaagaaggaaatcttttatcaccaaaatttgataatgatggcttaattcctgtaataactacatgctcaaaaactaaagaaattctaatgcacggctatatgaatacagaagctttaaaattaactattgaaactaaagaggctcattattggagtagatctcgaaaacaaatttggcacaaaggtaaaaccagtggcttcactcaaaaagttatagaaattagaattgacgatgatcaagattcagtttggctgactgttgatattggtgatggggctagctgtcatgttggttatagatcatgcttttatagatcaataccattgggtgaaattaaaaatggaagagaagtcaaaatgaactttgaagaaaaagaaaaaaaatttgatccagataaagtttataaaggacaacctaatccaactaaaatttaat

SEQ ID NO: 266418 - DNA, 469 bp, Unknown
  Bacterial polypeptide expressing nucleotide sequence isolated from the Sargasso Sea
atgtttaaaaagagagaaaatgtcgctgttatagaggaggggaatttgctgtctcctaagtttgataatgatggtcttattcctgttgtaactacagattacaaaacaggagaagtattaatgcacggttatatgaattcagaggcgctaaaaaaaactattgagactaaagaagcttactattggagtagatcaagaggagaaatttggcataaaggagaaacaagtggttttgtgcaaaaagttattgaaattagaattgacgatgatcaagactctgtatggatcagtgttgacattgggagtggagctagttgtcacgtaggatataaatcttgtttttataggtctgtcccgcttggaaagattgaaaaaactgaaaaagtggaaatggaatttaaagacaaaaaaaagaaatttgatccaaaagtagtctataaaggtaaatctaatcctacaaaaatataaa

SEQ ID NO: 266419 - DNA, 467 bp, Unknown
  Bacterial polypeptide expressing nucleotide sequence isolated from the Sargasso Sea
gttcaaaaaaagagaaaatatctatgatattgaagaaggaaatcttctatcaccaaaatttgataatgatggattaattccagtcattactatgtgttcaaaaaccaaggacattttaatgcacgggtatatgaatgtagaagctcttaaaaaaacaattgaaactaaagaagcacactattttagtagatcgaggaaagctatttggcacaaaggtaaaacgagtggttttacgcaaaaggttactgaaataagaattgatgatgatcaagattcaatatggttaacagttgatattggtgatggagctagttgtcatgttggttatagatcatgtttttatagatctattcctatgggaccaattgataatggacgcaaagtagaaatggaatttcttgagaaagaaaaaaaatttgatcctgaagaagtttataaaggtcaaccaaatcctactaaaatttaaa

SEQ ID NO: 266420 - DNA, 342 bp, Unknown
  Bacterial polypeptide expressing nucleotide sequence isolated from the Sargasso Sea
tgcttggtaatatgattaaagaagctttagataaaacaattctacccaagaaagcacactactggagcagaagtagaaaagctttatggaaaaaaggtgagtctagtggaatggtccataaaatagatgaaatacttatagatgatgatcaagattccatctggctgaaagtcaccatagagggcttgggggcaagttgtcatgttggttataaatcctgcttttatcgatcagtcgattcaatagaaaaagatgaagttatactaaatttcaccgaatcagagaaagtgtttgatccagaagaagtttatcctggtattgaaaatccaaccaagctttagg

SEQ ID NO: 266421 - DNA, 406 bp, Unknown
  Bacterial polypeptide expressing nucleotide sequence isolated from the Sargasso Sea
tatgttcaaaaaaagagaaaaaatctatgatattgaggaaggaaatcttctttcacctaaatttgataatgatgggttgattccagtcattacgatgtgctcaaaaactaaagatattttgatgcatggatatatgaatgtggaagctcttaaaaagacaattgaaactaaagaagcacattattttagcagatctagaaaagctatttggcataaaggtaaaacaagtggatttacccaaaaggttactgaaataagaattgatgatgatcaagactctatatggttaacagttgatattggtgatggagctagttgtcatgttggttatagatcatgtttttatagatctattcctatgggaccaatagagaatgggagaaaagttgaaatggaatttgttgaa

SEQ ID NO: 266422 - DNA, 469 bp, Unknown
  Bacterial polypeptide expressing nucleotide sequence isolated from the Sargasso Sea
tatgtttaaaaaaagagaaaatgtcactgaaatagaggaaggaaccttattatcacctaggttcgataatgatgggttaatacctgttgtgacaacatgcgctaaaacaaaagaagttttaatgcatggccacatgaatactgaagctttgaaattaacaatagaaactggtgaagctcactattggagtagatcaagaaaacaaatttggcataaaggaagtacaagcggatttgttcaaaaaataatagaaattagagtagatgatgatcaagattctatttggttaagagtggatattggaaatggagctagttgtcatgttggttatagatcatgtttttatagatcagtgcctattggtaaaattgaaaatggaagaaatattaagattaagtttgaagaaaaagaaaagaaatttgatcctgacaaagtttataaaggtcagccaaatccaactaaaatttaa

SEQ ID NO: 266423 - DNA, 397 bp, Unknown
  Bacterial polypeptide expressing nucleotide sequence isolated from the Sargasso Sea
ggcctgattccagttattactacggactttaaaactggagacatattgatgcacggatacatgaacgcagattcattaaaaaaaacaattgaaactaaagaagctcactattggagtcgttctagaaaaaagatttggcataaaggccaggtaagtggatttgttcaaaaaataaaagaaatcagaatagatgatgatcaagattcactgtggttatctgtagatattggaaatggggccagctgtcatgtgggctatcgttcctgtttttaccgatcaatacctttgggtaaaattaaaaatgcggaagaattagaaattaaatttgaagagaaaaaaaaaatttttaatcctaaagaggtatataaaggacaaccaaatcctacaaagatataaa

SEQ ID NO: 266424 - DNA, 361 bp, Unknown
  Bacterial polypeptide expressing nucleotide sequence isolated from the Sargasso Sea
taaagagatattaatgcatggttatatgaacatggaagccttaaaactaacaatcgaaactaaagaagctcattactggagcagatcaagaaaagtaatctggcacaaaggtaaaacaagtggatttgttcaaaaagttaaagaaattagaatagatgatgatcaagatgcagtttggttaactgtagatataggcgatggtgcaagctgccatgtaggttatagatcttgtttctaccgatcaattcctttaggtgaaattaaaaatggacgtgaagtcgaaatgaaatttgaagaaaaagaaaaaaaatttgatcctgaaaaagtttataaaggtcaaccaaatccaacaaaaatttaa

SEQ ID NO: 266425 - DNA, 469 bp, Unknown
  Bacterial polypeptide expressing nucleotide sequence isolated from the Sargasso Sea
atgtttaaaaaaagagaaagtgtcacagaaatcgaagaaggaaatttcctgtcgcctaagtttgataacgatggtttaattcctgtcgttactacttgtgtaaataccaaagaaattttaatgcttggctatatgaatgttgaagcatttaaaaaaacaattgaaactaaggaagcacactattggagccggtcaagaaaacaagtttggcacaaaggtaaaacaagtggttttgttcaaaaaataaaagagataagaatagatgacgaccaggatgcggtgtggctgactgttgatataggaaatggctctagttgccatgttggatacagatcttgtttttatagatctatccctctaggaaaaattgaaaatgcaagagaaataaaaatgaaatttgaagagaaagaaaaaaaatttgaccctgaaaaagtttacaaagatcaacttaaccctacgaaaatttaat

SEQ ID NO: 266426 - DNA, 469 bp, Unknown
  Bacterial polypeptide expressing nucleotide sequence isolated from the Sargasso Sea
atgtttaaaaaaagagagagcgtttttgagatagaagagggaaaatttctttcaccgaaatttgatgaaaaaggtcttataccggttactacgacagaccataaatcaggtgaagttttaatgcatggttatatgaacgaagaagctttaaaactaactattgaaaaaaaagaggcctgttattggagtagatcaagaaacactttatggcataagggaaaaacaagtggttttgttcaaaaagttatagatataagaattgatgatgatcaagattctttatggatgaccgtagacataggagatggagccagttgtcatgttggatacaaatcatgtttttatagatcaataccattaggtaaaataaaaaattctgaagaaataaaactagagtttaaagaaaaagaaaaaaaatttgatcctaagaaggtatacaaagatcaacccaatccaactaaattataaa

SEQ ID NO: 266427 - DNA, 469 bp, Unknown
  Bacterial polypeptide expressing nucleotide sequence isolated from the Sargasso Sea
tatgtttaaaaagagagaaaatgtcgctgaaatagaggaaggtagtttgttatcacctaaatttgataatgatggtctaattccagtggttacaacatgttctaaaaccaaggaaattcttatgcatggctacatgaatgtcgaggcttttaggttaactattgaaactaaagaggctcattattggagtagatcaagaaaacaaatttggcacaagggaaaaaccagtggatttgtccaaaaagttaaagaaataagaattgatgatgatcaagattctgtatggctaagtgttgatataggtgatggttcaagttgtcacgttggttatcgttcttgtttttatagatcagtgcctctaggaaaaattgataatgctagacaaatagaaatgaaatttgaagaaaaagaaaaaaaatttgatccaaaaaaggtttataaagatgaacccaatccaacaaaaatttaa

SEQ ID NO: 266428 - DNA, 327 bp, Unknown
  Bacterial polypeptide expressing nucleotide sequence isolated from the Sargasso Sea
aggctcttaagaaaactattgaaaataaaaaagctcattactggagtagatccagaaaagaagtttggttaaaaggtgaaacaagtggtttttttcaaaaagttattgaaattagaattgatgatgaccaagattcaatttggatgagcgttgatataggaaatggtgctagctgtcatgtcggctataaatcttgtttttacagatctgttccattgggaaaaattgaagacactgaaaaagtagaaatggaatttaatgataaaaagaaaaaatttgatcctagtataatatataaaggtaaaccaaaccctactaagatttaaa

SEQ ID NO: 266429 - DNA, 469 bp, Unknown
  Bacterial polypeptide expressing nucleotide sequence isolated from the Sargasso Sea
atgtttaaaaaaagagaaaatgtcacagatattgaagagggaaatttattgtcccctaaatttgataatgatggattaattccagtcattaccacgtgttcaaaaacaaaagaaatattaatgcacggttatatgaatgtagaagctttaaaaaaaacaattgaaactaaagaagctcactactggagtagatcaagaaatcaaatctggcacaaaggcaaaacaagtggttttgtgcaaaaagttattgaggttagaattgacgatgatcaagatgcagtttggttaacagtagacattggttcaggatcaagctgccacgttggctatagatcttgtttttatagatccgttcctcttggaaaaattgaaaatgctagagagataaaaatgaaatttgaggaaaaagaaaaaaaatttgaccccgaaattgtttataaaggccaaccaaatccaactaaaatatagt

SEQ ID NO: 266430 - DNA, 469 bp, Unknown
  Bacterial polypeptide expressing nucleotide sequence isolated from the Sargasso Sea
atgtttaaaaaaagaaaaaatgtcgctgctattgaagagggaaaattgctatctcctaaatttgataaggatgggcttattcctgtcgtgacgacagattgtaagactggagaagtgttaatgcatggttatatgaattcggaagcgctaaagaaaacaatcgaaaccaaggaagcttattactggagtagatcaagaaaagaagtttggcataaaggtgaaacaagtggttttgttcaaaaggttgttgaagttagagttgacgatgatcaagattctatttggatgagtgtagatattggtgatggagccagctgtcatgttggatataaatcttgtttttatagaattgttccacttggaaagattcaaaattctgaaaaagtagaaatgaaatttaaagataagaaaaaaaaatttgatccaaatgttgtttataaaggaaaacctaatcctacaaaaatataaa

SEQ ID NO: 266431 - DNA, 469 bp, Unknown
  Bacterial polypeptide expressing nucleotide sequence isolated from the Sargasso Sea
atgtttaaaaaaagagaaaatgttgaagaaattgaggaaggaaaccttctttctcctaagttcgacaacgacgggctcataccggttgtgacaacttgcgcaaacactaaagaagttttaatgcacggctatatgaatgttgaagcattaaaattaacaatagaaactaaagaagctcattactggagcaggtcaagaaaacaaatctggcaaaaggggaaaacaagcggatttgtgcagaatgtaaaagaattaagaattgatgacgaccaggacacaatatggatgagtgttgatattggaaatggctctagttgtcatgttggttacagatcatgtttttatagatcagtaccattgggtaagattgaaaatggtagaaatgttaagatgaaatttgaagagaaagaaaaaaaatttaatccagaagaagtttacaaagatcaaccgaatcctactaaaatttaaa

SEQ ID NO: 266432 - DNA, 469 bp, Unknown
  Bacterial polypeptide expressing nucleotide sequence isolated from the Sargasso Sea
atgtttaaaaaaagagaaagtgtcacagagattgaagaaggaagcttcttatcaccaaaatttgataatgatggtttaattccagttattactacatgcataaatactaaggagatattaatgcttggttatatgaatgttgaggcatttaaaagaacaattgaaactaaggaagctcattattggagcagatcaagaaagcaagtttggcataaaggtaaaacaagtggttttattcaaaaagtgaaggaaataagaattgatgatgaccaagactctgtttggttaagtgttgatattggaaatggctcaagttgccatgtaggatacagatcttgtttttatagatctatacctctaggaaaaatcgaaaacgctaaagaaattaaaatgaaatttgaggaaaaagagaagaaatttgatcctgaaaaggtttacaaagatcaaccaaatcctacaaaaatttaat

SEQ ID NO: 266433 - DNA, 469 bp, Unknown
  Bacterial polypeptide expressing nucleotide sequence isolated from the Sargasso Sea
atgtttaaaaaaagagaaaatgtcgctgatatagaggaaggtaaacttttatctccaaaatttgataatgatgggcttattcccgttataacaacttgctcgaataccaaagaaattttaatgcatggctacatgaatatggaggctcttaaactcacaatagagacaagagaagctcattattggagcagatcaagaaaacagatttggcataaggggaaaactagtggttttgttcagaaagttcatgaaattagaatcgatgatgatcaagatgcagtttggctaacggttgatattggtgacggtgcaagttgccatgtagggtatagatcttgtttttatagatcagttccaatggggaaaatagaaaatggaagaaaaattgaaatgaagtttgaggaaaaagaaaaaaaatttgatccagaagaagtctataagggacaaccaaatccaactaaaatataat

SEQ ID NO: 266434 - DNA, 451 bp, Unknown
  Bacterial polypeptide expressing nucleotide sequence isolated from the Sargasso Sea
tatgtttacaaaaagaaaatcaataaaacaagttgaagaaggaaaagacttagcgccaaaatttgataaatcaggtttaattccagttatcacaactgattcaaagaacggtaatgttttaatgcacggatacatgaataaagaagcattaaaaagaacaattgaaacaggggaagtatattattggagtagatcaagaaaaaaaatttggcataaaggagatagcagtggttttgttcaaatagttaaagaaataagaattgatgatgatcaagatgcaatttgggttaaagtttcaactagagcaagttgtcatgttggttataaatcttgtttttatagatctgtgccaatgaaaaaaaaaaaaacgaaattaattttcaaagaaacaaaaaaaacttttgatccaaaaaaaatatataaaggattaccaaatcctacaaaaatttaa

SEQ ID NO: 266435 - DNA, 374 bp, Unknown
  Bacterial polypeptide expressing nucleotide sequence isolated from the Sargasso Sea
tatgttcaaaaaaagagaaaatgtagtcgaaatcgaagaaggtaatcttctatctccaaaatttgataataatggacttattccagttattacaatgtgtgcaaaaacaaaagagattttaatgcacggctatatgaatgttgaggcgctaaaaaaaacaattgaaacaaaagaggctcattattttagtcgatcaagaaatgctatctggcataaaggaaaaacaagcggttttactcaaaaagtaaatgaaataagaattgatgatgaccaagattctatatggttaacagtagatattggtgatggtgcaagttgtcatgtcggttatagatcatgtttttatagatcaattcccttaggacctatcaata

SEQ ID NO: 266436 - DNA, 385 bp, Unknown
  Bacterial polypeptide expressing nucleotide sequence isolated from the Sargasso Sea
aatgccaaaaactacttttgaaaaatctgagaaacgaattgaaattctttcggtttcagatttagattttgaaaatttttccgggcttcttcccgttattgctcaggaacatgggtcgggaaggattctgatgctagcctatgcaaatcttgaagcagtcaggaaaacacaggaaactggttatgcacattactggtcaaggtctaggaaaactctctggaaaaaaggggcgacttctggacatgttcagcaaatcacagaagttcttgtggattgtgataaagatactctgctttataaagtcatacaaactggccccgcatgtcatactggagcaaagagttgtttttacagaaaattacattttgaaactattgaaaattga

SEQ ID NO: 266437 - DNA, 469 bp, Unknown
  Bacterial polypeptide expressing nucleotide sequence isolated from the Sargasso Sea
atgtttaaaaaaagagaaaatgtcgctgtaatagaagaaggccctttattatcaccaaaattcgataatgatggcttaattcctgtaattactacttgctcaagaactaaagaaattctcatgcatggctacatgaatgtagaagcgttaaaattaactattgaaactaaagaagctcattactggagcagatctagaaaacaaatttggcataaaggtaaaacgagcggctttgttcaaaaagttatagaaattagaattgatgatgatcaagatgctgtttggctaactgtagatataggtgatggcgcaagttgccatgtaggttatagatcatgtttttatagatcaattcctttaggtaaaattgaaaatggaaggaaagttgaaatgaaatttgaagaaaaagaaaaaaaatttgatcctgaaaaagtatacaaaggtcaacccaacccaacaaaaatttaat

SEQ ID NO: 266438 - DNA, 356 bp, Unknown
  Bacterial polypeptide expressing nucleotide sequence isolated from the Sargasso Sea
gattttagtgttaatgcttggttatatgaataaagaagctttagataaaacaattcttaccaaagaagcacactactggagcagaagtcgaaaagctttatggaaaaaaggtgagtctagtggaatggtccataaaatagataaaatacttatagatgatgatcaagattccatctggcttaaagtcaccatagagggcttgggagcaagttgtcatgttggttataaatcctgcttttatcgatcagtcgattcaatagaaaaagatgaagttatactaaatttcaccgaatcagagaaagtgtttgatccagaggaagtttatcctggtattgaaaatccaaccaagctttagg

SEQ ID NO: 266439 - DNA, 499 bp, Unknown
  Bacterial polypeptide expressing nucleotide sequence isolated from the Sargasso Sea
tatgaccgaaaaacagattaaatttgaaaagagggtttctattgagcaagttgaagaaggtatttcgctttcgcctaagtttgataaaactggcgtcattccgtgtattacggttcatgctaaaacaaaagaagttttaatgtttgcttatatgaatgaagaggctatgaagttaactatttcttcaggctttgctcactattggtctaggtctagaaaaagcttgtggaaaaaaggagaaacttccggcatgtttcaaaaagttgaaagaattttaattgatgatgatcaggatagtatagttattgaagttcttttaggcgaacctacaaaagggggtagagaagcatcctgtcatgttgggtatcggagttgcttttatcgcagtattccaataggagagtctaaagataaaattgctttaaaatttattgagaaagaaaaatcttttgatcctgataaaatatatgaaggtcatgaaaatccgaccaaattatag

SEQ ID NO: 266440 - DNA, 463 bp, Unknown
  Bacterial polypeptide expressing nucleotide sequence isolated from the Sargasso Sea
atgaataatagcctgtttaaagatagagtttctgttgaacaggttgaagagtcaaatgatcttgctcctagttttggagatcaaggattaatacccgtagttaccactgatgttcactcaggtgatgttctgatggttggatatatgaataaagatgcctttgccctcacaattgagacaaaaaaagctcattattggagtagaagtagaaataaaatttggaaaaaaggtgaaactagtggtctcgttcaaaatgtaattgagctcaggattgatgatgaccaagattctttatggttgaaggttgatgttgagggttcaggtgcaagttgtcatgtgggttacaaatcttgtttttataggtctgtaccgcttggtggtaatgaaaatatatctcttgattttaaagagaaagaaaaaacctttgatccaaaaaaaatttacggagaaattcctaacccta

SEQ ID NO: 266441 - DNA, 469 bp, Unknown
  Bacterial polypeptide expressing nucleotide sequence isolated from the Sargasso Sea
tatgtttaaaaagagagaaaatgtggatgaaattgaggaaggaaatttactttctcctaaattcgataacgatggtttgataccagtaattactatgtgttctcaaacaagagaaattttaatgcacggctatatgaatgtagaagccttaaaacttactattgaaactaaagaagctcattattggagcagatcaagaaaagaagtatggcataaaggcaaaactagtggatacattcaaagagtaaaagaaatcagaattgatgatgatcaagattctatatggcttctagtggatataggtaacggatctagttgccacgtaggttatagatcttgtttttatagatcaatacctttaggtaaaatagatgatgcaaaaaaaataaaaatgaaattcgaagaaaaagaaaaaaaatttgatcctgaaaaagtttacaaaggtcaacctaatcctacaaaaatataa

SEQ ID NO: 266442 - DNA, 403 bp, Unknown
  Bacterial polypeptide expressing nucleotide sequence isolated from the Sargasso Sea
tatgtttaaaaaaagagaaaatatagctgatatagaagaaggtgctttattatcaccaaaatttgataatgatgggctaataccagttgtgacaatgtgtcaaaaaactaaagaaattttaatgcatggatatatgaatgttgaagcactaaaactaactattgaaacaaaagaagctcattactggagtagatctagaaatgaaatatggcacaaaggaaaaactagtggttttgtacaaaaagttaaagaaattagaatagatgatgatcaagattctttatggttaactgtagatattggagaaggatcaagttgtcacgtgggttatagatcttgtttttatagatcagtaccactcggaaaaattgataacgctagaaaatataaaaatgaagtttga

SEQ ID NO: 266443 - DNA, 469 bp, Unknown
  Bacterial polypeptide expressing nucleotide sequence isolated from the Sargasso Sea
tatgtttaaaaaaagagaaaatgtaattgaaatcgaagaaggcaatcttctttcaccaaaatttgataacgatggattaatacccgtaataacaacttgttatcaaacaaaagagattcttatgcatgggtatatgaatgttgaagcactaaaaaaaacaattgaaacaaaagaagctcattactggagcagatcaagaaaagtaatctggcacaaaggtaaaacaagtggatttgttcaaaaagttaaagaaattagaatagatgatgatcaagatgcagtttggttaactgtagatataggcgatggtgcaagctgccatgtaggttatagatcttgtttctaccgatcaattcctttaggtgaaattaaaaatggacgtgaagtcgaaatgaaatttgaagaaaaagaaaaaaaatttgatcctgaaaaagtttataaaggtcaaccaaatccaacaaaaatttaa

SEQ ID NO: 266444 - DNA, 469 bp, Unknown
  Bacterial polypeptide expressing nucleotide sequence isolated from the Sargasso Sea
atgttcaaaaaaagagaaaatgtagtcgaaattgaggaaggcaaacttctatcacctaaatttgataatgatgggcttataccagtaatcacagtttgtcataaaacaaaagatatactaatgcatggatatatgaatgttgaggcttttaaaaaaactattgaaactaaagaagctcattattttagtaggtcaagaaatgctctttggcacaagggaagaacaagtggctttgttcagaaagttttagaaataagaatagatgatgatcaagattctctatggttaacagttgatattggtgatggcgcaagttgccatgttggttacagatcttgtttttatagatctattcctttaggtccaattaaaaatggaagagaaattgaaatgaaatttttagaagatgaaaaaaaattcgatcctgaggaagtttacaaaggtcagccaaatccaacaaagatttaaa

SEQ ID NO: 266445 - DNA, 577 bp, Unknown
  Bacterial polypeptide expressing nucleotide sequence isolated from the Sargasso Sea
tatgatagaggtgcgtaccaacaactctgataaccaagtcagttttcaaccccctttccctttctggaacaagtccgtggcagatacacattcttcatcagatgctcttcgtctttttgcacctcgtacctcaattgaacaagttgaggaaggaaacgaacttgcacctaagtttgatgaaaaaggctttattccatgtgtcacaacagatcacgtgtcgggcgagttgctgatggtagccgtaatgaaccaagaggcactcgagaaaacaatcgtaaccggagaggcgcattacttcagccgaagccgtcagtgtctctggcacaagggagcgacaagcgggcttgtccagaaagttgtcgagatgaggattgatgatgaccaagactgtatttggttgcgggttgatgttgctggtggcgcgagttgtcatgttgggtatcgctcctgcttttatcgaaaagttccagtgggtgtgcagcgagacagcggctcggaacttgagtatatcgaggccgaaaaaacatttgatccaaaagaagtgtacggtgatgcaccaaatccaacgcagttgtaa

SEQ ID NO: 266446 - DNA, 469 bp, Unknown
  Bacterial polypeptide expressing nucleotide sequence isolated from the Sargasso Sea
catgtttaaaaaaagagacagtatttttgaagttgaagaaggaaaatttttatctcctaaatttgatagtcaaggcttaattccagtaatcactacggacagtaaaactggagaagttttaatgcatgggtatatgaattctgaagctttaaaaaaaacaatagaaacaaaagaagctcattactggagcaggtcaagaaaatctatttggcacaaaggaaaaacaagtggttttactcaaaaagtaattcaaataagaatagatgatgatcaagattctgtttggttaagtgttgatataggaaacggtgctagttgtcatgtgggttatagatcgtgtttttatagatcgataccattgggtaaaatagatcagtctgaaaaagttgaaatgaaatttgaggaaaaagagaaaaaatttgatccagaaaaagtttataaaggacaacctaatccaactaaactttaa

SEQ ID NO: 266447 - DNA, 469 bp, Unknown
  Bacterial polypeptide expressing nucleotide sequence isolated from the Sargasso Sea
atgtttaaaaatagagaaaatgtaaaagaaatagaagaaggcaatctgttgtctcctaaatttgacaatgatggactaatacctgtcattactatgtgttcaaaaacaaaagaaatactaatgcacggttatatgaatgttgaagccttaaagctaacaatagaaaaaaaagaagctcattactggagtagatcccgaaaagaaatttggcacaaaggaaaaacaagtggatttgttcaaaaagtaaaagaaattagaattgatgatgatcaagattcaatttggatagttgttgatattggtgaaggatctagttgtcatgtaggttatagatcatgtttttatagaactgtccctctaggtaaaattgataatgccagagaaataaaaatggaatttaaagaaaaagaaaaaaagtttgatcctgataaagtttacaaaggacaaccaaatccaacaaaaatttaat

SEQ ID NO: 266448 - DNA, 487 bp, Unknown
  Bacterial polypeptide expressing nucleotide sequence isolated from the Sargasso Sea
ttgaggacaactgtgaataaagtaatttttgccaatagaagtagtatagagcaagttgaagaagggaatttcctagctcctaagttcgatagagatggaattattccagtgatagttacagaaacctcatctggagatgttttaatgttgggttacatgaacaatgaatctctagagaaaaccatagaaactagagaagcttattattggagtcgtagcagagaagttttatggaagaagggtgattcaagtgggatggtgcatcaagtagatgaaatcttgattgatgacgatcaagattctctttggttaaaagtttctataacaggattaggtgcaagttgccatgtcggatataagtcctgtttctatagatcgatcaaaaacgtagtagaacaaggtgttgaattggaattcacggaagatgaaaaagtttttgatccggaaattgtttacccaggagcagaaaaccccacaaaattataat

SEQ ID NO: 266449 - DNA, 484 bp, Unknown
  Bacterial polypeptide expressing nucleotide sequence isolated from the Sargasso Sea
tatgaactttaaaaaaagaatttctatagaacaagttgaagaaggagtagaattagctccaaaatttgatagtaaaggtgttattccctgtattacagttcatgctcaaacaaaggaagttcttatgtttgcatatatgaatgaagaggctatgcaattaactatgtctacaggacttgcccattattggtctaggtctaggaagagtttatggaaaaagggtgaaacttcaggtatggttcagaatattcaaagaatgttaatagatgatgaccaagatagtttagttattgaagttacactcactgaaccgagtcttggaggagaagaagcatcgtgtcatgttggctatagaagctgtttttatagagaagtgccaattggacaagaaaatatagataaaccgcttaaatttattgaggatgagaaatcatttgaccctgagaaaatttataaaaatatacctaatcctaccaaattataa

SEQ ID NO: 266450 - DNA, 469 bp, Unknown
  Bacterial polypeptide expressing nucleotide sequence isolated from the Sargasso Sea
tatgtttaaaaaaagggaaaatattgaggaaattgaggaaggaaatctactttctccaaaatttgataatgatggtttaatacctgttattacaacatgttctaatactaaagaaattttaatgcatggctacatgaatgttgaggctttaaaaaaaactatcgaaacaaaagaagctcactattggagtagatcaagaaaacaaatatggcacaaaggtaaaactagtggttttgttcaaaaggttaaagaaatcagaattgatgatgatcaagattctatttggttaagtgtagatataggtgatggtgctagttgtcatgttggttacaggtcatgtttttatagatcagtgccattaggaaaaattgataatgctagagaaattaaaatgaaatacgaagaaaaagaaaaaaaatttgatccagagaaagtttataaagggcaacctaatcctacaaaaatatag

SEQ ID NO: 266451 - DNA, 469 bp, Unknown
  Bacterial polypeptide expressing nucleotide sequence isolated from the Sargasso Sea
atgttcaaaaaaagagaaaatatctatgatattgaagagggaaatcttctttcacctaagtttgataatgatggattgatacctgtcattacgatgtgctcaaaaactaaagatattttgatgcatggatatatgaatgtagaagctcttaaaaagacaattgaaactaaagaagcacactattttagtagatcgagaaaagctatatggcacaaaggtaaaactagtggttttacgcaaaaagttactgaaataagaattgatgatgatcaagactcaatatggttaacagttgatatcggtgatggagctagttgtcatgttggttatagatcatgtttttatagatctattcctatgggaccaatagaaaacggaagaaaagttgaaatggaatttcttgagaaagaaaaaaaattcgaccctgaagaagtttataaaggtcaaccaaatccaactaaaatttaat

SEQ ID NO: 266452 - DNA, 469 bp, Unknown
  Bacterial polypeptide expressing nucleotide sequence isolated from the Sargasso Sea
atgttcaaaaaaagagaaaatgtaatagaaattgaagagggtaatcttttatcacctaaatttgataatgatggattgatcccagtaattacaatgtgctcgcagacaaaggatgttctgatgcatggatatatgaatgttgaggcattaaaaaaaacaatagagactaaagaggctcattattttagtcgatcaagaaatgctatttggcacaaaggtaagacaagtggtttcacacaaaaagttatagagattagaattgatgatgatcaagactctatttggttaaccgttgatattggtgatggagcaagttgccatgttggttatcgatcatgtttttatcgatctattccgatgggaccaattgaaaatggtcgaaaagttgaaatgaaatttttagaagatgaaaaaaaatttgatcccgaagaagtgtataaaggtcaacccaatcccactaagatttaaa

SEQ ID NO: 266453 - DNA, 469 bp, Unknown
  Bacterial polypeptide expressing nucleotide sequence isolated from the Sargasso Sea
tatgtttaaaaaaagagaaagtgtcacagagattgaagagggaagcttcttatcaccgaaatttgataacgatgggttgattccagttattactacatgcataaacactaaagagatattaatgctaggttatatgaatgttgaagcattcaaaaaaacaattgaaactaaggaagctcattattggagcagatcaagaaagcaagtttggcacaaaggtaaaacgagtggttttattcaaaaagttaaggaaataagaattgacgatgatcaagactctgtttggttaagtgttgatattggaaatggttcaagttgccatgttggatacagatcttgtttttatagatctataccactaggaaaaattgaaaatgctagagaaattaaaatgaaatttgaagaaaaagaaaagaaatttgatcctgaaaaagtttacaaagatcagccaaatccaacaaaaatttaa

SEQ ID NO: 266454 - DNA, 469 bp, Unknown
  Bacterial polypeptide expressing nucleotide sequence isolated from the Sargasso Sea
tatgtttaaaaaaagagaaaatgtagcagaaatagaagaaggcaagcttttatctcctaaattcgacaatgatggattgattccagtcattacaacatgctcaaaaacaaaagaaatattaatgcatgggtatatgaatgtcgaagccttcaagttaactattgaaaccaaagaagctcattattggagcagatcaagacaatcaatttggcataaaggaaaaacaagtgggtttgttcaaaaagtaaaagagattcgaattgatgatgatcaagatgcagtatggatgactgtcgatattggtgaaggttcaagttgtcacgttggctacagatcctgtttttatagatctgtccctttgggtaaaattgataatgcaagacaaattgaaatgaaatttgaagaagaagaaaaaaaatttgatccagaagttgtttataaaggacaacctaatccaacaaaaatataa

SEQ ID NO: 266455 - DNA, 350 bp, Unknown
  Bacterial polypeptide expressing nucleotide sequence isolated from the Sargasso Sea
aatgcatggatacatgaatgttgaagcattgaagcgtacgattgaaacaaaagaagctcactactggagcagatctagaaatgaaatttggcacaaaggtaaaacaagtggctttgtacagaaagttatggaaataagaattgatgatgatcaagattctgtctggttaagtgtagatataggagatggagccagttgtcatgtaggatataaatcctgtttctacagatctattccactcggaaaaattgaaaatggaagaaaagtcgaaatgaaatttgaagaaaaaaaaaaaaaattcgacccagaaaaagtatataaaggtcaaccaaatccaacaaaaatttaat

SEQ ID NO: 266456 - DNA, 469 bp, Unknown
  Bacterial polypeptide expressing nucleotide sequence isolated from the Sargasso Sea
atgtttaaaaaaagagaaagtgtattagaagtagaagaaggaaaatttctttcaccaaaatttaatgctgaaggtttaatccctgttataacaacagatcacaaaactggcgatgtattaatgcatggctatatgaatgaggatgctcttaaaaagactattgaaactaaagaagcacattattggagcagatcaagaaaggttttgtggcacaaaggaaaatccagtggatttattcaaaaagttatagaaattagaattgacgacgatcaagattctatatggatgagggtcgatatagcggatggggccagttgtcatgtaggatataaatcttgcttttatagagaagtaccacttggcaaaattcaagatcaagaaaaagttaaaatggagtttaaagaaaagaaaaaaaaatttgatccaaaaaaagtgtataaaaaccaaaataaccctactgaactgtgac

SEQ ID NO: 266457 - DNA, 469 bp, Unknown
  Bacterial polypeptide expressing nucleotide sequence isolated from the Sargasso Sea
aatgtttaaaaaaagagaaaatgtcgcggatattgaggaaggcaatttactttcaccaaaatttaacaatgatggtcttatacctgtcataacaactgattttaaaaccaaggaagttttaatgcaaggtttcatgaattctgaagctctaaaaaaaactattgaaactaaagaagctcattattggagtagatcaagaaaagaagtttggcacaaaggtgaaacaagtggttttgttcaaaaagttgttgagatgagaatagatgatgatcaagactctatttggatgagtgtagatataggcgatggcgcaagttgccacgttggttacaaatcctgtttttatagatcaatcactcttggaaaaattgaaaacaccgaaaagattaaaatagattttaaggaaaaaaagaaaaaatttgatcctgaagtggtttacaaaaacaaaccaaatccaacaaaaatctag

SEQ ID NO: 266458 - DNA, 334 bp, Unknown
  Bacterial polypeptide expressing nucleotide sequence isolated from the Sargasso Sea
atgaatgtggaggctttaaaaaaaacaattgaaactaaagaagctcactactggagcagatctaggaaacaaatttggcataaaggaaagcacagtggctttattcaaaaagttattgaattaagaattgatgacgatcaggatgcagtttggttaactgttgatattggaaatggttcaagttgtcatgttggatatagatcatgtttttatagatctgtaccacttggaaaaattgataatgccagagaaatcgaaatgaagttcgaagaaaaagaaaaatcttttgatcctgatgaggtttataaaaatcaatcaaaccctacaaaaattt

SEQ ID NO: 266459 - DNA, 469 bp, Unknown
  Bacterial polypeptide expressing nucleotide sequence isolated from the Sargasso Sea
atgttcaaaaaaagagaaaatgtagtagaaattgaagagggtaatcttctatcacctaaatttgataatgatggattaatcccagtaattacaatgtgctcgcagacaaaggatgttctgatgcatggatatatgaatgttgaggcactaaaaaaaacaatagagactaaagaggctcattattttagtcgatcaagaaatgctatttggcacaaaggtaagactagtggtttcacacaaaaagttacagagattagaattgatgatgatcaagactctatttggttaaccgttgatattggtgatggagcaagttgccatgttggttatcgatcatgtttttatcgatctattccgatgggaccaattgaaaatggtcgaaaagttgaaatgaaatttttagaagatgaaaaaaaatttgatcccgaagaagtctacaaaggtcaacccaatcccactaagatttaaa

SEQ ID NO: 266460 - DNA, 388 bp, Unknown
  Bacterial polypeptide expressing nucleotide sequence isolated from the Sargasso Sea
atgtttaaaaaaagagaaaatgtcgctgatatagaagaaggtaacctattatcgccaaaatttgataatgacggtttaattccagtagttactacttgtgcaaaaactaaagaaattctcatgcatggctatatgaatgttgaagcattaaagttgactattgaaacaaaagaagctcattactggagtagatctagaaaagcgatttggcacaaaggaaaaacaagtggctttactcaaaaagtaaaagaaataagaattgatgacgatcaggatgcagtatggataactgttgatattggtaatggagctagctgccatgttggctacagatcttgtttttatcggtcggttccaatgggaaaaattgagaatggtcgaaaagtga

SEQ ID NO: 266461 - DNA, 373 bp, Unknown
  Bacterial polypeptide expressing nucleotide sequence isolated from the Sargasso Sea
tgtgccaataccaaagaaatattaatgcacggcttcatgaatgttgaggcattaaagctaactatagaaactaaagaagctcattattggagtagatccagaaagcaactttggcataaaggtaaaacaagtggatttgttcaaaaagtaaaggagataagaattgacgatgatcaagattctatttggttaagcgtagacattggagatggtgctagttgccatgttggatataaatcttgtttttatagatctatacctcttggaaaaattgataatggaagaaaaattgaaatgaaatttgaagaaaaagaaaaaaaatttgatccagaagaagtttataaaggacaaccaaatcctactaaaatttaat

SEQ ID NO: 266462 - DNA, 478 bp, Unknown
  Bacterial polypeptide expressing nucleotide sequence isolated from the Sargasso Sea
aatgtctaatatgtttaaaaaaagagaaaatgtccaagaaattgaggaaggaatattattatcacccaagtttgataatgatggattaataccggttgtgacaacttgttcaaaaacagaagaggttttaatgcagggatatatgaatgtggaagcattaaaaagaacaatcgaaactaaagaagcacattattggagtaggtccagaaaacaaatttggcacaaaggaaaaactagtggttatatacaaaaagttatagaaataagaatagatgatgatcaagattcaatatggcttaaagttgatataggacaaggtgctagttgtcatgtcggatatagatcgtgtttttatagatcaattccattaggtaaaattgataatgctagaaatataaaaatgcgttttgaggaaaaagaaaaattatttgatcctgaagaagtttataaaggagaggaaaacccaacaaaagtttaa

SEQ ID NO: 266463 - DNA, 322 bp, Unknown
  Bacterial polypeptide expressing nucleotide sequence isolated from the Sargasso Sea
tctctccaaaaaacaattgagactaaggaagcacattattttagtagaagtcgaaatataatatggcataaaggggcttctagtggttatgttcaaaaaattgatgagattctaattgatgatgatcaagacgctctttgtattaaagtaaatattggagaaaatggggcaagttgtcatgtaggttataagtcttgtttttatcgtaaaattgacttagaagatactgcaaataagccgggtctagagtttactactgaagaaaaagtttttgatccgaacgtggtttatggagatgctcctaacccaactaaattgtaga

SEQ ID NO: 266464 - DNA, 334 bp, Unknown
  Bacterial polypeptide expressing nucleotide sequence isolated from the Sargasso Sea
aatgacattaaaagtaattgataatattgattttgaaaaaggaaatggacttgttccggtaattgttcaagattcagagtcaaaagatgtacttaccctagcatatacgaacaaagaatcactagaattaactaaaaaaacaggaaactcatggttttggagtcgttctagaaataaactatggatgaaaggcgaagaatctggaaatacacagaaagttaaaaaaatattggttgattgtgactcagacgcaataatttacttggtagaaccatcaggacccgcatgtcatcttggagaagatacttgtttccataatgaaatgaattcttaa

SEQ ID NO: 266465 - DNA, 368 bp, Unknown
  Bacterial polypeptide expressing nucleotide sequence isolated from the Sargasso Sea
tatgtttaaaaaaagagaaaatgttaaagaaatagaggaaggcaagctgttatcaccaaaatttgataacgatggtctgataccagttgtgacaacatgtgccaatacaaaagaaatattaatgcacggttacatgaacgttgagtcgcttagactaactattgagacaaaagaagctcattattggagtagatctaggaagcaaatttggcacaaaggtaaaaccagtggttttgtgcaaaaagtaaaagagttaagaattgatgatgatcaagattctgtgtggataagtgtagatattggaaatggatccagttgtcatgttgggtatagatcatgtttttacagatcggttccattaggtaaaa

SEQ ID NO: 266466 - DNA, 469 bp, Unknown
  Bacterial polypeptide expressing nucleotide sequence isolated from the Sargasso Sea
atgtttaaaaaaagagacagtgtttttgaagttgaagaaggaaaatttttatctcctaaatttgatagccagggcctaattccagtaatcactacggacagtaaaactggagaagttttaatgcatgggtatatgaattctgaggctttaaaaaaaacaatagaaacaaaagaagctcattactggagcaggtcaagaaaatctatttggcacaaaggaaaaaccagtggttttactcaaaaagtaattcaaataagaatagatgatgatcaagattctgtttggttaagtgttgatataggaaatggtgctagttgtcatgttggttatagatcatgtttttatagatcgataccattgggtaaaatagatcaatctgaaaaagttgaaatgaaatttgaggaaaaagaaaaaaaatttgatccagaaaaagtttataaaggacaacctaatccaactaaactttaaa

SEQ ID NO: 266467 - DNA, 469 bp, Unknown
  Bacterial polypeptide expressing nucleotide sequence isolated from the Sargasso Sea
atgtttaaaaaaagagaaaatgtcgctgatatagaagaaggctctttattgtcaccaaaatttgataatgatggtctaattcctgtaattaccacttgttcaaaaactaaagaaatcctaatgcatggctatatgaatgtagaagccttaaaattaaccattgaaactaaagaagctcattattggagcagatcaagaaaacaaatttggcacaaaggtaagaccagtggttttgttcaaaaagttatagaaatcagaattgatgatgatcaggattcagtttggctgactgttgatattggagatggcgctagttgtcatgttggttatagatcttgtttttatagatcaataccattaggtgaaattaaaaatggaagagagattgaaatgaaatttgaagaaaaagaaaaaaaatttgatcctgaaaaagtatataaagggcaacccaacccaacaaaaatttaat

SEQ ID NO: 266468 - DNA, 499 bp, Unknown
  Bacterial polypeptide expressing nucleotide sequence isolated from the Sargasso Sea
atggtcttaaaaataggaaagaaagtgaaaacaataaattttgctgaaaggtcatctatagaatttgtagaagaagggaatgtcttagcacccaaatttaattctgatggaatcatacctgtaatagttactgaaagtagttctgatttggttctgatgcttggttatatgaacaaagaagcattagataaaactattttgactagagaggcgcattattggagcagaagtagagaacttctttggaaaaaaggagaatccagcggaatgactcatagagtagacgaaatacttatagatgatgatcaagattcagtgtggcttaaggtctcaattgatggattaggagctagttgccatgtcgggtataaatcatgcttctataggtctgtagaatctgtagagcaaggcaatgttgttttgaattttactgaatcagaaaaagtctttgacccagaagttgtttatccgggggcagataacccaacaaaactttaaa

SEQ ID NO: 266469 - DNA, 469 bp, Unknown
  Bacterial polypeptide expressing nucleotide sequence isolated from the Sargasso Sea
tatgtttaaaaagagagaaaatgtcgctgatatagaagaaggaagcttattatcacctaaatttgataatgatggccttattccagtaattacaacctgttacaaaactaaagaaattttaatgcatggttatatgaatgtggaagcttttaaactaacaatagaaactaaagaagctcattattggagcagatctagaaaacaaatttggcacaaaggaaagacaagtggattcgttcaaaaggttaaggaaataagaattgacgatgaccaagactcagcatggttaactgttgatataggtgatggtgcaagttgtcatgttggttatcgttcttgtttttatagatctgtacctttaggaaaaattgacaatgcaagacaaatagaaatgaaatttgaggaaaaagaaaaaaagtttgatccaaaaaaggtttacaaagatgaaccaaatccaacaaagatttaa

SEQ ID NO: 266470 - DNA, 297 bp, Unknown
  Bacterial polypeptide expressing nucleotide sequence isolated from the Sargasso Sea
aagcttgttactggagcaggtctagaaaagctttatggtataaaggaaaaacaagtggttttgttcaaaaagttatagatataagaattgatgatgatcaagatgctttatggatgactgtagatattggtaatggagcaagttgccatgttggttataaatcatgtttttatagatctattccattaggtaaaataaataattcagaggaagtaaagctagaatttagagaaaaagaaaaaaagtttgaccctgaaaaagtgtataaaggacagccaaacccaactaaattataag

SEQ ID NO: 266471 - DNA, 469 bp, Unknown
  Bacterial polypeptide expressing nucleotide sequence isolated from the Sargasso Sea
tatgttcaaaaaaagagaaaatatctacgatattgaagaaggcaatcttctttcacctaaatttgataatgatggactaatccctgtcataactatgtgctcaaaaacaaaagatattttgatgcatggatacatgaatgtagaagctctaaaaaagacaattgaaactaaagaggcacactattttagtagatcgagaaaagctatctggcacaaaggtaaaacaagtggatttacacaaaaggttactgaaataagaattgatgatgatcaagactcaatatggttaacagtagatatcggtgatggagctagttgtcatgttggttatagatcatgtttttatagatcaatacctatggggccaatagaaaacggaagaaaagttgaaatggaatttcttgaaaaagaaaaaaaatttgatcctgaagaagtttataaaggtcaaccaaatccaactaaaatttaa

SEQ ID NO: 266472 - DNA, 418 bp, Unknown
  Bacterial polypeptide expressing nucleotide sequence isolated from the Sargasso Sea
tatggtagatattccactcgcgcagagagagagtgtctttgaggttgaagaaggtacagctcttgcgccaaaattcgatgaaaatggacttattccagtcgtaacaactgatagtaaatcgggtgaggttcttatgcatggctacatgaataaagaagcacttttacttacaatacaaaataaagaagcatactactggagtcgatcgcgcaaatcgatatggcataaaggtaaaacctcagggctaactcagaaagttagcagtatacgcattgatgatgatcaggattcaatctggctaattgttgatgttgaaggagtcggagcgagctgccacgttggttatagatcctgcttctatcgctctatcagttttgaaagtaaaaataaggtagtactcaaattgaagaagaagaga

SEQ ID NO: 266473 - DNA, 360 bp, Unknown
  Bacterial polypeptide expressing nucleotide sequence isolated from the Sargasso Sea
tatgtttaaaaaaagagaaaatgtcgctgaaatagaagagggaaatctattgtcaccaaaatttgatgatgatggattgatccctgtagttacaacatgctccaaaactaatgaggtgttaatgcatggttttatgaatgttgaatctctcagattaacaattgaaactaaagaagctcattattggagtagatctagaaaagaaatttggcgcaaaggtaatgtaagtggttttgtgcaaaaagttaaacaaattagaattgatgatgatcaggattcgatttggttatctgttgatattggaaaaggttctagttgtcatgtaggttataggtcttgtttttatagatcaataccact

SEQ ID NO: 266474 - DNA, 460 bp, Unknown
  Bacterial polypeptide expressing nucleotide sequence isolated from the Sargasso Sea
atgacagatgaatttggaaagagaataagtatagaagaggtagaagaaggaaagtgtttcacacctaaattcgacgaaaatggtcttattccggttattacagttgaagattcatctggtgacatcttgatgcacggttacatgaattcggaagcattaatcaagtcaatagagtccaaagaggcgcactattggagcagaagtagacaaaagttatggaaaaaaggtgaaattagcggcctcaaacaatctattgtcaaaatcttagttgacgatgatcaagattgtatgatttttagagtaaatgtcgccggctctggagccagttgtcacgtaggttacaagtcttgtttttaccgagttcttgaagacaaaaaaaatcttaaattcattgaaacagaaaaattatttgatcctgcagaaatttacgaaggtgaagataatcctactattctctgaa

SEQ ID NO: 266475 - DNA, 460 bp, Unknown
  Bacterial polypeptide expressing nucleotide sequence isolated from the Sargasso Sea
gatgaaaaataaatttggaaagagaataagtatagaacaggtagaagaaggaaattctttaatgcctaagtttgatgacaacggtttgataccagtaataacggtagaaagtggcacagaattgatactgatgcatggttatatgaatgaagaatcgcttgatttgagtatcgatacaaacttagctcactattggtcaagaagcagaaagaagatatggaaaaaaggagaaactagtggccaatttcagcatataaaagaaatattaattgatgatgatcaagactgtttaataataaaggttgtattagatggtcttggagcaagttgtcatgtcggctataagtcttgtttttacagaaaggttgataaagatttaagtcttgaatttattgaaaaagaaaaggtttttgatcctgaagaagtgtatgaaggagaagaaaacccaactattttatag

SEQ ID NO: 266476 - DNA, 469 bp, Unknown
  Bacterial polypeptide expressing nucleotide sequence isolated from the Sargasso Sea
atgtttaaaaaaagagaaaatgtcgctgatatagaggaaggtaacctattatctccaaaattcgataatgatggtttaatccctgtaattacaacttgtgcagaaaccaaagagattctaatgcacggttatatgaatgttgaagcttttaaattaacaatagaaacaaaagaagctcactattggagcaggtctcgaaaagaaatttggcataaaggaaaaactagtggctttactcagaaagtaaaagaaataagaattgatgatgaccaggatgcagtttggatcactgtagatattggtgatggtgcaagttgtcatgttggttatagatcatgtttttatcgatcagttccaatgggtgaaattgaaaatggacgtaaagtagaaatgaaatttgaagaagaaaagaaaaaatttgatccagaagttgtttataaaggacaacccaatccaaccaaaatataaa

SEQ ID NO: 266477 - DNA, 469 bp, Unknown
  Bacterial polypeptide expressing nucleotide sequence isolated from the Sargasso Sea
atgttcaaaaaaagagaaaatatctacgatattgaagaaggaaatcttctatcaccaaaatttgataatgatgggttaatcccagttattactatgtgttcaaaaacaaaagatattttgatgcatggatacatgaatgtagaagctcttaaaaagacaattgaaactaaagaagcgcactattttagtagatcgaggaaagctatctggcataaaggtaaaacgagtggttttacgcaaaaggttactgaaataagaattgatgatgatcaagattcaatatggttaacggttgatataggtgatggagctagttgtcatgttggatacagatcttgcttttacagatccattcctatgggaccaattgataatggacgaaaagtagaaatggaatttcttgagaaagaaaaaaaatttgatcctgaagaagtttataaaggtcaacctaatccaactaaaatttaaa

SEQ ID NO: 266478 - DNA, 424 bp, Unknown
  Bacterial polypeptide expressing nucleotide sequence isolated from the Sargasso Sea
attgtctgaaaccttagtcaggcaagtaatagagagtataaaatttgatacaaacggactagtaccagccatagctcaagatgaagacaccaaagaagtacttatgatggcttggatgaatgatgacgcaattaaagaaacgctagacaccggcatggcctgctatttttcccggtcgcgatcaaaactttggagaaagggagaggaatcgggccatgttcaaatccttaaggagttcagaatagactgtgacgccgacacaatactgctaatcgtggaccagaagggtgtagcctgtcatacagggcggccaaattgcttttttaaaaaagttgatgatggtagtattaagataatttcagaagttttgattgatccccaagacttgtatataaaaaatgaatactggaaaccaataccggaa

SEQ ID NO: 266479 - DNA, 412 bp, Unknown
  Bacterial polypeptide expressing nucleotide sequence isolated from the Sargasso Sea
atgcttaatctaaaggagcttgaaagctcagcgagcggtacgaccttcgatctagatagcatcttagaggcattgaaatttaatcaggaaggacttatccccgctgtagcacaggacatcgacacaaaagaggtactcatgctggcctggatggatgcaaaagcaattagaagtactcttgaggagggtcaagtttgctactattccagaagtcgaaaaacctactggaaaaaaggcgaagaatcgggtcacaagcaaaagatggtagaaatgtatatagattgtgatggcgactctattctgcttctggtaaaccaagagggtcctgcctgccataccaatagatctggttgtttttatctgaaaaccgagagcgacaaagtgatgatctctagcgatccaataaaataac

SEQ ID NO: 266480 - DNA, 469 bp, Unknown
  Bacterial polypeptide expressing nucleotide sequence isolated from the Sargasso Sea
atgtttaaaaagagagaaaatgtcgctgatatagaagagggaagcctattatcacctaaatttgataatgatggccttattccggtagttacaacatgttctaaaactaaagaaattcttatgcatggctatatgaatgtggaagctttaaaattaacaatagaaactaaagaagcgcattattggagtaggtctagaaaacaaatttggcacaaaggaaagacaagcgggtttgttcaaaaaattaaagagattagaattgatgatgatcaagactcagtatggttatctgttgatataggagatggtgcaagttgtcatgttggttatcgttcatgtttttatagatctgtacctttaggaaaaattgacaatgcaagacaaatagaaatgaagtttgaggaaaaagaaaaaaagtttgatccaaaaaaggtttacaaagatgaaccaaatccaacaaagatttaat

SEQ ID NO: 266481 - DNA, 469 bp, Unknown
  Bacterial polypeptide expressing nucleotide sequence isolated from the Sargasso Sea
atgtttaaaaaaagagaaaatgtagcagaaatagaagaaggcaagcttttatctcctaaattcgacaatgatggattgattccagtcattacaacatgctcaaaaacaaaagaaatattaatgcatgggtatatgaatgtcgaagccttcaagttaactattgaaaccaaagaagctcactattggagcagatcaagacaatcaatttggcataaaggaaaaacaagtgggtttgttcaaaaagtaaaagagattcgaattgatgatgatcaagatgcagtttggatgactgtagatattggcgaaggctctagttgccacgttggttacagatcctgtttttatagatctgttcctttgggtaaaattgataatgcaagacaaatcgaaatgaaatttgaagaagaagaaaaaaaatttgatccagaagttgtttataaaggacaacctaatccaacaaaaatataaa

SEQ ID NO: 266482 - DNA, 469 bp, Unknown
  Bacterial polypeptide expressing nucleotide sequence isolated from the Sargasso Sea
tatgtttaaaaaaagagaaaatgtcgctgatatagaggaaggtaaccttttatctccaaaattcgataatgatggcttaatccctgtaattacaacatgtgcagaaactaaagagatcctaatgcacggttatatgaatgttgaagctttaaaattaacaatagaaacaaaagaagctcactactggagcaggtctagaaaagaaatttggcataaaggaaaaactagcggctttactcaaaaagtaaaagaaataagaattgacgatgatcaagatgcagtttggataactgtagatattggtgatggtgcaagttgtcatgttggttacagatcatgtttttatagatcagtacctacaggcaaaattgaaaatggacgtaaagtagaaatgaaatttgaagaagaaaagaaaaaatttgatccagaagttgtttataaaggacaacctaatcctactaaaatttaa

SEQ ID NO: 266483 - DNA, 469 bp, Unknown
  Bacterial polypeptide expressing nucleotide sequence isolated from the Sargasso Sea
tatgtttaaaaaaagagaaaatgtcgctgatatagaagaaggttctttattatcaccaaaatttgataatgatggcctaattccagtaattaccacttgttcaaaaactaaagaaattctgatgcatggctatatgaatgtcgaagcattaaaattaactattgaaactaaagaagctcattattggagcagatcaagaaaagaaatttggcacaaaggtaagaccagtggttttgttcaaaaagttatagaaatcaggattgatgatgatcaggactcagtttggctgactgttgatattggtgatggtgctagttgccatgttggatacagatcttgtttttatagatcaataccattaggtgaaattaaaaatggcagagaagttgaaatgaagtttgaagaaaaagaaaaaaaatttgatccagaaaaagtatataaaggacagcccaatccaacaaaagtttaa

SEQ ID NO: 266484 - DNA, 461 bp, Unknown
  Bacterial polypeptide expressing nucleotide sequence isolated from the Sargasso Sea
aaaaagagaaaatatctatgatattgaagaaggaaatcttctttcacctaaatttgataatgatggattaatcccggtcattactatgtgctcaaaaacaaaggatattttgatgcatggatatatgaatgtagaagctcttaaaaagacaattgaaactaaagaagcacactattttagtagatcgagaaaagctatctggcacaaaggtaaaaccagtggcttcactcaaaaagtaactgaactgaggattgatgacgatcaggactcagtttggatgactgttgatataggtaatggtgctagttgccatgtagggtatagatcttgcttttatagatctattcctatgggaaaaattgataatgctagacaaatagaaatgaaatttttagaaaaagaaaaaaaatttgatccagaggaagtttataaaggtcaaccaaatccaacaaaaatataat

SEQ ID NO: 266485 - DNA, 472 bp, Unknown
  Bacterial polypeptide expressing nucleotide sequence isolated from the Sargasso Sea
tatgtttaaaaagagggaaaatgtcgctgatatagaggaaggcaacttgttgtcacctaaatttgataatgatggccttattccagtagttgcaacatgttccaaaacgaaagaaattcttatgcatggctatatgaacgttgaagctctaaaattaacaatagaaactagtgaagcacattattggagtagatctagaaaacaaatttggcacaaaggaaagacaagcggatttgtccaaaaagttaaagaaataagaattgatgacgatcaagattcggtatggatttctgttgatataggcgatggtgcaagttgccatgtaggatatcgctcttgtttttacagatccatacctttaggaaaaattgataatgctagacaaattgaaatgaattttgaggagaaagaaaaaaaatttgatccagaaaaagtttataaaggtcaacctaatcctacaaaaattaaaaaa

SEQ ID NO: 266486 - DNA, 334 bp, Unknown
  Bacterial polypeptide expressing nucleotide sequence isolated from the Sargasso Sea
atgaccttaaaaataatagatgagattgattttgagaaaggagatggattagttccagttattgttcaagattcggagtcaaaagatgttctaactttggcatatacaaacaaagaatcactagaattgacaaagaaaactggaaactcgtggttttggagtcgttctagaaagaaactttggatgaagggagaagaatcaggtaatacgcaaaaagtaaaaaaaatactggtagattgtgactcggatgcaataatctatctggtagaaccatcaggccctgcatgtcaccttggtgaacgaacttgtttccataatgacatggaatcttaga

SEQ ID NO: 266487 - DNA, 511 bp, Unknown
  Bacterial polypeptide expressing nucleotide sequence isolated from the Sargasso Sea
aatgcaaattgctattttgtctttttttcattattttacgttcatgtttaaaaaaagagaaaatgtatttgaggtagaagagggaaaatttctatctcctaaatttgataaagatggacttattccagtaaccacctctgacagtggctccggtgaattattaatgcacggttacatgaatgaggaagctctaaaaaaaacaattgaaactaaagaggctcattattggagtagatctagaaaagatatatggcacaaaggaaagactagtggttttgttcaaaaggtcattgatttaagaatagatgatgatcaggatgcattgtggatgtcagtagatataggaaacggagcaagttgccatgtaggatataaatcatgcttttatagatcaatacctttaggaaaaattaaaaattctgaagaaatagaattagaatttaaagaaaaagaaaaaaaatttgatcctgaaaaagtttataaaggacaaccgaatccaacaaaactataa

SEQ ID NO: 266488 - DNA, 682 bp, Unknown
  Bacterial polypeptide expressing nucleotide sequence isolated from the Sargasso Sea
tttgggtgtttctaacaatccttctcgattggggtcttctcccatccattttaagattgtcctgaatgcatcttcagcctctttgtcagagacattattttgcaatttttcgttttcatttttaactaatttcatagcgtccttatataatacaaaatatgccttttttaaaatatttattatctgtgctaatatgttacataattcaataaatatgtttaaaaaaagggaaaatatcgctgaaattgaggaaggaaatcttttatctcctaagtttgataatgaaggtttaatacctgtagttactacatgttcaaatacaaaagaaattttaatgcatggttatatgaatgttgaagcttttaaaaaaactattgaaacaaaagaagctcactattggagtagatctagaaaacaaatttggcacaaaggaaaaacaagtgggtttgtgcaaaaaataaaagagataagaatagatgacgatcaagactcgatttggttgagcgttgatataggcgatggtgctagttgtcatgttggttacagatcatgtttttatagatctgtaccattgggaaaaattgataatgctagagaaataaaaatgaaatttgaagaaaaagaaaaaaaatttgatccagaaaaagtttataagggacaaccaaatccaacaaagatttaa

SEQ ID NO: 266489 - DNA, 385 bp, Unknown
  Bacterial polypeptide expressing nucleotide sequence isolated from the Sargasso Sea
aatgtcatggctagataaaattaactggaataaagaaaacttggttcctgtcattgtgcaagaaattgatacaaatcaagttttaatgcatgcctggatgaaccgagaatcgctagaagaaacatataaaagcggtagggcaacatattggtcacgatctcgtcagagcttatggattaaaggggagtcgtcgggacactatcaatatgttgagtcaatacgggccgattgtgactatgacgctctcttaataactgtaaaacaaaaggaaggtattgcttgtcatactggtaggcatcattgcttttttaccaaactagttgatggcaattgggtagaaacagaaaaaatattgaaagcatcagaggatatttatgacaaatag

SEQ ID NO: 266490 - DNA, 485 bp, Unknown
  Bacterial polypeptide expressing nucleotide sequence isolated from the Sargasso Sea
gatgcaccccctcagccccgcttttatggaccaactccgttttacagaagcggggttgattcctgctgtggcgcaggattggctcgatggcgccgtcctgatggtggcctggatgaatcgcgaatcgattgagaaaacactgcagagcggtgaagtgcattactggagccgctcgagagccgagctctggcacaagggagcaaccagcggacacacccagatccttcgtggaatccgctacgactgcgacgcggatgttctgctcctcaacatcgagcagacaggcgatgttgcttgccacacgggagcccgcagctgtttttacgaagacgacgacaatcccactgagggcggggttgatgcattgccacctccggcagatgcctgcactgagttgtaccgcgtgatcttggatcgaaaaacccaaccggaggaggggagctacaccaacaagcttcttcagggcggcgacaacgccatcctca

SEQ ID NO: 266491 - DNA, 388 bp, Unknown
  Bacterial polypeptide expressing nucleotide sequence isolated from the Sargasso Sea
tatgagttcgtggttagaaaaaattaagtggaacgagaaagaattggtcccagttatcgtacaagaagttgaaacgaaacaaatccttatgcacgcttggatgaatcgagatgcgttgaagcaaacatatgaaagcgggaaagcaacatattggtcgcgttctagagaaaagatatgggtaaaaggagaaaaatcggggcactatcaatttgtagaatcgatcctcaccgattgtgattacgatgtccttttgataaatgtcaggcaaaagggcggaattgcttgtcatactggcagacaccgttgttttttcaataagttgactgataaaaactggttagaatctggagaaattctcaaaaacccaaaggatatttatggaaaataa

SEQ ID NO: 266492 - DNA, 588 bp, Unknown
  Bacterial polypeptide expressing nucleotide sequence isolated from the Sargasso Sea
gatgcagcccctcagccccgccttcattgaccaactccgttttaacgaagcggggctgattccagctgtggcccaggactggctggacggggcggtgctgatggtggcctggatgaaccgggaggccatcaaagccaccctgcgcagtggtgaagtgcattactggagccgctcacgccaggagctttggcacaagggggccaccagcggtcacgttcagacgatgcgggagatccgctacgactgcgatgccgacgtgctgctggtgatcgtggagcaggctggggatgtggcctgccacaccggctcccgcagctgtttctacgaaaacagcgatgcacgaaccacaggtggcgccgaggccctagcgccaccaacggatgcctgcaccgaactgttccgagtgatcgaggggagacgcgatcagccggaggaagggagctacaccaacaagctgctggcggggggagacaacagcatcctcaagaaaatcggcgaggagagtgctgaattcgtgatggcctgcaaagacgacaacgccgccgagattgcaggcgaagcggcggacatcgtcttccacatgcaggt

SEQ ID NO: 266493 - DNA, 391 bp, Unknown
  Bacterial polypeptide expressing nucleotide sequence isolated from the Sargasso Sea
atgtcttcatttctggatcaagtcaaatggaaccaagatggcttggtgcccgtggttacggttgacgcagcttctaggcgagttttgatgcaagcgtgggtcaacagagaggcgttacaaatcactgtcaacgaggggttcgctacttattggtctcgatccaggggaaaattatggaaaaaaggcgaacagtcaggcaacacacaaaagttagtaggaatatatttagattgtgataatgatagtttgtgttatgaagtggagcagaagggaggtattgcatgtcatacgggtcgagagagctgtttttttcaaaagtatgagaaaggcagatggtcgatttcagacccagtcctaaaagatccctctgaaatttataataatcactgat

SEQ ID NO: 266494 - DNA, 478 bp, Unknown
  Bacterial polypeptide expressing nucleotide sequence isolated from the Sargasso Sea
tatgtcccgttttgatcaagtctcgccggatgctctgtttaaacagcttgagcatgcctctacggatgatagcctgcccgctgtctccgctctactcgatgccgttcgctttaacagcgatggacttattcccgccattgcccaacagcacgactctaaagaagtattaatggtggcgtggatgaaaccgcaggcgctagaagaaaactttggcacgcagcgagtttgctactactcccgttcacggcaaaccttgtggcgcaaaggtgagacatcgggtcagcagcagcagctaaaatcagctgcgcttgattgcgatggcgatacgctgcttttacaagtcgatcaaacggggccagcttgccacactggccgacgcagctgcttttacgttgcagttagtaatgagctagcctcgattaccagcgaacctttgattgatcccgctgagctctacggcaaaaagactgagtcttag

SEQ ID NO: 266495 - DNA, 670 bp, Unknown
  Bacterial polypeptide expressing nucleotide sequence isolated from the Sargasso Sea
atgcagcccctcagccccgccttcatcttgcaactccgctttaacgaagcggggttgatcccagcgatcgcccaggactggctggacggggccgttctgatggtggcctggatgaacagggaatcgatccaacaaaccctgaacagcggcgaggcccattactggagtcgttcacgacaggagctgtggcacaaaggagccaccagtggtcacacccagaccctgcgttccatccgctacgactgcgatgctgatgtgctgctgcttaccatcgaacaacgtggcgacattgcttgccacaccggtgcccgcagctgcttctacgaaggcggcgatcaacgttccgacgggggctcagatgccttgcctccccctgctgacgcttgcaccgagctgtttcgcgtgatcgaggctcggcgagacaccccggaagaaggcagctacacaaacaagctgctggaggggggtgacaacaagattctcaagaaaatcggggaggagagtgctgaattcgtgatggcgtgcaaagacgacaatcctgaggagatcgcaggagaagcagctgacatcctcttccatatgcaagtggccttggcccaccacggcgtgagctggcgtcaggttcaggaggtgctggccgcacgacggggagccccgcgccggcactaag

SEQ ID NO: 266496 - DNA, 391 bp, Unknown
  Bacterial polypeptide expressing nucleotide sequence isolated from the Sargasso Sea
atgtcttctttcatagatcaaattaagtggaatcaggatggccttttgccagtggtgacagttgacgctaagtctggtcgggttctcatgcaggcctgggttaatagtgaagccctagaaatcacggtttcaggaggatctgctgtttattggtctcgatcaaggggcaaattatggaaaaaaggggaacaatcaggaaacacacagaaaatagtaaacatatatctagattgtgacaaagacagtttattgtatgaagtagaacaaaaaggcggtatcgcatgtcacactggcagagagagctgcttttatcaaaaatataaggatggtaagtggttggttaatgatcctgtactcaaagacccgtcttccatttatggtaaacactaac

SEQ ID NO: 266497 - DNA, 418 bp, Unknown
  Bacterial polypeptide expressing nucleotide sequence isolated from the Sargasso Sea
gatgaatacggaaacgaatgcattgcccgcgtggctcgacaaggtccgctgggacgacaacggcctcgtgccggtgatcgcgcaggaggcgtcgacgaacgacgtgctgatgttcgcgtggatgaaccgcgaggcactggcgaagacgatcgagacgcagcgcgcggtctactattcgcgctcgcgcaagcgcctgtggttcaagggcgaggagtcgggccacgtgcagcacgtgcacgaggtgcggctcgactgcgacgaggacgtcgtgctgctgaaggtcgagcaggtgtcgggcatcgcgtgccacaccggccggcattcgtgcttcttccagaaattcgaaggcaccgtcgacagcggcgactgggtcgcggtcgaaccggtgctgaaagatcccgaacacatctacaaatga

SEQ ID NO: 266498 - DNA, 341 bp, Unknown
  Bacterial polypeptide expressing nucleotide sequence isolated from the Sargasso Sea
ccaggactaccagactggccgcatcctgatgatggcctggatgaaccgcgaatcccttgccctcaccgccagcgagcaacgcgccatctactggtcgcgctcacgtggcaagttgtggcgcaagggcgaggaatccggccatgtgcagaagctgcacgaactgaggctggactgcgacgccgatgtcatcgtactgatggtcgagcaactgggcggcatcgcttgccacaccggtcgcgaaagctgcttctaccgggtatatgagaatggcggctggaaaaccgtcgacgcggtgctgaaagatccgcacgccatctatgcaggacacagccatgagtgac

SEQ ID NO: 266499 - DNA, 841 bp, Unknown
  Bacterial polypeptide expressing nucleotide sequence isolated from the Sargasso Sea
tccgacgatgcctccgacagcgccgactgcgacggggactgcgataccggcgatgactccgacagcgttgattgcgacgggtactgcggttcctgggatggctacgacagcgccgactgcgacggggactgcggttactacgatgacttcggtagctacgactgtgacgatatctgcgattactccgatgactccggcagcgttgattgcgacggggactgcgatacctgggatgactccttgagcgacgactgcgacgggtcctgcggtttctacgatgcctacgacagcggcgactgtaatatggtctgcgaatactccgatgactacggcagcgaggactgcgatggggactgcggttcctacgatgactccgacagctacgactgcgacgggtactgcgatacctgggatgactacgacagcgccgactgcgatggggactgcggttcctacgatgactccgacagctacgactgcgacgggtactgcgatacctgggatgactacgacagcgccgactgcgatggggactgcggttactccgatgactacgacagcgccgactgcgacgagatctgcgattccggcgatgactacgacagctacgactgcgacggggactgcgatgacttggatgcctccgacagctacgactgcgacgggtactgcgatgcccccgatggctacagcagccccgactgcgacggggactgcggttcctgggatgactacggcagctacgactgcgacgagatctgcgattccggcgatgagtcccccagctacgactgtgacgattactgcgatttcgacgatgctcccgacagctacgactgcg

SEQ ID NO: 266500 - DNA, 358 bp, Unknown
  Bacterial polypeptide expressing nucleotide sequence isolated from the Sargasso Sea
ctggtgccggccatcgcccaggactaccagagtggccgcatcctgatgatggcctggatgaaccgcgaatccctggccctcaccgccagcgaacaacgcgccatctactggtcgcgctcacgtggcaagttgtggcgcaagggcgaggaatccggccatgtgcagaaactgcacgaactgcgcctggactgcgacgccgatgtcatcgtgctgatggtcgaacaactgggcggcatcgcttgccacaccggtcgcgtaagctgcttctatcgggtatacgagaatggcggctggaaaaccgtcgacgcggtgctgaaagatccgcacgccatctatgcaggacacagccatgagtgac

SEQ ID NO: 266501 - DNA, 382 bp, Unknown
  Bacterial polypeptide expressing nucleotide sequence isolated from the Sargasso Sea
ctggatgagatcaagtgggacagtgacggcctggtgccggccattgcccaggactacaagaccgggcgcgtgctgatgatggcctggatgaaccgcgaggccctgagcctcaccgccgccgagcagcgcgccatctactggtcacgttcgcgtggcaaactgtggcgcaagggcgaagaatccgggcacgtgcagaccctgcacgagctgcgcctggactgcgatgccgacgtggtgatcctcaaggtcgagcagatcggcggcattgcctgccacactggccgccacagttgcttctatcgcgtgttcgagaatggcgaatggaaggttgtggagccggtgctcaaagacccgcacgccatctacccagcaggacactgaa

SEQ ID NO: 266502 - DNA, 316 bp, Unknown
  Bacterial polypeptide expressing nucleotide sequence isolated from the Sargasso Sea
ctgttcttgccagatggcgtggtagttgtttctgatggaaagatccaagatgtaatggctatttccgattacaaaaaaagtggtggtgatatctcagtagtcgagcatctcgaggatagccttatcgtccccgggtttatcgatgctcacattcatcatactcaaatgggcataatcgcgagctatggttatcaacttcttgattggctcgaaaattatgctttcccggcagaaaaagtcttttcggaccctgaactttcacgaaaacaagcggaaagcttcctagaatgtctattcaaacatggaacgacaaccg

SEQ ID NO: 266503 - DNA, 517 bp, Unknown
  Bacterial polypeptide expressing nucleotide sequence isolated from the Sargasso Sea
gatgctccaagttcacctagctagcatattgcattttttggaagaccctgcaaaaagtggggaggaagattcttatcgttactattctgacggtgcgttagttgtggaagatggcttagtcaaacaagtcggggactcagagggtttgttgggctctttgcctaaagatgcagatatttttgaccacggtaatagcttattagtaccagggtttatcgatgttcatgttcactatccgcaaatagagataattgctagttatggagagcatcttcttgagtggttagagaaatatacctttccagcagaggcacaatttggtgatttttcctattctcatgaggtatcagaacgatttataaaagagatgctccgtgtcggtacaacctctgctttggtgtttggtactgttcatccggtttcggtcgattctttttttgaggtctgcgagaaaaaaaatcttagaatgatcgctggtaaggtgatgatggaccgaaatgcgccttcgaatttattg

SEQ ID NO: 266504 - DNA, 322 bp, Unknown
  Bacterial polypeptide expressing nucleotide sequence isolated from the Sargasso Sea
gatgtcggattttgatcgtaggcaattcttgggactcggtgcagcagcagcagcagggctcaccaccggatgcgagcccagtagagaaggagctttagttcctgacctgatcgtggtgaacgccaacgttctgacacaggatgacagccagccgaaggctgaagcctttgcgatccacaacgaacgttttgtagccgtcggatcttcgtcggacgtgaagaacctcgctgggcccaactcaacgctgttggacgttgcgggcatgactgttgtccctgggttcatcgacgcccactcgcacccttctggtgcgggtttgaat

SEQ ID NO: 266505 - DNA, 823 bp, Unknown
  Bacterial polypeptide expressing nucleotide sequence isolated from the Sargasso Sea
atgcaagataatttaattaatagattttcagtgcctaatctctcaaactgcactattgatttagccaaagtagcttctaacaaaaaagaacctgatttagttttaacaaatgctagagttatttcaacttatactgacagattacttaaagataaagaaatatggatttacaaaggaagaatagcttgtattaaatcatcaggttcatataaaaattattttaatattgatcaaaataaaatttacaatgtaaacaagaatatactagcccctggtctagttgatcctcatatgcatatagaaagcagtatgatgacaggatgtgcatatgctgaagcagcattattaaatggaactactaccgttttctgtgattcacatgaaattggcaatgtttgtgacattgaaggtatagaatggatgctacaagattgccgtgaagctccattatcaatttttttgactttaccaagcacaatacctgctacaaatgattttttagaaactgctggcggaaacttaacagcaaaaaaaacttcattgttatttgataaatggcctgagatattaggattaggagaaaaaatggactttgtctcagtgtgcaatagtgatgaaaggtctcattctataattgctgaatctttaaaaagaaatttacctgtaagtggtcatgtttttggaagagagtttgttgcagcctacgctgcaagcggaattagtgatacccatgaagctgaagaaaaattatttacaaatgatttacttgaatctggactttggatatttttaagaggtgggaaatccaaaaacacctggaata

SEQ ID NO: 266506 - DNA, 589 bp, Unknown
  Bacterial polypeptide expressing nucleotide sequence isolated from the Sargasso Sea
gagtcatcgatgacccatattgagtcatcgatgacccataatgagtcatcgatgacccataatgagtcatcgatgacccataatgagtcatcgatgacccataatgagtcatcgatgacccatattgagtcatcgatgacccatattgactcatcgatgacccatattgactcatcgatgacccatattgactcatcgattgccaatattgactcatcgatgacccatattgactcatcgatggcccatattgactcatcgatgacccatattgactcatcgatgacccatattgactcattggtggcccatattgactcatcgattgcccatattgactcatcgatgacccatattgactcatcgattgccaatattgactcatcgatgacccatattgactcatcgatgacccatattgactcattggtggcccatattgactcatcgatgacccatattgactcattgcttgcccatattgactcatcgatgacccatattgactcattgatggcccatattgactcatcgattgccaatattgactcatcgatgacccatattgactcattgatggcccatatga

SEQ ID NO: 266507 - DNA, 746 bp, Unknown
  Bacterial polypeptide expressing nucleotide sequence isolated from the Sargasso Sea
gatgcttcaagttcacctagctaacatattgcatttcttggaagaccctgcaaaaagtggggaggaagattcttatcgttactattctgacggtgccttagttgtggaagatggcttagtcaaacatgtcgggggctcagaggaattgttgagctctttgtcacaagatgcagatatttttgaccacggtgatagcttgttggtaccagggtttatcgatgttcatgttcactatccgcaaatggagataattgctagttatggagaacacctccttgagtggttagagaaatatacctttccagccgaggcacaatttggtgatgtttcctatgctcgtgaggtatcagaacaatttgtaaaagagatgctacgcgtcggtacaacctctgctttggtgtttggtactgtccatccggtttcggttgattctttttttgaggtctgcgagagaaaaaatcttagaatgatcgctggtaaggtgatgatggatcgaaatgcgccttcgaatttattggatacagctgagagttcttataccgactccaaagctctgatagaaaaatggcatggaagagggaggttgcagtatgcggtgaccccgagattctctgtcacttcttctccccagcaattggaaaaagctggccagctaagagaggagtatccaagcatttaccttcagacacatctttctgagagtaaagaggaattaagcatggtccgtaagctatttcctgagtaca

SEQ ID NO: 266508 - DNA, 1684 bp, Unknown
  Bacterial polypeptide expressing nucleotide sequence isolated from the Sargasso Sea
atgaaaacttacattaaacaaatatcagctcttctcttcatatcgctcatcatttcttgctcaaaagaagaggtatgttacgaagcagatttagttttagtaaatagtaaaatctatactgccaatgctgatcaatgggaagcagcagccctggctattttaggtgataaatttatctttattggcagtaatgacgattcctctgcttacgcgtgcggatctaatagagttttagatttaaaagattcctttgtattcccaggattcattgatgcacatgcacatcttaaaggcataggttaccgagaaataaccctcaatcttcagggtgcggacagtttgaagaatatgctcaccttggttcaaatccattcaaataaattatcggacggcgattgggtagttggaaggggatggatagaaaaaaaatggccagaaggtaggtttcctactattgaggagttggatgctatttccagtaaaaagcctattgccctggaaagggcagatggccatgcaattattgttaattcgcttgctctaaaattagcaggaattgatagaagtacccccgatcctataggaggaaaaatagataaagactccaatggggaacctaatggagtcttgatagacaaagcatcatccttagttgaatctattattcccaaacgcactagggaagaagaaaagcgagctttaagggaaggacttaatagaacagcgaaaatgggatggacacaattgcatgatgcaggctctcctttatccgattacgaaattctaaatgaacttaaaaaaaatgaaggcttaccagttaggatccaattttatgtaagtgatggagaagatggtaataagtttcttgatgaaggcccttatttagatccagatcatttccttacttctaggggtatcaagttttacgccgatggggcaataggttccaggggtgctgcattcttcgacaaatatgacgattacgaaacaaaaggcttcctgatatttcaaaaagaagaaactatgccaaagctagttaaagcccttgtgaatggtattcaaatacaaactcatgctatcggagatttggcaaataaaattactctcgattggtatgaagaggcattcaacaaagtttcaccagaaaatagaataattgaaaatcctcgatggagagttgagcacgctcaaaacattaaacccgaagatcaaaaaagatactcagatttagaagttatagcttcaatgcaaccctctcatgcgattggcgatttacatttcgcacacaaaagattgggagaggaaagattaaaagatgcatatacatggaaaaagttgattgaattaggtgtagttgttgtaggtggatctgatgcacctgttgaaataggtgatccacgaattgaattcaaggccgctgttagcagaaaagatttagatggtttttatgaagactggtggaacattgaagaagtggtttctagagaagaagccctatatatgttcacaaaatgggcgtcctattctgtttttgaagaggatataaagggtacaattgaagttggaaagctagctgatttaacaatatttaataaagatctaatgacaattcctgaagaagatattatgagttctgaagttattatgactattgttggaggtaaagtagtttattcaaagtaaa

SEQ ID NO: 266509 - DNA, 1114 bp, Unknown
  Bacterial polypeptide expressing nucleotide sequence isolated from the Sargasso Sea
atgcaacaaatttcagtagcccggctttttgatggccagaactggcaacagaatgtgacactggagattgaagccggtcgcattcatgcgattcatcccgcagctggcgctgtgcttgctggcactttggtgccgggttttattgacgtgcaggttaatggcggtggtggcgctttgtttaacacagataccagtctcgaagcgctgcgtactatggtcaaagcccatgctcagtttggcagcacggctttattgcccacagtcatcactgattctgtggctgtgatgcaacaagccgctgatgtgatagctcaggctattgcgaataaagagcccggtgttttgggtgtgcactttgaaggcccgcatttatccgtgccaaaaagaggtgtgcatccgcagaactttatccggcctttatccgaagctgagttagcgatttatcgtcgcaccgaccttggcatcaagctggtgactgttgcgcctgaaactatcagcgctgaacaaatcaaagaattagtccaagccaatgtcattgtctgtttaggtcacagcaatacagatgcagctacagtacaggctgctttggctgccggagctacgggctttacccacttatacaatgccatgtcacctttaacttcgcgtgaacccggtgtagtaggggctgcacttgccgacccacacagctggtgtggcgtgattttagacggtttgcatgtacaccccctggcggtgaaagtggctttagctgctaagcctaaaggcaaactactgatagtcacagacgccatgtcgcctgttggcaccactcaaaccgagtttgatttttttgacggtaaagtgattcgggatggtaacaagttaaccaacttaaacggcaatttagcaggttctgtactggatatggccagcgctgtgtcttatgccgtgaaagagcttggccttgagttggcagaagctgtgcgtatggcgtctttgtatccggccgagtttttaggtatcagcgcgcagcgtggacaaatactggtgggggccaaagccgatctggtgttactgaatgacgaaggtctggtacagcagtgctggctggaaggtcgtcctgctatctaat

SEQ ID NO: 266510 - DNA, 1630 bp, Unknown
  Bacterial polypeptide expressing nucleotide sequence isolated from the Sargasso Sea
atgcttcatagcattgaaagagctgatttaataattagttccaataaagtgattttaatgacgggtcatcaaaaagctcagccactttcaattgctgtgcaaaacaaaaaaatagtctggattggatcacatactcaagccaaaaaaattcaaggacaacgcattgactatcacaatcaagccattctcccgggttttattgatgctcatggtcacgcatcctacctagcatttgccacacaagttgcaaacattgcctctcctccagttggagaagttaaaaccattaaagatcttcaagaaaatctaaaaaaatttatcaaagactccaatctaaagcctggcgaatgggtcatgggacttggttacgatgactcacttttagcagaacaaagacaccccaccaaagatgatcttgatgcagttagcactgatcatccaatatatcttattcatgtctcagctcatttgggtgcagcaaattcaatgggcttatccttggcaaatattaatagtgagagcaatgatcctcccggtggaaaaatccgaaggtatgaaaactcactcgagccaaatggggttttcgaagaaactgctgcctaccctcttcaacaattggccatgagcgcctacaaagatccaattggcagcgtcaaaaaagctatggatatttatgctagaaacgggattaccactgctcaagatggagcctctagccaagaaaccattgctttaatgcaggcagctgatgctcaaggcatgatcaacctagatattatcagttatcccataggacaaaatggattagatcaaaatctagattcaattagtttcggtaactacacaggaagattaaaaattggaggcatcaaactaattttagacggctcacctcaagggaaaactgcttatttaactgaaccctattacaaaccgcctcacagtgagtctgattcgtataaaggatatccgctcattcctcagtcagaagtttcgaaatgggtaaagcggtatgctgacctcaacattcccattatggcccatgccaatggtgatgctgcagctgatatgcttattgaggctgtaaaaaatgcagacattacttccgaccatcgaaccatcatgattcatgcgcaaaccgttagagaggatcaactggataaaatgaaagaactaagcatcatcccttcttatttttcaacacatacattctactggggagactggcatagagattcagtctttggagaagatcgtgccatgcgtataagtcctacaaaatctactctaaatagaaaaattcctttcagcgtccacaatgatgctcctgttgttccacccgatatgattagactgctgtggtccacaaccaacagaaaaactagatctggaaaagttctgggtgaggaacaaaaaatttctacctattcagctctggaggcaatgacaattaatgctgcttttcagcattttgaggatgatattaaaggtagtattgaagttggtaaactggcagacttggttattttatctaaggatcctttaagcatgccagtggatgaactgctagaattaaaaattatggccacttactctcatggcaaggaaatctttaaaaatgaaaaataat

SEQ ID NO: 266511 - DNA, 319 bp, Unknown
  Bacterial polypeptide expressing nucleotide sequence isolated from the Sargasso Sea
ttgaataatttaaaaaagaaaattcaacaaggactaggcactcaaaaggcagatattgttttaaggggtggcaaagtttttgatttaataactggggactttcttgaaggtgatgttgcaataactggagatactatagttggcacttgtacttcctatgatgcaaaaaaggtcatagatgtaaagaatcagtttctagttcctggtttcattgatacacatctccatattgaaagttcaatggtaagtccattcgaatttgagcgttgcgttcttccctctgggacaccactgttatttgtgatcctcatgagatagc

SEQ ID NO: 266512 - DNA, 393 bp, Unknown
  Bacterial polypeptide expressing nucleotide sequence isolated from the Sargasso Sea
tatgagtagtgtaaatttaaaaaaagttattgatgcagcaaggggtctaattaaagcagatttggtgttaaaaagtggaaaactttttgaccttgttacaggagaaataactgaaacggatatcgccatagttgatgatacaattataggagtgcattcaaaatatgaaggtgaaaatactatagatatttctggtaaatttgttgtgccaggttttatagatacacatctccatattgaatcttctatggtaacaccatttgaatttgaaaagtttgttttacctcgaggaattacctcagcaatatgtgatccccatgaaattgcgaatgtgaaaggagttgacggaataaaatactttcttgatgcatcagagaaaatgctgatgaattt

SEQ ID NO: 266513 - DNA, 928 bp, Unknown
  Bacterial polypeptide expressing nucleotide sequence isolated from the Sargasso Sea
cgaatttgagcgttgcgttcttcctcttggaacaacaactgccatttgtgaccctcatgagatagcaaacgtagttggtgtcgaagggataaaatattttcaagagtctagtgaacatactgtaatggatatttttgttcagttgtcttcctgtgttccttctactgaaatggaaactgcaggagcaagagtttcgtcactagagttgcaaaaattaaaaaatcacaaaagtaatattggtctctcagaaatgatgaattacccaggtgtcattaatcaggataatgaaataattaaaaaattaaaattgtttgagggagggcatattgatggccatgcacctcagctatccggaaaagaattaaatgcgtacattgctgcaggaataaaaactgagcatgaagcaacttcggaagatgaagctttagaaaaattaaaaaagggtatgcgcatactgatacgggaaggatctgttagcaaggatctaaaatctttacataaaatcttaacagacaaaacagcaccatatatttgtttgtgtacagatgacagaaacccgttggatatacacgaacagggtcatattaattacatgattaaagctttaattaaattgggagttaaaccattaaatgcttacagggcttcatctctttctgcagctgaagcatttagcttatcggataggggactgattgctcctggaaaaaaagcagacattgtttgtcttcaagatattgaagaatgtaaacctgcgatggttatatctggagggagagtagtttctgataaaattttttctactgtcaatcgaataaagccaattggattaaactcagttaaatcaaaatcagttaagagctctgattttataattaaagatgcatctgaggatacgaatgttattggaattttagaaggaaaataa

SEQ ID NO: 266514 - DNA, 1048 bp, Unknown
  Bacterial polypeptide expressing nucleotide sequence isolated from the Sargasso Sea
ccgacaaggtgcttcaccctccgatggtgggttggtgagtggtgccctagtcgctgccgtcgatggccttgatctggattcgctcgacagatttcgcgcaatgggcaatgaagcattgcgtctcgttgtgacggctcatcggatcgcatcaatgggactatctcctgcagagataaatgagcttgagcatgcgggttactccatccccttgaggcgtgcagtcaacatgcaggagatcctggctttggcatgttcaagtgatgtcgtgcacgagaccgctgcgagccagttgtcgtcggctacaccgggagaggccgccggactgtcgttggtcaggctctctcgactgttgccggcagtggtcgcgatgccggctggaatacctcctgcctcacgtatcgatgaagctctcagcaccggcgaactgctgtccgtcgacgttggtgaagtgaacgaatattacacggcttcgtgcgatggtcatgttgttgcgattagtgaagccccagttcccttgagcgaaaacgaagagtcccgttttgtgttgttccgagagtcgcacgggcttcaagaacatgttgcgatcattgttggaaacccaaagtattggcccgatccactgccggtacgcctacattcagcgtgtttcacgggggacctttttggaagcttgaagtgtgactgtggagagcaacttctcggcagtatgaagttctttgaagaaaaggggggcggcgtgcttctctatctcgcgcaggagggtcgtggcattgggcttaacaataagttcagggcctacaccctgcaggaaaatggccttgatacgatagacgccgacagaaccctaggtttcggtccggacgagcgtcgctacggtgtggcagcacagatcctccacgagataggtatcggtcgtatcgagctactcaccaacaatccggataaggtccaggcgatgcaggatgcggggattgaggtagttaatcgacgaccattgcacgggactctaaacagatacaatcgaccctatgtagaagccaaggtggtc

SEQ ID NO: 266515 - DNA, 199 bp, Unknown
  Bacterial polypeptide expressing nucleotide sequence isolated from the Sargasso Sea
atatgaaaatattgctggaatggtaaaatatttagcaatcaaagaattagatttgatgaccaataatccaaaaaaaataaaagcgcttgaagatatgggtatcaaagtaaatcaaagagttcctattttctcaaacaccaataagtataatgaaaaatatatctcaactaagaaaagtaaacttggtcatttaatttaa

SEQ ID NO: 266516 - DNA, 226 bp, Unknown
  Bacterial polypeptide expressing nucleotide sequence isolated from the Sargasso Sea
aattaggtttcaagatgatgaaagaacatatgaaaatattgctggaatggttaaatatttagcaatcaaaaaattagatttgatgactaataatccaaaaaaaataaaagcgcttgaggatatgggtattaaagtaaatcaaagagttcctattttctcagacacaaataaatataatgaaaaatatatctcaactaagaaaagtaaacttggtcatttaatctaa

SEQ ID NO: 266517 - DNA, 873 bp, Unknown
  Bacterial polypeptide expressing nucleotide sequence isolated from the Sargasso Sea
caataaagaaaggagaaattattatagtagttgacgatgagtcaagagagaatgagggtgattttgtatgtgcttcttcaaaagtaactcctgaaataataaatttcatggctaaagaggggagaggtttaatttgttgttccctagaatcagatagatgtaatgaattaggtttggaccttatggttggtaaaaatactgatgtatatggtacttcttttacggtttctgtggatttaaaagggagcggggttactactggaatttctgcttcagatagatcaaagacagttaaagcgcttgtagaccctaagatagaagcatccaacttctctaaaccaggccatatttttccattgagatcaattgatggaggtgtattaagaagagctggacatactgaggcatctgttgatttaccaaagcttgcgggactatatccatctggtgttatatgtgaaattctaaatgaggacggaagtatggctaggttaaacaacctttataaagttgctgacaaacatggcttagtaattatatctattaaagatttaattgaatataaaattgaaagagaatcgttaattgaagaaaaagaaactgttgatttacctactgagtacgggaattttaaattaatttcttttgaacaaaaagacacaaaagatattcatcttgctttgaaaaaaggagattggactaaagaagatgaggtattggtaagagttcattcatcatgtgtgactggtgatatattaggttctcttagatgtgactgcggttctcaacttcaaagggctttaagaatgattgataaaaaaggtcaaggcttagtattgtatatgaatcaggagggaagaggtatggcttaat

SEQ ID NO: 266518 - DNA, 567 bp, Unknown
  Bacterial polypeptide expressing nucleotide sequence isolated from the Sargasso Sea
ccgacctcggcatccaccatctgcggcttctgaccaacaacccgcgcaagatcgccggcctcggtggctatggactgaaggtggaggaacgcgttccgcttgtgatggatgccggggatcacaacgcagagtatctggccacgaaacgcgacaagctcggtcatctgatggcagaacagggaccctgcaccgtgctggcgctggccgtcgacgccgccacggaccagtggcctcagatccgtcgacgagccgagtcggcggcctcggaccacggcttccagctggaagccgtccagaccccccgcctgctggccctttgggagcgcccccagttcgtctggacgcttcgtccgggtcaggaggatcctctccccctgctgcgtctgatggcgcaatggccggagacacgtcgactcggtctgttgaaggcagcaaccgaccggatggcactgcatccgccccacacgctggagcggaccgagcttggcctgaacgacctggttgatgggcagggggacggaccgctgccttccgaaccgtccctgctgcactggaccacggactgat

SEQ ID NO: 266519 - DNA, 199 bp, Unknown
  Bacterial polypeptide expressing nucleotide sequence isolated from the Sargasso Sea
tatgaaaatatttcagatatgattaattttcttggaataaaaaaaatagatttaatgacaaataatccaaaaaaaataaatgcattaaaaaatatgggtatagttgttaatcaaagagtttctattacttcagacactaataaatataatgaaaaatatatatcaacaaaaataaaaaaacttggtcatttaatataat

SEQ ID NO: 266520 - DNA, 353 bp, Unknown
  Bacterial polypeptide expressing nucleotide sequence isolated from the Sargasso Sea
ggagtctggagttttcttgtacatgaaacaagaaggtagaggaataggtttgcttaataagctaaaagcatatgaacttcaagatgatggagcagacacggttgaagcaaacgaaatgctcggatttcctcctgacttaagacattatggagtaggtgcacaaatccttgcagatcttggtttaaaaaaaataaagcttcttactagtaatccaaaaaaagttgttggtttagatggatatggattagaaatcgttgaaacagttaatttaaatgtggaaccaaatccagtaaatcaggcttatttaaaaactaagaaagataagcttggccacaatatagaaaatgtctgat

SEQ ID NO: 266521 - DNA, 244 bp, Unknown
  Bacterial polypeptide expressing nucleotide sequence isolated from the Sargasso Sea
gttgaagcaaatcatcaattgtggtttcaaagatgatgagagaacatatgaaaatattgccggaatggtaaaatatttagcaatcaaaaaattagatttgatgactaataatccaaaaaaaataaaagcgcttgaagatatgggtatcaaagtaaatcaaagaattcctattttctcagacaccaataagtataatgaaaaatatctctcaactaagaaaagtaaacttggtcatttaatctaa

SEQ ID NO: 266522 - DNA, 385 bp, Unknown
  Bacterial polypeptide expressing nucleotide sequence isolated from the Sargasso Sea
tctaatgctttaaacacaatttcaaaaaatggaagtggcgttctcttgtacatgagaggtcacgaaggaagaggtattggattaggcaacaaaataaaagcatactcacttcaagatgagggggatgatactgttgatgcaaatcttaaacttggtttcaaaaacgatcagcgagattatggaaccggtgcattaattttaagatcacttggaattgagaaaatgaacttattaactaacaatccatcaaaaagagcagggcttgaaggttatggcctaagtattacaaaaagaacgccgttacttggacaaacaacaccagaaaatgaaaaatatctagaaactaaggaatcaaaaatgggacacttattcaatgaagagtaag

SEQ ID NO: 266523 - DNA, 823 bp, Unknown
  Bacterial polypeptide expressing nucleotide sequence isolated from the Sargasso Sea
cgaattcgacagcattcccgatgccctggcggccatccgtaacggggcctgcgtcgtggtggtcgacgacgaacagcgtgaaaacgaaggggatctcatctgcgccgcgcagttcgccacccctgaagcgatcaatttcatggccaccgaagcccgtggactgatctgcctggcaatggaggggagtcgtctggatgccctcgatctgcccctgatggtggatcgcaacaccgacgtcaatgagaccgccttcaccgtcagcatcgatgccggccgtgagcatggcgtcagcacggggatttccgctgaggacagggcccgaacgatccaggtagccctcaacccgtccacgcgaccggccgatctgcggcgccccggccacatcttccccctgcgggcccgtccgggtggggttctgaagagggcagggcataccgaagccgcggttgacctcgcccagctgtccggactggcaccagccggtgtgatctgcgagatccagaacaccgatggctcgatggctcggctggcgcagctgcgggagtacgccacccgctgggggttgaagctgatcaacatcgcggatctgatccgataccgactggaaaacgagcggttcgtcagacgacaggcccaggcgagcatgcccagccagttcggcgactttcaggcgatcggatatcgcaatgaactcgacggttccgagcacgtcgccctgatcaagggagatcctgcagccctgaaggaaccggtgctcgtgcgcatgcattcggaatgcctcaccggcgatgccttcggttcacttcgctgcgattgccgatcc

SEQ ID NO: 266524 - DNA, 325 bp, Unknown
  Bacterial polypeptide expressing nucleotide sequence isolated from the Sargasso Sea
aatgatcgccatcaagccgacccgcgacttctcgaatcttggccggatttcattctccgccaacaacgcctccaaacccaaacagaacactgcaatcaatcgctaccgagccgaacaagcccaggggggcttgatgtcgcgcaaaggcctggctgcgtcctcacaaaacgagtacaaggagaatctttgctcagcgatggggattgggatcggccccagagttcacagcgaatgtccttttagcagtgttaatgatcaatatgctgcaacaggaaacgaagctcttgaggtggcaatcgaagcggcatatcggcaggtactcggg

SEQ ID NO: 266525 - DNA, 421 bp, Unknown
  Bacterial polypeptide expressing nucleotide sequence isolated from the Sargasso Sea
tatgacatctaaattgaaatttattgaaacaagcaagcttccaactgacgtaggagagtttactgttcatgcatttacagatgaaaaagattccaaagatcatctagctataggtatgggggacttattgactaatgagcctgttttgtgcagaattcattcacaatgtataacaggtgagtctttctttagtatgcgatgtgattgtaggtttcaattaactgaatcgctgaatcaaattgcagctaagggtcgcggagttgttttttatcttcaacaggaaggaaggggtataggtctatcaaataaaattagagcatataacctgcaagataagggattggatacagtcgaagcaaaccatcagttaggcttcagagaagatgagagaggatatgaaattgtatctgatatggctaat

SEQ ID NO: 266526 - DNA, 391 bp, Unknown
  Bacterial polypeptide expressing nucleotide sequence isolated from the Sargasso Sea
agaaggtcaggtcatactgaagctagtttagaactagctgaattagctgggtttaaatctagtggcgtgctgtgtgaaataatggctgaagatggaacgatgcttaggggaaaagatctacaaaattttgctgacgaacatgatcttaagttaatatcaatcgcagaactcatttcatatgtaagaataaaaaaatctttaattgagaaaatagagaaaactaaactgccaactgattatggagattttaccttacatctataccaagataaatttgaaagtaaacaacatattgcacttacccatgggaagatggataagaaaaaaccaactcttatacgagttcattcagaatgcattactggtgatattttttcatcaaaaagatgtg

SEQ ID NO: 266527 - DNA, 309 bp, Unknown
  Bacterial polypeptide expressing nucleotide sequence isolated from the Sargasso Sea
tccgtgcctatgaattgcaggataaaggcgccaatacggttgaggcgaatgagcaattaggtttcccggcggacatgcgtaaatacgatatgatccaacctatgcttgaacaaattggcgtgaagcatgtacgcttaatgaccaataaccctcgcaaagtcaaagcgatgaaagaaatcggcatcgaagtggttgaacgtgttcccctgcaagtcggtaaaaaccgctacaatgaagcttacttaaagactaaatccaccgaacttgggcatatgatgtctgagtatcattttacggatgaagagtaat

SEQ ID NO: 266528 - DNA, 298 bp, Unknown
  Bacterial polypeptide expressing nucleotide sequence isolated from the Sargasso Sea
aaagcataaaatcaaagcttacaaacttcaagaggaaggcttagatacggtagaagcaaatgaaaaattaggatttaagccagacttgagagactatggtgttggagcgcaaatactaaaagatctaggagcaactaaactgactgttttaacaaataatccaaaaaaattagttggacttcaaggtcatggattagaaataacctccagaatccctatacagattgagatgaatcaagagaataaagaatatttaaatacgaaaaaaaataaattaggtcacttacttaacctatga

SEQ ID NO: 266529 - DNA, 436 bp, Unknown
  Bacterial polypeptide expressing nucleotide sequence isolated from the Sargasso Sea
tatgaaatcaagtttaaaatttattgaaacaagttccttacctactgatttaggtgaatttaaagtgcacgctttcactgatgaggctaagtctcatgatcatttagcgattagtatgggtgatttattaacaaatgaacctgttctttgcagaatacattcacaatgcattactggagaatctttttttagtatgcgatgtgattgcagatatcaattaacagagtcattaacacaaattgctgatagaggacgaggtgtaattttttaccttcaacaagaaggaaggggtattggattatcaaataaaattcgcgcttacaatttacaagacaaaggacttgatactgtagaagccaaccatcaattggggtttaaagaagatgaaagggattatgaaaatgtatctggaatgattaattttcttgcaatttaa

SEQ ID NO: 266530 - DNA, 171 bp, Unknown
  Bacterial polypeptide expressing nucleotide sequence isolated from the Sargasso Sea
ttcttggaataaaagaggttgatttaatgaccaataatccaaaaaaattaaaagcgcttgaagcaatgggtgttaaaattaatcaacgcgttccactttcttctaatacaaataagtacaacgaaaaatatatatcaacaaaaataaaaaagcttggtcacttaatttaat

SEQ ID NO: 266531 - DNA, 181 bp, Unknown
  Bacterial polypeptide expressing nucleotide sequence isolated from the Sargasso Sea
aatgattaattttcttgcaattaaaaaggttgatttaatgacaaataatcccaaaaaaattgatgcattaaaatccatgggtgtaattataaatgaacgagttcctctttcaacaaacagtaataaatataatgaaaaatatatttcaacaaaaataaaaaaacttggtcatttaatataa

SEQ ID NO: 266532 - DNA, 700 bp, Unknown
  Bacterial polypeptide expressing nucleotide sequence isolated from the Sargasso Sea
tggaggcacattaattagagctggccacactgaagcaatagttgacattgtaaatgccgctggcatgacgcctgctggtgtaatctgtgaaatattaaaagatgacgggacaatggcaagaatgcctgatttaataacattttcacaattgcacggtttgaaagttgcgacgattgcagatttaatatcctatagattaaaaactgaaagtactgttagaagaagtatagaatctaattttccaagtcaatttggcggtgattggagagcaattgtgtatattgataccatttctggtgtagagcatttagccttagttatgggcaatatcacatcttctgattcaataccagttaggatgcatgcagttaattttttaggtgatttgttaggagcaacaaatcaagataagaacgatgtacatttagcgtctgcgatgaaaactatttcaaagattggaaaaggtgcagtagtcttgttacgcgatttatctcctacaaccattagagatcaattagctacaataaataacaatacctctaaagatagttggaagtttaaaaattatggtgcaggggcacagattcttgtagatttgggattaaaaaatattctattacttacaaataatcctaaaaaaccagttgcattggacagctacggtttaaaaatcacaggtcatcaaaagctagatgtttaa

SEQ ID NO: 266533 - DNA, 664 bp, Unknown
  Bacterial polypeptide expressing nucleotide sequence isolated from the Sargasso Sea
tcaaaataattttataaatgttgatgtaaatgacataaaatcgtatgaaaattataacgcacaaagtttatctattgcagtaagagctaaagtgccaattgctgaaactgatgattgtgaagttataatttttagaccttcagacggtggagatgagcatttttgtttagtttttggaaaaaccagagaaaatcataataattttaaaaaagagacattagtaagaattcacagtcagtgcataactggtgatgttctcgacagcctaaaatgtgactgcggtcaacaattaaaacaatctattaaggtcatggctagcgcaaatgaaggtgtattaatttacctggcacaagaaggtcgcgatattggtttgttgaataaacttagagcttattctttacaagaaacgggcatggatactgtcgaggcaaatgaagatttaggttttaatgatgatgaaagactgtattatccagctaaagaaatgctttcacaattgaggattaataaagttaaattaattactaacaatcccagaaagattgaacacttaacaaaattaggtataaaagtaactcaacgtataccaattacaattaaccctaataaatataatcaaaaatatcttgaaactaagtcaaaaaaatcaggccatattttataa

SEQ ID NO: 266534 - DNA, 220 bp, Unknown
  Bacterial polypeptide expressing nucleotide sequence isolated from the Sargasso Sea
tttagagaagatgaaagaggatatgaaattgtatctgatatggctaattttcttggaataaaagaagttgatttaatgaccaataatccaaaaaaattaaaagcccttgaagcaatgggagttaaaattaatcaacgtgttccactttcatcaaataccaataagtacaacgaaaaatatatatcaacaaaaattaaaaagcttggtcacttaatttaat

SEQ ID NO: 266535 - DNA, 887 bp, Unknown
  Bacterial polypeptide expressing nucleotide sequence isolated from the Sargasso Sea
aatgaaagaaacaagtcccaaatcaaataatggaacaattgtggataataacgaaaattttaatatagtatttgatcccataagcgatgcattagctgccataagaaatggagaatgcataattgttgttgatgatgagagaagagaaaatgaaggcgatttaatttgtgcggctcagtttgcaactcctcaacaaattaattttatggcaacagagggtagaggtttaatatgtttagcaatgcaaggagagaagttagatgccctagatcttcctttaatggttgataggaatacagatgaaaatcaaactgcatttactatttcaatagatgcaggtcctgagaataatgtaactactggaatatcagcagaggatagagctaaaactatccaagttgcaataaatccttcaactaagccagaagatttaagaagaccaggacatatatttccactaagagcaaaaaagggaggagtattaaaaagagctggacataccgaagccgctgtagacattgctgctatgtctggtctttatcctgccggtgtgatttgtgaaattcaaaatccagatggctcaatgtcaagacttccccaacttaagcaatatgcaaaagaatggggaatgaagctaatatccattgcagacttaatcagttatagatttcaaaacgaaagatttgtttatagaaaatctgatgcaatacttccaagtattttcggtaattttaaggcatatggatacataaatgaacttgacggttctgaacatattgcactagtaaagcaaaagtcaaataaattaagtgaaccagtattagtaagaatgcattcagaatgtttaaccggtgatgcatttggatcacttcgttgtgattgtagac

SEQ ID NO: 266536 - DNA, 669 bp, Unknown
  Bacterial polypeptide expressing nucleotide sequence isolated from the Sargasso Sea
atctcagaaattatggagttggagcacaaatattaactgatcttggtataaagaaattaaaattactaaccaacaacccgagaaaaattgctggattaggtggttatggaatagaagttattgaaagagttccattagtaatttgtccaaatgataataatgctgaatatttgagtgttaaaaaaacaaagctgggccacatgattgacgaagataattctaattctaggaatatcgatccatatatatcaatttttctcgacggtgtatataaatctattgatctagttccaataaaaaataaagttattaaattctgtagtgatcaaaacattaatatcaaactggaaagcagtccaagattattggctttttggaatcgcccaaaattagtatggagaattttacatgatccaaatagaactaattccaacattactgatgtagaaataaaaaatatagaattatttattcagtttttatcaaaatatgaaaatagtacaaagattggaattattgtttctagaaacattgaacaagcattacatccaaaaagtagcatcaaactaatcaatactaaattcactataaataatgaaatcttatattcatctacaagaaaatttaatctagataaagagacatttagtattgtttttgaaggctaaa

SEQ ID NO: 266537 - DNA, 745 bp, Unknown
  Bacterial polypeptide expressing nucleotide sequence isolated from the Sargasso Sea
atgcgcgcgcgctctgacttgcgcctgggcattccaattgttttggcaggaaaaaaaatagatgctgtcgtgacaccagtagaagttttaaaccaggcgcggctaaatgaactaagactaattgatacaaattcgttcgttttaatcacttctagaagagctcaaacattgaaatgcccaatttatgacggaaactttgttagaattgaactaggtgaaaaatccacgcctaattcagtaaaagcaatagcagatccaatgcttgatctaaacaacccattgaaaggcccatttaagatcgttagagaaatgccccttgaaattgaaaacgaagctctcattgtattaaaatcagctcaactcttaccggcggctgttatctcccaagttacaaatggtgaaaattttgctcaaactcacaagctaacctatctcaaaacagagcagttagtggaaatggctatcagccctaaaggcatagcagatgctattacagcagaagttccaacagcaagagctgaaaatgctcaatttcatatttttagaccaaacataagtggagaggaacattatgctatggagattggcaaaattgaccgagatcaacctactttagtgcggattcattctgcatgtttcactggagatgtccttggtagtttgaagtgcgattgtggacctcagctacatgccgctacgaaaatgatcaatgataagggtggtgggcttcttatatacctgaacc

SEQ ID NO: 266538 - DNA, 904 bp, Unknown
  Bacterial polypeptide expressing nucleotide sequence isolated from the Sargasso Sea
aatgatcgccatcaagccgacccgcgacttcacgaatcttggccggatttcattctccgctaacaacgcctccaaacccaaacagaacactgcaatcaatcgctaccgagccgaacaagcccaggggggcttgatatcgcgcaaaggcctgcctgcatcctcacaaaacgagtacaaggagaatctttgctcagcgatggggattggaatcggccccagagttcacagcgaatgtccttttagcagtgttaacgatcaatatgctgcaacaggaaacgaagctcttcaggtggcaatcgaagcggcatatcggcaggtactcgggaatcttggaccaacgatcagccagagatgcatcgaacttgaatcgcaactaaagaatggcgagataagcgtcagagatttcgtggcgggacttgcgaagagtgatctctacagggaaaactacttttcgaaagtttcgccaatccgcggcatcgagctgaactacaagcaccttctcggtcggccgccgatcaatcaagcagaagtaagtgctgccataagccttatcgcatccaaaggctttaatgcgttcatcgatcagatcacacggtctggggaatacctagaggttttcggaacagacacagttccatacctgcgtgcatggacatcagaagcacgcgcctattgttcaacttttgccaaccttgctcgcgtcactcctggcaatgcaggctcagacactattgttgagcgacggagccaactggttgttgagttcagcaatgcacgtagcctgagcgaggctggcaacaaatatgaagtcagtggcttctcttattccaaagcaacatgcgatcccacctctgcggcattcctcagaatgtaccaatccaaaacagcaaaatcctggaactaa

SEQ ID NO: 266539 - DNA, 882 bp, Unknown
  Bacterial polypeptide expressing nucleotide sequence isolated from the Sargasso Sea
tatgcctcttagtaatatagaagattgtattaaagatattcaaaacggtaaaatggtaatcattgtagatgatgaggatcgtgaaaatgaaggtgattttgctattgcggctgaatttattacccctgaaattattacctttatggcttcatatggtagaggtttaatttgcatgccaattataggacaaagacttgagcatttagacatcccattaatggtaccagaaaatactgctcgattaggtacagctttcactgtatcaattgatactaaaacagatggggcaacaacaggtatatctgcatacgaccgtgcagcaacagtgaaagctgtgttaaaccctctgacaaggcctgaggatttacaaaagccaggccatatatttcctctaaggtatgctgaaggtggagttttggttcgtgctggccaaacagaaggatcagtagacttagcaaaattagctggattatatcccgcatcagtcatatgcgaagtcatgaatgaagacggcacaatggcacgtatgccagaactagaaaaaatatcagaagaatatgatattaaaattgtaagtgtcgaacaaataattcaatatagacatgaaaaagataacatgattgcaaaagttgctgagactaaacttcctacaaaatttggagaatttatgtctgttgcttttcgcagccttactgattccgacgaacatgttgcattagttaaaggagacttaacagctgctgatacaattccattagtcagagttcatagccaatgtttaactggagatacatttaaaagtttgagatgtgactgtggtgaacaaatggaaaaatctctagaattaattgcaaactctgaatgtggtgtatttttgtatat

SEQ ID NO: 266540 - DNA, 910 bp, Unknown
  Bacterial polypeptide expressing nucleotide sequence isolated from the Sargasso Sea
atgaaagaaacaagtcccaaatcaaataatggaacaattttggatataaatgactcttttaaaattgaatttgatcctatcagcgatgcgttggcagctataagaaatggtgaatgcataattgttgtagatgatgaaagaagagaaaatgaaggagatttaatatgtgcggctcagtttgcaactccacagcaaattaattttatggctactgagggacgtggtcttatatgcctagcaatgcaaggtgaaaaacttgattctttagatttaccactaatggtagatagaaatacagatgaaaatcaaacagcttttacagtatcaattgatgctggacctgaaaataatgttactactggaatttctgctgaagacagagcaaagacaatacaagttgctataaacccaaatacaaaacctgatgatttaaggaggccaggacatatttttccattaagagctaaaaaaggtggagtattaaaaagggccggacataccgaagcggcagtagatattgctgcaatgtcaggtctttatcccgctggagtaatttgtgaaatacaaaatcctgacggttctatgtcaagacttcctcaacttaaagagtatgcaaaacagtggggaatgaaattaatatcaatagctgatttaataagttatcggtttcaaactgagagatttgtatatagaaaatctgatgctgttctgccaagtatttttggtaatttcaaagcttatggatatgtgaatgaacttgatggttcagagcacgttgcattagttaaacaaaaatcatcaaaattaagcgaacctgttctagtaagaatgcattcagagtgcttaactggcgatgcttttggatcattacgttgtgattgtagaccccagttagaagcagcttttatca

SEQ ID NO: 266541 - DNA, 964 bp, Unknown
  Bacterial polypeptide expressing nucleotide sequence isolated from the Sargasso Sea
aatgaaagaaacaagtcccaaatcaaataatggaacaattttggatataaatgaatcttttaaaattgaatttgatcctatcagcgatgcgttggcagcgataagaaatggtgaatgcataattgttgtagatgatgaaagaagagaaaatgaaggagatttaatatgtgcggcgcagtttgcaactccacagcaaattaattttatggctactgagggacgtggccttatatgcctagcgatgcaaggtgaaaagcttgactctttagatttaccattaatggtagatagaaatacagatgaaaatcaaacagcttttacgatatcaattgatgctggtcctgaaaataatgttactactggaatttccgctgaagacagggcaaagacaattcaagttgcaataaacccaaatacaaaacctgatgatttaaggaggccaggacatatttttccattaagagcaaaaaaaggtggtgtattaaaaagggcaggtcataccgaagcggcagtagatattgcggcgatgtcaggtctttatcccgctggagtgatttgtgaaatacaaaatcctgacggttccatgtcaagacttccgcaacttaaagagtatgcaaaacagtggggaatgaaattaatatccatagctgatttaataagttatcgatttcaaactgagagatttgtatttagaaaatctgatgctgttcttccaagtatttttggtaatttcaaagcttatggatatgttaatgaacttgatggttcagagcacgttgcattagttaaacaaaaatcatcaaaattaagtgaacctgtactagtaagaatgcattcagagtgcttaactggtgatgcttttggatcattacgttgtgattgtagaccctcaattagaggctgctttatcaaggatagaaaaggaggaagagggagttgttgtctacttgagacaagaaggtag

SEQ ID NO: 266542 - DNA, 172 bp, Unknown
  Bacterial polypeptide expressing nucleotide sequence isolated from the Sargasso Sea
gtagagttaatgacgaacaaccctaagaagctagcggcacttgaagcccttggaatagacgttatatcgcgcaaacctatcgaccatggcgtaacgaaagacaataaaaactatttaaaaactaaaacagaaaagctggggcacgcattcgaccctcacatttttaaatagg

SEQ ID NO: 266543 - DNA, 278 bp, Unknown
  Bacterial polypeptide expressing nucleotide sequence isolated from the Sargasso Sea
tcgggagaagatacctaccaggccaatcgttctttggggttgccccgacgactcaagggacttcactgatgcagccatcttgttgaagcactttgttggtaatgagtcttttcgtttgatgacgaataaccccaagaagctggatgacctagcaaaatacggactgactaatcttacagcggtaaaacatgtaactgggaccggtgaatggaatagaacctacctaaacgctaaacgtggttggggccacaatattgaggaatcagatttagtctgat

SEQ ID NO: 266544 - DNA, 467 bp, Unknown
  Bacterial polypeptide expressing nucleotide sequence isolated from the Sargasso Sea
aatgtcagataaattaaagtttattgaaactagtaaacttccaacagatattggagagttcactgtacatgcctttacagatgaaaatgaatctaaagatcatttagcaatatgtatgggtgacttgcttactaatgagccagttttatcaagaattcattcacaatgtattacaggggaatctttttttagtatgagatgtgattgtagattccaactaactgaatcattaaaacaaattgctcagattggaagaggtgtcattttttatcttcaacaagaagggagaggtattggtctctcaaataaaattaaagcatatagtttacaagacaaaggactagatactgttgaagctaatcatcaattagggttcaaagatgatgaaagaacatatgaaaatattgctgggatggtaaaatatctagcaatcaaagaattagatttgatgaccaataatccaaaaa

SEQ ID NO: 266545 - DNA, 592 bp, Unknown
  Bacterial polypeptide expressing nucleotide sequence isolated from the Sargasso Sea
atgacttcaaaactaaaatttatagaatctagtagccttcctactgacttgggtgaatttaaagttcatgcttttacagatgaaataaaatctaaagatcatctagcaataagcatgggggacttattaacaaatgaaccagttctatgcagaattcattcacagtgcattactggagaatcgttttttagtatgcgatgtgattgcagatatcaattaacagaatctttagcacaaattgctgagagtggtcgtggtgtagttttttatttacaacaagaaggaaggggtattggcctatcaaataaaattcgcgcttataatcttcaagataaaggacttgatactgttgaggcaaatcatcaactaggttttaaagaagatgaaagagattatgaaactgtttctggaatgattaaattccttgctattaaaaaagttgatttaatgacaaataatccaaaaaaaatagaagctttaaaaacaatgggcattactgtaaaccaaagagttcctcttgcatctaatcctaacaagtataatgaaaaatatattaataccaaaattaaaaaacttggtcatttattataaa

SEQ ID NO: 266546 - DNA, 355 bp, Unknown
  Bacterial polypeptide expressing nucleotide sequence isolated from the Sargasso Sea
aaagaaggtaatggggttatcctttacttgccacaggaaggcagaggcattggactgatcaacaagcttcatgcctacaaactccaggaagatggagctgacactgttgaagcaaaccataagttaggatttaaagatgatttacgtgattatggaatgggggcacaaatgctttatatgcttggagtccgccgaatgagactaatgaccaataatccgcgaaagatagtaggacttcaaggacatggacttgaagttgttgaaagagtgccgcttgaaattgaaagtaatcctggcaataaagattacttgcatgcaaaaaaatccaaactggggcatatattaaatgtataaa

SEQ ID NO: 266547 - DNA, 763 bp, Unknown
  Bacterial polypeptide expressing nucleotide sequence isolated from the Sargasso Sea
tgctcagagtgtgctcagagtgtgctcagagtgtgctcagagtgtgctcagagtgccttcagggtgccttcagagtgcctgcagagtgtgttcagagtgccttcagagtgccttcagagtgcgttcagagtgccttcagagtgccttcagagtgccttcagagtgccttcagagtgccttcagagtgtgttcagagtgtgttcagagtgccttcagagtgccttcagagtgtgttcagagtgccttcaaagtgccttcagagtgtgttcggagtgtgttcagagtgccttcagagtgcattcagagtgtgttcaaagtgagttcagagtgccttcagagtgccttcagagtgccttcagagtgccttcagagtgccttcagggtgccttcagggtgccttcagagtgtgttcagagtgccttcagagtgtgttcagagtgcgttcagagtgcattcagagtgccttcagagtgccttcagagtgccttcagagtgccttcagagtgccttcagagtgccttcagagtctgttcagagtgccttcagagtgccttcagagtgccttcagagtgccttcagagtgccttcagagtgccttcagagtgcgttcagagtgccttcagagtgccttcagggtgccttcagagtgcattcagagtgtgttcagagtgcgttcagagtgcgttcagagtgcgttcagagtgccttcagagtgccttcagagtgccttcagagtgccttcagagtgccttcagagtgtgtt

SEQ ID NO: 266548 - DNA, 274 bp, Unknown
  Bacterial polypeptide expressing nucleotide sequence isolated from the Sargasso Sea
cttcaggaagatggtgctgacactgttgaagcaaaccataagctaggatttaaagatgatttacgtgattatggaatgggagcccaaatgctttatatgcttggcgttcgcaggatgagattaatgaccaataacccacgtaaaatagtcggacttcagggtcatgggctggaagttgttgaaagagtcccgcttgaaattgaaagcaatcctggaaataaagagtacttgtttactaaaaaatccaaacttggtcacatgttaaatgtataaa

SEQ ID NO: 266549 - DNA, 196 bp, Unknown
  Bacterial polypeptide expressing nucleotide sequence isolated from the Sargasso Sea
tatagtttacaagacaagggactagatactgttgaggctaatcatcaactaggtttcaaagatgatgaaagaacatatgaaaatattgctggaatgattaaatatttagcaatcaaagaattagatttgatgaccaataatccaaaaaaaataaaagcacttaaagatatgggtattaaagtaaatcaaaagagtt

SEQ ID NO: 266550 - DNA, 388 bp, Unknown
  Bacterial polypeptide expressing nucleotide sequence isolated from the Sargasso Sea
tgcaggtatcaattaacagaatctttgacacaaattgctgaaaaggggcgtggtgtagttttttatctgcaacaagaaggaagaggaattggattatctaacaaaattcgggcttataatcttcaagataaaggatttgatacagtagaagcaaatcatcaattaggatttaaagaagatgaaagggaatatgaaaatatttcagatatgattaattttcttggaataaaaaaaatagatttaatgacaaataatccaaaaaaaattaatgcattaaaaaatatgggtatagttgttaatcaaagagtttctattacttcagacactaataaatataatgaaaaatatatatcaacaaaaataaaaaagcttggtcatttaatataga

SEQ ID NO: 266551 - DNA, 205 bp, Unknown
  Bacterial polypeptide expressing nucleotide sequence isolated from the Sargasso Sea
ttggagaagaaagtgccagctaattttgtggcctcgagcaaattgcccacggcgtttggtgaatttgctatgcacggttttgaggactcggattccggtcaagaacatattgcgcttgtgtttggagatctcacaaaaaatactccaacgctttgtagagtccactcggagtgtttgacgggagatgctctatttagcatgcgct

SEQ ID NO: 266552 - DNA, 892 bp, Unknown
  Bacterial polypeptide expressing nucleotide sequence isolated from the Sargasso Sea
gaaaacgaaggcgatttaatgattgcagcggaaaaggctacccccgaacttatcaactttatggctcgatttggacgaggattgatttgtttgacattgaccgaagagagaaccaaagagttgggtctctctatgatggttgaagataatcaatcgacttttgaaaccccattcacggtttcgattgatgcgcgtcaaggagtgactacaggtatatcagctgcagaccgggcacataccatcaaagtagctattgactccttaactgtcaaggaggatctagtcaaaccgggacatatttttcctttaagggcaaaggacggaggagtgttagtaaggatgggacaaaccgaagcttctgttgatattgcccgaattgcagggttaaacccttatggagtgatctgtgagattatgaatgaagatgggacgatggcacgagttccacagttgacagagtttgtcgaagaacacgatctcaagatgatcacggtcaaggatctggcagagtatcgcctcatgaaggaagcattggtagaagaagttacctccaccattttaccaactcattctgggaaattccaatctgtagcttttaaaaatttgttagacgatcaagtccatatagctttagtaaaaggcgaaatcaatgaagagaagcctacattagttcgagtgcattcccagtgtttgaccggcgatgtttttggttcttatcgttgcgattgcggggagcagctaagtaaatccatggaaatgattgaacaggaaggaacaggtgttttgctttatctttatcaggaaggaagaggaattggcattgtcaataaattaaaggcctatgcgttgcaagatgaaggaaaagatacggttcaggccaatgaagcgttag

SEQ ID NO: 266553 - DNA, 260 bp, Unknown
  Bacterial polypeptide expressing nucleotide sequence isolated from the Sargasso Sea
caagggactagatactgttgaagctaatcatcaactaggtttcaaagatgatgagagaacatatgaaaatattgctgcaatggtaaaatatttagcaatcaaaaaattagatttgatgactaataatccaaaaaaaataaaagcgcttgaagatatgggtatcaaagtaaatcaaagagttcctattttctcagagaccaataagtataatgaaaaatatatctcaactaagaaaagtaagcttggtcatttaatctaag

SEQ ID NO: 266554 - DNA, 592 bp, Unknown
  Bacterial polypeptide expressing nucleotide sequence isolated from the Sargasso Sea
tatgaattcaaaattaaaatttattgaaacaagtaaactcccaactgatattggcgaatttacagtacatgcatttactgatgaaaaagattctaaggaccatttagcaataagcatgggtgacctactaacaaatgagccagttttatgtagaattcactcacagtgcataacgggagaatcttttttcagtatgagatgtgattgccgatttcaattaacagagtcacttaatcaaattgctacagtaggtcgtggtgtagttttttatcttcaacaagaaggcaggggtataggtttatcaaataaaattagagcttacaatcttcaagataaaggtttggacactgtagaagctaatcatcaattaggttttaaagaggatgaaagagggtatgaaattgtatcagatatggtcaattttttaggaattaaagaggtagatttaatgacaaacaatcctaaaaaattaaaagctcttgaagcaatgggggttgttataaatcagcgtgtcccactctcctctaatacaaataagtataacgaaaaatatatttcaacaaaaataaaaaagcttggtcatttaatttaa

SEQ ID NO: 266555 - DNA, 509 bp, Unknown
  Bacterial polypeptide expressing nucleotide sequence isolated from the Sargasso Sea
aaaagaatctaaagatcacttagctataagtatgggggacttattaacagatgaaccagtattatgcagaatacattcccaatgcataactggggaatctttgtttagtatgcgttgtgattgtagatatcaattaactgaatctttaaaacaaattgcagcaagtgggcgtggcgtaatattttactttcagcaagagggaagaggtattggtttgtcaaataaaattagagcatataatcttcaggataaaggacttgatactgttgaggcaaaccatcaattaggatttaaagaagatgaaagaaattatgaaatagtctctgaaatgattacttttcttgccatcaagaaaatagatttgatgacaaacaatccaaaaaaaattgaagcacttaaatcaatgaatatagaagtgaaccaaagaattcctctatcatctgatacaaataagtataatgaaaaatatatttcaacaaaaataaaaaagcttggacatctaatatagg

SEQ ID NO: 266556 - DNA, 865 bp, Unknown
  Bacterial polypeptide expressing nucleotide sequence isolated from the Sargasso Sea
aatgccaatttcaaaaattgaggatgcaataaaagattttaaaaaaggcaagatgataattcttgttgatgatgccgatagagaaaatgaaggtgatcttattgttgcctctgaatttgccaccccaaatgttattaacttcatggcaactcatgggagagggttaatatgcgtcactatggatacagaagttgctgataggcttgatttgtctccagttaaaaatagccccaaagaaaatttagatacaactgcatttacaatttctattgatgctaataaaggaacgacaacaggcatatctgctcaagatagatccacaacagcaaagttagtggcaaatccaaagtccaagccgcaagattttgataggccaggtcatatgtttccacttgtggctcgagatggaggaattttagtaagagcgggtcatacagaggcttcagttgatatggctaaaatttgtggtttgcaatcatcagcagtcatttgtgaaataatgaatagtgatggaacaatggcgagattaaaagattgtgagaaattcgcaaaaaaacataaaattaaaattgccactattgcggacctcataaggtataggctaaaaaaagactctttagttgaaaaaatagccgagtgtcagcttcccactcatatgactaattttaaatgctatgcatacgaaagcatgatagatgggaaaacacacatagccctgattaaagggaagattagtaagacaaaaccgacattggtaagggttcattcagagtgcctaacaggagacctttttggatctttgagatgtgattgcggttctcaattgcatgctgctatagaaatgatttctaatgaaggatccagg

SEQ ID NO: 266557 - DNA, 388 bp, Unknown
  Bacterial polypeptide expressing nucleotide sequence isolated from the Sargasso Sea
tgcagatttcaattaacagaatctttggcccaaatagctgaaagagggcgaggagttgttttttatttgcaacaagagggcagaggtattggcttatcaaataaaattagagcttacaatttacaagataaagggcttgatactgttgaggcaaatcaccaattaggatttaaagaagatgaaagaaattatgaaaatgtttctggtatgattaattttctagctataaaaaaaattgatttaatgaccaataatccaaaaaaaattgaatcattaaaatcaatgggtattattgtaaatcaaagggttccactttcatctaatactaataagtataatgaaaaatatatatctacaaaaattaaaaagcttggtcacttaatataaa

SEQ ID NO: 266558 - DNA, 765 bp, Unknown
  Bacterial polypeptide expressing nucleotide sequence isolated from the Sargasso Sea
gatgcgtgcacgcgcagacttacgcttgggcattcctatcgttttaactaacaaaaaaaatgatgctgtagttgcgccactagatgtactgagccaaacaagacttgatcagttaaaatcaattgacaataatccatttatactgataacggccagaagagctcaaactcttaaatgtccaatatatgagggaaattttgctagaattgaagttgaccaatcatccaaaatctcctctctaaaagcaattgctgatccatcacttgatctaaagaatcctcttaagggaccttttgaaattctaagagaaaaccctctcaaacttgagactgaagttctttggctactaaaatccgctcatcttctaccagcagccattatttcgaaagtaaacaacggtgaaaattttgccgcaaaaaataatttaacgtatctgcagacagagcaactcatgaatttggcaatgagctcggaaagcatatctaatgcaattactgcagaggttccaacagctagagctaagagcactcaatttcacatattcagaccggctttaagtggagaagaacactatgccatggagattggaaaaattaaccgtgatcgagcaactttggttcgtattcattccgcttgtttcacaggagatgttttaggtagtctaaaatgcgactgtggtcctcaattacatgcggctacaaaaatgattaatgatcagggcggtgggctcttaatttaccttaatcaagaaggaagaggtattgg

SEQ ID NO: 266559 - DNA, 484 bp, Unknown
  Bacterial polypeptide expressing nucleotide sequence isolated from the Sargasso Sea
gttgccggcgcaggttcgaagcaagtgcgctttcccagtgaaaggcggacggatggtcgcagagatcatcacgttcgatgcattaactgatggcaaggaacatgtagcgctccggtttggccccaacaccggcagcctgccgcccctggtgcgacttcactctgaatgcgttaccggagatgtgtttggatcgcagcgatgcgactgtggcccgcagctggacgaagcgatggagaccctcgagaaagaggggggctacctgctataccttcggcaggaaggacgcggtatcggactcaacgccaagatggatgcttacgtcctccagatggcaggcatggacacctatcaggccaatctggagctcggcttcgaggcggatctgcgcgactacagctgcgcggcgcagatgcttcatgctcttggtcacagcagcgtgaggctcctctccaacaatcctgacaaggcaatgcagctggagcga

SEQ ID NO: 266560 - DNA, 821 bp, Unknown
  Bacterial polypeptide expressing nucleotide sequence isolated from the Sargasso Sea
aaactgttctagcttaattaatccaaaaacaaaacctaaagatttaggaaaaccaggacatatatttcctttaagagcaaaagctgaaggagttttaagaagagctggtcatactgaagctgccgttgaccttagtagattagctggatttgaacctgcaggcttaattgttgaaattatgaataaagatggatcaatggctagattacctgaattaaaatctattgctaagaaatttagtctgaaaataataactatagaatcactcatagcttatagaatgcaacatgaaacacttattaaagaagttgtagaagtaaatttgccaacaaaatatggggattttaaattaaaagcgtataaacaaattagtaacaataaagaacatttagctttaattaaaggtaaatgggatgaaaatgaatctatattagtaagagttcattcgtcgtgttttacaggtgatattttaggatctttaagatgtgattgtggagatcaattatctactgcaatgaaaatgattaataaatttggcaaaggagttgttttatatataaatcaagaaggaagaggaattggtcttctaaataaactaaaatcttacaaattacaagaaaatggatatgatactttagatgcaaatttaaaacttggttttaaagctgatgctagagattatgggataggtgctcaaattttaagagctgtaggagttaaaaaaatgaagttattaagtaataatccaaaaaaaagaagtggcctgacaggctatggtctagaaattactgaaacaatatctattgaaacaaaaatataat

SEQ ID NO: 266561 - DNA, 808 bp, Unknown
  Bacterial polypeptide expressing nucleotide sequence isolated from the Sargasso Sea
atgaagtttagttctgtagcagacattcttagtgacatcgccgatggaaaaccggtaattgttattgacagcgaggatagagagaacgaaggagatcttgtaatcgcatcagagttagcaacccctgagacaataaatttcatggcaaaagaaggtcgaggattaatctgtgtgtcgctaacagaagaaagagctgattatctagatctagaagtcattgaaaataaaaattcaggtcttcataaaacaaactttactgttagcgtagatgcaaaagaaaataccacaaccggcatttctgcatttgatagatcaataacgattaaaactctcatttcagacaatacgaactccagagatttatcacgacctggtcacatatttccaatagttggaaagaatggtggagtattaagacgtgctggtcatacggaggcaagcattgatcttgcaacactggcgggtctgaagccaagcggtgtgatatgtgagatcatggccgatgacggtaaaatggcaaagggaaaggagctagaacgatttgctataaaacatgaccttaaaatcatttcaatttcatcattaattgcgcacctaagtaaaaaacgtgatctagtaaaaaaaatagaatcaataaagttgccaacaaaaaatggagaatatgatttacattcatacgagggtatttttgatggaaaaacacaccttgcacttaccaagggtaattatctttctaaggaatcagttttggtaagggttcactcagagtgccttactggcgatgtattccactcccttagatgtgatt

SEQ ID NO: 266562 - DNA, 446 bp, Unknown
  Bacterial polypeptide expressing nucleotide sequence isolated from the Sargasso Sea
ggtaagacttcactctcaatgcctaactggagacttacttggtagtttgcgctgcgactgtggcgatcaactgcgcggggctataaaagctatttccgagtatggtggaggagttttaatctatttggcgcaagaaggacgagacatcggcttagtgaacaaattgcgggcctataacctacaggacttagggtctgatactgtagaagctaatcaccaaattggttttgaggttgacgagaggatttacgcgccagcagctgagattttaaaacagcttggaattcaaaaagtgaagctgttgaccaataatcccaataaaattgatcagttggccgcaactgggatcgatgttatagaacgggtgaaacacgcatttccgcctaacccgcataatgctgagtatctaaagacaaaagctgcaaaaactggccaccttttctaaa

SEQ ID NO: 266563 - DNA, 792 bp, Unknown
  Bacterial polypeptide expressing nucleotide sequence isolated from the Sargasso Sea
ccagaggcagtcaattttatggcaaaatatgctcgcggactcgtatgtgtttctgtgaataaagatgatgcaaatagattgcaattagatctcatggagcaaaaaaatactagtcttcacgaaactaactttacaataagtatagatgcggtaaaagataccaccactggtatatctgctcaggataggtcaaaaaccataagattaatggttgatgaacattctaagcccaaggatttcgctaggcccgggcatatatttcctatcttagccaaagagggtggagttttaagaaggtcaggtcacaccgaagctagtttagagttagcagaattagctggatttaaacctagtggtgttctttgtgaaattatggctgaagacggaaccatgcttagaggaaaagacctttttagatttgctgatgagcataatctcaaattaatatcaataacagagctaatttcatatgttagggtaaaaaaatctttaatagaaaaaatagagactaccaaacttcccacagattatggtgattttatgctacatctttatcaagataagtttgaaaataagcagcatatcgctctgactcacggtaaggttcaaaataataaacctactttagtaagagtacattcagagtgtgtcactggtgatatattttcatctaaaaggtgcgattgtggtgcccagttagatcatgctatgaaaaaaattgttgaggtcggatgtggaataataatttatcttaagcaggaaggtagaggcattggccttaaacataaaatc

SEQ ID NO: 266564 - DNA, 751 bp, Unknown
  Bacterial polypeptide expressing nucleotide sequence isolated from the Sargasso Sea
tgatagcgaagaccgcgagaatgagggcgatctggtcatcgcatcagagttagtcaccccagacacgatcaactttatggcaaaagaaggccgtggacttatttgtgtttctattacaagtgaacgttcaaaagaactagaccttgaacccatggatagacgtaattcaagtttgcatgaaacaaatttcactatcagtgttgatgcaaaacaaaataccacgacagggatttcagcttttgatagatcaaagaccatccttgcacttataaatgatggtacacgatctagtgatctagctcgaccaggccatatatttccaattgttggtaaggatggcggcgtattaagacgtgcggggcatacagaagctagcattgatcttgcaatgatggcaggtcttagaccaagtggggttatatgcgagatcatggcagatgacggtactatggcaagaggtgacgaacttcaaaagttctcagaaaaacataacctgaagatcatttcaatatctgacctgatccgccatcttagaagggaaagaagccttgttaagaagattgaaacaattaaactcccaacagatgaattagattttgaactacatttgtacgaggggatctttgataatcaaacacacctggcattaacaactggaaactatctggactcagaatccgtattggttagagtacactcagagtgcttaacgggagatgtttttaaatctttaaggtgcgactgtggggag

SEQ ID NO: 266565 - DNA, 311 bp, Unknown
  Bacterial polypeptide expressing nucleotide sequence isolated from the Sargasso Sea
aattgcaaacaaattaaaagcatacaagctgcaagaagaaggcgctgataccgttgaagctaacgaaaaacttggctttaaagcggatttaagagattatggtgtaggcgctcaaatgttattagatttaaatatcaaaaaacttcgcttaatgactaataacccaaaaaaaattgttggtttagaaggctatggactcgaagtaacggatcgtgtatcaattgaaatgtctcctggaaaatttaataaaaagtatttatcaacaaaagcaaataagcttggtcatatgttagacaatcatgggcactaat

SEQ ID NO: 266566 - DNA, 286 bp, Unknown
  Bacterial polypeptide expressing nucleotide sequence isolated from the Sargasso Sea
ttatgaattacaggatcaggggatggatacagtagaagctaatgaagcgttgtgtttcgccgcagatgagcgagattattcatattgcaaagagatactctcttcagtagatatttcctctgtcaagctcatgacaaataatcctcgcaaaattgaaggtttagaaaaagcagggatcaaggttaccgaaagagtgcctgttcatattgattctaataaacataatgagaattatcttaaggtcaaggcgaaaaaactaggccatatgatggataggtcagattag

SEQ ID NO: 266567 - DNA, 556 bp, Unknown
  Bacterial polypeptide expressing nucleotide sequence isolated from the Sargasso Sea
tatgacatctacattaaaatttattgaaactagcaagcttccaactgacgtaggagagtttactgtacatgcgtttacagatgaaaaagactctaaggaccatttagctataggtatgggggacttgttaaccaatgagcctgttttgtgcagaattcattcacaatgtataacaggtgagtcgttttttagtatgagatgtgattgtaggtttcaattaactgaatcgctaaatcaaattgcagctaaaggtcgcggagtagttttttatcttcaacaagaaggaagaggtataggtctatcaaataaaattagagcgtataatctgcaagacaagggattggatacggtcgaagcaaaccatcagttaggctttagagaagatgagagaggatatgaaattgtatctgatatggctaattttcttggaataaaagaggttgatttaatgaccaataatccaaaaaaattaaaagcgcttgaagcaatgggtgttaaaattaatcaacgtgttccgctctcatcaaacacaaataaatataatgaaaaatatatt

SEQ ID NO: 266568 - DNA, 658 bp, Unknown
  Bacterial polypeptide expressing nucleotide sequence isolated from the Sargasso Sea
gggacgagctggtatcttcccattatctgagtctgatataggtaatttaaagataaaaagtgaggagaccaagtttttgccgaatttgagctcggcccgattacccatcagtggacaacaaaatataagtctatctgttttcagagaagtaacagatcttactgaacattatgcgatagtatttggcaatccaaaaattaatcaacctgctttaacacgcgtacattctgcttgttttacgggtgatttactcggctcagaaaaatgtgattgcggagagcaatttagtgtctcaatgtcaaaaatgagaactgaaggcaatgggattttgttatatttaaaccaggaaggtagagggattggcttagctaataaaatgagagcatatcatctccaaaatattggttttgatacggttgatgctaatcatagacttggttttgaagatgacgaaagagacctagagattgctgcaaagattttaaaatcattaggtgtgagcgacataaagctaatgactaacaacccaaaaaaggtagaacttttaactgataatgggatcactgtcaaagaaagagtacctttgatagtaagtatgaatcctaataatgaaaattatttgaaaacaaaagctaaaaaaagtgggcaccttttctga

SEQ ID NO: 266569 - DNA, 928 bp, Unknown
  Bacterial polypeptide expressing nucleotide sequence isolated from the Sargasso Sea
gtaatcattgttgttgatgatgaggacagagaaaacgagggcgattttttaactgctgcacaaaatgcaacaccagaaataatcaactttatggctactcatggtcgagggttaatatgtactcctttaactgaggaaagatgtgacaatctgaacttagaccttatggttcaaaagaactctgctacatacgaaacaccattcacagtatcagttgatttaaatggacatggctgtacaacaggtatatctgcttcggatagatcaaaaaccattaaagccttaattgaccctaatacaaatccgaatgatcttggtaagccagggcatattttcccattaaaagcaaaaaaaggcggtgtattaagaagagcaggacacactgaagcagctattgatttatctagattagcaggatttgaccctgcaggaattattgttgaaattctgaatgaagatggctctatggcacgtctacctcaattaatcaagattgctgaaagatttaatcttaagatcgtttcaatagaggatctaattgcatacaggatgcaaaacgaaacattaattgaagaattggtcgaaattcaacttcctaccaaatttggtgattttaaacttaaagcttttaaacaaattactaccggggaagaacaccttgctctaattaaagggaaatgggcccctgatgaagcagttcttgttcgtgtgcattcatcctgctttaccggtgacatccttggctcgctcagatgtgattgtggtgaccaaatggccgatgccatgaaaatgattgaaaaagaaggaaagggagtcgtcttatatatgaatcaagaaggaagaggaattggactgattaataaattaaaggcgtataaacttcaagaagaaggttatgacacgctagaagcaaatctagaattagggt

SEQ ID NO: 266570 - DNA, 790 bp, Unknown
  Bacterial polypeptide expressing nucleotide sequence isolated from the Sargasso Sea
tatgataagtgacataaaagaaataatagaccttttttcaaaaggagaaatgataattctcatcgatgatgaagaacgcgaaaatgaaggagacttagttatatcatctaagtacttgacttcagaccatataaatttcatgattacttacggtaaaggtttagtttgtgctcctatttcttcttctattgcaaaaaaattgaaattaccactaatggaaggtgtgaataacgaaatgcaaacaccatatacacattcagttgatttgaagggtgatggtgttacaactggaatctctgctgaagacagatttaaaactattaaaggtttagctagtgacgattcaacgcgtgaatcatttaatgtaccaggtcatatctttccgttacaagcaatggatggaggtgttcttaggagagcaggccatacagaagcagctgttgatttatgtacaatttcaaatcacaaacaagttgcagttatctgtgaaattataaatgaagatggaacaatggctagattagaagatttgattaaattttcccaagtacacaaaattccaataggtactattaaagatcttatacaataccgacttgattcatctaacccagtcgaatttgtttcaaaatctaagataccaacagactacggtgaatttatgggtcatgtttttaaagataatgtagacaatacagaacatattgctttaacttttggtgattatttgtcaggagaagacaccatggttcgcgtacactcagaatgtttaacaggtgatactcttttt

SEQ ID NO: 266571 - DNA, 265 bp, Unknown
  Bacterial polypeptide expressing nucleotide sequence isolated from the Sargasso Sea
atgagcgagaagaaaggtcctttggtagaagccagaatgccaacaaaatttggaacctttagactgattgcctttgatggagaagcaaaagaaaaggaaaatcttgctttggtcatgggaaatatagacgaaggtgaagttctagttagagtgcactcagaatgttttactggagatgtattgcattctatgagatgtgattgtggtgaacaactagatctggcaatggaacgaatagctacagaaagaaagggaatgattattt

SEQ ID NO: 266572 - DNA, 365 bp, Unknown
  Bacterial polypeptide expressing nucleotide sequence isolated from the Sargasso Sea
gctaaatcaaattgcagctaagggtcgcggagttgttttttatcttcaacaggaaggaagaggtataggtctatcaaataaaattagagcatataacctacaagataagggattggatacagtggaagcaaaccatcagttaggctttagagaagatgagagaggatatgaaattgtatctgatatggctaattttcttggaataaaagaggttgatttaatgaccaataatccaaaaaaattaaaagcgcttgaagcaatgggtgttaaaattaatcaacgcgttccactttcttctaatacaaataagtacaacgaaaaatatatatcaacaaaaataaaaaagcttggtcacttaatttaat

SEQ ID NO: 266573 - DNA, 840 bp, Unknown
  Bacterial polypeptide expressing nucleotide sequence isolated from the Sargasso Sea
attgataactgacattaatcaaataataaatagattcaaatctggtgagatgataattctcatagatgatgaagaaagagagaacgaaggagatcttgttatatcatcagagtatttaactccagaccacataaattttatgataactaaaggtaaaggtctcgtctgtgcaccgatttctactgaagtcgcaaagaaattagatttaactttgatgactggtgtaaataatgaaacagaaacccaatttactgcttcagtagatcttaggggtgacggtgtttcaactggtatatctgctgaagatagatataagacaataaaaggactttgcaatgaaaaatcaacaagaagtagttttaatgtcccgggccatgtttttccacttcaatcaatggatggcggagtactaagacgagctggacacactgaagcagcaattgatttatgtaaattatcagatcattatccggtagctgtaatctgtgaaataattaatgaagatggatctatggcaagatatgatgatttaattgaattttctaaaattcataatttaccaataggaactataaaagatttaattgaatacagaataaataaaacagagatgattacttttgtttcaaaggcaaaagtacctacacaatatggtgagtttactgcacatgtatatagagacaatcttgataacacagaacatattgctttgacacataataattacctagaaagcgatgaaacaatggttagagttcattcagaatgtctcacaggagatgttttatattcaaacaagtgtgattgtggttctccattagaaaatgcttttaaaaaaat

SEQ ID NO: 266574 - DNA, 592 bp, Unknown
  Bacterial polypeptide expressing nucleotide sequence isolated from the Sargasso Sea
atgacagttagtttaaaatttattgaatcaagtaatctaccaactgatctgggcgaatttaaagttcatgccttcacagatgaaaaaaagtcaaaagaccatttagctattagcatgggggatttacttactaatgaacctgttttatgtagaatacattcacaatgcataactggagaatcattttttagtatgcgttgtgactgtagatatcaattaacagaatctttaactcaaattgctgaaataggcagaggtgtaattttttaccttcagcaagaaggaaggggtattggattgtctaataaaattagagcttataatttacaagacaaaggtcttgatactgttgaggcaaatcaccagttaggatttaaagaagatgaaagggattatgaaaatgtttcagaaatgattaattttcttgccataaaaaaaattgatttaatgactaataatccaaaaaaaattgaagcattaaaaacaatgggtgttatagtaaatgaaagagtaccgctttcatctaatccaaataaatataatgaaaaatacattaatacaaaaataaaaaaacttggccacttactttaac

SEQ ID NO: 266575 - DNA, 581 bp, Unknown
  Bacterial polypeptide expressing nucleotide sequence isolated from the Sargasso Sea
tatggatatagataaattacctaaatcaaagttacctatgccttggggagaattctctgttataggttttgaagatcatgatggagaggaacatttagctatttatttaggagaagtgtctgaaaatccacttttaaggattcactcacaatgtttgactggagatgctttgtttagtttgagatgtgactgtggcccacaacttgctatggctttagaaaaaatagcatcagatggaaatggtatggttatttatatggcgcaagaaggacgaggtataggattaatgaataagatcagagcctatgaactgcaggaccaaggattaaacactgttgaagctaacgaaaaacttggatttgctgatgacgaaagagaatacgcattttgtgctgaaatcttaacttcaatgggaatttcctctgttcgcttgatgacaaataatccttctaaaatcaaaggtcttgaagattctgggataaaggtatccgaaagaatagagattaaggcaaagcctacagatcagaataaagagtacttaaaagttaagtctgaatacatgggccatatgttagaggagt

SEQ ID NO: 266576 - DNA, 436 bp, Unknown
  Bacterial polypeptide expressing nucleotide sequence isolated from the Sargasso Sea
catgcttttagtgatgaaaaagattctaaagatcatttagctataggaatgggagatttattaactaatgagcctgtcctaagcagaatacactcacagtgtatcacaggagagtccttctttagtatgcgttgtgattgtcgatttcaattaactgagtcgtttaatcaaattgcggagagaggtcgcggggttgttttttaccttcaacaagaagggagggggattgggctttcaaataaaattagagcttataatcttcaagacaaaggcctcgatactgtagaggcaaatcatcaattaggctttaaagaggatgaaagaggttatgagattgtatctgacatggtcaactttcttggaataaaagaagttgatttaatgacaaataatccaaaaaaaataaaagctcttgaagctatgggagttgttgtta

SEQ ID NO: 266577 - DNA, 592 bp, Unknown
  Bacterial polypeptide expressing nucleotide sequence isolated from the Sargasso Sea
aatggaaaaaaaattgaaatttattgaaacaagtaaactgcctactgacctaggtgaatttaaagttcatgcatttactgatgaagagaattctaaagatcacttagcaataagtatgggtgacttattaactaatgaacctgttctatgtagagtacattctcaatgtataacaggagaatcattttttagtatgcgctgtgattgcaggtatcaattaacagaatctttgacacaaattgctgaaaagggtcgtggtgtagttttttatctgcaacaagaaggaagaggaattggattatctaacaaaattcgggcttacaatcttcaggataaaggatttgatacagtagaagcaaatcatcaattaggatttaaagaagatgaaagggaatatgaaaatatttcagatatgattaatttccttggaataaaaaaaatagatttaatgacaaataatccaaaaaaaataaatgcattaaaaaatatgggtatagttgttaatcaacgagtttctattacttcagacactaataaatataatgaaaaatatatatcaacaaaaataaaaaaacttggtcatttaatataa

SEQ ID NO: 266578 - DNA, 466 bp, Unknown
  Bacterial polypeptide expressing nucleotide sequence isolated from the Sargasso Sea
atgaaaaaaattttaaagtttattgaaactagtgtcctacctactgatctaggagagtttaaagttcatgcctttacagatgaacatgaatctaaagatcatttagcaataagtatgggggacctgcttacaaacgaacctgttctttgcagaatacactcccaatgtattacaggggaatcgttttttagcatgcgatgtgattgccgctatcaattaacagagtccttgaaacaaattgctgaaaaaggcagaggtgttattttttaccttcaacaagagggcaggggaattggattatcaaataaaattcgtgcctataatcttcaagataaaggttttgatactgttgaggctaaccatcaattaggatttaaagacgacgaaagaaattatgaaaatatatcagaaatgattaaatttcttgctataaaaaaaattgatttaatgactaataatccaaaaa

SEQ ID NO: 266579 - DNA, 499 bp, Unknown
  Bacterial polypeptide expressing nucleotide sequence isolated from the Sargasso Sea
tatgacaatccaaaaaaaggctgaagctaaactacccacacattggggagacttttctgttatagcttacgaagacgagaagaaagatgaagagcatttacttctttacatgggggagcttactaatgacttgcttttacgcatacattcacagtgccttacaggtgataccttatatagccttaagtgtgattgcggctctcagctagcaatggctctagagaagatagcttctgaaggacaagggatgattatatatatggcgcaagagggaagaggcataggtctagtaaataaaatacgtgcttacgaactgcaagacaaaggcatggataccgtagaagctaatgaggcattaggttttgctgatgacgaaagggactattcttattgcaaagaaatactatcttcagtggacatttcttccgtaaagctgatgacaaataacccgcgtaaaattaaaggactagaagacgtgggcatcaatgtttcagaaaga

SEQ ID NO: 266580 - DNA, 355 bp, Unknown
  Bacterial polypeptide expressing nucleotide sequence isolated from the Sargasso Sea
ttggctgaaaagggtcgaggtgtagttttttatctgcaacaagaaggaagaggaattggattatctaacaaaattcgggcttataatcttcaggataaaggatttgatacagtagaagcaaatcatcaattagggtttaaagaagatgaaagggaatatgaaaatatttcagatatgattaattttcttggaataaaaaaaatagatttaatgacaaataatccaaaaaaaattaatgcattaaaaaatatgggtatagttgttaatcaaagagtttctattacttcagacactaataaatataatgaaaaatatatatcaacaaaaataaaaaaacttggtcatttaatataat

SEQ ID NO: 266581 - DNA, 592 bp, Unknown
  Bacterial polypeptide expressing nucleotide sequence isolated from the Sargasso Sea
catgacgatacaaaaaatagctaaagcaaaattaccaactcactggggagacttttctgttattgcttatgaagatgaaaggctaggagaggagcacttgcttttatacctaggagagttaaatgaaaattcgcttcttagaatccactctcaatgcttaaccggagatgccctttacagtcttaaatgtgattgcggatctcaacttgctaaagctatggaggttattgctagagaaggttgtgggatgatcatttatatggcccaggaaggaagaggcataggacttgtaaataaaataagagcatatgaattgcaagataaaggtttaaataccattgaggcgaatgaggcattaggttttgctgctgatgaaagagactattcttattgtaaagagatattagcttcagttggaatctcttccgttcgattaatgactaataatccagcaaaaataaaaggcttggaagaggttggtatcggagttacagaaagggtttcaatgagatttgaacctaataaacataatgaagactaccttaagataaaagcagaatatatgggtcatatgttaagtgagtcagattga

SEQ ID NO: 266582 - DNA, 469 bp, Unknown
  Bacterial polypeptide expressing nucleotide sequence isolated from the Sargasso Sea
tttattaactaatgagcctgtcctaagcagaatacactcacagtgtatcacaggagagtctttttttagtatgcgttgtgattgtcgatttcaattaactgagtcgcttaatcaaattgcggagagaggtcgcggggttgttttttaccttcaacaagaagggagggggattgggctttcaaataaaattagagcttataatcttcaagacaaaggcctcgatactgtagaggcaaatcatcaattaggctttaaagaagatgaaagagggtatgaaattgtatctgacatggtcaactttcttggaataaaagaagttgatttaatgacaaataatccaaaaaaaataaaagcacttgaagctatgggggttgttgttaatcagcgtgtgccactttactctagtaccaataaatataatgaaaaatatatatcaacaaaagtaaagaagcttggccacctattctga

SEQ ID NO: 266583 - DNA, 397 bp, Unknown
  Bacterial polypeptide expressing nucleotide sequence isolated from the Sargasso Sea
aaaatgtgactgtggaagtcaattagaaagagctattgaaaaattgttttcagtaggtgaaggaattcttctttatcttaatcaagaaggtagaggaataggactattaaacaaagtaagagcatataagcttcaagagcaaggttatgatacagtagatgccaatcataggttaggttttgaagatgaggaaagagattttcaaattggtgctgaaatactgcacttacttgggttctctaaagctaaattaatgacaaacaatcctaaaaaaattaagatgcttgaagactgtgaaataaaagtagtagagcgtgtaagccttctaacacagcctaccgaacagaaccttcattatttacaaaccaaagcaaaaaaaagcggtcatcttttttag

SEQ ID NO: 266584 - DNA, 568 bp, Unknown
  Bacterial polypeptide expressing nucleotide sequence isolated from the Sargasso Sea
atgacatcaaaactacagtttatagaaaccagtaaattaccaactgatgtaggggagtttaccgtacatgcttttaccgatgaaaaagattctaaagatcatttagctataggaatgggagatttattaactaatgagcctgtcctaagcagaatacactcacagtgtatcacaggagagtctttttttagtatgcgttgtgattgtcgatttcaattaactgagtcgcttaatcaaattgcggagagaggtcgcggagttgttttttaccttcaacaagaagggagggggattgggctttcaaataaaattagagcttataatcttcaagacaaaggcctcgatactgtagaggcaaatcatcaattaggctttaaagaggatgaaagaggctatgagattgtatctgacatggtcaactttcttggaataaaagaggttgatttaatgacaaataatccaaaaaaaataaaagctcttgaagctatgggggttgttgttaatcagcgtgtaccacttcactctagtactaataatataataaaaagtatatatcaacaaaagtaaa

SEQ ID NO: 266585 - DNA, 412 bp, Unknown
  Bacterial polypeptide expressing nucleotide sequence isolated from the Sargasso Sea
tactttttttagtaagaaatgtgattgtggccatcaactaagaaggtcaatggagcttatctcagaaaaaggtagcggtattatattgtatttaagacaagaggggagagggattggccttgtaaataagatcaaagcatattctttacaagatgaaggctatgatactgttgaagcaaatgagatgttaggatttaatgcggatgagagaagctatgaaatttgtagcgatatgttgtcacatttttccgttaaatctgtgaatgtgcttactaacaatcctaacaaggtaaaggggttagaggaatccaacgtctctgtttcaaaaagaataccactgcacgttggtaaaaatgaggtcaattcagcttacctcaaaaccaagaaagataagcttggacatcttgattag

SEQ ID NO: 266586 - DNA, 1027 bp, Unknown
  Bacterial polypeptide expressing nucleotide sequence isolated from the Sargasso Sea
gttggtatcagatttacgattaggactcccaatcatcttatatgatgcaaagacatatattttaaccgcagcgatagaaacattatattcagagaaactagataaaataatggaaattgcgaaaaataaaaattttgagatagctataactaatagaagagcaaaggtattaaacgttagactatataatgaatcagttactagaatttccataagagaaaaagtaagcttacaactccttcaagctatcgcagatccttcaaaggatctagattatccacttaagggcccattccaaagcgagaggaatggtaaattcaacgttgccagtgtatcactatcactttgtaagaaagcaagacttttgccagcatcaatactcataaatataccaaaaagcatgcgggacgagttggtatcttcccaaatatctgagtctgatatagatgatttgaaggttaaacatgaggagaccaagtttttgccgaatttgagctcagcccaactacccatcagtggacaacaaaatataaacctatctgttttcagagaagtaacagatctaactgaacattatgcgatagtatttggcaatccaaaaattaatcaacctgctttaacacgcgtacattctgcttgttttacaggtgatttacttggctcagaaaaatgtgattgcggggagcaatttagtgtctcaatgtcaaaaatgaaaaatgagggaaatggggttttgttatatttaaaccaggaaggtagaggaattggcttggctaacaaaatgagagcatatcatctccaaaatattggttttgatacagtcgatgctaatcatagactcggttttgaagatgacgaaagagacctagagattgctgcaaagattttaaaatctttaggtgtaagcaacataaagctaatgactaataacccaaaaaaaatcgaacttttaactgacaatgggatcacggtcaaagaaagagtgcctttgatagtaagcatgaatcctaacaatgaaaattactga

SEQ ID NO: 266587 - DNA, 703 bp, Unknown
  Bacterial polypeptide expressing nucleotide sequence isolated from the Sargasso Sea
ctgatcagtatattaggaccgataccgctcccgctaatcaaagctgaaaagactgtcgacgtctcttggtatgcctgtgtcagacacacagagctgagcaaagtagagcaattagctgaggaattaagagggggaaatagaaaaaattcatttgcaaatttagcttcttcaatggcagtcaatagcgtgctggtcatgggtgaccccagcagttggaccaatccactcatccgggtgcattcaagctgcttgactggagatgtccttggatcaggacgatgtgaatgcggccctcagctagataaagccattcaagacatatccaatgattctcaaggtgggttcgtaatatacatggcaggacacgaaggaagagggattggattatgggccaaagcggctacttatatactccaggatgagggagaaaatacttaccaagcaaatcgatctctcggacttgatgaggattccagagatttttcagatgcggccactctgatcaaatatttttatggcaacaaaccattccgtttgctcacaaacaatccaaagaagattgatgacttgaaagacaaagggcttgaaaccattactccaatgaagcatataatcggcgttaccggtacaaatcgagaatacctattcgccaaaaaagattggggtcatacgctcgaagacaaagacatttcagaagattaat

SEQ ID NO: 266588 - DNA, 670 bp, Unknown
  Bacterial polypeptide expressing nucleotide sequence isolated from the Sargasso Sea
atctagaagaatttcaaagcaacacaacatcaagattctgagtatagcccaaatcatagctcatagaagacaaaccgaaaccttagttaaacgagttgcagaagcccgcatgccaaccaaatatggtgaattcaccattattggatatgaaagtgaagttgaacctggagaacatttggcattagtaattggagattggcaagaaggagacgaggtcttaacaagagtacacagcgcctgtttaacaggggaatctctgggaagtcttagatgtgattgcggtgatcagatcgaaagatctttagaaatgatagctagtaacggttcgggagtactgttgtatatgaggcaagaaggaagaggaataggtctacataacaaaattaaagcctattcattacaggatacaggactagatacgattgaagctaatcgcagattaggttttgatagtgaccttaggcaatatgggattggagctcaaattctcactgacctcaaagttactaaattgagattattaactaacaacccgcaaaaaattgcagggttatcaggattcaatttggaagtcacagaacgaatcccaatgccgccatcagtaaacacagaaaaccatccatacctagacgctaaaaagtccaaaatgggccatatgattgacatgtaa

SEQ ID NO: 266589 - DNA, 649 bp, Unknown
  Bacterial polypeptide expressing nucleotide sequence isolated from the Sargasso Sea
gatgtcttcgcgtccccaatcgcccacgcagggcaatgaccaggccgacgagtgcgtgaccctcgtcgccaccgcgtcgctgcctacgcgctacggtacgttcaagtcatacgcgtttcgcgtatcgggcagcgatgccgaacatctcgcgctcgtgatgggcgacgtcgccggcgagcagtccgtgctgacgcgccttcattccgaatgcctgaccggcgatgtattcggctcgtaccgctgcgactgcggcgagcagctcgatctcgcattgcgctacatcgcggcggaagaccgcggcgtgctgctgtacctgcgcggccatgaagggcgcgggatcggcctgagcaacaagatccgcgcttacgcgctgcaggagcaggggcgcgacaccgtcgaggcgaacctcgacctcggcctgcccgacgacgcccgcgaatacgattcggccgccgccatcctgcggatcctcggcgtgacgtcggtgcggctgatgagcaacaacccggcgaagttcgatacgctcgcgaagcacggtatacccgtctgcgaacgcgtggcgcttgccgtgcccgtgcgcgaggaaaacgagcgttatatccgcacgaagcagacgaagttcgggcattacttcgaagaaaacgagtaa

SEQ ID NO: 266590 - DNA, 781 bp, Unknown
  Bacterial polypeptide expressing nucleotide sequence isolated from the Sargasso Sea
cttgagacaagaaggtagaggtattggtcttataaataaattaaaagcttatagcttacaggatggtggattagacactgtagaagctaatgaaaaattaggttttccagctgatctcagaaattatggagttggagcacagatattaaccgatcttggaataaaaaaactaaaattacttacaaacaatcctagaaagattgctggattaggtggttatggaatagaagttattgagagagttccattggttatttgtccaaacgataataatgcagaatatttgagtgtaaaaaaaaccaagttaggccatatgattgatgaagataattctaattccaggaatatagatccatttatatcaatttttcttgacggaaaatataaatctattgatctagttccaataaaaaatgacgttattaaattctgtagttataagagcattaatataaaactagaaagtactccaagattattggctttttggaatcgtccaaaactcgtttggagaattttgcatgatcagaatagaaccaactccaacattactgatgaagaaataaaaaatatagaattatttattcagtttttatctaattatgaaaatagtacaaagattggaattattgtttctagaaacattgaacaggccttacacccaaaaagtagcatcaaattaatcaatactaaatttactattaataatgaaatcctatattcatctacaagaaaatttaatctagataaagagacatttagtattgtttttgaaggctaa

SEQ ID NO: 266591 - DNA, 1204 bp, Unknown
  Bacterial polypeptide expressing nucleotide sequence isolated from the Sargasso Sea
attgataactgacattaatgaaataattaataaatttaaagctggtgagatgataatcctcattgatgatgaagagcgagagaacgagggtgaccttgttgtatcatcagaatatttaacaccggatcatataaattttatgataactaaagggaaaggtctcgtctgtgcaccgatttctacagatgtagctaaaaaattagatttaacattgatgaccggtgttaataatgaaacagaaacacagtttacagcatcagttgatttaaaaggggacggtgtatcaactggtatatcagcagaagatagatataaaacaataaaaggtctctgtaatgagaattcaacaagaagtagttttaatgttcctggtcatgtattcccacttcaatctatggatggaggcgtattacgtagagcaggtcatacagaagcagcaattgatctatgtaagctttcagatcattacccagtagctgttatctgtgaaataattaatgaagatggttcaatggctaggtacgatgatttaataagtttttctaaagaacataatctacctattggaactattaaagatttaattgaataccggataagcaaaactgaaatgattacttttgtgtcaaaagcaaaagtcccaacacagtatggtgattttactgcccatgtgtatagagataatcttgataatactgaacatatagctttaacatataacgattacttagaaagtgatgaaacaatggtaagagttcactctgaatgtcttacaggagatgttttatattcaaataagtgtgactgtggttctcaattagaaaatgcttttaaaaaaattacaactaatgggtctggagttttgctatatatgagaggtcatgaaggaagaggcatcggattaggaaataaaataaaagcttattcattacaagaagatggtgatgatactgttgatgctaatttaaaactaggatttaaaatggatcagagggattatggtacgggtgcacttattcttagagacctagggataacaaatatgaatatattaactaataatccatctaaaagagctggtcttgaagggttcggtttaaatataacatccagaacacctttaattggaaatataactaaagaaaatgaatcatatttagaaacaaaagaagaaaaaatgggacataagtataaagatgaataa

SEQ ID NO: 266592 - DNA, 1120 bp, Unknown
  Bacterial polypeptide expressing nucleotide sequence isolated from the Sargasso Sea
attcaagttgctataaaccctaatacaaaacctgatgatttaaggaggcccggacatattttcccattaagagctaaaaaaggtggagtattaaaaagagcaggtcatactgaagcggcagtagatattgctgcaatgtccggtctttaccccgctggagtgatttgcgaaatacaaaatcctgacggttccatgtcaagacttccacaacttaaagagtatgcaaaacagtggggaatgaaattaatatccatagctgatttaataagttatcggtttcaaactgagagatttgtatttagaaaatctgatgctgtacttcctagcatttttggtaatttcaaagcttatggatatgttaatgaacttgatggttcagaacatgttgcattagttaaacaaaaatcatcaaaattatgcgagcctgtactagtaagaatgcattcagagtgcttaacaggcgatgcttttggatctctacgttgtgactgtagaccgcagttagaggctgctttatcaaggatagaaaaggaggaagaaggagttgttgtttacttaagacaagaaggtagaggtattggtctaataaataaattaaaagcttatagtttacaagatggtggattagatactgttgaagctaatgaaagattaggtttccccgctgatcttagaaattatggagttggagcacagatattaaccgatctaggtattaaaaaactgaaattacttacaaacaatcctagaaagattgctggattaggtggttatggaatagaggttattgaaagagttccattagtaatttgtccaaacgataataatgcagaatacttgagtgtaaaaaaaactaagttaggccacatgattgatgaagataatcctaattccaggaatatcgatccatttatatcaatttttcttgatgggaaatataaatctattgatctagttccaataaaaaataaagtaattaaattctgtagtgagaataatattaatattaaactagaaagtactccaaggttattggctttttggaatagaccaaaattagtttggcgaattttgcatgatcagaatagaaccaattccaacattactgatgaagaaataa

SEQ ID NO: 266593 - DNA, 838 bp, Unknown
  Bacterial polypeptide expressing nucleotide sequence isolated from the Sargasso Sea
ttggcacgccccggtcacatattcccgatagttggtaagaacggtggagtattaaggcgtgctgggcatacggaggcaagcatagatcttgcaacaatggcgggtttacagccaagcggtgtgatatgtgagattatggccgatgacggtacgatggcaaagggaaaagagcttgatcaatttgcaaaaaaacatgatctcaaaatcatttcgattgcatcattaatcaagcaccttagcaaagaacgtgatctagtaaagaaaatagactcaatcaaactaccaactaagaatggcgaatatgatctccatacatatgaaggcatttttgatggaaaaacacacctcgcacttacaaaaggtgattatctctcaagggaatcagtactagtgagggtccactcagaatgccttactggcgatgtattccattctctaagatgtgattgtggtgaccagctagatgtggccttgaatttgattgagtcagaaggatctggaatcgttatataccttagacaagagggtagaggaattggtcttaaacacaagataaaagcctacaagttgcaagaagaaggtcttgatacggttgaagcaaatgaaaagcttggttttaagccagacctgagagattatggaattggtgcgcaaattttaaaaaagctcggtgtgaaaaagttaacagtcttaacaaacaatcctaaaaagttgatcggcttggaagggcacggtttggagatcacatcaagaagaccaattatcgttggtgagaacaaaaataattcaagatatttaaaaactaaaaaagaaaagcttgggcatatactaagatgat

SEQ ID NO: 266594 - DNA, 967 bp, Unknown
  Bacterial polypeptide expressing nucleotide sequence isolated from the Sargasso Sea
agatacacaatttacaacttcagtcgatctaatgggagatggggtttcaacaggaatttcagcagatgatagatttaaaacaataaaaggtcttagtgatccaaatgctactagacaagattttaaagttccaggtcacgtctttcctttgcaggcaatggatggaggagtattaagacgtgctggtcatactgaagcagctgtagacttatgtttactcgctgatcattatcctgtagctgttatttgtgaaataataaatgacgatggttcaatggcacgtattgacgatctagtaaatttttcgaaaaaacacgatgtagctattggaacaattaaagacttaatcgagtacaagttgaaattaacaaatcctgtatcttttgtatctaaagcaaaagtgccaactgaatttggtgaatttactgcgcatgtttacaaggacaataatgataatactgagcatattgcgctgacatatgagaattacttagaaggagagtcttcaatggtaagagtgcactcagagtgtttaacaggtgatgtatttagttcaaataaatgtgattgtggataccagttggatagtgcattagaaactattgtaaataatggttccggtgttctactctacatgagaggacacgaaggaagagggataggtttaggaaataagattaaagcatactcattacaagatgaaggtgcagatacggttgaagcaaacattcaacttggttttgaaatggatcaaagagattatggaactggtgccctgatacttagagatttaggaattacgaatatgaatttactcacaaataatccaagcaaaagagcaggtttagaaggttttggtttaaatattgtaaaaagaacaccaattaagggaaagacaacacctgagaatacttcatatcttgagacaaaagaaaacaagatgggtcataattttaatgaagaataa

SEQ ID NO: 266595 - DNA, 912 bp, Unknown
  Bacterial polypeptide expressing nucleotide sequence isolated from the Sargasso Sea
aatgggagatggggtttcaacaggaatttcagcagatgatagatttaaaacaataaaaggtcttagtgatccaaatgctacaagacaggattttaaagttcctggtcacgtctttcctttgcaggcaatggatggaggagtattaagacgtgctggtcatactgaagcggctgtagacttatgtttacttgcagatcattatccggtagctgttatttgtgaaataataaatgatgatggttcaatggctcgcattgacgatctagtaaatttttcgaaaaaacacgatgtagctattgggacaattaaagacttaattgaatacaaattgaaattaacaaatcctgtgtcttttgtatctaaagcaaaagtgccgacagaatatggtgtatttactgcacatgtttacaaagacaataatgataatactgagcatattgcactgacatatgagaattacttagaaggtgagtcatcaatggtaagagtgcactctgaatgtttaacaggtgatgtatttagttcaaataaatgtgattgtggatatcagttagatagtgcattagaaactattgtaaataatggttccggtgttcttctgtatatgagaggacatgaaggaaggggaataggtttaggaaataagattaaagcatactcattgcaagatgaaggtgcagatacggttgaagcaaacattcaacttggttttgaaatggatcaaagagattatggaactggtgccctgatacttagagatttaggaattactaatatgaatttactcacaaataatccaagcaaaagagcaggtttagaaggttttggtttaaatattgtaaaacgaacaccacttaagggaaagacaacaccagagaatacttcatatcttgagacaaaagaaaacaagat

SEQ ID NO: 266596 - DNA, 733 bp, Unknown
  Bacterial polypeptide expressing nucleotide sequence isolated from the Sargasso Sea
gtagctgtaatttgtgaaattattaacgatgatgggtcaatggcaagaatagatgaccttattgaattttcagcaaagcacgacgttgctattggaactataaaagatttaatagagtatcgcttgaaattgtccaacccagtaaatttggtttctagtgcaaaagtaccgacagattatggcgaatttactgcacatgtatacaaagataataatgacaatacagagcatattgctcttacctacaaagattatctacaaggtgaatcatctatggtaagagttcactctgaatgtcttacaggtgacgtttttagctcgaataaatgtgactgtggatatcaactaaataatgcaatggaaacaatagttaaaaatggttctggagttattttgtacatgagaggtcatgaaggaagaggtataggtcttggtaacaaaataaaagcttactcacttcaagatgaaggtgctgatacagttgaggcaaatttgaaactaggttttgaaatggaccaaagagactacggaacaggagcgcttatccttagagacttaggaatcacaaatatgaacctattaacgaacaatcccaacaaaagagcaggccttgaaggatttggtttaaatattgtaaagagaacaccattgaagggtaaaataacgaatgaaaattcttcataccttgacactaaagaaaataaaatgggtcataactttaatgaagagtaaa

SEQ ID NO: 266597 - DNA, 592 bp, Unknown
  Bacterial polypeptide expressing nucleotide sequence isolated from the Sargasso Sea
aatgtcagataaattaaagtttattgaaactagtaaacttccaacagatattggagagttcactgtacatgcctttacagatgaaaatgaatctaaagatcatttggcaatatgtatgggtgacttgcttactaatgagccagttttatcaagaattcattcgcaatgtattacaggagaatctttttttagtatgagatgtgattgtagattccaactaactgaatcattaaaacaaattgctcagattggaagaggtgtcattttttatcttcaacaagaaggaaggggtattggtctctcaaataaaattaaagcatatagtttacaagacaaaggactagatactgttgaagctaatcatcaattagggttcaaagatgatgaaagaacatatgaaaatattgctgggatggtaaaatatctagcaatcaaagaattagatttgatgaccaataatccaaaaaaaataaaagcgcttgaagatatgggtatcaaagtaaatcaaagagttcctattttctcaaacaccaataagtataatgaaaaatatatctcaactaagaaaagtaaacttggtcatttaatttaa

SEQ ID NO: 266598 - DNA, 868 bp, Unknown
  Bacterial polypeptide expressing nucleotide sequence isolated from the Sargasso Sea
catcgacgatgaagaacgtgagaatgaaggagacttagttatatcatctaagtacttgacttcagaccatataaatttcatgattacttacggtaaaggtttagtttgtgctccaatatcttcttctattgcaaaaaaattgaaattaccactaatggaaggtgtgaataacgaaatgcaaacaccatatacacattcagttgatttaaagggtgatggtgttactactggaatctctgctgaagacagatttaaaactattaaaggtttagctagtgacgattcaacgcgtgaatcatttaatgtaccaggtcatatctttcctttacaagcaatggatgggggtgtacttaggagagcaggccatacagaagcagctgttgatttatgtacaatttcaaatcacaaacaagttgcagttatatgtgaaattataaatgaagatggaacaatggctagattagaagatttgattaaattttctcaagttcacaaaattccaataggtactattaaagatcttatacaatatcgacttgattcatctaacccagttgaatttgtttcaaaatctaagataccaacagactacggtgaatttatgggtcatgtttttaaagataatgtagacaatacagaacatatcgctttaacttttggcgattatttgtcaggagaagacacaatggttcgagtacattcagaatgtttaacaggtgatactcttttttcaaaaaaatgtgattgtggctcacaactttcaagcgcacttgaagctatatctaataataagagtggtgtattactttatatgaggggtcatgaaggaagggggattggtcttggaaataaaataaaagcttattca

SEQ ID NO: 266599 - DNA, 933 bp, Unknown
  Bacterial polypeptide expressing nucleotide sequence isolated from the Sargasso Sea
atctgtgcggcgcaatttgccacgcccaaacagatcaatttcatggccaccgaagcacgcgggctgatctgtctggccatggaaggtgaacggctggatgccctcgacctgccgctgatggtgggtcagaacactgacaccaaccaaacagctttcaccgtgagcatcgacgctggccctgaagctggcgtgagcacaggaatttcagcggaagatcgagcccgaaccatccaagtggctttgcatccccaaagccggccacaagatctacgacgacctggccacatcttccctttgcgagctcgcgatggtggggtgctgaaacgagcaggccataccgaagcggctgtcgatctctctcgtatggcaggactccatccctctggggtgatctgtgagatccaaaaccaagatggctcgatggctcgcctgcctcagctggctgactacgccgaacaacacgggctctgcttgatctcgattgccgatctaatccgctatcgactcgagaacgaacggtttgtggtgcgcgaggccgaagcaaaaataccgagtgagttcggtgatttccgagccatcggatatcgcaacatcctcgatggcggggagcatgttgcgctggtcaaggggcatccaggtcgccagagctcgcccgtgatggtgcgggttcactcggaatgcctcacgggcgatgcctttggatccctgcgctgcgactgccggccgcagctggaagcagccctccgcatgattcaggccgaaggtgagggggttgtcgtctacctacggcaagagggacgtggcattggcctgatcaacaaactcaaggcctacagccttcaagagtcaggcctcgacaccgttgaagccaatgaacatctcggatttggcgctgatcttcgcgactatggcgttggcgcccagatcattacc

SEQ ID NO: 266600 - DNA, 352 bp, Unknown
  Bacterial polypeptide expressing nucleotide sequence isolated from the Sargasso Sea
tgctcagattggcagaggagttattttttatcttcaacaagaagggagaggcattggtctttcaaataaaattaaagcatatagtttacaagacaagggactagataccgttgaagctaatcatcaactaggtttcaaagatgatgaaagaacatatgaaaatattactggaatggtaaaatatttagcaatcaaagaattagatttgatgaccaataatccaaaaaaaataaaagcgcttgaagatatgggtatcaaagtaaatcaaagagttcctattttctcagacacaaataaatataatgaaaaatatatctcaactaagaaaagtaaacttggtcatttaatataa

SEQ ID NO: 266601 - DNA, 592 bp, Unknown
  Bacterial polypeptide expressing nucleotide sequence isolated from the Sargasso Sea
aatgaaagacaaacttaaatttattgaaactagtaaactgccaactgatattggggaatttacaatccatgcatttactgatgaaatagaaaaaaaagatcatctagcaatttgtatgggtgatttgctaactaatgaaccagtattatcaagaatacattcacagtgtattaccggtgagtctttttttagcatgagatgtgattgcaggtttcaattaacagaatctctaaaacaaattgcaaacgctggtagaggtgtagttttttatcttcaacaagaaggaaggggcattggtctgtcaaataaaataaaagcatatagtttacaagataaaggattagatacagttgaggccaatcatcagctaggtttcaaggatgatgaaaggacttatgaaaatatagctgatatggtaaaatatttagcaattaaaagattagatttgatgacaaataatccaaaaaaaattaaggcacttgaagatatgggaatcgaagtaaatcaaagagttcctattttctcagatacaaataagtataatgaaaaatatatctcaactaagaaaagtaaacttggccatttaatttaa

SEQ ID NO: 266602 - DNA, 487 bp, Unknown
  Bacterial polypeptide expressing nucleotide sequence isolated from the Sargasso Sea
tgtaaagggagattggaatgaagatgatcctatacttgttcgtgttcattccgcatgcctgaccggagacgtttttggttcatatcgatgtgattgtggtccgcagttgcattctgctatggaattgattgaaagagaagggaaaggggtcattctttacttgccacaggaaggcagagggattggactaatcaacaaacttcacgcatacagacttcaggaagatggagctgacacggttgaagcaaaccataagctgggatttaaagatgatttgcgtgattatggaatgggtgctcaaatgctttatatgctaggtgtacgtcgaatgaaattaatgacaaataatcctcgtaaaatagttggacttcaaggacatggactggaagttgttgaaagagttccacttgaaattgaatgcaaccctggcaataaaaaatacttacacacaaaaaaatccaaactgggtcatattttaaatatataa

SEQ ID NO: 266603 - DNA, 840 bp, Unknown
  Bacterial polypeptide expressing nucleotide sequence isolated from the Sargasso Sea
ttttgattctgtggaatccgtgatcgccgattttcggcgcggcaagatggtgatcgtggtggatgatgaagaccgcgaaaatgaaggcgacctgatcatggccgccgaacacgccacacctaaggcgatcaatttcatggccaagcatggccgcggcctcatctgtgtgccgaccactgaggatcgcttacgccaactcggcatcgagcgcatggtgccgcgcaatcaggaaagtttccaaacggatttccaagtgagcgttgatgccgccaaaggtatcacaacgggcatcagcgccaaggaccgtgccaagacgatccaaaccatggccgatcccaccgcagtaccggatgacctcgtgcaaccagggcatatctttccgttgcgcgcacgccctggcggagtactccaacgcgctggtcatactgaagcggccgtggacctcaccaagcttgccgaatgtcgcccaatcggcgtcatctgcgaaatcatggatgattccggcaatatggcccgccttcccaaactcaagcgatttgccaaggctcataagctcaagatttgttccatcgaggaactcatcaaatatcggcgcagccgcgaaaagctaatcgaaaaaattgaggtcatcaatctccccagcgagcacggtgatttcaaactgcacctttaccgtagcgcgctggacggccagaatcacatcgcgttggtttgtggagacgtggaaaagacggaaaacgtcatggttcgtgtccatagcgaatgtcttaccggcgatgtattcggaagtctgcgttgtgattgcggtccgcaactggacgacgccatgcggcaggtcgc

SEQ ID NO: 266604 - DNA, 380 bp, Unknown
  Bacterial polypeptide expressing nucleotide sequence isolated from the Sargasso Sea
attgaatagctgtaaatttgcatccgaatcaaaactgccaacaaggtttggtgagtttaccatctccacttttgaagaaccttgtggtaaggatcatattgctttgaccattggagatattcaaaatgcagaaacagttatgtgtagagttcattctgaatgcttaactggggatgcattgcatagtcttagatgtgattgcggccctcaattgcaagcagcccttaagatgttagctgaaaataagtcaggcatccttttatatttacgtcaggaaggcaggggcattgggtttggtaataaaattcgggcttacgcacttcaagatcaaggtcatgataccggtgaagccaatgaaatgttgggttttccggctgatt

SEQ ID NO: 266605 - DNA, 373 bp, Unknown
  Bacterial polypeptide expressing nucleotide sequence isolated from the Sargasso Sea
cgcgctgctgtacctgcgccaggaaggccgcggcatcggcctgatgaacaagatccgcgcctaccacctgcaggacggcggcgccgataccgtcgaagccaacgagctgctgggctttggcgctgatcagcgcgattacggcatctgcaagccgatgctcgaccatctgggcatcaccagtcttaaactgctcaccaacaacccgcgcaaggtcaaggcgattcagggctttggcgttgaggtggcccagcgcctgccgctgcagtttggcaagaacccgcataacgccaagtacctggccaccaaggccggcaagctgggccacatgctgggccaactgcaccaggctgaaaccgagcccggcgatgtttga

SEQ ID NO: 266606 - DNA, 592 bp, Unknown
  Bacterial polypeptide expressing nucleotide sequence isolated from the Sargasso Sea
aatgtcagataaattaaagtttattgaaactagtaaacttccaacagatattggagagttcactgtacatgcatttacagatgaaaatgaatctaaagatcatttagcaatatgtatgggtgacttgctcacggatgagccagttttatcaagaattcattcgcagtgtattacaggggaatctttttttagtatgagatgtgattgtagattccaactaactgaatcattaaaacaaattgcgcaaaatggaagaggggtgattttttatcttcaacaagaaggaaggggcattggtctttcaaataaaattaaagcatatagtttacaagacaaaggactagataccgttgaagctaatcatcaattaggtttcaaagatgatgaaagaacatatgaaaatattgctggaatggtaaaatatttagcaatcaaaaaattagatttgatgaccaataatccaaaaaaaataaaagcgcttgaagatatgggtatcaaagtaaaccaaagagttcctattttctcagacatcaataagtataatgaaagatatatctcaactaaaaaaagtaaacttggtcatttaatttaa

SEQ ID NO: 266607 - DNA, 679 bp, Unknown
  Bacterial polypeptide expressing nucleotide sequence isolated from the Sargasso Sea
atacgacttcccatagttgcgatcgcagatgtaattgcctacaggatgagtcatgaaaaactcgtagaacgtggcgctgaagcacgcctcccaacggactatggagtctttaccgcagttgcatacgacagcgttgttgacgcctcagaacatatcgcggtgtacatgggagatatagatgactctgaaccagtaatcgtacgcgtcgaatctgaatgcctcacgggacatgtctttggaagtaccaggtgcgattgtggggatcaagtcaatatggcactcaagaccatatcggaccacggtcggggtgtactggtttatatgcgacaggaaggacgcggaatcggcctactaaacaaattaaaagcatatgaattacaagacaaaggtttagataccgtagaggcgaatcttcaccttggcttcccaatggatcttaggaggtatggcgtcggagcccagattcttcgtgatttaggggttcgaagatttaacctattaaccaataatccaaagaaggttgtgggccttcaaggtttcggactcgaaatgttggaacagattccacttaaggcacccatcaacgatgaaaatcgtttttacatgaaaaccaaggtcgagaaaatgggacatgatctagagattgatccaccgcataaaaaagaaactgcaaactgat

SEQ ID NO: 266608 - DNA, 960 bp, Unknown
  Bacterial polypeptide expressing nucleotide sequence isolated from the Sargasso Sea
cataaggaatggtgaatgcataatagtcgtagatgatgaaagaagggagaatgagggggatttgatttgtgctgctcaatttgcaacacctcaacaaataaattttatggctactgagggaagaggtcttatatgcctagcgatgcaaggtgaaaaacttgattccttagatttacctttaatggttgatagaaatacagatgaaaatcaaacagcctttacgatttcaattgatgctggcccggaaaataatgtttcgactgggatatcagctgaagacagagcaaagacaattcaagttgctataaatccaaacacaaaacctgaggatttaagaaggccaggacatatatttccattaagagctaaaaaagggggagtattaaaaagggcaggtcatacagaagcagctgtagatattgccgcaatgtcaggtctatatccagctggagtaatttgcgaaatacaaaatcctgacggttcaatgtcaagacttcctcaacttaaagagtatgcaaaacagtgggggatgaaattaatatcaatagcggatttaataagttaccgatttcaaactgagagatttgttttcagaaaatcagatgctgttctaccaagtatctttggaaattttaaagcctatggatatattaatgaacttgatggttcagagcatgttgcattagttaaacaaaaatcatcaaaattaagcgaacctgtattagttagaatgcattcagaatgcctaactggtgatgcttttggatcattacgttgtgattgtagaccacagttagaagctgctttatcaaggatagaaaaggaggaagagggcgttgtagtttacttgagacaagaaggtagaggtattggtcttataaataaattaaaagcttacagtttacaggatggaggattggacacagtagaagctaatgaaaaactaggatttcctgctga

SEQ ID NO: 266609 - DNA, 853 bp, Unknown
  Bacterial polypeptide expressing nucleotide sequence isolated from the Sargasso Sea
aggaaatccagaaaatttaaaagagccggtattggtaagaatgcactcagagtgtctgacaggagatgcatttggatcattaaggtgcgattgtcggcctcaattagaagctgccttatcaagaatttcagaagaaggagaaggagttgttgtctatctaaggcaggaagggagaggtataggtttagttaacaaattaaaagcctataatcttcaagatggaggattagatactgttgaagccaatgagaaattaggttttcctgcagatttgagaaactatggagtgggggcgcaaatattgacagatttaggaataaatagacttaaattactaacaaataatcctagaaaaatagctggtcttggtggatatggtcttcaagttgaatctagagttccattagttatttgccccggagatcataatgcggcttatcttgaggtaaaaagagaaaaacttggacacttaattgataataatattcagacaaatttaaccaatgaaagacaaaatattgttgtctattgggatggaaaagttaacgacagcgaattaaaacattttgaagatagagcatgtaagtggtcagaaaaccattttttaaatatttctattcaaacagctccaaggttaaaagctctatgtgaaaacccattattcatttggaatgttagacatagagatatcaaaacacatttggaaggtaactttatagataaaagattgcttgagtcactacttaaggagcttagcaattggaaaaatacagaaagaattggaataattaaaactgacaattatgaaaggcttttacatccttcttcaaatatatctatagagtcaaaaaaa

SEQ ID NO: 266610 - DNA, 805 bp, Unknown
  Bacterial polypeptide expressing nucleotide sequence isolated from the Sargasso Sea
gattttgtaaagccaggtcatatctttcctctgagatatcaaaaaggcggtgttttggtaagagcagggcacactgaaggctcagttgatcttgtcaaactatctggaaaaagacctgctgcggttatttgtgaagttatgaatgaagatggaacaatggcaagaggtgatgatcttaagaaaatttcagaaaaatacaatatgccaattgtttcaatagaagatattatcgcttacagaatagctaaagagaatctagtagaaaaaattgcagaggctaaactccctactaaatatggagaatttaaggttgttggattcaaatcacaagtagataaatctgaacctatagttctaataaaaggagagataatagcgaacaaaccagtattagttagagtacactcggaatgtactacaggcgatatacttgaatccattaggtgtgattgtggagatcagttagataaagcacttgaaaaaatctctaaatctgactcaggagtattagtttatatgaggcaggaaggcagaggtataggcctattgaataaattaagggcatatgaacttcaagacgaaggtatggataccgttgatgcaaatttatctttaggttttcctatggacttgagaacttatggaataggagctcaaatattaagatctctaggaataaagaaatttgaccttcttacaaataatcctaaaaaagttataggactagaaggctttggtttagaaataagttcaacaataaaacttagtactgaaaaaagaccacaaaataaaaaatatatagaaa

SEQ ID NO: 266611 - DNA, 592 bp, Unknown
  Bacterial polypeptide expressing nucleotide sequence isolated from the Sargasso Sea
aatgtcagacaaattaaagtttattgaaactagtaaacttccaacagatattggggagttcactgtacatgcctttacagatgaaaatgaatctaaagatcatttagcaatatgtatgggtgacttgcttaccgatgagccagttttatcaagaattcattcgcaatgtattacaggtgaatctttttttagtatgagatgtgattgtagattccaactaactgagtcattaaaacaaattgctcaaaatggaagaggggttgttttttatcttcaacaagaaggaaggggtattggtctttcaaataaaattaaagcatatagtttacaagacaagggactagataccgttgaagctaatcatcaattaggtttcaaagatgatgaaagaacatacgaaaatattgctggaatgataaaatatttagcaatcaaaaaattagatttgatgactaataatccaaaaaaaataaaagcgcttgaagatatgggtatcaaagtaaatcaaagagttcctattttctcagacactaataagtataatgaaaaatatatctcaactaagaaaagtaaacttggtcatttaatctaa

SEQ ID NO: 266612 - DNA, 349 bp, Unknown
  Bacterial polypeptide expressing nucleotide sequence isolated from the Sargasso Sea
ttgtccaagcaacaacaagaacgcgaacgagcggttcgagccgatgcacaccttccaactgaacacggtaattttcgtgtgagagcatttccagaattaacatccgaagatcactgtgtgatttacactggtcaaccatggatggatgaggcacccttagttcgtattcactcagagtgtctaaccggagatgcatttagttcgctaaagtgtgactgcggaccgcaactgaagcgagcgttgaatggaattcaagaaaacggtgtcgggatggtagtttacctccgtcaagaaggacgcggtattggattagcggcaaaaattcaagcctacgcgctccaggatagag

SEQ ID NO: 266613 - DNA, 364 bp, Unknown
  Bacterial polypeptide expressing nucleotide sequence isolated from the Sargasso Sea
ttaaaacaaattgctcaaaatggaagaggagttattttttatcttcaacaagaaggaagaggcattggtctttcaaacaaaattaaagcgtatagtttacaagacaagggactggataccgttgaagctaatcatcaattaggtttcaaagatgatgaaagaacttatgaaaatattgcaggaatggtaaaatatttagcaataaaaaaattagatttgatgacaaataatccaaaaaaaataaaagcgcttgaggatatgggtattaaagtaaatcaaagagttcctattttctcagacaccaataagtataatgaaaaatatatctcaactaagaaaagtaaacttggtcatttaatctaag

SEQ ID NO: 266614 - DNA, 875 bp, Unknown
  Bacterial polypeptide expressing nucleotide sequence isolated from the Sargasso Sea
ttgtgtttcattacaagtgaacgttcgaaagaactagaccttgaacccatggacagacgtaattcaagtttgcatgaaacaaatttcactattagtgttgacgcgaaacaaaataccacgacagggatttcagcttttgatcgatcgaagaccatccttgcacttataaatgatgatacacaatcaagtgatctagctaggccaggccatatatttccaattgttggtaaggatggtggtgtattaagacgtgcggggcatacagaagctagcattgatcttgcaatgatggcaggccttaaaccaagcggggtcatatgcgagatcatggcagatgacggtactatggcaagaggtgacgaacttcaaaagttttcagaaaaacataatttaaagataatttcaatatccgatctgatacgccatcttagaaggaaaagaagccttgttaaaaagattgaaacaatcaaactcccaacagatgaattagattttgaactacatttgtatgagggcctctttgataatcaaacacacttggcattaacaactggaaactatctggactcagaatccgtattggttagagtacactcagagtgcttaacgggagatgttttcaaatctttaaggtgcgactgtggaaagcaattgaatgctgcaattgaagcgataagtaaaaatgaatctggtgttattgtatatctaaggcaagaaggtagaggaatcggtttgaaacataagatcaaggcgtataaacttcaagaacaagggcttgacactgttgaggcaaaccaagagttagggtttgaacctgacctgagggattatggagttggagcacaaatcttaaaagatcttggtgcaaacaactc

SEQ ID NO: 266615 - DNA, 470 bp, Unknown
  Bacterial polypeptide expressing nucleotide sequence isolated from the Sargasso Sea
cctgcttaccgatgaaccagttttatcaagaattcattcgcaatgtattacaggagaatctttttttagtatgaggtgtgattgtagatttcaactaactgaatcattaaaacaaattgctcaaattggcagaggggtgattttttatcttcaacaagaaggaagaggcattggtctttcaaataaaattaaagcatatagtttacaagacaaggggctagatacagttgaagctaatcatcaattaggcttcaaagatgatgagagaacatacgaaaatattgctggaatggtaaaatatttagcaatcaaaaaattagatttgatgactaataatccaaaaaaaataaaagcgctcgaagatatgggtatcaaagtaaaccaaagaattcctattttctcagatacaaataaatataatgaaaaatatatctcaactaagaaaagtaaacttggtcatttaatctaag

SEQ ID NO: 266616 - DNA, 892 bp, Unknown
  Bacterial polypeptide expressing nucleotide sequence isolated from the Sargasso Sea
gcgatcaatttcatgccgaccgaggcccgcgggctgatctgtctggccatggaggggaagcggctggacgagctcgatctccccctaatggtggatcgcaacaccgatgccaacgaaacggccttcacggtgagcatcgatgcgggagctgagcacggcgtcagcacaggaatctctgcggaggatcgtgcacggacgattcaggttgccctcaatcccaagacgcgacctgctgagctgcgacgaccgggacacatttttccgctgcgggccaagcccggcggcgtgctgaaacgcgccggacacacggaagcagctgttgacctggcccagctggcggggcttactccctccggcgtgatctgcgagatccagaacagcgatggctcaatggctcgtctgccggaactgagggcttacgccgatacctggggcttgaagctgatcagcatcgctgaactgatccgttaccgactcgacaacgaacggtttgtgcgacggcaggcccatgcggaactgccgagtcagttcggttcgttccaggccatcggttactgcaatgaactggatggctcggaacatgtggccctcgtcaaaggcgacccggcctccctgcgtgaaccagtgctggtgcggatgcattcggaatgcctcaccggtgatgccttcggatccctgcgctgcgactgccgtcctcagctggaggcagcactccgccaaatcgaacgtgagggggaaggtgtggtggtttacctccgccaggagggccgcggcatcggtctgatcaacaaacttcgcgcctacagccttcaggatggaggcctggacaccgttgaagccaacgaacggctggggttccctgctgacctgcgcaactacggggtgggggcgc

SEQ ID NO: 266617 - DNA, 470 bp, Unknown
  Bacterial polypeptide expressing nucleotide sequence isolated from the Sargasso Sea
aatgtcagacaaattaaagtttattgaaactagtaaacttccaacagatattggggagttcactgtacatgcctttacagatgaaaatgaatctaaagatcatttagcaatatgtatgggtgacttgcttaccgatgagccagttttatcaagaattcattcgcagtgtattacaggtgaatctttttttagtatgagatgtgattgtagattccaactaactgaatcattaaaacaaattgctcaaaatggaagaggggttgttttttatcttcaacaagaaggaaggggtattggtctttcaaataaaattaaagcatatagtttacaagacaagggactagatacagttgaagctaatcatcaattaggtttcaaagatgatgaaagaacatatgaaaatattgctggcatgataaaatatttagcaatcaaaaaattagatttgatgactaataatccaaaaaaaa

SEQ ID NO: 266618 - DNA, 813 bp, Unknown
  Bacterial polypeptide expressing nucleotide sequence isolated from the Sargasso Sea
tagaaaaggaggaagagggggttgttgtttacttgagacaagaaggcagaggtattggtctaattaataaattaaaagcttacagtttacaggatggaggattagatactgtagaagctaatgaaaaattaggttttccagctgatctcagaaattatggagttggggctcagatattaaccgatctagggataaaaaaactaaaattactaacaaacaatccaagaaaaattgctggattaggcggttatggaatagaagttattgaaagagttcctttagttatttgtccaaacgataataatgcagaatatttgagtgtaaaaaaaacaaagttaggccacatgatagatgatgataattctaattccagaaatattgatccatttatatcaattttttttgacggaaaatataaatctattgatttagttccaataaaaaataaagttattaaattctgtagtgaacaaaaaattaacattaaacttgaaagtagtcctagattattggcgttttggaaccgaccaaaattagtctggagaattttacatgatcggaatagaaacaattccaacattaacgatgaggaaataaagaatatagaattatttattcagtttttatccaaatataaaaatagtacaaagattggaattattgtttctagaaatattgaacaagcattacacccaaaaagtagcatcaaactaatcaatactaaattcactattaataacgaaatcttatattcttctacaagaaaatttaatctagataaagagacattcagtattgtttttgaaggctaaa

SEQ ID NO: 266619 - DNA, 813 bp, Unknown
  Bacterial polypeptide expressing nucleotide sequence isolated from the Sargasso Sea
tgatcgcacatcagggcggtgtgctgaaaagggcgggtcacaccgaagccgccgtggatctggccaggctcgcaggtctgcagcccggaggtgtgatctgtgaaatcatgaatgaagacggtacgatggcgcgttatccccagttgagggaatttgccgaccgtcataaaatgctgctgatcaccatcgaggacctgatccaataccgtaagcacatggaaaccctggtggtgaaaaaggcggaagcagccctccccaccgaatttgggaccttcagagtaattggcttccagagtcttttggatgacagcgattacgttgcactcgtcaaaggagagtgggaacaggatgaaccggtattggtccgggtccattcggaatgcctgactggtgatgtatttggttcattccgctgtgactgcggcccccaattgcatgctgcgatgatgatggttgaacgtgaaggaaaaggggtgatcctctatcttccccaggaaggacgtggaataggactgctcaataaactgaaagcctataagcttcaggaagatggggtcgacacagtcgaagccaaccacaggcttggattcaaggaagatttgagagattatggtatgggagcacaaatgctctacatgcttggggttagaaacatgcgactgatgaccaataatcctagaaaaatcgtcggcctccagggacatggccttcaggtggtggaaagggttcctctagaaattgaaaaaaaccccggaaaccagagatacctcgaaaccaaaaaacatagactcggacatctccttaatctatgac

SEQ ID NO: 266620 - DNA, 305 bp, Unknown
  Bacterial polypeptide expressing nucleotide sequence isolated from the Sargasso Sea
catgcagcttaaacgtgtggcagaagccaaactgccaaccccctggggtgatttcctgatggtgggatttgaagaactggcaaccggacacgatcacgtcgcactggtttttggcgatatcacaggtcaaacgcctgttctggcgcgtgtccactccgaatgtctgactggcgatgcattgtttagcctgcgttgcgattgcggcttccagctcgaagcggctctcacccacattgctgaagaggggcgcggtatcctgctttatcatcgtcaggaaggacgcaatatcggcctgctcaataaaa

SEQ ID NO: 266621 - DNA, 673 bp, Unknown
  Bacterial polypeptide expressing nucleotide sequence isolated from the Sargasso Sea
aagacgctatttaaatttgcaaaaaaacataatctaaaaatcatctcaatagctgacttaattagatacatacgaaaaactgaaaaacttgtaaaaaaagttgaagaagttaacttgccaactaaatatggtaattttaaactgcatttatatgaagatatatttgacaataattctcatttagctttatcgcttggcgattttagtcatgaaaaatctaccctggttagagtccactcggaatgcttaaccggagacgttttccattcccaaaggtgtgactgcggtgatcagctagaaaccgcgatgcagatgatttctgacaacaaatcaggggttatagtttatcttaaacaagaaggaagaggcattgggcttttgcataaaatcaaagcttatcgcttgcaagaagggggtttagacacagttgaagcgaatgaagaattaggctttttagcggatctaagagattatggtgttggtgcgcaaatactcaaagatctcggcattacaaatattaccataatgactaacaatccaaaaaaattagtaggacttgaaggtcatgggctcaacattgtatccaggattccaatcaaaatcaaacccaatccaaataataaagaatatctgaaaacaaagaaatcaaaattgggacatattttagactaat

SEQ ID NO: 266622 - DNA, 842 bp, Unknown
  Bacterial polypeptide expressing nucleotide sequence isolated from the Sargasso Sea
ccctctcagagccagagcaggcggagtcctcaaaagggctggacacacagaagctgcagttgacttagcaacaatggcagggctagcccctgcgggagtactatgcgaaatagtttcggacgacggaacaatggctcgcttaccagaacttatcgaattcgcccaaacctatgacatcccaattatttcaattgctgacatgatcagataccgaaaccgtcatgaaagacttgtagaacggttctcatctgcacgaatccccacaatatacggtgaattttctgcccacatctatagaagttctttagatgatgtagagcacctagcgttcgtttttggcgacttaaacgaaaatgaaattccacttgttcgtgtgcactcagaatgcttgaccggagacgttcttggttcccttcggtgtgattgtggatctcaactagagcttgcaatgaaactcgttgcagagaacggaagtggagccataatttacctcagaggtcacgaaggccgaggcatagggctcggccataaaatgcgcgcttatgcccttcaagatgaaggcatggacaccgttgatgctaatgtcgctttgggattcgcccctgattcacgtgaatatggaataggtgcccagataatagctgacttaggaattcaaaaaatgagaattctaacaaacaaccctgccaagtatggagggcttcaagggtacaatctggaaatagttgaaagagttccgctcataagcgactcaaaccctgagaacgtgagatatctccaaacaaaagaagaacgcatgggacacctgatggacaaaagcaatacatcaaaggacagttaaa

SEQ ID NO: 266623 - DNA, 793 bp, Unknown
  Bacterial polypeptide expressing nucleotide sequence isolated from the Sargasso Sea
ggagagatttgtatttagaaaatctgatgcggtacttccaagtatttttggtaatttcaaagcgtatgggtatgttaatgaacttgatggttcagagcacgttgcattagttaaacaaaaatcatccaaattaagcgaacctgtactagtaagaatgcattcagagtgcttaacaggtgatgcttttggatcattacgttgtgattgtagaccccagttagaggctgctttatcaagaatagaaaaggaggaagaaggtgttgttgtttacttgagacaagaaggcagaggtattggtctaataaataaattaaaagcctacagtttacaagatggtggattagacactgtagaagctaatgaaaaattaggttttccagctgatctcagaaattatggagttggagcacaaatcttaactgatttaggtataaaaaaactaaaattactaacaaataatcctagaaagattgctggattaggtggttatggaatagaagttattgagagagttccattagttatttgtccaaacgataataatgcagaatatttgagtgttaaaaaaacaaagttaggccatatgattgatcatgataattctaattccagtaatattgatccatttatatcaatttttcttgacggaaaatataaatctattgatttagttccaataaaaaataaagttattaaattctgcagcgaacaaaacattaatattaaacttgaaagtagtccaagattattggcgttttggaaccgaccaaaattagtatggagaatcttacat

SEQ ID NO: 266624 - DNA, 457 bp, Unknown
  Bacterial polypeptide expressing nucleotide sequence isolated from the Sargasso Sea
tctactctggttagagtccactcagaatgcttaaccggagacgttttccattcccaaaggtgcgactgcggtgatcagctagaaaccgcaatgcaaatgattgctaacaacaaatcaggggttatagtttatcttaaacaagaaggaagaggcattgggcttttgcataaaatcaaagcttatcgcctgcaagaagggggtttagacacagttgaagcaaatgaggaattaggcttttcagcggatctaagagattatggtgttggtgcgcaaatactcaaagatctcggcattactaacattaccataatgaccaataatccaaaaaaattagtagggcttgaaggtcatggactcaacattgtatccagaatcccaatcaaaatcaaacccaatcaaaataataaagaatatctaaagacaaagaaatcaaaattgggacatattttagactaat

SEQ ID NO: 266625 - DNA, 745 bp, Unknown
  Bacterial polypeptide expressing nucleotide sequence isolated from the Sargasso Sea
gccgtgcccgaagcgccggtgctgattcgcgccgccgagcccttcgatctcgacaccgcgcgcgcggtggccgatccggcgctagacctcgcttatccgatgaaaggcccgttcgcggccgagcacatcgaggatggcgatgcggcgcgcacggcgatggaactggcgcgccttgccggcatcctgcccgcgttcctcgtcgcgccaaatcaggatggcgaggcgcaggacgtttccagcgccgacctcgccgcgtggaaggataccgcgcacctcgccatcgcctcgcgcgcgaagttgcccgtcgaggcggcggagaatgccgagatcgtcgctttccgcgcgctagacgacttgcgcgaacatgtcgcgctcgtcatcggcacgcaggacggcgaccggccgccactggtgcgcctccattccgagtgcctgactggcgacatcctcggcagcctcaagtgcgactgcgggccgcagctgaacgcagcgctgcgggcaatgtcggcggaggccggagaggggggctggggtgtgctgctgtacttgaggcaggaagggcgcggcatcggcctcgtcaacaagctgcgcgcctatgcgctgcaggatgcaggctacgacacggtggacgccaacaaccgcctcggcctgccgaccgaggcgcgcgatttcccggtggcggcgcggatgctggacctgctgggggtccatgcgattcgcctgatgaccaacaatcccgccaagg

SEQ ID NO: 266626 - DNA, 603 bp, Unknown
  Bacterial polypeptide expressing nucleotide sequence isolated from the Sargasso Sea
gctgggagaggtgcctgccgatgctcacctgcccacagagcatggaaatttcagaatcagagtattccacgaggaggagactggtctagatcacgttgccctacttctaggagatatggtgggtccagaccctgtgcttgtgagagtacactcagaatgcctaactggggatgccttcgggagtcttaggtgcgactgtggccctcagttacaaactgccctcagaatgatacaagatgtgggatgggggtgtctggtgtatcttcgccaggaagggagagggatcggcctgcatgccaagatccaggcgtataacctacaggacagaggagttgacacgctagatgccaatctaatgctaggtcacccagccgatgctagagactacgggatagcctcggagatccttgattcagtagggatagaaaaggtgaacctgatgaccaacaatccagacaaagttgagcagctttctgaatatggcataaacgtagtagagaggatggcaatagtagcaggagtaggggaaggaaacttggattatctatccaccaaggctacgagaatggggcatcaaatcagcaaagataacctggagaagca

SEQ ID NO: 266627 - DNA, 870 bp, Unknown
  Bacterial polypeptide expressing nucleotide sequence isolated from the Sargasso Sea
agacagggcaaagacaattcaagttgctataaacccaaatacaaaacccgatgatttgagaaggccaggacatatttttccattaagagctaaaaaaggtggagtattaaaaagagcaggtcatactgaagcggcagtagatattgcgtcaatgtcaggtctttatcccgctggagtgatttgcgaaatacaaaatcctgatggttccatgtcaagacttccacaacttaaagattatgcaaaacagtggggaatgaaattaatatccatagccgatttaattagttatcgttttcaaactgagagatttgtatttagaaaatctgatgcagtacttccaagtatttttggtaattttaaagcttatggatatgttaatgaacttgatggttcggagcacgttgcattagttaaacaaaaatcatccaaattaagtgaacctgtattagtaagaatgcattcagagtgcttaactggcgatgcttttggatcattacgatgcgattgcagaccccagttagaggctgcgttatcaagaatagaaaaagagggagaaggtgttgttgtttacctgagacaagaaggaagaggtattggtcttataaataaattaaaggcatatagtttgcaggatggtggattagacactgtagaagctaatgaaaaattaggttttcctgctgatctcagaaattatggagttggagcacaaatattaactgatctagggataaaaaaattaaaattactgaccaacaatcctagaaaaattgctggattaggtggttatggaatagaagttattgagagagtcccattagtaatttgtccaaatgataataatgcagaatatttgagtgttaaaaaaac

SEQ ID NO: 266628 - DNA, 629 bp, Unknown
  Bacterial polypeptide expressing nucleotide sequence isolated from the Sargasso Sea
gtatccggtgtccgtcgtgttcgtcgccgcctcccaactgcccacgcccttcggtgtgttcaccatgcacggttttctcgatgaggctaccggcaaggaacatgtcgccctgaccttcggcaacgtcgccgacggtgcaccggtgctggggcgtctgcattccgaatgcctgaccggcgacgcgctgttcagcctgcgttgcgactgtggagcccagctgcaggcggcgctgcaggccattgccaacgaaggccgcggcgtgctgctgtatctgcgtcaggaaggccgtggtattggtctgttgaacaagatccgcgcctatgaactgcaggacggcggtgccgataccgtggaagccaacgagcgcctgggtttcggcgccgaccagcgtgattacgccatctgcctgccgatgctcgagcacctgggcatcgacagcctcaagttgatgaccaataacccgcgcaaggtcaaagccttgggcgacatgggcatcgccgtggatcaccgtgtgccgctgcagattgcgcacaacccctacaacaagcgctacctcgccaccaaggccggcaagctcggtcatatgctgggcaaccagcatcagggcgagaccgaggaaagcctgtgac

SEQ ID NO: 266629 - DNA, 322 bp, Unknown
  Bacterial polypeptide expressing nucleotide sequence isolated from the Sargasso Sea
tatgaccatccagataaggaccccggaagaaccaacagaaattgacgccgacgcattcctcccgacggagtttgggaacttcaggattagagtcacggtggacgaagacgggaatgagcactgccttgtgtacgcaggtgaccttcagggcgcagatgcccccctgattagaatccactccgaatgcctgactggtgatgcattcagttcaatgaagtgtgactgcggacctcagctccaggcctcactcaagcagatccaggaagaagggtgcggagcagtagtctaccttcgtcaagaggggagggggatagggcttcac

SEQ ID NO: 266630 - DNA, 544 bp, Unknown
  Bacterial polypeptide expressing nucleotide sequence isolated from the Sargasso Sea
atgggagagttcactgtacatgcctttacagatgaaaatgaatctaaagatcatttagcaatatgtatgggtgacttgcttactgatgagccagttttatcaagaattcattctcaatgtattacaggggaatctttttttagtatgagatgtgattgtagattccaactaactgaatcattaaaacaaattgcacaaaatggaagaggggttattttttatcttcaacaagaaggaagaggtattggtctttcaaataaaattaaagcatatagtttacaagacaaggggctagataccgttgaagctaatcatcaattaggtttcaaagatgatgagagaacatatgaaaatattgctggaatgataaaatatttagcaatcaaaaaattagatttgatgactaataatccaaaaaaaataaaagcgcttgaagatatgggtatcaaagtaaatcaaagagttcctattttctcagacaccaataagtataatgaaaaatatatctcaactaagaaaagtaagcttggtcatttaatctaag

SEQ ID NO: 266631 - DNA, 919 bp, Unknown
  Bacterial polypeptide expressing nucleotide sequence isolated from the Sargasso Sea
cacaattaattttatggctactgaggggcgaggtcttatatgcctagctatgcaaggggagaaacttgactccttagatttacctttaatggtagatagaaatacagatgaaaatcaaacagcatttacgatttcaattgatgctggccccgaaaacaacgtttcgaccggaatttcagcagaagacagagctaagactattcaagttgcaataaacccaaatacaaaacctgatgatttaaggaggccaggacatatatttccattaagagcgaagaaaggaggggttttaaaaagggcaggtcatacagaagctgcagtagatattgctgcaatgtcaggtctatatcctgctggagttatttgtgaaatacaaaatcctgacggatcaatgtcacgacttccgcaacttaaagaatatgctaaacagtgggggatgaaattaatatcaatagcggatttaataagttatcgatttcaaactgagagatttgtttttagaaaatccgatgcagttcttccaagtatttttggaaatttcaaagccttaggatatattaatgaacttgatggttcagagcacgttgcattagttaaacagaaatcatcaaaattaagcgaacctgtactagtaagaatgcattcagaatgcttaactggtgatgcttttggatcattacgttgtgattgtagaccccagttagaggctgctttatcgagaatagaaaaggaagaagaaggagttgttgtttacttgagacaagaaggtagaggtattggtctaataaacaaattaaaagcttacagtctacaagatggtggattagacacagtagaggctaatgaaaaattaggatttcctgctgatctcagaaattatgggagtggagcacagatattaacagatctcgggataaaa

SEQ ID NO: 266632 - DNA, 554 bp, Unknown
  Bacterial polypeptide expressing nucleotide sequence isolated from the Sargasso Sea
acattggggagacttttcagttatagcttacgaagatgagaaaaatgctgaagagcatctacttctgtatatgggagaacttgctaatgattctctgctacgcatacattctcaatgcctaactggtgacacgttatatagcttaaaatgtgattgcggctctcaactagctatggcgctagagaagatagcatcagaaggaaaagggatgatcatatatatggcacaagaaggaagaggtatagggcttgtgaataaaataagagcttatgaacttcaagacaaaggcatggacacagtagaggctaatgaagcattaggttttgctgctgatgaaagagattattcttattgcaaagaaatcttatcttcagtgaatattgaatcagtaagactgatgactaataatccgcgtaaaattaatggcttagaagatgttgggataaaggttactgaacgagttgccattcaagttgaccccaataaacataatgaggactacctcaaagttaaggcggacaaattaggtcacatgatgaagagttcagattagc

SEQ ID NO: 266633 - DNA, 758 bp, Unknown
  Bacterial polypeptide expressing nucleotide sequence isolated from the Sargasso Sea
cctctgcgagatcgtgaacgactccgacggcagcatggcgcgcctgccccagctccgggagttctccgagaagcacgggctcaagatggtgctcatctccgacctcgtcaggtacaggcgcaagaggcaggcgctggtggagaggaccgcgtcggcgagggtccccaccaaccacggggagttcaccgccgtctcctacaggtccaagctcgacggcatcgagcacgtggcgttcgtgtacggcgatgacgcggacgccgtgtccggagataacgtcctggtccgcgtgcacagcgagtgcctcaccggggatatcttccactccaccaggtgcgactgcggcaaccagctggacatggcgatgaagaaggttgcggctgaggggcggggcgtcatcgtgtacctcagggggcaggagggccgtggcatcggcctcggacacaagctccgcgcgtacaacctgcaggatgagggcagggacaccgtgcaggcgaacgaggatctcggcctccccgtggattcgcgcgagtacggcgtgggagcacagatccttcaggacctgggcgtgaggaccatcaggctcatgaccaacaacccggccaagtaccacggcctcaagggattcggcctgacggtcgtcggccgcgtcccgctcttcgccccgatcaccttggacaacaagaggtacatcgagaccaagaggaagaagatgggtcacatgtttgggaacgagagcgacgagttcaacgccgtgccgg

SEQ ID NO: 266634 - DNA, 553 bp, Unknown
  Bacterial polypeptide expressing nucleotide sequence isolated from the Sargasso Sea
agatgatttagattttgaactacatttgtatgagggcctcttcgataatcaaacacacctggcattaacaactggaaactatctagactcagactccgtattggttagagtacattcagagtgcttaacgggagatgttttcaaatctttaaggtgcgactgtgggaagcaattgaatgctgcaattgaagctataagtaaaaatgaatctggtgttattgtatatctaaggcaagaaggcagagggatcggtttgaaacataagatcaaggcgtataaacttcaagaacaagggcttgacactgttgaagcaaaccaagagttaggatttgaacctgacctgagggattatggagttggagcacaaatcttaaaagatcttggtgcaaacaaactcactgttctaacaaataatccaaaaaaacttattggcctagaaggccatggattagaaatcgtatctagggccccgatcatcataaaagctggaaaagaaaatgaaaaataccttgataccaaacaaaaaaagttagggcatatatttaacgtatga

SEQ ID NO: 266635 - DNA, 852 bp, Unknown
  Bacterial polypeptide expressing nucleotide sequence isolated from the Sargasso Sea
aatgtcagaaaaaaacaatttttttaataccattgaagacgccatcgaggtttttggtaagggtgaaatgttagtggttgttgatgatgaagaccgagaaaatgaaggagatcttgtttgtgcggctgagacaatttcaccagagaaaatcaacttcatggcaaaacatggaaggggcctaatatgtcttccacttgattcagaagttgtaaaacgtctaaacattccattaatggtcagcaataataatgctaccatgggtacaaactttactatcagcattgaagcctcaactggtgtaaccacaggaatttccgctgcagatcgtgcacgtacaattaaagttgctatagatcctaattcaagtgcgaaagacatacgcagtcccggacatgttttccccttaagtgctctggagggaggagttttacgcagggcaggtcatacagaagctgctgttgatcttgcaaaaatgtcaaatatgctcccagcaggagttatctgtgagattatgaatgaagacggaacaatggcacgtgtacctgatttaaagaagttcgctaactatcatggaattaagatcattaccataaaagacttaattaagtataggaaacgtaatgaaacactggtagtaaaaaaagcagaagcatcaatgccatcaatttatggagattttaaagtgataggatttcaaagtctactggatgatagtgattatgtggcacttgtcaaaggagatttggatgaaaaagagcccatacttgttcgtgttcattcggaatgcctgacaggagatgttttcggttcatatcgctgtgactgcggtcctcagcttcatgctgcaatgaa

SEQ ID NO: 266636 - DNA, 604 bp, Unknown
  Bacterial polypeptide expressing nucleotide sequence isolated from the Sargasso Sea
atgagtgatgatgttccaagtatagcaaaacttcccaccttgtgggggcagttcgatattcacgtatatcatgaagaagaaacgggcctagaccacgtagctttgatgcttggatcaatggctggacctgatcccgtcttgcttcgagtacactcagaatgcttgacaggtgatgccttttcatcactacgttgtgattgtgggccgcaacttgatgcagctatgaaagcgattgttgacaatggatggggatgtttactttaccttcgtcaggaaggtcgagggataggtcttcatgcaaagatccaagcctatcatctccaagataagggtgcagataccctcgatgcgaacttaattctcggccatcctgctgatggacgtgattatcaaatcgcggcaactatgttacgcgaccttgaaattgaagacgtagctttgttgaccaacaatccagataaagtcaaacaactagagcaacacggtattgtcgtttcaaagacggttccattggttgcaggggttggtgaagacaatttgcaatacttacaaactaaggttgaacgaatgggacataccatcgattcaaccgatttggaatgaa

SEQ ID NO: 266637 - DNA, 797 bp, Unknown
  Bacterial polypeptide expressing nucleotide sequence isolated from the Sargasso Sea
tatgttccccttagttgcaagagatggcggaacattagttcgagctggtcacactgaagcatctgttgatatttctaaacttgcaggtctaaggtcttgtgcagttatttgtgaaataatgaatgatgatggtactatggctcgattgaaagattgtgaaaaatttgctaaaaaacataaaattaaaattgctactatcgctgatctcattagttatagattaaaaaaagattctcttgttgaaagagttggagagtgtcaacttccaactcatatagcaaagtttaggtgcttcgcatataacagtttaatcgatgggaaaacacacattgcattggttaaaggtaaaataagtaaatcaaagccaactttagtcagagttcattccgaatgcttaacaggagacttattcggatcccagagatgcgattgtggatcccagcttgatgcagctttagaaatgattacagatgcaggatctggagttttattatatttagctcaagagggacgtggaattggcatagctcataaaatcaaagcttattcccttcaagagaaaggtttagatactgttgaggcaaatgaagctttaggatttaaggaagatttaagagaatatggaacaggagcgcagattttacgtgatttaggtgtaaccaaaataaatttgctaaccaataatcctagaaaaattgcaggaattgaggggtatggaataaaaattgaaaagtcattaccaatcgaaattaagccaggtgagtataatcttagatatcttcgaactaaaaagaaaa

SEQ ID NO: 266638 - DNA, 466 bp, Unknown
  Bacterial polypeptide expressing nucleotide sequence isolated from the Sargasso Sea
ggaagtgatgagccagttttatcaagaattcattctcaatgtattacaggggaatctttttttagtatgagatgtgattgtagattccaactaactgaatcattaaaacaaattgcacaaaatggaagaggggttattttttatcttcaacaagaaggaagaggtattggtctttcaaataaaattaaagcatatagtttacaagacaaggggctagataccgttgaagctaatcatcaattaggtttcaaagatgatgagagaacatatgaaaatattgctggaatgataaaatatttagcaatcaaaaaattagatttgatgactaataatccaaaaaaaataaaagcgcttgaagatatgggtatcaaagtaaatcaaagagttcctattttctcagacaccaataagtataatgaaaaatatatctcaactaagaaaagtaagcttggtcatttaatctaag

SEQ ID NO: 266639 - DNA, 582 bp, Unknown
  Bacterial polypeptide expressing nucleotide sequence isolated from the Sargasso Sea
atagctgtaaatttgcatccgaatcaaaactgccaacaaagtttggcgagtttaccatctctacttttgaagaaccttgtggcaaggatcatattgctttaaccattggagatattcaaaaagaggatacagttatgtgtagagtccattctgaatgtttaactggagatgcgctacacagtcttagatgtgattgtggcccccagttgcaagcagcaatgaagatgttagctgaaaataaatcaggcatccttttgtatttacgccaagaaggtaggggcattggtttggtaaataaaattagggcttacgcgcttcaagatcagggccatgatacggtgcaagcaaatgaaatgttgggttttccggctgacttaagagaatacaacatatgcttggatatactccaacacttcaatattacttcagtgaatctattaacaaataatccaaaaaaagtaagcgccttggaagaggttggtattaatgttacgcaaagaacttctcttcatgaaggagaaaatgaaaaaaacaccgaatatctaaatactaaacgagataagatgggacatttaagataaa

SEQ ID NO: 266640 - DNA, 597 bp, Unknown
  Bacterial polypeptide expressing nucleotide sequence isolated from the Sargasso Sea
cggcgcacgcttacgtgtcgttgctggacgaagaagagcatgtggcttatgtgctgggtgacctttcctcggtggatgctccgctggtgcgcgttcactctgagtgcctcactggcgacctcctagggtcgttgcgctgtgactgcgggtcacagttggacgccgcgctggcccagatcggatccgagggagttggtctgatcgtctacctgcggggtcatgaggggcgtggcatcggtattggtcacaagttgcgtgcctatgggctgcaggacgaggggcttgacaccgtcgatgccaatctgtcccagggccttcccgtcgactcccgggagtatggcgtgggggcccagatactgtccgacctgggtatcacccacatgcgcctgatgaccaacaaccctgccaagtacgggggcctagagggctatggcctagagatcactggccgggttccgttggagacggcggccaacccagaaaatgtccggtacctggagaccaagcgtgaccggttgggtcacaactttgctcagaggggcggatctggtgggccaggaagcgccgaggagactgctggagggactggctcgtgag

SEQ ID NO: 266641 - DNA, 843 bp, Unknown
  Bacterial polypeptide expressing nucleotide sequence isolated from the Sargasso Sea
attgcactagttaaacaaaaatcaaataaattaagtgaaccagttttagtaagaatgcattcagaatgtttaacaggtgatgcttttggatcattaagatgtgattgtagaccgcagttagaagctgcattatctagaatagaaaaagaagaagaaggagtagttgtttatttaagacaggaaggaagaggtattggtttgataaataaattaaaagcttatagcttacaagatggaggattagatactgtggaagctaatgaaaaattaggtttcccagctgatttgaggaactacggagttggagcacagatattaactgatctaggaattaaaaagcttaaacttctaacaaataatcctaggaagatagctggattaggtggttatggaatagaagttacggagagagtccctttagtaatatgtccaagtgatcataatgctgaatatttaaatgtaaaaagacaaaagctaggtcacatgttagacgaagaaaaattaaacactagaaatatagatccatacatagctatattccttgatggtgaattcaaatcaattgatttggtttcaattaaaaataaaacttctgagttttgtgaacaaaataaaataaatataattttagaaagtactcctaggttattagctttttggaataggcccaaattagtgtggagaatattacatgataagaaaaggaaagattacacaataaatgataatgaaattagaaagatagagatatttattcagttactatctgaatataataaaagctcaaaagttggcattattatatccaggaaatatagaacaggcattacacccaaaaaatag

SEQ ID NO: 266642 - DNA, 1201 bp, Unknown
  Bacterial polypeptide expressing nucleotide sequence isolated from the Sargasso Sea
atgaaatttgacactatttcctctgcaattaaagaaattaaggctggtggcatggttgttgttcttgataatgaggacagagaaaatgaaggtgatttggtaatggcatctgatgctgctactcctgcaaatattaactttatggccaaagaaggtagaggtttaatttgtatttcagtttcaaagtcaagagtaaaaaaattagatctcgaaccaatggaacagaaaaatactagtttgcatgaaactgcatttactgtaagtgtagatgcgattaaaggaaccacaactggtatatctgcttcagataggtgtaaaacaatcaaaacaattgttagtgacaaaacgaatccttctgatttagctagacctggtcatatttttcctattgtaggacgtaatggaggagtattaagaagagcaggtcatactgaagcaagtatggatcttgctcagcttgcaggtttttctagaagtggagtcatttgtgaaattatcggagatgatggtgaaatgcttagaggtcctgagttgttgaaatttgcacaacaacataacttaaaaattatttccatcgaggaccttatacgatttagaagaaaagaagagagtatcattaaaaaagttgaagaaattaaactgccaacaaaatttggtgattttgatctacatatgtatgatgatatttataataacaaagtgcaccttggattaacctatggaaaaattgacaacaaaaaacctgtcttaattagagttcactctgaatgtcttactggagatatttttcattctttgatgtgtgattgtggtagtcaacttgattttgcaatgaaaaaaattgttgaaaaaggttctggaattattgtttatttaaggcaagaaggaagaggaattggcctaagaaataagattaaagcttataagcttcagcaagagaaaaatttagatactgttgaagccaataacgctttaggttttaaagcagatttaagagattatggagtaggtgctcaaattttgaaagatttaggagccaaagaattaatcgtaatgaccaataatccaaaaaaacttattgggcttgaaggacatgatttaaaaatagctgatagagtatcaattaatattgatccgtcagaacataacaaagaatatttatcaatcaagaaaacaaaactaaaccatatattagattaat

SEQ ID NO: 266643 - DNA, 1201 bp, Unknown
  Bacterial polypeptide expressing nucleotide sequence isolated from the Sargasso Sea
atgaaatttgacactattccctctgcaattaaagaaattaaggctggtggtatggttgttgttcttgataatgaggacagagaaaatgaaggtgatttggtaatggcatctgatgctgcttctcctgcaaatattaactttatggccaaagaaggtagaggtttaatttgtatttcagtttcaaagccaagagcaaaaaaattagatcttgaaccaatggaacagaaaaatactagcttacatgaaactgcattcactgttagtgtagatgctattaaaggaaccacaactggtatatctgcttcagatagatataaaacgatcaagaccattgttagtgacagcacgaatccttctgatttagccagacccggtcatatttttcctattgtaggacgtaatggaggagtgttaagaagagccggtcatactgaagcaagtatggatcttgcccaacttgcaggtttttctagaagtggggtcatttgtgagattatcggagatgacggagaaatgctcagaggaccagagttaatgaaattcgcaaaaaaacataacttaaaaattatttctattgaggatcttatacgattcagaagaaaacaagaaagcattattaaaaaagttgaagaaattaaacttccaaccaaatttggtgattttgatttacatatgtatgatgacatctataataataaagtacacttcggattaacctatggaaagatcgatactaagaaacccattttaatcagggttcactctgaatgtcttaccggagatatttttcattctctaagatgtgattgtggtagccagcttgattttgcaatgaaaaaaattgttgaaaaaggttctggaattattgtttatttaagacaagagggaagaggaattggcataagaaataagattaaagcttataagcttcaacaagagaagaatttagatactgttgaagccaacaatgtattaggctttaaagcagatttaagagattatggagtaggtgctcaaattctgaaagatttaggagcaaaggaattaattgttatgaccaataatcccaaaaaacttattgggcttgagggacatgatttaaaaatagctgatagactaccagttaaaatcaagccatcagaatacaatgaaaaatatttatcaataaaaaagactaaactaaaccatatgttagattaat

SEQ ID NO: 266644 - DNA, 592 bp, Unknown
  Bacterial polypeptide expressing nucleotide sequence isolated from the Sargasso Sea
aatggatgataaattaaaatttattgaaacaagtaaactcccaaccgatattggtgagtttactgttcatgcattcactgatgaaaaggaaaaaaaggatcatctcgctatatgtatgggtgatttattaacaagcgaaccagttttatcaagaatacattctcagtgcataactggtgaatctttttttagtatgagatgtgattgtagatatcagttaactgaatcccttcaacaaattgcaaatataggtagaggagttgttttttatcttcagcaagagggaagaggaattggtttatcaaataaaattaaagcttatagcttacaggacaaaggattagacactgtagaagcaaatcatcaacttggatttaaagaggatgaaagaacttatgagactgtatcgggaatgataaaatttttagcaataaaaaaattagatctaatgacaaataatccaaaaaaaataaaagctttaaaagatatgggtgttgaagttaatcagagaattccactttcatctgatacaaataaatataatgaaaaatatatttctacaaaaattaaaaaacttggccatttactttaa

SEQ ID NO: 266645 - DNA, 1204 bp, Unknown
  Bacterial polypeptide expressing nucleotide sequence isolated from the Sargasso Sea
aatgataagtgacatagaagttattatcgaaaaatttaaaaaaggtgagatggtcattctcgttgacgatgaagacagagagaatgaaggtgatttaattgtatcttctcagtacctaacacctgaacacattaactttatgataacttatgcaaaaggtcttgtgtgcgcaccaatcgcaaaagatgtagcaacaaagttaaaactttcattaatgcagggtattgataatgaagaagatacacaatttacaacttcagttgatttaatgggagatggggtttcaacaggaatttcagcagatgatagatttaaaacaataaaaggtcttagtgatccaaatgctaccagacaagattttaaagttccaggtcacgtctttcctttgcaggcaatggatggaggagtattaagacgtgctggtcatactgaagcggctgtagacttatgtttacttgcagatcattatccggtagctgttatttgtgaaataataaatgatgatggttcaatggcacgcattgacgatctagtaaatttttcgaaaaaacacgatgtagctattgggacaattaaagacttaattgaatacaaattgaaattaacaaatcctgtgtcttttgtatctaaagcaaaagtaccaacagagtatggtgaatttactgcgcatgtttacaaagacaataatgataatactgagcatattgcactgacatatgagaattacttagaaggtgagtcatcaatggtaagagtgcactctgaatgtttaacaggtgatgtatttagttcaaataaatgtgattgtggataccagttagatagtgcattagaaactattgtaaataatggttccggtgttctactgtatatgagaggacatgaaggaaggggaataggtttaggaaataagattaaagcatactcattacaagatgaaggtgcggatacggttgaagcaaacattcaacttggttttgaaatggatcaaagagattatggaactggtgccctgatactcagagatttaggaattacgaatatgaatttactcacaaataatccaagcaaaagagcaggtttagaaggttttggtttaaatattgtaaaaagaacaccacttaagggaaagacgacaccagagaatacttcatatcttgagacaaaagaaaacaagatgggtcataattttaatgaagaataa

SEQ ID NO: 266646 - DNA, 1204 bp, Unknown
  Bacterial polypeptide expressing nucleotide sequence isolated from the Sargasso Sea
aatgataagtgacatagaagttattatcgaaaagtttaaaaaaggtgagatggttattctcgttgacgatgaggatagagaaaatgaaggtgacctagttgtatcttctcaatatcttacacctgaacatataaatttcatgattactaatgcaaaaggactcgtctgtgcaccaatagctatagatgtagcaaagaaattaaaactatctttaatgcaaggtattgagaatgaagaagatacacaatttaccacatctgtagatcttaatggtgatggtgtaacaacaggaatttcagctgaagacagatttaaaactattaaagggttaagtgatccaagttcaacaagagacgattttaaagtacccggtcatgtttttccattgttagccatggatggtggagttttaagacgtgctggacattcagaagcagcggtagatttgtgtttagttgctgaccattatccagtagctgtaatttgtgaaattatcaatgatgacgggtcaatggcaagaatagatgatctgattcaattttcagcaaaacatgacctagccattggaactataaaagatttaatagagtatcgcttaaagctaaccaatccagtaagtttggtatcgagtgcgaaaattccaacagactttggtgaatttactgcccatgtatacaaagataataacgacaatacagagcatattgcactaacctataaaaattatctagagggtgaatcatctatggtaagagttcattctgagtgtcttacaggtgatgttttcaattcaaataaatgtgactgtgggtatcaattaaacaatgcaatggagacaattgttcaaaatggttctggtgttattttgtatatgagaggccacgaaggtcgaggtataggtctaggaaataagataaaagcctacgcactccaagataaaggtgatgatacagttgaggctaatttaaaattaggttttgaaatggaccaaagagactacggaacaggagcacttattcttagagatttaggaattacaaatatgaatttattaacaaacaatcccagtaaaagagcaggtcttgaaggttttggtttaaatattgtaaagagaactccattaaaaggtaaaataacgaatgaaaattcttcataccttgacactaaagaaaacaaaatgggtcataattttaatgaagaataa

SEQ ID NO: 266647 - DNA, 592 bp, Unknown
  Bacterial polypeptide expressing nucleotide sequence isolated from the Sargasso Sea
atgtcagataaattaaagtttattgaaactagtaaacttccaacagatattggagagttcactgtacatgcctttacagatgaaaatgaatctaaagatcatttagcaatatgtatgggtgacttgcttactaatgagccagttttatcaagaattcattcgcaatgtattacaggagaatctttttttagtatgagatgtgattgtagattccaactaactgaatcattaaaacaaattgctcagattggaagaggtgtcattttttatctccaacaagaaggaaggggtattggtctctcaaataaaattaaagcatatagtttacaagacaaaggactagatactgttgaagctaatcatcaattagggttcaaagatgatgaaagaacatatgaaaatattgctggaatggtaaaatatttagcaatcaaagaattagatttgatgaccaataatccaaaaaaaataaaagcgcttgaagatatgggtatcaaagtaaatcaaagagttcctattttctcaaacaccaataagtataatgaaaaatatatctcaactaagaaaagtaaacttggtcatttaatttaag

SEQ ID NO: 266648 - DNA, 1090 bp, Unknown
  Bacterial polypeptide expressing nucleotide sequence isolated from the Sargasso Sea
aatgaagttcgacagcgtagaggatgctatcgaagatatccgccgagggcggatggtcatcgtggctgatgatgaagacagagagaacgagggtgacctcgtgatggcagcttcgatgattacaccgcaggcagtcaacttcatggcggaacacggacgtgggttaatctgcgtcacaatgttgccggacctcgctgatcagttagatctgcctctgatgacagatcgcaacactgatcctcatcaaacagccttcacgatttcagtggatgcgcatacgaagtatggcgtaactactggcattagcgcccaggatcgggcgaagacaatcgaattactagcaagcgaagagacggtgccggaggattttcgtcggccgggccatgtctttccgctaagagcaaagcccgggggcgttctgcgcagagtcgggcagaccgaggcttctgttgacttggcccttttagctgggttgcctccagttggtgtgatctgtgagatccttgacgcggacggcactatggcgcgtcgtccgaagctggaagaattcgccgctgagcacgaactcaagttcatcacggtggcacaactagttcgttaccgcttgacccggacgaggctcgtagagcggatcgccgtcgcaagtatgccaaccgcttatggtgatttcgatattatcggctacagcactgcgatggacggacgagagcatatcgccctagtgaaaggtaatctggatgaggtggataacgttttagtgaggatgcactccgagtgtctgacgggcgatgtgtttggctcgaagcgttgtgattgtggagaacagcttcaagcagcgctgcggcagatcgatgaagaaggtgccggagctatagtctatcttcgtcaagagggccgaggtatcggattaggaaacaagttgaaggcatatcatctgcaagatggcgggttggatacagtagaggccaacgaagagcttggttttaaacccgatcttcgggattatggaatcggggcacagatccttctggacttgggaattcaatcaatgcggttattaacaaacaaccctcggaaggtggtggcctga

SEQ ID NO: 266649 - DNA, 564 bp, Unknown
  Bacterial polypeptide expressing nucleotide sequence isolated from the Sargasso Sea
tatggatatagaaaaattacctaaatcaaagttaccaatgccttggggcgaattcaatgttataggttttacagaccatgatggcgaggaacacttagcgatttacttaggggatatttctgaaaatcctctattaagaattcattctcaatgtttaactggtgacgcacttttcagtttaaggtgtgactgcggtccacaacttgcaatggcattagaaaaaatagcatcagatggaaatggtattgttatttatatggctcaagaaggaaggggcataggattaataaacaaaataagggcctatgagcttcaagatcaaggaatgaataccgctgaagcaaatgaaaagcttggtttcgctgctgacgaaagagaatatgcattttgtgcagaaatactaaattctttaggaatttcttctgtgcgcctgatgacaaacaacccttcaaaaatcaaaggtcttgaagatgctgggataaaagtatccgaaagaatagctatacaagcaaaaccaacagatgaaaataaagagtacttaaagattaagtctaagtatatagg

SEQ ID NO: 266650 - DNA, 619 bp, Unknown
  Bacterial polypeptide expressing nucleotide sequence isolated from the Sargasso Sea
tatgaccatccagataaggaccccggaagaaccaacagaaattgacgccgacgcattcctcccgacggagttcgggaacttcaggattagagtcacggtggacgaagacgggaatgagcactgcctagtgtacgcaggtgatcttcagagcgcagatgcccctctgatcagaatccattccgaatgcctgactggtgatgcattcagttcaatgaagtgtgattgcggaccacagctccaggcctcactaaagcagatccaggaagaagggtgcggagcagtagtctaccttcgtcaagaggggagggggatagggcttcactccaagatacaggcatacgcccttcaggaccaaggttacgatacgctagatgcgaatctcgcactcggactgcctgctgacgctaggacctacggaatagcggctagaatgctcaaagaggcaggagtcagaaaggtcaggatgatgaccaacaacccgttgaaggtgagggggctcgaggagaacgggatcaaggtcgagtttcgtctaccccatatgagcggggtttccgtacagaacatagactatctcaggacgaaaaacgaacggatggggcacatgctcgaactagagtag

SEQ ID NO: 266651 - DNA, 1726 bp, Unknown
  Bacterial polypeptide expressing nucleotide sequence isolated from the Sargasso Sea
aatgaaagaaacaagtcccaaatcaaataatggaacaattttggatataaatgaatcttttaaaattgaatttgatcctatcagcgacgcgttggcagctataaggaatggtgaatgcataattgttgtagatgatgagagaagagaaaatgaaggagatttaatatgtgcggctcaatttgcaactccacagcaaattaattttatggctactgagggacgtggtcttatatgcctagccatgcaaggtgaaaaacttgactctttagatttaccattaatggtagatagaaatacagatgaaaatcaaacggcttttacgatatcaattgatgctgggcctgaaaataatgttactactggaatttctgctgaagatagggcaaagacaattcaagttgctataaaccctaatacaaaacccgatgatttgagaaggccaggacatatttttccattaagagctaagaaaggcggagtattaaaaagagcaggtcatactgaagcggcagtagatattgcggcaatgtcaggtctttatcccgctggagttatttgcgaaatacaaaatcctgatggttccatgtcaagacttccacaacttaaagagtatgcaaaacagtggggaatgaaattaatatccatagctgatttaattagttatcgttttcaaactgagagatttgtatttagaaaatctgatgcggtacttccaagtatttttggtaatttcaaagcttatggatatgttaatgaacttgatggttcagagcacgttgcattagttaaacaaaaatcatcaaatttaagcgagcctgtacttgtaagaatgcattcagagtgcttaactggcgatgcttttggatcattacgatgtgattgtagaccccagttagaggcggctttatcaaggatagaaaaggaggaagagggggttgttgtttacttgagacaagaaggtagaggtattggtctaataaataaattaaaagcttatagtttacaagatggtggattagacactgtagaagctaatgaaaaattaggttttccagctgatcttagaaattatggagttggagcacagatattaaccgatctagggataaaaaaattaaaattacttacaaataatcctagaaagattgctggattaggtggttatggaatagaggttattgagagagttccattagtaatttgtccaaacgataataatgcagaatatttgagtgtaaaaaaaacgaaattaggccacatgatagatgaagataatcctaattccagtaatatcgatccatttatttcaatttttcttgacggagaatataaatcaattgatctagtaccaataaaaaataacgttattaaattctgtaatgaaaataatatcaatattaaactagagagtacaccaagattattagctttttggaatcgaccaaaattagtttggcgaattttgcatgatcagaacagaaccaattccaacattactgatgaagaaataaaaaatatagaattatttattcagtttttatccaattatcgaaatagtacaaagattggaattattgtttctagaaatattgaacaagcattacacccaaaaaatagtatcaaattaatccatactaaatttactatcaataatgaattattattttcatctacaagaaaatttaatctagataaagagacatttagtattgtttttgagggctaa

SEQ ID NO: 266652 - DNA, 829 bp, Unknown
  Bacterial polypeptide expressing nucleotide sequence isolated from the Sargasso Sea
ctggtctatttttccattgttggaaaagaaggtggagtgttgagaagagctggtcacactgaagccagcattgatttatcagtcttagcagggctaaaaccgagtggtgttatatgtgaaataatggcagatgatggtactatggcaagagggaaaatgctttataattttgctaaaaaacattctttgaaaataatctcgatcgaagatttaattcgatatcgaagaaagaatgaaaagcttgttgaaaaaattgaagctatacgccttccaacggaatatggagattttacccttcacttatacgaagataaatttgataattctactcatcttgcattaacaatgggaagctatacaactcaagattctgtactggtgagagttcactcagaatgtttaactggagatgtatttcaatcgcaaaggtgtgattgtggtgagcagcttgaaatggctatgcatcaaatcagcgaaaacaaatcaggaattattgtttatctaagacaggaaggtcgtggtatcggtcttaagcacaagataaaagcttacaagctgcaagagaaaggaatggatacagttgaggcaaacaataaattaggattttctgctgatctaagagattatggagttggtgctcagattttaaaagatcttgatgcaactaaactaacaataatgacgaataatccaaaaaagctaatcggtcttgaaggacatggactaactattgttgatagaaaaccaattaaaatccctccaaagaaaaaaaataaaaaatatttagaaactaaaaaaaataaacttggacatattttagatttatgat

SEQ ID NO: 266653 - DNA, 586 bp, Unknown
  Bacterial polypeptide expressing nucleotide sequence isolated from the Sargasso Sea
attgaatagctgtaaatttgcatccgaatcaaaactgccaacaaagtttggcgagtttaagatctctacttttgaagaaccttgtggcaaggatcatattgctttgaccattggagatattcaaaatgaggaaacagttatgtgtagagttcattctgaatgcttaactggagatgcattgcatagtcttagatgtgattgcggcccccaattgcaagcagcgcttaagatgttatctgaaaataagtcaggcatccttttatatttacgtcaggaaggcaggggcattggtttggtaaataaaattcgggcttacgcgcttcaagatcaaggtcatgatacggtagaagcaaatgaaatgttgggttttccagctgatttaagagaatacaatatatgcttggatattcttaagcacttcaatattacctcagtgaatctattaacaaataatccaaaaaaagtaagtgctttggaagaagttggtattagagtcgcgcaaagaacttctcttcatgaaggagaaaatgataaaaattctgaatatctggatactaaaagaaataagatgggacatctaaggtaa

SEQ ID NO: 266654 - DNA, 688 bp, Unknown
  Bacterial polypeptide expressing nucleotide sequence isolated from the Sargasso Sea
agattaaaagattgtgaaaaatttgctaaaaaacataagattaaaatcgcaactattgctgatttgattagttacagattaaaaaaagaatcatttgtgtcactttatgctaaatgtaatttgccaactgattatggagaattcacttgctattcttttgacagcgagattgataataagactcatctagcttttgtaatgggcaatattaaagctaataaagaatatttagtaagagttcattcagaatgcctaacgggcgacttatttggttctaaaaggtgtgattgtggaagccagctacataaagcaatggaaattatccagaaagagggagaaggagttctactttatctacgacaagaaggtagaggtataggtattagcaaaaagattaaagcttattctttacaagaagagggattagatacagttgaggctaatcatgcacttggatttaatgaagatttaagagagtacggaactggcgcacaaatattgagagaccttggcctaaagaaaattaagcttttaaccaacaatcctagaaaagttgcaggcttagatggctacggaattaaaattataaaaactgtaccaattgaaactgttcccgttaaagagaatttgaaatatctaaaaaccaagaagaataagttaggacataagctcagcttggtagaataga

SEQ ID NO: 266655 - DNA, 967 bp, Unknown
  Bacterial polypeptide expressing nucleotide sequence isolated from the Sargasso Sea
aatgaaatttgattcaataacctcagctgtggaagatatcaaaaacggtaaatgtattattgttgttgataatgaagatcgtgagaatgaaggcgaccttgtggcagcatcagaactttgcactccagacatgataaattttatggcaaaagaaggtcgaggcttgatttgcgtatctatagaaaaaaatcgcgctaagaaattgaaccttgagccaatggaaagaaaaaattcaagccttcatgaaacaaacttcactacaagtgttgacgcaaataaaaatactactactggaatttcagcttttgatagatcggaaactgtgcgagcattaattgatagctcaacaatatcaagcgacctagcaagacctggtcatatttttccaattgtaggaaaagaaggtggagttttaagaagagctggtcatactgaagctagtatagatttatcattattagcagggctaaggccaagcggggtaatatgcgaaataatggctgatgatggctctatggctcgaggaaaagaattgcatcgttttgctttgaagcataatcttaaaatcatatccattgaagacctcattcgctataggagaaaaaatgatcaattggttaacaaaattgaagagatatcccttccaacggattacggtgattttaaactgcatctgtttgaagatgtgtttggcaatgcttcccatctggcattaactatgggtaaaataaacaaaaatagctcaacgcttgttcgggtgcactcagagtgccttaccggtgatgtatttcattcttttcgttgtgattgcggtgatcaacttgataatgcattaagacaaatcagtcaaaacaagtcaggtattttagtctacttaaggcaggaaggcagaggaataggattggagcacaaaatcaaagcatataagcttcaagaagatggaatggatacggtggaggcaaacaat

SEQ ID NO: 266656 - DNA, 1201 bp, Unknown
  Bacterial polypeptide expressing nucleotide sequence isolated from the Sargasso Sea
atgaactttgattcaatttcctctgctataaaagaaattaagaaaggtggaatggtcatcgttcttgataatgaagatagagaaaatgaaggtgatttagtaatggcatctgatgcagtaagctctgcgaacatcaactttatggctaaagagggtagaggattaatttgtatttctgtttctaagcctagagcaaaaaaactagatcttgaaccaatggaacaaagaaatacaagcttgcatgaaactgcatttaccgtaagtgtagatgctgttaagggaacaacaactggtatttcagcctccgatcgatgcaagacaattaaaacaatagtaagtgatagaactaaaccttctgatttggctagaccagggcatatttttcctatagttggaagaaatggaggtgttttacgaagagctggtcatactgaagcaagtatggatcttgcccaacttgcaggcttttctagaagtggagttatttgcgaaattataggtgatgatggtgaaatgcttagggggactgaccttatgaaatttgcaaaaaaacataacctaaaaataatttcaattgaagacctaataagatttagaagaaaaaaagaaagtattgttcaaaaactagaagaaattaaactaccaacaaaatttggtgattttgatttacatatgtatgatgatatatataataataaagtacattttggattaacatatggaaaaatcaatccaaaaaaaccaatactcacacgagttcattcagaatgcctcactggagatatattccattccttacgatgtgattgtggaagtcaattagactttgcaatgaataaaattgttgaaaaaggctctggaatcattgtctacttaagacaagaaggaagagggattggaattgaaaataaaattaaggcatacaagctccagcaagaaaaaaatttagatactgttgaagctaataatgctttaggatttaaagctgatttacgagattatggggttggggctcagattttgaaagatttaggagcaaaggaattaattattatgacaaataacccaaaaaaacttattggtctagaagggcacgatttaaagatttcagaaagaattccagttaaaattaaacctacaaagcataatgaaaagtatttatctattaaaaaaacaaaacttaatcatatcttagactaat

SEQ ID NO: 266657 - DNA, 598 bp, Unknown
  Bacterial polypeptide expressing nucleotide sequence isolated from the Sargasso Sea
gttgtattttctccgaaggttttcctctgcgcgtattccaacacgagtgggggagttcacggctcattcatacagaaataattttaagaacgaagggaacatagcgttagttttaggtgatgtcacagacatcgatactcctttagtcagagtccattctgagtgcttgactggagatctaattggctctcttagatgtgactgcggttctcaattgcaggtttctttggagatgattggagaagaaggagtcggtattcttatttatttgcgtgggcatgaaggtagaggaattgggttaggtaagaaacttcgggcttataacctgcaagatcaaggaatggacacggttgacgccaatttggagcaaggtttaccagtagattctcgcgactattatttcgcagctgaaattcttcaagacttgggtgtttctaaaataaggcttttgacgaataatccaaagaaaaaaagcgagttagaggatgaaggtatagatgttgtctcgcgtgtgccgttggaaatagctcccactgaggaaaacaaacgttatttagaaacaaaaaagacacgtctgggtcacatccttaacaactaa

SEQ ID NO: 266658 - DNA, 586 bp, Unknown
  Bacterial polypeptide expressing nucleotide sequence isolated from the Sargasso Sea
ttgaatagctgtaaatttgcatctaaatcaaaactgcctactaaatttggcgagtttactatatcttcttttgaagaaccttgtggcaaggatcatattgctttaaccattggagatattcaaaacgaggatacagtaatgtgtagagtccattcagaatgtttaactggagatgcgttacatagtcttagatgtgattgcggtccccagttgcaagcagcaatgaagatgttagctgaaaataaatcaggcatccttttgtatttacgccaagaaggcaggggcattggtttggtaaataaaattagggcttacgcgcttcaagatcagggtcatgatacggtagaagcaaatgaaatgttgggttttccggctgacttaagagaatacaacatatgcttagacatacttcaacacttcaatattacttcagtgaatttattaacaaataatccaaaaaaagtaagcgctttggaagaggttggtattagtgttgcgcaaagaacttctcttcatgaaggaaaaaatgaaaaaaacaccgaatatctaaatactaaacgagataagatgggacatttaagataaa

SEQ ID NO: 266659 - DNA, 1402 bp, Unknown
  Bacterial polypeptide expressing nucleotide sequence isolated from the Sargasso Sea
gttgtagatgatgagagaagagaaaatgaaggagatttaatatgtgcggcacaatttgcaactccacagcaaattaattttatggctactgagggacgtggtctaatatgcctagccatgcaaggtgaaaaacttgattctttagatttaccattgatggtagatagaaatactgatgaaaatcaaacagcttttacgatatcaattgatgctggcccagagaataatgttacaactggaatttccgccgaagacagggcaaagacaattcaagttgcaataaacccaaatacaaaacctgatgatttaagaaggccagggcatattttcccattaagagcaaagaaaggtggagtattaaaaagggcagggcatactgaagcggctgtagatattgcggcaatgtcaggtctttatcccgctggagtaatttgcgaaatacaaaatcctgacggttccatgtcaagacttccacaacttaaagagtatgcgaaacaatggggaatgaaattaatatctatagctgacttaataagttatcggtttcaaactgagagatttgtatttagaaaatctgatgcagttcttccaagtatttttggtaatttcaaagcttatggatatgttaatgaacttgatggttcagagcacgttgcattagttaaacaaaaatcatcaattttaagcgaacctgtacttgtaagaatgcattcagagtgcttaactggcgatgcctttggatcattacgttgtgattgtagacctcagttagaggcagctttatcaaggatagaaaaggaggaagagggggttgttgtttacttgagacaagaaggtagaggtattggtctaataaataaattaaaagcgtatagtttacaggatggtggattagacactgtagaagctaatgaaaaattaggttttccagctgatcttagaaattatggagttggagcacagatattaaccgatctagggataaagaaattaaaattacttacaaacaatcctagaaagattgctggattaggtggttatggaatagaggttattgagagagttccattagtaatttgtccaaacgataataatgcagaatatttgagtgtaaaaaaaacgaaattaggccacatgattgatgaagataatcctaattccagtaatatcgatccatttatttcaatttttcttgacggagaatataaatctattgatctagttccaataaaaaataacgttattaaattctgtaatgaaaataacatcaatattaaactagagagtacaccaagattattggctttttggaatagaccaaaattagtttggcgaattttgcatgatcagaatagaaccaattccaacattactgatgaagaaataaaaaatatagaattat

SEQ ID NO: 266660 - DNA, 595 bp, Unknown
  Bacterial polypeptide expressing nucleotide sequence isolated from the Sargasso Sea
atgagcagcgttaccctcgtggccaaatccaagttgccgaccccctggggcactttcacgctggtaggctttcaggaaaccggcaccggcaaggatcacgccgcactggtgatgggcgatatcacgggtgatgagccggtgctgggccgcattcactccgagtgcctgaccggcgatgccctgttcagtctgcgttgcgactgcggcttccagctgcaggctgcattggaaaacatcgccaaggccggccgcggcgtcttgctgtacgtgcgtcaggaagggcgcggcatcggcctgctcaacaagatccgggcctatcatctgcaggatcaaggcgccgacaccgtcgaggccaacgtggcactcggctttgccgccgacatgcgtgactacaccatctgcgccgacatgctcaagcagctggaggtgaaatccctcaagttgatgaccaacaacccgcgcaagatgaaggcgatggaatccttcggtattccagtggcagagcgggtccccctccaggaagggcgcaatccccacaacgaattctacctctcgaccaaagccagcaagctggatcacatgttcaagaagtgag

SEQ ID NO: 266661 - DNA, 1316 bp, Unknown
  Bacterial polypeptide expressing nucleotide sequence isolated from the Sargasso Sea
cctgaaccccagttcccttgaccccgcgaacgaaccgatcgcgtttgatgccatcagcgacgccctggcggcgatccgcaatggggaatgcgttgtcgtggtggacgacgaacaacgggagaacgaaggcgatctgatctgcgcggcccagttcgccaccccggaagcgatcaacttcatggccaccgaggcacggggcctgatctgtctggcaatggaggggcagcggctggacgaactggatctgccgctgatggtggaccgcaacaccgatgccaacgaaacggccttcaccgtgagcatcgatgccggcaacgagcatggggtgaccaccggcatctccgccgaagaccgcgccgccacgattcaggtggccctcaacccagccacgcggcccgcggaactgcgccgccctgggcacatctttccgctgcgtgcgcgtcccggcggagtgctcaaacgggccggccacaccgaagccgccgtggatctggctcagctggcgggcctcagcccctccggagtgatctgtgaaatccagaacagcgatggctccatggcccgcttgccggagctgcgcagttacgccgatcgctgggggctgaagctgatcagcattgctgacctgatccgctaccggctggagaacgagcgcttcgttcgccgcatggcccaggcccagatgcccagccgcttcggcagctttcaggcggtgggctatcgcaacgaactggatggctccgaacacgttgccctgatcaagggtgagcccaatgccctgtgcgaacccgtgctggtgcgcatgcattccgaatgcctcaccggcgatgccttcggctcactgcgctgcgactgccggccccagctcgaggcggccatgcgccagatcgaagcggagggcgagggagtggtcgtttatctgcgccaggaagggcggggcatcggcctgatcaacaaattgaaggcctacagcctccaggaagccgggctcgacaccgttgaagccaacgagcggcttggcttcccggcggatctgcgcaactacggcgtcggcgcacagatcctctccgacctcggcatccaccggctgcggttgcttaccaacaacccccgcaagatcgccggcctcggcggctatggcctgcaggtggaggagcgggtgccgctggtgatggaccccggtgcccacaacgccgactacctggcggccaagcgagagaagctcgggcatctgttcgaatccgagagtccctgtgtggtgctggccctggcggtgaacgtgggccccgaaagctggcccaccattcgccaggaag

SEQ ID NO: 266662 - DNA, 905 bp, Unknown
  Bacterial polypeptide expressing nucleotide sequence isolated from the Sargasso Sea
aatatcagctcaagatagatcaaagaccataagattaatggttgatgaaaattctaaacctgaagattttgcaaggcccgggcacatatttcctatccttgcaaaagacggaggtatattaagaaggtcaggtcatactgaagctagtttagagctagctgaattagctgggtttaaatctagtggcgtgctgtgtgaaataatggctgaagatggaacgatgcttaggggaaaagatctgcaaaattttgctgacgaacatgatcttaagttaatatcaatcgcagaactcatttcatatgtaagaataaaaaaatccttaattgagaaaatagagacaactaaactgcctactgattatggagattttaccttacatctataccaagataaatttgaaagtaaacaacatattgcacttacccatgggaagatagataaaaaaaatccaactcttatacgagttcattcagaatgtgttactggtgatattttttcatcaaaaagatgtgattgtggagctcagctagatcatgccatgaagaaaattgttgaggctggctcaggtataatcatttatttaaagcaagaaggtagaggaataggtcttaaacacaaaattcaggcatacaagcttcaagatgagggtttagatactgttgaggcaaatgagaagcttgggtttcctcctgatatgagagattatggaacaggagcgcaaattctaaaagaccttggagttactaaactcaatgtgatgacaaataatcctaaaaaattagttggtttagagggtcacggtttagagatatgtgaaagaattaagatcaaaatgcctatagaacctgaaaatgaaagatatttatcgacgaaagaaaaaaaattagggcacatatttgactgat

SEQ ID NO: 266663 - DNA, 1735 bp, Unknown
  Bacterial polypeptide expressing nucleotide sequence isolated from the Sargasso Sea
aatgaaagaaacaagtcacaaaccaaataatggaacaattgtggataataaagaaaattttaatatagaatttgatcccataagcgatgcattagctgccataagaaatggagaatgcataattgttgtagatgatgagagaagagaaaatgaaggcgatttaatttgtgcggctcagtttgcaactcctcaacaaattaactttatggcaacagagggtagaggtttaatatgtttagcgatgcaaggagacaagttagatgccttagatcttcctttaatggttgatcggaatacagatgaaaatcaaacagcatttactatttcaatagatgcaggtcctgagaataatgtaactactggaatatcagcagaggatagagctaaaaccatccaagttgcgataaatccttcaactaagccagaagatttaagaagaccaggacatatatttccactaagagcaaaaaaaggaggagtattaaaaagagctgggcataccgaagccgctgtagatattgctgctatgtctggactttatcctgctggtgtgatttgtgaaattcaaaatccagatggctcaatgtcaagacttccccaacttaagcaatatgcaaaagaatggggaatgaagctcatatccattgcagacctaatcagttatagatttcaaaacgaaagatttgtttatagaaaatctaatgcaatactaccaagtattttcggtaattttaaggcatatggatacataaatgaacttgacggttctgaacatattgcactagtaaagcaaaagtctaataaattaagtgaaccagtattagtaagaatgcattcagaatgtttaaccggtgatgcttttggatcactacgttgtgattgtagaccccagttagaggctgcgttagcaaggattgaaaaagaagaagagggtgtggttgtttatttaagacaagaaggaagaggtattggtttgattaataaattaaaagcatatagtttacaagatggtggtttggatactgtagaagcaaatgaaaaattgggtttccctgcagacctaagaaattatggagttggagcacaaatattaactgacctggggatcaaaaagttaaaactacttacaaataatcctagaaaaattgctggattaggtggatatggaatagaagttactgagagagtcccattagtgatatgtcctggagagcataattctgaatatctaaatgtaaagaggcaaaaacttggccatatgttagaagaagaaaaattaaactctatagatatagatccttatattgcaattttccttgatggtgactataaatcaatagatttagttcctatcaaaaataaaataattgaattttgcgaaaaacataaaataaatattatgttagaaagttctcctagactattagctttttggaatagacctaaattagtatggaaattattgcatgacaaaaacagagaagattccactattaatgataatgaaattaataagattgaaatctttattcaatttttatcagaatataataaaatttcaaaagttggaattatcgtatcaaaaaatattcaacaggctttacatccaaaaaacaatattaaattaaaaaataccaatttttcaataaaaaatgaagaattatactcatccactaggaaatttaatctcgataaagaaacgtttagtattatttttgataagaaattaacttaa

SEQ ID NO: 266664 - DNA, 1312 bp, Unknown
  Bacterial polypeptide expressing nucleotide sequence isolated from the Sargasso Sea
aatgaaagaaacaagtcccaaatcaaataatggaacaattttggatgtaaatgaatcttttaaaattgaatttgatcctatcagcgatgcgttggcagctataagaaatggtgaatgcataattgttgtagatgatgaaagaagagaaaatgaaggagatttaatatgtgcggctcagtttgcaactccacagcaaattaattttatggccactgagggacgtggtcttatatgcctagcaatgcaaggtgaaaaacttgattctttagagttaccattaatggtagatagaaatacagatgaaaatcaaacagcttttacagtatcaattgatgctggacctgaaaataatgttactaccggaatttccgctgaagacagggcaaagacaatacaagttgctataaacccaaatacaaaacctgatgatttaaggaggccaggacatattttcccattaagagctaaaaaaggtggagttttaaaaagggcaggtcataccgaagcagcagtagatattgcagcaatgtcaggtctttaccctgctggagttatttgcgaaatacaaaatcctgacggttccatgtcaagacttccacaacttaaagagtatgcaaaacagtggggaatgaaattaatatccatagctgatttaataagttatcggtttcaaaatgagagatttgtatttagaaaatccgatgctgtacttccaagtatttttggtaatttcaaagcttatggatatgttaatgaacttgatggttcagagcatgttgcattagttaaacaaaaatcatcaaaattaagcgagcctgtactagtaagaatgcattcagagtgcttaacaggcgatgcttttggatctttacgttgtgattgcagaccccagttagaggctgctttatcaaggatagaaaaggaggaagaaggagttgttgtttacttgagacaagaaggtagaggtattggtctaataaataaattaaaagcttatagtctacaggatggtggattagatactgtagaagctaatgaaagattaggttttccagctgatctcagaaattatggagtaggtgcgcagatattaactgatctaggtataaaaaaactgaaattacttacaaacaatcctagaaagattgctggattaggtggttatggaatagaggttattgagagagtaccattagtaatttgtccaaatgataataatgcagaatatttgagtgtaaaaaaaacgaagttgggccacatgattgatgaagataatcctaattccaggaatatcgatccatttatatcaatt

SEQ ID NO: 266665 - DNA, 613 bp, Unknown
  Bacterial polypeptide expressing nucleotide sequence isolated from the Sargasso Sea
atgtcgataaaatatgtcgcgacgtcaaaattacccactccctggggcgtttttgccatgcacggttttgaagataccgaaactggtaaagagcacgttgccctcacgtttggcaccctaagtagcgatgcccctgtattaggccgtattcactctgagtgtcttacgggcgatgccttgttcagcttacgctgtgactgtggcttccagctacaaactgcgatgcaaaacattgccgaaaccggcagtggatttatcttatatttgcgccaagaaggccgcggtattggtctgctgaataagatccgtgcctatgaattgcaggataaaggcgccaatacggttgaggcgaatgagcaattaggtttcccggcggacatgcgtaaatacgatatgatccaacctatgcttgaacaaattggcgtgaagcatgtacgcttaatgaccaataaccctcgcaaagtcaaagcgatgaaagaaatcggcatcgaagtggttgaacgtgttcccctgcaagtcggtaaaaaccgctacaatgaagcttacttaaagactaaatccaccgaacttgggcatatgatgtctgagtatcattttacggatgaagagtaat

SEQ ID NO: 266666 - DNA, 613 bp, Unknown
  Bacterial polypeptide expressing nucleotide sequence isolated from the Sargasso Sea
catgtcgataaaatatgtcgcgacgtcaaaattacccactccctggggcgtttttgccatgcacggttttgaagataccgaaaccggtaaagagcatgttgccctcacatttggcaccctaagtagcgatgctcctgttttaggccgtattcactctgagtgtctcacgggcgatgccttattcagcttacgctgtgactgtggattccagctgcaaaccgcgatgcaaaacattgccgagaccggcagtgggtttatcttatatttgcgtcaggaaggtcgtggtattggtctgctaaataagatccgcgcctatgagttgcaggataaaggcgccaatacggttgaggcgaatgaacagttaggtttccctgcggacatgcgtaaatacgatatgatccagcctatgcttgagcagattggcgtaaagcatgtacgcttaatgaccaataatcctcgcaaagtcaaagcgatgaaagaaatcggcatcgaagtggttgagcgcgtacccttacaagtcggtaaaaatcgctataatgaggcttacttaaagactaagtccactgagcttgggcatatgatgtctgagtatcattttacggatgaacagtag

SEQ ID NO: 266667 - DNA, 607 bp, Unknown
  Bacterial polypeptide expressing nucleotide sequence isolated from the Sargasso Sea
gctgggagaggtgcctgccgatgctcacctgcccacagagcatggaaatttcagaatcagagtgtttcacgaggaggagactggtctggatcacgttgccctactcctaggggacatggggggtccagaccccgtgctggtgagagtacactcagaatgcctaaccggggatgccttcgggagtcttaggtgcgactgtggccctcagttacaaactgccctcagaatgatacaagatgtgggttgggggtgtctggtgtaccttcgccaggaagggagggggataggtctgcatgccaagatccaggcgtataacctacaggaccgaggagttgacacactagatgccaatctaatgctaggtcacccagccgatgctagagactacgggatagcctcagagatccttgattcagtggggatagagaaggtaaacctgatgaccaacaatccagacaaagttgagcagctttctgaatatggcataaacgttgtagagaggatggcaatagtagccggagtaggggaaggaaacttggattatctatccaccaaggctacgagaatggggcatcaaatcagcaaagataacctggagaagcagtag

SEQ ID NO: 266668 - DNA, 1081 bp, Unknown
  Bacterial polypeptide expressing nucleotide sequence isolated from the Sargasso Sea
cctgcgagcccggcccggtggggtgctcaaacgtgcgggccacaccgaagcagccgtggacctggcgcagctggcgggactcaccccgtcaggtgtgatctgcgagatccagaacagtgatggctctatggcccgtctccctgaactgcgtgcttatgccgacacctggggattgaagctgatcagcatcgctgagttgatccgctaccgactcgaaaatgaacggtttgtgcgacgacaggcccatgcggagctgcccagtcagttcggttccttccaggccatcggctatcgcaatgaactggatggctcggagcacgtcgccctcgtcaaaggcgaccctgcctccctgcgggaaccggtgctggtgcgaatgcattcggaatgtctgacgggtgatgccttcggctctctgcgttgcgattgccgccctcagctggaggcagcactgcggcagatcgaacgcgaggaggagggcgttgtggtgtatctgcgacaggaaggccgtgggatcggtctgatcaacaaactgcgcgcctacagcctgcaggacggcggcttggacactgtggaagccaatgaaaggcttggatttccagctgatctgcgcaattacggggtgggggcccagatcctcacggatctcggcatccatcgcctgagactcctcaccaacaacccgcgcaagatcgccggtctcggagggtatggccttcaggtggaagaacgggtcccccttgtgatggacgccggtgatcacaacgccgagtacctggctgccaagcgcgacaagctcggtcatctcatggacagtgatgggccctgcaccgttctcgccctcgctgtcaacgactcgaccgacagccttccagccatccgcgcacgggtggaagacctcgctcgaatccacgggcaggccttggaggcactgcatgagcctcgcctgcttgccctctgggaccgaccacagttcgtctggaaactcacccccgatgtcgcgaatccaatggcactgctcaaggcaatcgcagagctggaatcgagccgacggattggcttactgcggggaacaccgaacgca

SEQ ID NO: 266669 - DNA, 540 bp, Unknown
  Bacterial polypeptide expressing nucleotide sequence isolated from the Sargasso Sea
attgaatagttgtaaatttgtctctgaagcatcattgcctacaaaatttggtgattttactatttcggcatttgaagagcctaatggtaaagatcacatagcattaactattggcgatatctataataaagatactgtgatgtgcagaatccattctgaatgtttaactggagatgcgttgcatagccttaggtgtgattgtgggcctcaattacaatcagcactaaaaatgttggctgaaaataaatctgggattctcttatatttgagacaagagggcagaggcattggactggtcaataaaattcgagcatatgctttacaagatcaaggtcatgatactgttgaggctaatgaattattaggttttcctgcagacttaagagaatataatatttgcttagatataatgcagcatttcaatattaactcagtgaatctcttaacaaacaatccaaaaaaagtagatgctctagaggaggttggcataaaggttgaaaaaaggacctctcttcatgagggtgccaatgaaaaagatca

SEQ ID NO: 266670 - DNA, 592 bp, Unknown
  Bacterial polypeptide expressing nucleotide sequence isolated from the Sargasso Sea
aatgtcagacaaattaaagtttattgaaaccagcaaacttccaacagatattggagagttcactgtacatgcctttacagatgaaaatgaatctaaggatcatttagcaatatgtatgggtgatttgcttaccgatgaaccagttttatcaagaattcattcgcaatgtattacaggagaatctttttttagtatgagatgtgattgtagatttcaactaactgagtcattaaaacaaattgctcagattggaagaggggttattttctatcttcaacaagaaggaagaggcattggtctttcaaataaaattaaagcatatagtttacaagacaagggactagacactgttgaggctaatcatcaactaggttttaaagatgatgaaagaacatatgaaaatattgctggaatggtaaaatatttggcaatcaaagaattagatttgatgaccaataatccaaaaaaaataaaagcgcttgaaaatatgggtatcaaagtgaatcaaagagttcctattttctcagacaccaataagtataatgaaaaatatatctcaactaagaaaagtaaacttggtcatttaatctaa

SEQ ID NO: 266671 - DNA, 1222 bp, Unknown
  Bacterial polypeptide expressing nucleotide sequence isolated from the Sargasso Sea
attggataataaaccacctgctagcaaacaaattaaatctgttgaaactgccattgagtactttaaaaaaggtaagatggtaataatagttgatgatgaaggtagagaaaatgagggtgacctagcattacccgctcaagattgtactccagataacattaactttatggcaactattgctagaggattgatatgcacaccattagatggagatattattgataatctagagcttgaacccatggtaactagaaatactgaatcaatgggtactgcatttaccgtttctgtagatgcatcttctggaattgaatcaggaatttcagctaaggacagatcaaatactgttaggaaattaagcgatacaaaatctactagagaagattttgtaaaacctggacatattttcccattaagatatcaaaaaggtggagtattagtaagagcaggacacactgaaggatctgtagatttagtaaaattatccgggaaaagacctgctgctgtcatatgtgaagttatgaatgaagatggaactatggcacgaatagatgatctaaaaaaagtctcgggaaaatacaatcttcctatagtttctattgaagatattattgcctacagaatagcaaaagaaaatttggtttcaatagtatcagaagctaagcttccaacaaaattcggagaatttaccgcatatgggttcaaatctgaagtagataaatctgaaccaatagctttagtcaaaggtaatatagacaagaataaacctactttggttagagttcattcagagtgtgctactggagatttattaggatccttaagatgcgattgtggagatcaattagaattagccttagaaaaaatttctaaagcagaagctggagtatttgtttacatgaggcaagaaggtagaggcattgggctaattaataaattaagagcttataatttacaagatgaaggattagatacagttgatgcaaatctctctcttggatttccaatggacttaagaaactacggtattggagcacaaatactaagaaatcttggtgtaaagaaatttgatttattgactaataatcccaaaaaagtagttggtcttgaaggatttggtttagaaataaattctacggtaaatatatctgctgaaaaaagacctgaaaataaaaaatatttagagacaaaaaaaacaaaaatggggcatgaaattgagtaa

SEQ ID NO: 266672 - DNA, 616 bp, Unknown
  Bacterial polypeptide expressing nucleotide sequence isolated from the Sargasso Sea
atgagtagcaaacagcctaaatacgaatatgtcagtaccgcaaaattacccactcgcatgggtgattttaaaatacacggctttgttgaagccagcggccaagagcacgttgccctttcttatggagagtggaaagaagacgacgtagtgccaattcgtatccattcagaatgcttaacaggcgattctttatttagcactcgctgtgactgtggctttcaattagaaaaagccatgcaaaatatcgtcgataatggtcacggtgtgcttttataccttcgccaagaaggtcgcggtattggtcttttaaataaaattcgcgcctacaaccttcaagatagcggcatggacacggtagaagctaacgaacatcttggatttgacgccgatttaagaagttacgatatctgcaagctgatgctagatacgctgaatgtgaagcatgttgagcttatgacaaacaacccgaaaaagttggcagcactaaaagcgcttggtatagacgtggttgcacgtaagcctattgaccacggtatcaccaaagacaacaagcattacttaaagacgaaaacagaaaagcttgggcacgctttcgacccccacgttttcaaataga

SEQ ID NO: 266673 - DNA, 502 bp, Unknown
  Bacterial polypeptide expressing nucleotide sequence isolated from the Sargasso Sea
aatgtcagacaaattaaagtttattgagactagtaaacttccaacagatattggggagttcactgtacatgcctttacagatgaaaatgaatctaaagatcatttagcaatatgtatgggtgacttgcttaccgatgagccagttttatcaagaattcattcgcagtgtattacaggggaatctttttttagtatgagatgtgattgtagattccaactaactgaatcattaaaacaaattgctcaaaatggaagaggggttattttttatcttcaacaagaaggaagaggcattggtctttcaaataaaattaaagcatatagtttacaagataagggactagataccgttgaagctaatcatcaattgggtttcaaagatgatgagagaacatatgaaaatattgctggaatggtaaaatatttagcaatcaaaaaattagacttgatgactaataatccaaaaaaaataaaagcgcttgagggtatgggtatcaaagta

SEQ ID NO: 266674 - DNA, 1018 bp, Unknown
  Bacterial polypeptide expressing nucleotide sequence isolated from the Sargasso Sea
tgcagaaattgtgaaacgtcttaacattccattaatggtcagcaacaataatgctactttgggaacaaactttaccatcagcattgaagcatcaaccggcgtaacaacaggcatttctgctgcagatcgtgcacgcacaattaaagttgctattgatacggattctagtgccaaagacatacgtagtcccggacatgtatttccattaagttcactagagggtggagttttgcgaagggcaggacatacagaagctgctgttgatcttgcaaaattggcaaatatgcttcctgcaggtgttatctgtgagattatgaatgaagacggaacaatggcgcgcgtacctgatttaaaaaaattcgctgaccatcatggaattaagatcattacaataaaagacttaattcagtaccggaaacgtaatgaaacgctggtagtcaaaaaagcagaagcatcaatgccctcaatttatggtgattttcaagtgataggatttcaaagtctgctggatgaaagtgattatgtggcacttgtcaagggggattgggatgaagaagagcctgtccatgttcgtgttcattcagaatgcctgaccggagatgttttcggttcatatcgctgtgactgcggtccacagctccatgcggcgatggaattggtggaaagagaaggaaaaggagtaatcctatacttgccgcaggaaggcaggggcattggattgatcaacaagctgaatgcctacagactccaggaagatggagctgacacagttgaagcaaaccataagctgggatttaaagatgatttacgtgattatggaatgggggctcaaatgctttatatgcttggagtccgccgtatgctgttaatgaccaataatccgcgtaaaatagtcggacttcagggacatggactggaagttgttgaaagagtgcctcttgaaattgaaagcaatcccggcaataaaaagtacttgcacactaaaaaatccaaacttggacatatgttaaatgtataa

SEQ ID NO: 266675 - DNA, 886 bp, Unknown
  Bacterial polypeptide expressing nucleotide sequence isolated from the Sargasso Sea
atgataagcgtaagtgaggagtcaaataacttagtacaagatcttattgataactttgaaacatataatattaacttgttaaaaggctttgatgattgcactataatagatgcaggaatcaattgtccaggaagtattgaatgtgggagagttgtatcagaaatatgtttaggtggcttaggaagagttcacttactaaatacgtttcaatcgaaatcttggcctttttcaattcacgttaacactaaacacccagtaatatcatgcttaggctctcaatatgccggttggaatcttaaatcaaatttaaagagtgaaaagtttcaagcattgggttcaggtcctgcgagagcattagctcaaaaagaggagatatttgaccatattaactataaagataaattttcaaggacagcgttggttatggaagttgattcaattccacctgaagatgtcgtaaaaaaaatcatacaggatactggagtagaaggtaaaaatttaacaataataataacaccaacaacaagcatagttggaaatattcaggtagtttcaagagttttagaggttgctttacacaaatcacacgaacttggctttgatttatcaaaaatacttgaggggtttggaagcgcacctatacctccaaattccaatgactttttagaagcaatgggtagaacaaacgacgccattatcttttcaggcgtcattcagctatgggtaaactgtgaagatgaagaagctgaaaaactttgtaaagatcttcctagtagcacttcgcaagattatggaatgccatttgctgatatatttaagaaatacgagtatgatttttttaaaattgatccaaacttgttagcccagcccaagcttttgttataaa

SEQ ID NO: 266676 - DNA, 274 bp, Unknown
  Bacterial polypeptide expressing nucleotide sequence isolated from the Sargasso Sea
cctttaacagtatgtccgctctcaaatgtaaaattaaaagtattcaataaattagaagaacacaacttaaaaaaaatgttagataaaaaattaatggttatggtgaattcagatgatccagcgtattttggaggttatttaaataaaaatttaactgaaactcaagcagctttgaatctttcttatgaacaagtaaaaacgttgcttattaattcgtttaaatcttcgtttttaaaagataacgaaaagaaaaaatggatttctaaaatctaaa

SEQ ID NO: 266677 - DNA, 272 bp, Unknown
  Bacterial polypeptide expressing nucleotide sequence isolated from the Sargasso Sea
cttaactgtttgtcctttatcaaatattaaactttgtgtttttgataaacttgaaaatcataacttaaaagaaatgttagataatggtctaagagtaatggtcaattctgatgatccagcatattttggtggatatttaaatacaaatttaattgaaacttctaaagctttaaacttaagcatggaagatataaaagttttaatagagaattcttttaaatcttcatttttagatgaaataagtaaaaatagttggcttaataagatataat

SEQ ID NO: 266678 - DNA, 406 bp, Unknown
  Bacterial polypeptide expressing nucleotide sequence isolated from the Sargasso Sea
aagaaggaccggcatcttaccatttgggaagccatcgagctattggacgtcgatcgtattgaccacggtgtgcgctgccaagaagacgaggcgcttatggatctcttgaaagaaagacaaattccacttactgtttgtccgttaagtaacctcaagctgtgtgtgataaatgatatgaaagaccacaatattgtccagcttcttgatgctgggcttctggtcacggttaactctgatgatcctacgtattttggtggcttcctaaatgacaattttgaagcgttgcaccagtctctgggtattgacgaaaaaacaattcgtacgttggtagcaaatagctttaaggcaagttttttgccgcaagagcagaaaaaccagcttgttgaaaaggttctttcagcctagg

SEQ ID NO: 266679 - DNA, 277 bp, Unknown
  Bacterial polypeptide expressing nucleotide sequence isolated from the Sargasso Sea
gatccctttaactgtttgtccactttcaaatataaaactttgtatttttaaaaaacttgaagatcataatttgaaaaaaatgctagataaaaagttaatggtaatgataaattctgatgacccagcttactttggtggatatataaataaaaatttgattgaatgtcaaaagtcactaaaactctctatgcatgaggttaaaactttaattattaattcttttaaatcttctttcttaacgaaagaaaagaaaagtgaatggatttcaaaagtttaa

SEQ ID NO: 266680 - DNA, 419 bp, Unknown
  Bacterial polypeptide expressing nucleotide sequence isolated from the Sargasso Sea
tgcacatgctggagaagaaggacatgcgtcttatatttgggaagccatcgagctattggacgttgatcgtattgaccacggtgtacgctgcgaagaagacgaggcgcttatggctcttttgaaagaaaggcaaattccacttaccgtttgtccgttgagcaatctcaagctttgcgtcattgatgacatgaaagaccacaatattgtccaacttttgaatactgggcttttggttactgtaaattcggacgatcctacctattttggtggtttcctaaatgacaacttcgaagcgctacacgagtcgctaggtattgacgaaaaaataattcgcacgttggtagcaaatagctttaaagcaagttttttaccgcaagagcagaaagacgcacttgttgatcaggttctttcagcttaat

SEQ ID NO: 266681 - DNA, 412 bp, Unknown
  Bacterial polypeptide expressing nucleotide sequence isolated from the Sargasso Sea
tatgaataatttagataatataataaattttataaataaggttccaaaggcagaactacatttacatattgagggaagtttggagcctgagctgatgtttaagctatctaaaagaaataaagttgagatccctttcaaatctgtagaagaaattaagtctgcatataattttaaaaatttagactcttttttgaaaatttattatgagggatcgaatgtattgattacagaagaggatttttttgatcttacatgggaatacattttaagatgcaagaatgataacatagtgcatacagaaatattttttgatccccagtcacatacggaaagaggaatagaatttgatttagttatcaatggaattaataaagctttaaaaaaagcaaattctgtttttggcattacatct

SEQ ID NO: 266682 - DNA, 679 bp, Unknown
  Bacterial polypeptide expressing nucleotide sequence isolated from the Sargasso Sea
caggcttacatcccaaggtgttgtcgaagctgtggttgatggtattaaatcagcaacaaagaatgccaatattaaagctaatttaattggtattttgtcgcgtacttatggtgttaaaacctgccaacatgagcttgaagcattacttgcgtttaaaaatgatttagtggctgttgatttagcgggcgatgaaattggctttccgggagagttatttattgagcactttaagcaagtgcgtgatgcgtatttagcgtcaaccattcatgccggtgaagcacttggtgcgcccagtatttggcaagcgattaacgagctaggtgcaagtagaattggccatggtgtaaaagcaattgaagacttaacattaatggattacctgcgtgataaccgtattggtattgagtcatgtttaaccagtaatattcaaaccagtacagttaccgacctagctacgcacccgcttaaacagtttttagatcatggcattcttgcttgccttaatacagatgatccggctgttgaaggtatagaaatagagcatgaatatactattgcagcacccaaggctggtttatctcagactgatatagaaaaagcccaagcgaatgcgttggaaattgcatttttaagcgacggcgataaaaaagcactactagcacaagtgagtgcacgttaa

SEQ ID NO: 266683 - DNA, 843 bp, Unknown
  Bacterial polypeptide expressing nucleotide sequence isolated from the Sargasso Sea
catgataaataaaaactttccattacttgatttacaccgtcatttagatggcactgtgcgtctgcagacgattctggagcttggtcagcaatttaacatttgtttgcctgcttattcgttagagggcttgcgaccgcatgttcaagtaatggagatcgcccccgatttggtgtcatttttagataagcttacttggggcgttaaggtgttaggcagtctcgacgcctgcaaacgggtagcgatggagaatgtagaggatgcagctaagcagggtattgactacacagagctgcgttttagtccttattttatggctgaaagtcacgggctaccaacacaaggtgtggttgaggccgtaatagacggtataaaaagcgcaactaaagatcacgatattaaagttaatctcatcggtattttgtcgcgttcttatggcgcaaaagtatgtcagcatgagctagattcaatcttggcctgtaaagcgcatataactgcaattgatttggcgggtgatgaaaaaggctttcctggcaacatgttcatagagcactttacaaaagtgcgcggcgaagggctgcctatcacaattcatgcaggtgaagcagaaggcccgcagagtatttggcaagccattaacgacttaggtgctgtgcgaatagggcacggcgttaatgccattaatgatgctaagctaatggattatttgcgcgacaaccgtattggtattgaaagctgtttaaccagcaacgtattgacgaacacggtcacatcattaactgagcacccgttaacacctttttggacacggcatactcgcctgtctgaataccgacgacccggcag

SEQ ID NO: 266684 - DNA, 294 bp, Unknown
  Bacterial polypeptide expressing nucleotide sequence isolated from the Sargasso Sea
tattatcaaaaagtcaaattcctttaacagtttgtccgctttcaaacgtaaaactaaaagtattcaataaattagaagaacataacttaaaaaaaatgctagataaaaagttaatggttatggtgaattcagatgatcctgcttattttgggggttatttaaataaaaatttaattgaaacacaagcagctctagatctttcttatgaacaagtaaaaactctaattgttaattcgtttaaatcttctttcttaaaagactcacaaaagaaaaaatggatttctaaaatataaa

SEQ ID NO: 266685 - DNA, 328 bp, Unknown
  Bacterial polypeptide expressing nucleotide sequence isolated from the Sargasso Sea
agttcaatgtcttaaagatgaaaaattaattgaaaaactttctaaaaataaaattcctttaacagtgtgtcctttgtcaaatataaaactaagagtttttgataatttaaaagatcatagtttaaaaaaaatgttagataagaaattaatagcaatggttaattcggatgatccagcttattttggaggttatttaaatcaaaatttaattgaaactcaagaagcgctaaatctgactattgatgatataaaaactttattaattaattcattcaaatcttcatttttaaatgaagaaaaaaaaaaagagtggattaataaaatataa

SEQ ID NO: 266686 - DNA, 334 bp, Unknown
  Bacterial polypeptide expressing nucleotide sequence isolated from the Sargasso Sea
catggtgttcagtgcctcaaagatgaaaaattgcgttgaaatattatcaaaaagtcaaatccctttaacagtttgccctctttcaaatattaaattacgagtttttaattctttaaaagagcataatttaaaaaaaatgttagagaaaaaattaatggtaatggtgaactcagatgacccagcttattttggaggatacctaaataaaaattttattgaaattcaggaagctttaaatctttcttacgaacaagtaaaaacactacttataaattcatttaaatcgtctttcttgatagataaaaaaaagaaagaatggatttccaaaatttaa

SEQ ID NO: 266687 - DNA, 324 bp, Unknown
  Bacterial polypeptide expressing nucleotide sequence isolated from the Sargasso Sea
aatgtttaaaagatgaaaaattagttaaggaactatttaagagtcaaatgcctctgaccgtatgtcctctttcaaatataaaattaaaagtatttaacaaattagaggatcataatttaaaaaaaatgcttgataaaaagttaatggtcatgatcaactcagatgacccagcttattttggtggttatttgaatcaaaacctcatcgaaatacaagcagcattgaatctttcaaaagatgatgtaaaaacattgcttgttaactcatttaaatcttcttttttagaagaagaaaagaaaagcgaatggatttcaaagatttagt

SEQ ID NO: 266688 - DNA, 417 bp, Unknown
  Bacterial polypeptide expressing nucleotide sequence isolated from the Sargasso Sea
tatgaacatagaagagtttataaaaaaatcacctaaagcagagttacatttacatattgagggaacattagaacccgaacttatgttttttttagcaaaaagaaataacatcgagattccttttaaaaatatagatgacgtaaaaaaagcatataattttaataatttagattcttttttaaaaatttattatgagggagctaaagtactaattaaagaacaagatttttttgatcttacatgggcttatatattaaaatgtaaagaggataatatagtacataccgaaatcttctttgatccacaaacccatacagatagaggaattgactttgatattattataaatggaatttttaatgctttaaaaaaagctgaaaaagagtttggtttaagttttaaaataataatgtgctt

SEQ ID NO: 266689 - DNA, 418 bp, Unknown
  Bacterial polypeptide expressing nucleotide sequence isolated from the Sargasso Sea
tcatactgaacgtggtattcctttcaaagcagtgataactgggattcacaatgcccttgaagccgcacgcgaaaaatatggcataacttcatttctgattctttgttttttaagacacctaagtgaaaaagcagcgcttgaaacccttgaagaagcaattcctttcagagaatggattaagggagtaggacttgattcttcagaagtgggattccctccagaaaattttgaacgcgctttcgccagagctgcagaacacggattccgaaaagttgcacatgccggtgaggaagggccgccggaatatatttggaactctctagatgtgctgggagtttcacggatagatcatggagtaagatgtacagaagatcaaaaactggctggaacgtattgtacatggagaaaatacctttga

SEQ ID NO: 266690 - DNA, 319 bp, Unknown
  Bacterial polypeptide expressing nucleotide sequence isolated from the Sargasso Sea
catggagaaaatacctttgaccgtctgcccactttcaaatattaaactacgagtatttgaaaaaatggaaaaccacaacctgaaaaaaatgcttgaaaagggaattcgagtaaccatcaattcagatgaccctgcatatttcggaggttacattaatcaaaatttttttgcagtacaacaggccctaaagctgaatgaaaatgaaattgttgagattgctaaaaacggattccgctccagctttctgccgcaggaaagtatagaaaaacatcttgaaagcattgaagagtttacttttaagttaaaaaattcaacttga

SEQ ID NO: 266691 - DNA, 721 bp, Unknown
  Bacterial polypeptide expressing nucleotide sequence isolated from the Sargasso Sea
tttgccctggcggaaaggaatcgggttgatctgccttacaactcggttgaagagctaagacaggcgtatcagtttaccaacctgcagtcttttcttgacatctattacgcgggagccagggttctgctggttgagcaggatttttacgatctcacctgggcttatctgacgcgcatgcaggaacagaatgtcaagcatgtggaaatcttttttgatccccaaacccatgccgaaagaggagttgcaatctccactgtgattgaaggcattgattctgccctgaaggatgcaagacgggagtatggaatttcttcctacctgatcctctgttttttacgtcacctcagcgaagaggatgccttcaagacactggaggaggctcttccgttccgtgaaaaaatcattggtatcgggctcgattcctcggaagtggggcatcctccggagaaatttcagcgtgtcttccagcgtgcttccgaagagggtttccggcgtgtcgctcatgccggagaagagggacctccggaatacatcatcggggcgttggatcttctgggagtggaacgcattgatcatggcgttaagtgtgaaaaagatcccgaactgctccgcaggctggcggaatcaaggatgccccttaccgtctgcccgctttccaatacccgtctctgcgtctttgaaaaaataaaggaccacaaccttaaacgacttctggatgcgg

SEQ ID NO: 266692 - DNA, 325 bp, Unknown
  Bacterial polypeptide expressing nucleotide sequence isolated from the Sargasso Sea
cattgttcatgaagaaatacctttaactgtttgcccgctttcaaatgtcaagctgcgtgtttttaacaaaatggaagaccataacctaaagaaaatgcttaacaagggaattcgggtgaccatcaattcagatgatcctgcgtatttcggaggttatataaatcaaaattttattgaagtacaaaaggcccttaaacttaatcaaaatgagatcatagaaattgccaaaaacggattccgctctagcttcctgcctcaggaaattataaatatgcatcttgacagcattgatgaatttgctaatcgtgcaataaaatcatcttga

SEQ ID NO: 266693 - DNA, 430 bp, Unknown
  Bacterial polypeptide expressing nucleotide sequence isolated from the Sargasso Sea
atgacatctactaatcttaaagaaatcattcaaggaattccaaaggccgaactccaccttcatattgaaggaagttttgaacccgaactcatgtttgagattgccaaacgaaacaacatttctttagattacgactctgtagaatctcttaagaaagcatataaatttaacaacctccaagaattcttagacatctactatataggtgcaaaagttttgatccacgaacaagacttttacgatttaacatgggcttatttaaaaaaagtgcacagccaaaatgtggttcatgtggaagtgttttttgaccctcaaacacatacagatagaggagttggttttgatactgttataaacggcatatacaaagcattagaaaaagctaagaatgaattaaacatttcattcaaactcatcatgtcttattaag

SEQ ID NO: 266694 - DNA, 484 bp, Unknown
  Bacterial polypeptide expressing nucleotide sequence isolated from the Sargasso Sea
atgaatataaaagaatttataaaaaaatcaccaaaagctgaattacatttacatattgaaggaacactagaacctgaacttatgttttctttagcaaaaagaaataatattaagattccttttaacaatatagaagaagttaaaaaagcatataatttcagtaatttagattcttttttaaaaatatattacgaaggtgcaaaagtattaataaaagaacaagatttttttgatcttacatgggattacattttaaaatgcagagaagacaatatagtgcatactgaaattttttttgatccacaaactcatacagatagaggaattgattttgaaactgttataaatggaatttttaatgcattaaaaaaaggtgaaaaagaatttggtttgagttttaaaataataatgtgttttttgagacatttaaatgaagacgagtgttttaaaattttagataaagctatagcacacaaagataaga

SEQ ID NO: 266695 - DNA, 839 bp, Unknown
  Bacterial polypeptide expressing nucleotide sequence isolated from the Sargasso Sea
tttgaaaattactgatagtgttctaaatcaacttccaaaagttgagcttcattgtcacttagatgggagtctaagaatagagactatcatcgatttagctaaaaagaataaaattaacctaccatacactaataaaaaggaccttcaaaaagcgctgtcaattggtaaaaaacgtgtcacacttgaagagtatatagctcgatttgatataaccttaagcgttatgcaaacgccttcggcactgaatcgaattgcctatgaacttattgaagatgtctcaaaagaaaatgtaagatacattgaagttcgatactctcccattctccacacaaaaaatggaatgacattagaagaagcaattatttcagttcgtaatggtttggaaaagggaaaaaaagattttggcgttaaatcaggtataattatatgtggaattcgtcatatctctccacaagcctcattaaaattagctgatctatgtgtaaagtttaagaacaaaggtgttgtaggttttgatttagcaggtgccgaagaaaattttcccgcaaaagatcatagagaagcattttatatgatcttaaacaataatattaatgcaactatacatgctggagaagcatttggtccttcatcaattcatcaggcaattcatcattgtggtgctcacaggattggtcatggaactagattaaaagaagatttagatcttatggaatatgtaaacaatcatagaattacaatggaagtctgccttacttcaaactggcatactttctctgtaaaatcgttaaaacaacatccatttaaattttattatgataaaggtatcagggtaacat

SEQ ID NO: 266696 - DNA, 1072 bp, Unknown
  Bacterial polypeptide expressing nucleotide sequence isolated from the Sargasso Sea
aatgaaagtaaataaatcacttctccaaaaacttcctaaagttgaactccattgtcatcttgatggttcattaagaatccctacaattatagatttagccaatcaggataaaataaatatacctacctctaacccggataaattatccaaacttttgactattggcaaaaaaagaggatcattagaagattatattaaaaggtttgatatcactttgagtgtaatgcaaacgcctgaagcactcgagagaacttcttatgagctaattgaagatgtttttaaagaaaacgttcgttatatagaaataagatattctcccattctccatacagaaaaagggatgacaattagtgactcagttgaggctgtaagaaaaggtttaaaacgcggtgaaaaagattttggtgttaaatcaggtatcattgtatgtggaataagaaatatatcttcggaagcatccctaaagcttgcagacttaactgtccgatacaaaaatagaggtgttgttggatttgatcttgctggagctgaagaaaattatcctgctaaggatcatcgggaagcattttatatgattttgaataataatattaatgcaaccattcatgctggtgaagcatttggtcctagttcaatccatcaagcaattcatcattgtggagctcatcgaattgggcatggaacaagacttaaagaggataaagatttaatgaattatgtaaatgaccaccgcataacattagaagtatgtttaacatccaattggcaaacaagatctatacgatcattaaaatttcatcctttaaagtactactatgatcaaggtattcgagttactctaaatacagataataggttaatgtcgggcactaatctcactaatgaatatctacttgcccatgaattatttggatttaaactacatgattttagagaaatgataattatggctatcaaaagtgcgtttattccatataatgaacgaaaaaaaataattggagaaattgcaaatgaattagagcaggaatttggtctgatgcctgaatttgttcaaagaaaaccatcgttataa

SEQ ID NO: 266697 - DNA, 1066 bp, Unknown
  Bacterial polypeptide expressing nucleotide sequence isolated from the Sargasso Sea
gatgcagtctatttcttatgaattgatcacccaactaccaaaagttgaactccattgtcatttagatggtagcatacgaactcagtctatattagaacaagcagaaatagataaagtaaaactcccttttcataattacaatgagctagatacataccttcggattggtaagaaacgcgggtcattagaggattatataaaaagatttgatgttacactaagtgtaatgcagactccccaatcacttttccgctttgcttatgaattgatcgaagatgtagctaaagaaaatgtccgatatattgaagtacgttactcacctatacttcatactaataaagggatgaccttagataatgcgattgactgtgtgcaaaaggggcttaaaaaagggcaaaaagaatttggagtcaaatcgggtattattatttgtgggataagacatatttctcctgatacatcattaaaactagctgatcttgcagtacgttataaaaatcgtggtgtcgttgggtttgatctcgcaggtgcggaagaaaactttcctgccaaagagcatagagaagcattttaccttatcaggaacaataatatcaatgctactatacatgcaggtgaagcatttggaccctcatctattcaccaagctatacatcagtgtggcgctaatcgaattgggcatggtacaagactaaaggaagataaggacttaatgaattacgttaatgaccatcgaataccattagaagtatgcctgacctctaactggcagacaaaaagtgttcgattattaaaatatcatccagtaaaggaatattttaagcaaggcataagagtgacattaaatacagataatcggctgatatctgacacaacattaacaaaggaatttatgttggcacataatctatttcagtttgggcttaatgactttagagagattaccataatcgctatgaaaagcgcatttatgaaacatagtaacaggataaaaatggttcaatcaatagctaatgaatttgaaaaagattttggtcttcatccagaattcattagtaaaaaataa

SEQ ID NO: 266698 - DNA, 666 bp, Unknown
  Bacterial polypeptide expressing nucleotide sequence isolated from the Sargasso Sea
ttgattttgatattgttatcaatggaatttttaaagctttaaaaaaagctgagaaagagtttggtttaagttttaaaataataatgtgctttttaagacacttaagtgaagatgagtgttttaaaattttagataaagcactagctcacaaagataaaatttatggggttggtttagactcatctgagaaaggtaatcctcctaaaaaatttgaaaaattattcaaaaaagcattggaaaatgaatttattacagttgctcatgctggcgaagaagggccttcagaatatatttgggaagctttaaatctattaaatgttcatagaattgatcatggagttcaatgtcttaaagatgataagttagtcgaagtattatcaaaaagtcaaattcctttaacagtgtgcccactttcaaatgtaaaactaaaagtgtttaataaattagaagaacataacttaaaaaaaatgctagataaaaaattaatggttatggttaattcagatgatcctgcttattttagtggttatttaaataaaaatttaattgaaactcaagcagctctggatctttcttatgaacaagtaaaaactctacttgttaattcttttaaatcttccttcttaaaagatacagaaaagaaaaaatggatttccaaaatataaa

SEQ ID NO: 266699 - DNA, 539 bp, Unknown
  Bacterial polypeptide expressing nucleotide sequence isolated from the Sargasso Sea
gatgttcaagatcccccccatctccgccgagcgcctgcccagcctgctgcgtgccatgcccaaggccgagctgcacatccacatcgagggctcgctggagcctgagctgatctttgcgctggcgcagcgcaacgggctgacactgccctatgccagcgtggacgccttgcgcagcgcctatgcgttcaccaacctgcagagctttctggacatctactacgcgggcgccagcgtgctgctgcatgagcaggacttctacgacatggcgcgcgcctacctgggccgcgcggcgcgcgacaacgtgctgcacgccgaactcttcttcgacccgcagacccataccgcacgcggcgtgcccatggagaccgtcatcaacggtctgcaccgcgcctgcgaggacgcccgcgccgaactgggcatcagcgccacgctgattttgtgtttcctgcgccacctgagcgaggagtcggcgtttgagacgctggagcaggccatgccgctgctcgacaagatcgtgggtgtggggctcgattccagcg

SEQ ID NO: 266700 - DNA, 478 bp, Unknown
  Bacterial polypeptide expressing nucleotide sequence isolated from the Sargasso Sea
tatggaaccgggattcattgaggggattcccaaagcagaacttcacctgcacatcgaaggttcgctcgaaccggaactgatgtttgccctggcagaaaggaatcgggttgatctgccttacaactcggttgaagagctaagacaggcgtatcagtttaccaacctgcagtcttttcttgacatctattacgcgggagccagggttctaatggttgagcaggatttttacgatctcacctgggcttatctgacacgcatgcaggaacagaatgtcaagcatgtggaaatcttttttgatccccaaacccataccgaaagaggagttacattctccaccgtgattgaaggcatttattctgccctgagggatgcaagacgggagtatggaatttcttcctacctgatcctctgttttttacgtcacctcagcgaagatgattccttcaagacactggaagaggctctttccgttccgtga

SEQ ID NO: 266701 - DNA, 514 bp, Unknown
  Bacterial polypeptide expressing nucleotide sequence isolated from the Sargasso Sea
tggagtgggtttagactcgtcagaaaaaggaaatccacctaataaatttaaaaaattatttgagctggcaattaaagaaggttttttaacagtggcgcatgctggggaagaaggtccaccagagtatatttgggacagtttagatcttttgaaagtaaaaagaatagatcacggtgttcaatgcctgaatgatgaaaaattaactagtagattaaatattgaacaaatccccttaacagtatgcccattatcaaatgtgaaattatgtgtttttgataaactcgaaaatcacaatttaaagaaaatgttagataaaggtttgagggtaatgattaattcggatgatcctgcttattttggaggttatttaaataaaaatttaatcgaaacatcaaaagcattaaatctagatcttcaagatgttaaactattaattgagaattcttttaaatcttcatttttaagtgaagaagaaaaaataaattggttgaaaaaaataaataatgaaatttaa

SEQ ID NO: 266702 - DNA, 406 bp, Unknown
  Bacterial polypeptide expressing nucleotide sequence isolated from the Sargasso Sea
catgcaggagaagaaggtcctccggagtatattttgggaagctttaaatcttcttaaagtaaaaagaattgatcatggtgtacaatgtcttcaagataaaaaacttgttaaaaaactattacatgatcaaattcctctaacggtttgtcctctctcaaatataaagctttgtgtttttaaaaaacttcaagatcacaatttgaaaaaattattaaataatggactaatggtaatggttaattcagatgatcctgcttattttggaggttatataaataaaaatttaatagaatgtcaggcagcattagatctttctaaggaagatataaaaaaattaataataaattcttttaagtcatcttttttaacagaaagagaaaaaaaagtatggattgaaaaaatttga

SEQ ID NO: 266703 - DNA, 789 bp, Unknown
  Bacterial polypeptide expressing nucleotide sequence isolated from the Sargasso Sea
aggtattaataaaagagcaggatttttttgatcttacttgggcttatgtactaaaatgtaaagaaaataatgtagtgcatacagaaattttttttgatccccaaactcatttaaatagaggagttgaatttgatttagttatcaatggtatttacaaagctctacaaaaagcgaataaagaatttggtttaacatttggaatcatcatgtgttttctacgacatcttgatgagatttctgcgtttaaaatgttggatcatgctttgcttcacaaagacaaaataattggagttgggttggattcttctgaagtaggccatcctccaagaaaatttgaaagagtttttaaaaaagctatagaaaaaggttttttaacagtagctcacgcaggagaagagggaccaccagaatatatttgggaagccttaaattttcttaaagttaaaagagttgatcatggcgttcaatgtcttaaagatcaaaaattagtagaaaaattaaggaatgatcaaattcctcttactgtttgccctctttcaaatataaagctttgtgtttttaataaacttgacgaacataatttaaaaaaaatgttagataaaaaattgatggtaatgataaattctgacgatcctgcatattttggaggttatattaatgagaatttaatagaaagtcagactgccttagatctttctatgaaggaaataaaaactttaattgttaattcatttaaatcatcttttttaaaagaagaaaaaaagaaagaatggattaaacaaatctaat

SEQ ID NO: 266704 - DNA, 535 bp, Unknown
  Bacterial polypeptide expressing nucleotide sequence isolated from the Sargasso Sea
tatgaatatagaagagtttataaaaaaatcacctaaagcagagttgcatttacatattgaaggaacattagaacccgaacttatgttttttttagcaaaaagaaataacatcgagattccttttaaaaatatagatgacgtaaaaaaagcatataattttaataatttagattcttttttaaaaatttattatgagggagctaaagtactaataaaagaacaagattttttcgatcttacatgggcttatatattaaaatgtaaagaggataatatagtacataccgaaatcttctttgatccacaaacccatacagatagaggaattgactttgatattattataaatggaatttttaatgctttaaaaaaagctgaaaaagagtttggtttaagttttaaaatcataatgtgctttttaagacacttaactgaagatgagtgttttcaaattttagataaagcactagctcacaaggataaaatttatggagttggtttagattcatctgagaaaggcaatcctcctaaaaaa

SEQ ID NO: 266705 - DNA, 607 bp, Unknown
  Bacterial polypeptide expressing nucleotide sequence isolated from the Sargasso Sea
aatgtgttttttaaggcatttaaatgaagatgattgttttaaaattttagataaagcactaacccataaagataagatttatggggttggactagattcatctgaaaaaggtaaccctccaaaaaagtttgaaagattattcaaaaaagcattagaaaatgaatttattactgttgctcatgcaggtgaagaaggaccaccagaatatatttgggaagctttaaaacttttaaacgttcgtagaatagaccatggggttcaatgtcttaaagatgaaaaattggttgaaatgttatcaaagagtcaaattcctttaacagtttgtccactctcaaacataaaattaaaagtattcaataaattagaagaacatagcttaaaaaaaatgttagataaaaaattaatggttatggtgaattcagatgatcctgcttattttggtggttatttaaataaaaatttaactgagacacagtcagctttgaatctttcttatgaagaagtaaaaacactccttattaactcttttaaatcatcttttatgaaagacaataaaaaggaagaatggatttctaaaattaatgaaaaaaacaatattatcaattag

SEQ ID NO: 266706 - DNA, 619 bp, Unknown
  Bacterial polypeptide expressing nucleotide sequence isolated from the Sargasso Sea
aatgtttgaacaaattattgattatattaataaaataccgaaagctgagttacatctacatattgaaggaagtttagaacctgaattaatgtttaagttatctaagcgtaacaaagttgagataccatttaaatcagttgaagagataaaatctgcttacaactttactaatttagattcatttcttaaaatttattatgaaggttccaatgttctaattaatgaagaggatttttttgatttaacttgggaatatgttttaagatgtaagcaagataacattgttcatactgaaattttttttgaccctcagtcacatttagttagaggagtgagttttgataaaataatcaatggaattgataaagccttaaaaaaagctgaaaaggaatttaatataacctctaaaattataatgtgttttttaagacatttagatgaggatgcttgttttgatgtattaaatcatgcatgtaatcataaagacaagattatcggcgtaggtttagactcatcagaaaaaggaaatcctccaaaaaaatttaagtcattatttgaaaaagctatagaggaacgttttttaacagtagctcacgcaggagaggaggtcctccagaat

SEQ ID NO: 266707 - DNA, 708 bp, Unknown
  Bacterial polypeptide expressing nucleotide sequence isolated from the Sargasso Sea
tgcgttttagcccatattacatggcgatgaaccataaactaccgattgaaggtgtggttgaagcggtgatcgacggggtgaaagcgggcctgaaagattaccaagttaaaatcaatcttatcgggattatgtcgcgctccttcggccaagccgcttgtactcaggagcttgaaggcctgctcgcccataaacaacatttagtcgcgatggatttagccggcgatgagctaggcttccctggcgaattgtttaacgagcactttaagcgagtgcgagatgctggcttagccattactgcccatgcgggagaagcggcgggttcacaaagtatgtggcaagcgattcaggagctgggcgcgacacgtatcggccatggtgtgaatgcgattcacgatcctaagctgatggaatatctcgctaaacaccgtatcggtatcgaatcttgccctaccagcaacctgcacacgtcgaccgtgtcttcctatgcagaacatcccttcagaacctttatggatgccggtgtgttgataagccttaacactgatgatccaggcgtgagtgcgattgatatcaagcatgaataccgcattgccaagtctgaactgggactaagcgatgctgagctggctcaggtgcaacgcaacggggtggaaatggcgtttttatccgagagtgagcgcaaggcgctgtatgcggctaaagcttaag

SEQ ID NO: 266708 - DNA, 717 bp, Unknown
  Bacterial polypeptide expressing nucleotide sequence isolated from the Sargasso Sea
aatgaataatttagacaatattattgatttcataaaaaaatctccaaaaacagaattgcatcttcatattgagggcagtttggagcctgaattgatgtttaaattatcaaaaagaaataaaattgaaattccttttaaatcagttgaagaaattagatcagcatataattttactaatttggactcttttttaaagatttattatgaaggatctaatgtcttaataaatgaggaagatttttttgatttaacctgggaatatattttaagatgtaagcaagataatatagtacatacagaaatattttttgatcctcaatcacatataccaagaggagtaaattttgataaaattattaatggtattgataaagctttaaaaaaagctgagaaagattttaatattacatctaaaattataatgtgttttttaagacatttggatgaagagtcttgttttgatgtattaaaaaaagcttgtaattataaagataagattgttggtgttggtttagattcatctgaaaaaggtaatccaccaacaaaatttaaaagattatttgagcttgcaatgaaagagggctttttaaccgtggctcatgctggtgaagaaggtcctccagactatatttgggacagtttaaatattttaaaagttaaaagaatagatcatggtgttcagtgtttaaatgatgaaaaaatagtagataaactaat

SEQ ID NO: 266709 - DNA, 448 bp, Unknown
  Bacterial polypeptide expressing nucleotide sequence isolated from the Sargasso Sea
ttatttaagaaagctttagaaaatgaatttataacagtcgctcacgcaggtgaggaaggtccaccagaatatatttgggaagccttaaattttttaaatgttcatcgaattgatcatggagttcaatgtcttaaggatgataaattagttggaatgttgtcagaaagccaaattcctttaacagtatgtccactctcaaatgtaaaattaaaagtattcaataagctagaagaacataacttaaaaaaaatgttagacaaaaaattaatggttatggtgaattcagatgatcctgcttattttggtggttatttaaataaaaacttaactgaaacacaagccgctttgaatctttcttatgaacaggtaaaaacactacttgttaattcgtttaaatcctcatttttaaaagatgtagaaaagaaaaaatggatttctaaaatctaaa

SEQ ID NO: 266710 - DNA, 571 bp, Unknown
  Bacterial polypeptide expressing nucleotide sequence isolated from the Sargasso Sea
atgatattggaagaatttataaaaaaatcaccaaaagctgaattgcatttacatattgaaggaacattggaacctgaactcatgttctctttagcaaaaagaaacaacattaagatcccttttaaaaacataaatgatgttaaaaaagcttataattttagtaatttagactcttttttaaaaatatattacgaaggtgccaaagtattaattaaagaacaagatttttttgatcttacatgggcctatgtattaaaatgtagagagaacaacatagtgcatgctgaaattttttttgatccacaaactcatacagacagaggtatcgattttgacactgttataaatggaatttttaatgcattaaaaagaggcaaaaaagaatttggtttgagttttaaaataataatgtgctttttgagacatttaaatgaagatgagtgttttaaaattttagataaagctcttgcacataaagataagatttttggtgttggattagattcatcagaaacaggcaatccacctaaaaaatttaaaaatttatttaaaaaaggcgttagaaaatgaa

SEQ ID NO: 266711 - DNA, 823 bp, Unknown
  Bacterial polypeptide expressing nucleotide sequence isolated from the Sargasso Sea
cctgcatatcgaggggaccctcgaacccgagctgatgttcgccctcggccagcgcaacggggtggcgctgccctggcccgatgtcgacagcctgcgcgccgcctatgagttcgacggcctgcaatccttcctcgatctctactacctcggcgccagcgtgctcatccacgaacaggacttcttcgacctcacctgggcctatctcgagcgctgcgttgccgatcacgtggtgcacgtggagatctttttcgctccccagacccacaccgcccgcggcgtgccttttgccaccgtgctggggggcatcgagcgggcgttgcaggctggcgaagcagcctttggcatcagctggcggctcatcatgagcttcctgcgccacctgagtgaagaggcggcattcgccaccctggcagaggccatgccgcacctggtgcgcctgcacggggtcggcctcgattcgggggagcagggcaacccgcccagcaagtttgcccgggtctttgcccgggccagggaactggggttgccggtggtggcccacgccggcgaggagggacctgcggactacatctggcaggcgatccgggagctcggggtgcaacgcatcgatcacggggtgcgctgcgtcgaggatccctcgctgctgagctatcttgccgacacacggctgcccctcaccgtctgccccctctccaacgtgcggctcagggtgtttgaccagatggcccaccacaatgtgctgaggctgctggagcaggggctctgcgtcaccgtgaactccgacgatcccgcctatttcgggggatacctgggggccaacttc

SEQ ID NO: 266712 - DNA, 445 bp, Unknown
  Bacterial polypeptide expressing nucleotide sequence isolated from the Sargasso Sea
tttccggcgtgtcgctcatgccggagaagagggacctccggaatacatcatcggggcattggatcttctgggtgtggaacgcatcgatcatggcgttcagtgtgaaaaagatcccgaactgctccgcaggctggcggaatcaaggatgccccttaccgtctgcccgctgtccaatacccgtctttgtgtgtttgaagaaatgaaggatcacaaccttaaacgattactggacgcgggactctgtgtgaccgtcaattccgatgatcctgcttatttcgggggttacatgaatgaaaacctgaccgcagtacagcagggattgaatctgtcaaaggagaatctggtggagttggtgaaaaacggattccgagccagttttctgcctaaaactgcaatcgaatcccgggttcaggcagtcgatgaatatgcctcgaaaaatctgtga

SEQ ID NO: 266713 - DNA, 575 bp, Unknown
  Bacterial polypeptide expressing nucleotide sequence isolated from the Sargasso Sea
gcagacgctggaggccgcgcttccgctgcgtgatcgctttatcggcgtggggctggacagcagcgagctgggcaatccgcccgagaagttcgcccgcgtgtttgaacgctgcaagcaactgggcttgcgtctggtggcccatgcgggagaggaggggccgcccgcctatatctggggcgcattggatgtgctgaacgtggagcgcatcgaccatggagtgcagtcagagcaggatgcgctgctgatgcagaggctggtcaaggagcagataccgctgacggtctgcccgttgtcgaatctcaagctctgcgtgatcaaggacctggccgatcacaatctgccgcgccttctggcggccgggctcaaggtcatgatcaactcggacgaccctgcctatttcggcggctatgtcaacgaaaactacacccagctatttgccgccacgggcatgggcgcgcccgaggcctatcagctggcgcgcaacagcctggaagcgagctttgccagcgaggcgcagaagcaggaatggattgcaggccttgacgaagtgtttcggcagtatgccgcagcttgac

SEQ ID NO: 266714 - DNA, 532 bp, Unknown
  Bacterial polypeptide expressing nucleotide sequence isolated from the Sargasso Sea
atgattttggaagaatttataaaaaaatcaccaaaagctgaattacatttacatatcgaaggaacattggaacctgaactcatgttttctttagcaaaaagaaacaacattaagattccttttaaaaatatagatgatgtaaaaaaagcatataattttagtaatttagattcttttttaaaaatttattatgaaggagccaaagtactaataaaagaacaagatttttttgatctcacatgggcttacatattaaaatgtaaagaagacaacatagtacatactgaaatcttttttgatccacaaacccatacagatagaggaattgaatttgacactgttataaatggaatttttaatgctttaaaaaaggctaaaaaggaatttggtttaagttttaaaataataatgtgttttttgagacatttaagcgaagatgagtgttttaaaattttagataaagcgcttgctcataaagataagatttttggagttggtttagactcatccgaatcaggaaatccgcctaaaa

SEQ ID NO: 266715 - DNA, 810 bp, Unknown
  Bacterial polypeptide expressing nucleotide sequence isolated from the Sargasso Sea
gctgtcatcaataattaaaaacattccaaaggccgaactgcatctgcatatagaaggtagcttaacgcctgaactcatgtggcgcctagctgaaaagcacagtgtatcacttccttatgctagcgtggaagagattgaagccgcatataatttcaaagacttacaaagctttcttgacctctattacgcaggggccggggtattaagagacgaagacgacttcttcatactaatgtgggaatacttaactcggtgcgctgaagaaaatatcgtacataccgaaattatgtttgaccctcaaacccataccgagcggggtataggctttgatgtgttcatgcctggcttcttgcgggctatacaaaaggcagaaactgaatacggcataagtagctatttgatcatgtcctttctacgtcacttacccgaaagcgaagcatatcaaacactggaagcggcaaaaccttattatcagcacattaaagcggtaggacttgatagttcagagttagggcatccgccttctaagtttgagcgcgtattcaaaaaggcgaggtcgctaggtttcaaaattgttgctcacgcgggagaggaagggccagcgtcctatatttgggaagcgattgaactgcttgatgtggaccgcattgaccatggtgttcgctgccaagaagaccaagcacttatggcgtatttaaaggaaaaacaaataccacttaccgtatgcccattaagtaatttgaaactatgcgtgatagacgatatgaaagagcataatatcgtgcagctgcttgatgctggattattggt

SEQ ID NO: 266716 - DNA, 441 bp, Unknown
  Bacterial polypeptide expressing nucleotide sequence isolated from the Sargasso Sea
aaaaagcattagaaaatgaatttattactgttgctcatgcaggcgaggaaggaccgccagaatatatttgggaagctttaaatcttttaaacgttcatagaatagaccatggggttcaatgtcttaaagatgaaaaattggttgaaatgttatcaaagagtcaaattcctttaacagtttgtccactttctaatataaaattaaaagtatttaataaactagaagaacatagtttaaaaaaaatgttagataaaaaattaatggttatggtgaattcggatgatccagcatattttggtggttatttaaataaaaatttaattgaaacacaagcagctttgaatctttcttatgaacaagtaaaaacgctgcttgttaattcgtttaaatcctcttttttaaaagatacagaaaagaaaaaatggatttctaaaatctaaa

SEQ ID NO: 266717 - DNA, 351 bp, Unknown
  Bacterial polypeptide expressing nucleotide sequence isolated from the Sargasso Sea
atgtaaaaagaattgatcatggcgttcaatgtcttaaagatgaaaaattagtagaaaaactttcaaaaaatcaagttcctttaacagtctgccctctatcaaatataaaattaaaagtttttgataaattatacgatcataatttaaagaaaatgttggataaaaaattaatggtgacgattaactcagatgatccagcttattttggaggttatctaaatcaaaatttaattgaaactcaagcagcattgaatctttcctttcaagatataaaaactttattaattaactcttttcaatcttcatttttaagtgaagaaaaaaaacaagagtttatcttaaagatttaaa

SEQ ID NO: 266718 - DNA, 622 bp, Unknown
  Bacterial polypeptide expressing nucleotide sequence isolated from the Sargasso Sea
tatggaaccgggattcattgaggggattcccaaagcagaactgcacctgcacatcgaaggttcgctcgaaccggaactgatgtttgccctggcagaaaggaatcggattgatctgccttacaactcggttgaagagctaagacaggcctatcagtttaccaacctacagtcttttcttgacatctattacgcgggagccagggttttgctggttgagcaggatttttacgatctcacctgggcttatctgacacgcatgcaggaacagaatgtcaagcatgtggaaatcttttttgatccccaaacccataccgaaagaggagttgcattctccaccgtgattgaaggcattgattctgccctgaaggatgcaagacgggagtatggaatttcttcctacctgatcctctgttttttacgtcacctcagcgaagatgatgccttcaagacactggaagaggcctttccgttccgtgaaaaaatcattggtgtcgggctcgattcctcggaagttgggcatcctccggagaaatttcagcgtgtcttccagcgtgcttccgaagaaggtttccggcgtgtcgctcatgccggagaagagggacctccggaatacatcatcggg

SEQ ID NO: 266719 - DNA, 746 bp, Unknown
  Bacterial polypeptide expressing nucleotide sequence isolated from the Sargasso Sea
tatgccgaacaaatcactaaaatctttcatcaatctaatgccaaaagcagagcttcacattcatatcgaaggttctctagagcctgaactgatgcttcgattagcagggaaaaacaagataaagcttccttacgatagcgttgaagatgttagggatgcttactcctttgacaatctccaaagttttctcgatatctactatctgggtgcaaacgtgctccaaacggcggaagacttctatgaactcatgcagaactatctagagaagtgcttggatagcaacatactgcatacagagatcatgttcgacccgcaaacccacatggatagaggtatagcctttgcagcgatgtttcagggttttgaccaagcagttagcgaggcccgcgagaaaggcatgtcgataggtttgatcatgtgttttcttcgtcatctgtccgagcaaagcgcttttgaaactatcaagtcggcctcaccttttaaagatcgtatccaaagcattggtctcgatagtggagagaaaggaaatcccccagcgaaatttacacgcgtatttcaatatgccaagtcacaaggctatcgcctagtagctcatgctggtgaggaaggacccccagcatacgtagcacaagcgttagaaaagctaaaagttgaacggattgaccatggtgttaggtctttggaagaccccaaactcgttgagaccctcgcatccactcgattaccactcacagtttgtcccttgt

SEQ ID NO: 266720 - DNA, 436 bp, Unknown
  Bacterial polypeptide expressing nucleotide sequence isolated from the Sargasso Sea
agcagctgaaaacaactttataaccgttgctcatgcaggtgaggaaggaccaccagaatatatgtgggaagcgttaaatcttcttaatgtaaaaagaattgatcatggtgttcaatgtcttaaagataaaaaattagtagaaaaactgttgaaaaatcaagttcctttaacagtctgtcctctctcaaatataaaattaaaagtttttgataaattgaacgatcataacttaaagaaaatgttggataaaaaattaatggtgacgattaactcagatgatccagcttattttggaggttatctaaatcaaaatttaattgaaactcaagcagcattaaatctttcttttgaagatataaaaactttattaattaactcttttaaatcttcatttttaagtgaagaaaaaaaacaagaatttatcttaaagatttaa

SEQ ID NO: 266721 - DNA, 463 bp, Unknown
  Bacterial polypeptide expressing nucleotide sequence isolated from the Sargasso Sea
aagaaatttaaaaatttatttaaaaaagccttagaaaatgaatttgtaactgttgctcacgcaggggaagagggtccaccagaatatatttgggaagccttaaattttttaaatgttcatcgaattgaccatggagttcaatgtttaaaggatgataaattggttgcaatgttatcagaaagccaaattcctttaacggtatgtccactctcaaatgtaaaattaaaagtatttaataaattagaagaacatagtttaaaaaaaatgttagataaaaaattaatggttatggtgaattcagatgatccagcatattttggaggttatttaaataaaaatttaactgaaacgcaagcagctttgaatctttcttatgaccaagtaaaaacgttgcttgttaattcctttaaatcctcctttttaaaagatacagaaaagaaaaaatggatttctaaaatctaaa

SEQ ID NO: 266722 - DNA, 823 bp, Unknown
  Bacterial polypeptide expressing nucleotide sequence isolated from the Sargasso Sea
ttcctttttcaatgttgatgagataaaatctgcttataattttaaaaatctagaatcttttttaaatattttttatcaaggctctaaagtattaataaaagagcaggatttttttgatcttacttgggcttatgtattaaaatgtaaagaaaataatgtagttcataccgaaattttttttgatccacaaactcacctaaatagaggaattgattttaatgtcgttataaatggtatttataatgcattgcataaagcgaataaagaattcggattaacatttggaattattatgtgctttttgagacatcttgacgaagattctgcatttcaaatgctagaccatgctttggatcataaagataaaataattggaattggattagattcttccgaagtaggtcatcccccaagaaaatttgaaagagtcttcaaaaaagctatagaaaaaggtttttttacagtagcccatgcaggagaagaggggccgccagaatatatttgggaagctttaaatttacttggagttaaaagaattgatcacggtgtgcaatgtcttaaagatcaaaaattagtgaaaaaattaaaaaatgatcaaacccctcttactgtttgtcccctttcaaatgtcaagctttgtgtttttaataatcttaatcagcataatttaaaaaaaatgttagatgaaaaattgatggtaatgatcaattctgacgatcctgcttattttggtggttatattaatgataatttaatagaaagtcagattgctctagatctttctatggatgaaataagaacgttaattattaattcatttaaa

SEQ ID NO: 266723 - DNA, 806 bp, Unknown
  Bacterial polypeptide expressing nucleotide sequence isolated from the Sargasso Sea
ttattatgagggatcaaatgttttagttacggaagaagatttttttgatcttacctgggagtatgttttaagatgtaaacaggataatattgtacatacagaaattttctttgatccacaatcacacataccaaggggaataagatttaatacggttatcaatggaattcataaagcattaacaaaagcaaatactgaatttggaattacatccaaaattattatgtgttttttaagacatttggatgaagaaccttgttttgaagttttagatgaagctgtaaaacataaagataaaattattggagtaggtttagattcatcagaaaaaggaaatcctccagaaaaatttaaaaaattatttgaaaaagcaattcaggaaggttttttaacggtcgcacatgcaggagaagaagggccaccagaatatatttgggatagcttaaatttgcttaaagtaagaagagttgaccatggtgttcagtgtttgagggatgaaaaacttgttcaattgctaaaggaaaaaaatgttccacttactgtttgcccattatcaaatatcaaactttgtgtttttgataaattagaaaatcataacttaaaaaaaatgttagaaaaaggacttagagttatggttaattcggatgaccctgcttattttggtggttatttaaatacgaatttgattgaaacgtcaaaagctctaaatttaagcttagaagatgtaaaattattaattaaaaattcatttaaatcatcattcttagatgaaaaaaccaaaaataattggttgaataaaatttaat

SEQ ID NO: 266724 - DNA, 762 bp, Unknown
  Bacterial polypeptide expressing nucleotide sequence isolated from the Sargasso Sea
ttgatcttacatgggcttatgtattaaagtgcaaagaagacaatgttgttcataccgaaatattttttgatccccaagcacacgtaaatagaggaattaactttgatgtagttatcaatggcatttataaagctcttctaaaagcaaataaggaatttggtttaacatctaagattataatgtgttttttaagacatctagatgagacagccgcatttgaaatattagatcttgctttagttcataaagataaaattgttggagtaggccttgactcttcagaaaaaggtcatcccccaagtaaatttgagagagtttttaaaaaagctatagataatggttttttgacagtggcgcatgctggtgaagaagggccagccgaatatatttgggagtctttaaatcttcttaaagtaagcagggttgatcatggtgtgcaatgtttaagtgatgaaaaattagttaaaaaattacgggatgaacagatcccacttacagtttgcccgttatcaaatataaaacttcgtgtatttaataaacttaaagagcataatttaaaaaaaatgttaaataagggattgatggtaatggtaaattctgatgacccagcttattttggtggttatgtaaacgataatttaattgaatctcaagttgcactaaatttatctaaaaaagaattaaaaacattaattattaattcatttaaatcatcttttttagacaaagaagaaaagatgaaatggatagaaaaagtctaac

SEQ ID NO: 266725 - DNA, 631 bp, Unknown
  Bacterial polypeptide expressing nucleotide sequence isolated from the Sargasso Sea
atgatattggaagaatttataaaaaaatcaccaaaagcagaattgcatttacatattgaaggaacattagagccagagcttatgttttcactagcaaaaagaaacaatattgtaataccttttaaaagtatagatgatgtaaaaaaagcatataattttagtaatttagattcttttttaaaaatatattatgaaggcgcacaagtattaataaaagaacaagatttttttgatctcacatgggcctacatattaaaatgtaaagaagataatatagtgcatactgaaattttttttgatccacaaactcatacagatagaggaattgaattcgatactgttataaatggaatttttaatgctttaaaaaaaggcgaaaaagaatttggcttaacttttaaaataataatgtgttttttaaggcatttaaacgaagatgaatgttttaaaattttagataaagcactggctcataaagataagatttttggtgttggattagattcatcagagacaggcaatcccccaaaaaaatttaaaaatttatttaaaaaagcgttagaaaatgaatttataacagtagctcacgcaggtgaagagggaccaccagaatatattgggaagccttaaa

SEQ ID NO: 266726 - DNA, 880 bp, Unknown
  Bacterial polypeptide expressing nucleotide sequence isolated from the Sargasso Sea
tcaattccttacaaaaattttgaagaagtgaaagctgcttacaattttaaaaatctagattcttttttaaatatttattatcaaggttgcaaagttttaatacatgaaaatgatttttttgatcttacctgggcctatgtattaaaatgtaaaaaagataacattgttcataccgaaattttctttgatccccaagctcatgtcgatagaggcatttcttttgataccgtcattaacggaattagcaaagcacttgataaagctaattcggaatttggtttaacttctaaaattattatgtgttttttaagacatttggaagaaaaatcaggatttaatgttttaaatcaggcgcttaagcataaagataaaatttttggtgttggacttgattcttcagaacttggaaactctccaaaaaaatttgaaaaattatttcaaaaagcaagagaagaaggctttgttcctgttgctcacgctggagaagaaggtccaccagaatatatttgggatagcatcaacttacttaaagttaaaaggattgatcatggtgttcaatgtttaaaagacaataaattagtagaagaattaaaaaaaagacaaattcctttaactgtttgtccattatctaatgtaaaactgtgtgtttttgataaacttgaaaaccataatttgaaaaagatgttaaatcttggtttaagagttatggttaattctgatgatccagcttattttggtggatatttaaatgaaaatttaatcagatctcaattagcacttgatctaaaattggaagatgtcaaaacacttattgtaaattcatttaaatcttcttttttggatagcagaagtaagaataaatggattgagaaaattaatt

SEQ ID NO: 266727 - DNA, 591 bp, Unknown
  Bacterial polypeptide expressing nucleotide sequence isolated from the Sargasso Sea
aaattataatgtgttttttaagacatttagacgaagaactttgttttgatgttttaaaatatgcaataaatcataaagataaaattattggagtaggtttagactcgtcagaaaaaggaaatccacctaaaaaatttaaaagattatttgaggaggcaattaaagaaggctttttaactgttgcgcatgccggagaagaaggaccaccagagtatatttgggatagtttgaacttgttaaaagtaaaaagaatagatcatggagttcaatgtttaaaagatgaaaaacttgtcgaaaagcttaaagaaaaaaacatacctttaactgtatgccctctatccaatattaaattatgcgtttttgataaacttgaaaatcataatttaaaaaaaatgttagataaaggccttagagtaatggtgaattctgatgatcctgcatattttggaggttatttaaatacaaacttaattgaaacatcaaaagctctaaatttaaatttagaagaagtaaaaattttgattagaaattcatttaaatcctcattcttggatgaaaatagtaaaaataattggttgaataagatataat

SEQ ID NO: 266728 - DNA, 694 bp, Unknown
  Bacterial polypeptide expressing nucleotide sequence isolated from the Sargasso Sea
tattttatgggtgaaagtcacgggctaccaactcaaggtgtggttgaggccgtgatagacggtgtagaaagcgcagctaaaaatcacgatgttaaagttaatctcatcggtattttgtcgcgttcttatggcgcaaaagtatgtcagcatgagctagattcaatcttagcctgtaaagcgcatataactgcaattgatttggcgggtgatgaaaaaggctttcctggcaacatgttcatagagcactttacaaaagtgcgccgcgaagggctgcctatcacaattcatgcaggtgaagcagtaggcccgcagagtatttggcaagccattaacgacttaggtgctgtgcgtataggacacggcgttaatgctgttaatgatgctaagctaatggactatttgcgcgacaaccgtattggtattgaaagctgtttaaccagcaacgtattgacgaacacggtcacatcattaactgagcacccgttaacaacctttttggatcacggcatactcgcctgcctgaataccgacgacccggcagttcaaggtgtagagctagatcacgaattctccgttgcagctaagcaagctagccttatgccttctcatattaaacaactgcaagagaatgcgcttgcaattgcttttttaagtgaaagcgaaaaagccgcacttaagcgcaaagtaaactaat

SEQ ID NO: 266729 - DNA, 625 bp, Unknown
  Bacterial polypeptide expressing nucleotide sequence isolated from the Sargasso Sea
cttagtcgccttcttgaagaagcttgactggatggtggccgttctcgctgatttagatgcggtaaaacgtgtcgcctatgaaaacgtggctgatgcggcgttatctggccttgattatgcggagctgcgttttagtccatattacatggcgatgaaccataaactaccgattgaaggtgtggttgaagcggttatcgacggggtgaaagcgggcctgaaagattaccaagttaaaatcaatcttatcgggattatgtcgcgctcttttggccaagccgcttgtactcaggagcttgaaggcctgctcgcccataaacaacatttagtcgcgatggatttagccggcgatgagcttggcttccctggcgaattgtttaacgagcactttaagcgagtgcgagatgcgggcttagccattaccgcccatgcgggggaagcggcgggttcacaaagtatgtggcaagcgattcaggagctgggggcgacacgtattggccatggtgtgaatgcgattcacgatcctaagctgatggaatatctcgctaaacaccgtatcggtatcgaatcttgccctaccagcaacctgcacacgtcgaccgtgtcttcctatgcggaacatcccttc

SEQ ID NO: 266730 - DNA, 520 bp, Unknown
  Bacterial polypeptide expressing nucleotide sequence isolated from the Sargasso Sea
taaagataaaataattggagtaggattagactcatctgaaaaagggaatccgccaacaaaatttaaaaaattatttgaagaagcaattaaagaagggttcttaacagttgcacatgctggagaagaaggtccacccgaatatatttgggatagtttagaccaattaaaagtaaaaagaattgatcatggtgttcaatgtttaaaagatgaaaaattagttaacaaattaaaagagagccaaattcccttaacagtttgtccattatctaatgttaaattatgtgtatttgataaacttgaaaatcataatttaaagttaatgttagaaaaaggtttaaatgtgatggtcaactcagatgatcctgcttattttggaggatatttaaataaaaatttgattgaaacatccatggctttaaatctaaaattagatgaagttaagatattaattgaaaattcttttaaagcatcttttttagatcaaaaaataaaagatgagtggataaagaaaattaattaa

SEQ ID NO: 266731 - DNA, 754 bp, Unknown
  Bacterial polypeptide expressing nucleotide sequence isolated from the Sargasso Sea
agagaatgtagaagatgcggctaagcagggtattgactacacagagctgcgttttagtccttattttatgggtgaaagtcacgggctaccaactcaaggtgtggttgaggccgtgatagacggtgtaaaaagcgcaactaaaaatcacgatgttaaagttaatctcatcggtattttgtcgcgttcttatggcgcaaaagtatgtcagcatgagctagattcaatcttggcctgtaaagcgcatataactgcaattgatttggcgggtgatgaaaaaggctttcctggcaacatgttcatagagcactttacaaaagtgcgccgcgaagggctgcctatcacaattcatgcaggtgaagcagtaggcccacagagtatttggcaagccattaacgacttaggtgctgtgcgaatagggcacggcgttaacgctattaatgatgctaagctaatggactatttgcgcgacaaccgtattggtattgaaagctgtttaaccagcaacgtattgacgaacacggtcacatcattaactgagcacccgttaacaacctttttggatcacggcatactcgcctgtctgaataccgacgacccggcagttcaaggtgtagagctagatcacgaattctccgttgcagctaagcaagctggccttatgccttctcatattaaacaagcacaagagaatgcgcttgcaattgcttttttaagtgaaagcgaaaaagccgcacttaagcgcaaagtaaattaa

SEQ ID NO: 266732 - DNA, 463 bp, Unknown
  Bacterial polypeptide expressing nucleotide sequence isolated from the Sargasso Sea
atttaaaaaattatttaaaaaagcaatagaaaataactttataaccgttgctcatgcaggtgaagaaggcccacctgagtatatgtgggaagccttaaaacttcttaatgttaaaagaattgatcatggtgttcagtgccttaaagatgaaaaattagttgaaaaattatctaaaaatcaaattccattaacagtttgccctctatcaaacataaaattacgagtatttaataaattagaggatcacaatataaagaaaatgttagacaaaaaattaatggttatggttaactcagatgatcctgcttattttggaggatatttaaataaaaatttgattgatacacaggctgcgttaaacctttctgaagatgaagtaaaaacactgcttataaactcatttaaatcttcttttctaaatgaagaaaaaaagagacaatggatttctaaaattcttgattaa

SEQ ID NO: 266733 - DNA, 381 bp, Unknown
  Bacterial polypeptide expressing nucleotide sequence isolated from the Sargasso Sea
ttctgggtgtggaacgcatcgatcatggcgttcagtgtgaaaaagatcccgaactgctccgcaggctggcggaatcaaggatgccccttaccgtctgcccgctttccaatacccgtctttgtgtatttgaggaaatgaaggatcacaaccttaaacgattactggacgcgggactctgtgtgaccgtcaattccgatgatcctgcttatttcggaggttacatgaatgaaaacctgaccgcagtaaagcaaggactgaatctgtcaaaggagaatctggtggagttggtgaaaaacggattccgagccagttttctgcctaaaactgcaatcgaatcccgggttcaggcagtcgatgaatatgcctcgaaaaatccatgaa

SEQ ID NO: 266734 - DNA, 356 bp, Unknown
  Bacterial polypeptide expressing nucleotide sequence isolated from the Sargasso Sea
tttaaacgttcatcgaattgatcatggagttcaatgtctaaaggatgataaattggttgaaatgttatcagaaactcaaattcctttaacggtatgtccactctcaaatgtaaaattaaaagtattcaataaattagaagaacataatttaaaaaaaatgttaaataaaaaattaatggttatggtgaattctgatgatcccgcatattttggaggttatttaaataaaaatttaatcgaaacacaagtagctttgaatctttcttatgaacaagtaaaaacgttgcttattaattcatttaaatcctcttttttaaaagatactgaaaagaaaaaatggatttctaaaatctaaa

SEQ ID NO: 266735 - DNA, 364 bp, Unknown
  Bacterial polypeptide expressing nucleotide sequence isolated from the Sargasso Sea
attggatctccttaaagtagagagaatagatcacggagttcaatgtctgcatgatgaaaaattagtccaaaggttatgcgaggatcaaactcccttaaccgtatgtccactctcaaatattaaactttgcgtttttaataagcttgaaaaacataatttaaaaaaaatgttgaataaaggattgatggtcatgttaaattcagacgatccggcctatttcgggggctatatcaatgaaaatattgttgaatgtcaaatcgcattgaatctttccaaggaagaagttagaactttaattgttaattcatttaaagcttcctttttaaaggaagaaataaaaaataaatggatctcaaaaatttaa

SEQ ID NO: 266736 - DNA, 619 bp, Unknown
  Bacterial polypeptide expressing nucleotide sequence isolated from the Sargasso Sea
ggtgaaaaagaatttcggtttaagttttaaaataataatgtgctttttacgacatttaaatgaggaagaatgttttaaaactttagataaagctttaagacataaagataagatttttggagttggattagactcatctgaaaaaggtaatcctcctaaaaagtttgaaaaattatttaaaaaagcattagagaatgagttcattacagttgctcatgcaggtgaagaaggtcccccagaatatatttgggaggcattaaatcttttaaatgttcatagaattgatcatggtgttcagtgcctcaaagatgaaaaattggttgaaatattatcaaaaagtcaaatccctttaacagtttgtcctctttcaaatattaaattacgagttttcaactctttaaaagagcataatttaaaaaaaatgttagaaaaaaaattaatggtaatggtaaactcagatgacccagcttattttggaggatacttaaataagaattttattgaaattcaagaagctttggatctttctcatgaacaagtaaaaacactacttataaattcatttaaatcttcttttttgaaagacaataaaaaaaaagaatggatttccaaaatttaa

SEQ ID NO: 266737 - DNA, 300 bp, Unknown
  Bacterial polypeptide expressing nucleotide sequence isolated from the Sargasso Sea
accatggcgtgcgtgccatcgaagacgagcggctgatgcagcgcatcatcgacgaacagattccgctgaccgtctgcccgctgtccaacatcaaactctgtgtgttcgagcacatgggccagcacaacatcctcgagatgctcgagcgcggcgtgaaggtgacggtgaactcggatgatccggcctacttcggcggctacgtcggcgagaacttcgccgctctgcacgaacatctgggcatgaccgaagcccaggccaagcgcctggcgcagaacagcctagacgcgcgcctggcctgag

SEQ ID NO: 266738 - DNA, 867 bp, Unknown
  Bacterial polypeptide expressing nucleotide sequence isolated from the Sargasso Sea
gactctcgcgccatttgtacaaattcaggggaaagaaaccagcttagtcgccttcttgaagaagcttgactggatggtggcggttctcgctgatttagatgcggtaaaacgtgtcgcctatgaaaacgtggctgatgcggctttatctggcctcgattatgcggagctgcgttttagcccatattacatggcgatgaaccataaactaccgattgaaggtgtggttgaagcggtgatcgacggggtgaaagcgggcctgaaagattaccaagttaaaatcaatcttatcgggattatgtcgcgctccttcggccaagccgcttgtactcaggagcttgaaggcctgctcgcccataaacaacatttagtcgcgatggatttagccggcgatgagctaggcttccctggcgaattgtttaacgagcactttaagcgagtgcgagatgctggcttagccattactgcccatgcgggagaagcggcgggttcacaaagtatgtggcaagcgattcaggagctgggcgcgacacgtatcggccatggtgtgaatgcgattcacgatcctaagctgatggaatatctcgctaaacaccgtatcggtatcgaatcttgccctaccagcaacctgcacacgtcgaccgtgtcttcctatgcagaacatcccttcagaacctttatggatgccggtgtgttgataagccttaacactgatgatccaggcgtgagtgcgattgatatcaagcatgaataccgcattgccaagtctgaactgggactaagcgatgctgagctggctcaggtgcaacgcaacggggtggaaatggcgtttttatccgagagtgagcgcaaggcgctgtatgcggctaa

SEQ ID NO: 266739 - DNA, 907 bp, Unknown
  Bacterial polypeptide expressing nucleotide sequence isolated from the Sargasso Sea
acgggtattgctttgcctgccgattctttagagactctcgcgccatttgtacaaattcaggggaaagaaaccagcttagtcgccttcttgaagaagcttgactggatggtggccgttctcgctgatttagatgcggtaaaacgtgtcgcctatgaaaacgtggctgatgcggcgttatctggccttgattatgcggagctgcgttttagtccatattacatggcgatgaaccataaactaccgattgaaggtgtggttgaagcggttatcgacggggtgaaagcgggcctgaaagattaccaagttaaaatcaatcttatcgggattatgtcgcgctcttttggccaagccgcttgtactcaggagcttgaaggcctgctcgcccataaacaacatttagtcgcgatggatttagccggcgatgagcttggcttccctggcgaattgtttaacgagcactttaagcgagtgcgagatgcgggcttagccattaccgcccatgcgggggaagcggcgggttcacaaagtatgtggcaagcgattcaggagctgggggcgacacgtattggccatggtgtgaatgcgattcacgatcctaagctgatggaatatctcgctaaacaccgtatcggtatcgaatcttgccctaccagcaacctgcacacgtcgaccgtgtcttcctatgcggaacatcccttcagaacctttatggatgcgggtgtgttgataagccttaacaccgatgatcctggtgtgagtgcgattgatatcaagcatgaataccgcattgctaagtctgaactaggtctaagcgatgctgagctggctcaggtgcaacgcaacggggtggaaatggcgtttttatccgagagtgagcgcaaggcgctgtatgcggcgaaagcttaag

SEQ ID NO: 266740 - DNA, 667 bp, Unknown
  Bacterial polypeptide expressing nucleotide sequence isolated from the Sargasso Sea
atggaaccgggattcattgaggggattcccaaagcagaattgcacctgcacatcgaaggttcgcttgaaccggaactgatgtttgccctggcggaaaggaatcgggttgatctgccttacaactcggttgaagagctaagacaggcctatcagtttaccaacctgcagtcctttcttgacatctattactcgggagccagggttctgctggttgagcaggatttttacgatctcacgtgggcttatctgacgcgcatgcagaaacagaatgtcaagcatgtggaaatcttttttgatccccaaacccataccgaaagaggagttgcattctccaccgtgattgaaggcattgattctgccctgaaggatgcaagacgggagtatgggatttcttcctacctgatcctctgttttttacgtcacctcagcgaagatgaggccttcaagacactggaggaggctcttccgttccgtgaaaaaatcattgggatcgggctcgattcctctgaagtggggcatcctccggagaaatttcagcgtgtcttccagcgtgcatccgaagagggtttccggcgtgtcgctcatgccggagaggagggacctccggattacatcatcgaggcgttggatcttcttggtgtggaacgcatcgatcatggcgttcagt

SEQ ID NO: 266741 - DNA, 565 bp, Unknown
  Bacterial polypeptide expressing nucleotide sequence isolated from the Sargasso Sea
atgagtttattagaatttataaaaaaatcaccaaaagctgagctacatttgcatatagaaggaactcttgaacctgaactaatgtttcgattggctaaaagaaataatattaaaataccatttaacaacattgatgaagcaaaaaaagcatacaactttagtaacttagaatcatttttaaaaatatattatgaaggggctaaagtattaataaaggagcaagatttttttgatttgacttgggcttatgttttaaaatgcaatgaagacaacatagttcatactgaaattttttttgatcctcaaactcatactgacagaggtattaattttaatattgttattaatggaatttataaagctcttaaaaaaggcgagaaagaatttggtttgagttttaaaattataatgtgttttttaaggcatctaaatgaagatgaaggatttaaaattttagatcaagctatagctcataaagataaaatttttggagttggattagattcttcagaaacaggtaatcctccaagtaaatttgaaaaattatttaaaaaagccaattgaa

SEQ ID NO: 266742 - DNA, 852 bp, Unknown
  Bacterial polypeptide expressing nucleotide sequence isolated from the Sargasso Sea
ttaaatctgcatataatttttcaaatttagactcttttttaaaaatatattaccaaggatcaaatgtattaattactgaacaagatttttttgatctcacttgggaatatatcctaaaatgcaaaagagataatattgttcatacagaaatattttttgacccacagtctcatactgaaagaggtgtagaattcgatactgttataaatggaataaacaaagcgttaatgaaagcaaaatctgaatttggaattacctcagaaattatcatgtgttttttaagacacttagatgaggagccatgtttcgaagttttaaagcatgccacaaagcataaagacaaaattattggcgtaggtttagactcatcggaaaaaggaaatcctccccaaaaatttaaaagattgtttgatgccgcaattaaagaaggttttttaacagtggctcatgctggagaagagggtcccccagaatatatttgggaaagtataaatttacttaaagtaaaaagaatagatcatggtgttcaatgtctaaaagacaaaaagcttgtagaaacacttaagaaaaaaaatattcccttaactgtttgtcctctatcaaatattaaactttgtgtttttgataagcttgaaaatcataacttaaaagaaatgttagataatggtctaagagtaatggtcaattcagatgatccagcttattttggtggatatttaaatacaaatttaattgaaacctctaaagcattaaatttaagcatagaagatataaaagttttaattaagaactcttttaaatcctcatttttagacgaaaaaagtaaaaatagttggctgaataagatataat

SEQ ID NO: 266743 - DNA, 295 bp, Unknown
  Bacterial polypeptide expressing nucleotide sequence isolated from the Sargasso Sea
cggacagcgtattggtatcgaatcctgtctgacgtcgaatattcagaccagcaccgtggcatcattgtccgtgcatccgctgaaaacgttccttgagcatggcgtcctcgccagcctgaatacggacgatccggcggtccagggggtggatatcattcacgaatataccgttgcggcaccggcagcaggactgagccgtgagcagattcgtcagacacagattaacggactggaaatcgccttcctgagcgcggcggaaaagcaggtgctgcgagataaagtggcggcggcataa

SEQ ID NO: 266744 - DNA, 1003 bp, Unknown
  Bacterial polypeptide expressing nucleotide sequence isolated from the Sargasso Sea
catgattgacagatctcttcccctgaccgacctgcaccgccatctggacggcaacatccgcccgcagaccatcctcgagctgggccgtcagcacaacattcagttgcccgccttcgagctggaggcgctgcgcccccatgtgcagatcgtcgagaatgaaccgagcctggtcgccttcctcaagaagctggactggggcgtggccgtgctggccgactatgacgcctgccgccgggttgcctacgagaacgtggaagatctgctgcgcgccggtatcgactatgccgagctgcgtttcagcccggcctacatggcgatggcccacaagctgcacccgcagggcgtggtcgaagccatcatcgacggcgtggcagccggcagccgcgacttcggcatcaagaccaacctgatcggcatcatgagccgcaccttcggcaccgagcagtgcaaacaagaactggatgcctgtctggcccatcgcgatcggctggtcgccatcgatctggccggcgacgagctgggcttcccgggcgagctgttcaccgaccacttccgacgggtacgtgatgcgggcatgcgcgtcaccgtgcacgccggtgaagccgccggccccgagagcatgtggcaggccattcgcgagctgggtgccgaacgtatcggccacggcgtcaaagccgttcaggatccgaccctgatggcctatctggccgagcaccgcatcggcatcgagtcctgcctcacttccaacgttcagaccaccacggtggcgagcctgaccgagcacccgatccgccagttcctggccgccggcgtgctggcttgcctcaacaccgacgacccggcggtagaaggcatcgacctgccccacgaataccaggtggcggccccggctgccggcatgacggtgagcgagatccgcaccgcccagcagaacggcctgactctggctttcctgagcgaggccgacaaggccgagctgagtgcccgcgcagcccgccgctga

SEQ ID NO: 266745 - DNA, 562 bp, Unknown
  Bacterial polypeptide expressing nucleotide sequence isolated from the Sargasso Sea
aatggaaccgggattcattgaggggattcctaaagcagaactgcacctgcacatcgaaggttcgctcgaaccggaactgatgttcgccctggcggaaaggaaccgggttgatctgccttacaactccgttgaagagctaagacaggcgtatcagtttaccaacctgcagtcttttcttgacatctattacgcgggagccagggttctgctggttaagcaggatttttacgatctcacctgggcttatctgacgcgcatgcaggaacagaatgtcaagcatgtggaaatcttttttgatccccaaacccataccgaaagaggagtcgcattctccaccgtgattgaaggcattgatactgccctgaaggatgcaagacgggaatatggaatttcttcctacttgatcctctgttttttacgtcacctcagcgaagatgatgctttcaagaccctggaggaggctcttccgttccgtgaaaaaatcattggggtcgggctcgattcctccgaagtgggacatcctccggagaaatttcagcgtgtctttcagcgtgcttccgaa

SEQ ID NO: 266746 - DNA, 1000 bp, Unknown
  Bacterial polypeptide expressing nucleotide sequence isolated from the Sargasso Sea
atgtcgctgtcatcaataattaaaaacattccaaaggccgaactgcatctgcatatagaaggtagcttaacgcctgaactcatgtggcgcctagctgaaaagcacagtgtatcacttccttatgctagcgtggaagagatagaagcggcgtataactttgaagatctacaaagcttccttgacttatattatgcaggggcgggcgtgcttcgcgatgaggatgatttctttgctttaatgtgggaatacttaacgcggtgtcatgaggacaatatcgtccacacagaaattatgtttgatccgcaaacccatacagagcgtgacataggtttcgatattttcatgccaggctttttgaaggcgatggaaaaagcaaaagatgaatacggtatcagtagctatttaatcatgtctttccttcgccatttgccagaagatgctgccttcgatacgctttctgcagcagagccttattacgagcacattacagcggtagggttagacagctccgaacttggtcatccgccgtcaaaattcgaacgcgtattcaaaaaagccaaagcgctgggatttaaaattgtcgcccatgctggagaagaaggaccggcatcttacatttgggaagccatcgagctattggacgttgatcgtattgaccacggtgtacgctgccaagaagatgaagcgcttatggacctcttgaaagaaagacaaattccactcactgtttgtccgttaagtaacctcaagctgtgtgtgataaatgatatgaaagaccacaatattgtccagcttcttgatgctgggcttctggtcacggttaactctgatgatcctacgtattttggtggcttcttaaatgacaattttgaagcgttgcaccagtctctgggtattgatgaaaaaacagttcgtacgttggtagcaaatagctttaaggcaagttttttgccgcaggagcagaaaaaccagcttgttgaaaaggttctttcagcctagc

SEQ ID NO: 266747 - DNA, 718 bp, Unknown
  Bacterial polypeptide expressing nucleotide sequence isolated from the Sargasso Sea
ctgcatttgcatattgaaggtacattggaacctgaacttatgttttttttggcaaaaagaaataatgtagaaattccatttaaaaatattgatgatgtaaaagaagcgtataattttagcaatttagattcttttttaaaaatttattatgaaggagctaaagtattagttgaagaacaagatttttttgatcttacatgggcttacatattaaaatgtaaagaaaacaacatagtacataccgaaattttttttgatccacaaacccacacagatagaggaatagactttgataaagttataaatggaatttttaatgcttttaaaaaaggtgaaaaagaatttggcttgagttttaaaataataatgtgctttttacggcatttaaatgaggaagaatgttttaaaactttagataatgctttaagacataaagacaagatttttggagttggattagactcatctgaaaaaggtaaccctccaaaaaagtttaaaaaattatttaaaaaagcattagagaatgagttcattacagtcgctcatgcaggtgaagaaggtcctccagaatatatttgggaggctttaaatcttttaaatgttcatagaattgatcatggtgttcagtgtctcaaagatgaaaaattggttgaaatattatcaaaaagtcaaatccctttaacagtttgtcctctttcaaatattaaattacgagttt

SEQ ID NO: 266748 - DNA, 766 bp, Unknown
  Bacterial polypeptide expressing nucleotide sequence isolated from the Sargasso Sea
ctgacgcgcatgcaggaacagaatgtcaagcatgtggaaatcttttttgatccccaaacccataccgaaagaggagttgcattctccaccgtgattcaaggcattgattctgccctgaaggatgcaagacgggaatatggaatttcttcctacctgatcctctgttttttacgtcacctcagcgaagatgatgctttcaagaccctggaggaggctcttccgttccgagaaaaaatcattgggatcgggctcgattcctcggaagtgggacatcctccggagaaatttcagcgtgtcttccagcgtgcttcagaagagggtttccggcgtgttgctcatgccggagaagaggggcctccggaatacattatcggggcgttggatcttcttggtgtggaacgcatcgatcatggcgttaagtgtgaaaaagatcccgaactgctccgcaggctggcggaatcaagaatgcctcttactgtctgcccgctttccaatacccgtctctgcatctttgaaaaaatgaaggaccataacctgaaacgacttctggatgcgggactctgtgtgaccgtcaattccgatgaccctgcttatttcggaggttacatgaacgaaaacctgaccgcagtacagcagggactgaatctgtcaaaggaggatctggtggagttggtgaaaaacggattccgtgccagttttctgccgaaaaccgcaatcgaatccaggattcaggcagtcgatgaatatgcctcgaaaaatcggtgaa

SEQ ID NO: 266749 - DNA, 928 bp, Unknown
  Bacterial polypeptide expressing nucleotide sequence isolated from the Sargasso Sea
tgccctggcagaaaggaatcgggttgatctgccttacaactcggttgaagagctaagacaggcgtatcagtttaccaacctgcagtcttttcttgacatctattacgagggagccagggttctgctggttgagcaggatttttacgatctcacctgggcttatctgacacgcatgcaggaacagaatgtcaagcatgtggaaatcttttttgatccccaaacccataccgaaagaggagttgcattctccaccgtgattgaaggcattgattctgccctgaaggatgcaagaagggaatatggaatttcttcctacctgatcctctgttttttacgtcacctcagcgaagatgatgccttcaagacactggaagaggctcttccgttccgtgaaaaaatcattggggtcgggctcgattcctcagaagtggggcatcctccggagaaatttcagcgtgtcttccagcgtgcttccgaagaaggtttccggcgtgtcgctcatgccggagaagagggacctccggaatacatcatcggggcgttagatcttcttggtgtggaacgcatcgatcatggcgttcagtgtgaaaaagatcccgaactgctccgcaggctggcggaatcaaggatgccccttaccgtctgcccgctttccaatacccgcctatgtgtgtttgaaaaaatgaaggaccacaaccttaaacgacttctggacgcgggactctgtgtgactgtcaattccgatgatcctgcttatttcggaggttacatgaacgaaaacctgaacgcagtacagcagggactgaatctgtcaaaggaggatctggtggagttggtgaaaaacggattccgtgccagttttctgccgaaaaccgcaatcgaatcccgggttcaggcagttaatgattatgcctcgaaaaatccgtga

SEQ ID NO: 266750 - DNA, 754 bp, Unknown
  Bacterial polypeptide expressing nucleotide sequence isolated from the Sargasso Sea
atggaaccgggattcattgaggggattcccaaagcagaacttcacctgcacatcgaaggttcgcttgaaccggaactgatgtttgcactggcggaaaggaatcgggttgatttgccttacaactcggttgaagagctaagacaggcatatcagtttaccaacctgcagtcctttcttgacatctattacgcgggagccagggttctgctggttgagcaggatttttacgatctcacctgggcttatctgacgcgcatgcaggaacagaatgtcaagcatgtggaaatcttttttgatccccaaactcataccgaaagaggagttgcattctccaccgtgattgaaggcattgattctgccctgaagaatgcaagacgggagtatggaatttcttcctacctgatcctctgttttttacgtcacctcagcgaagatgatgccttcaagacactggaagaggctcttccgttccgtgaaaaaatcattggggtcgggctcgattcctcggaagtgggtcatcctccggagaaatttcagcgtgtcttccagcatgcttccgaagagggtttccggcgtgtcgctcatgccggagaagaggggcctccggattacatcatcggggcgttggatcttcttggtgtggaacgcatcgatcatggtgttcagtgtgaaaaagatcccgaactgctccgcaggctggcggaatcaaagatgccccttactgtctgcccgctttccaatacccgtctatgcg

SEQ ID NO: 266751 - DNA, 829 bp, Unknown
  Bacterial polypeptide expressing nucleotide sequence isolated from the Sargasso Sea
aggagcagaagttctgaagaagactgaagatttctttgatttgacctgggcatacttgaatagaatacataatgaaaatgtaagacacgtagaaatattttttgatccacagacacatactgaccgaggcatttcttttaaaacagttataactggcattcataaagcactggaagcagcaagagaaaaatttggaattacgtctttcctgatactttgttttttaagacacctgagcgaagaagcagcacttgagactcttgaagaggcactgcctttcagagattggattgagggcgtaggacttgattcttcagaagttggattccctccagagaattttgaaaacgctttcgccaaggcggagaaaaatggatttcgtaaagttgcacatgccggtgaggaaggtcctcctgaatatatatggaactcactggacatacttggagtttcgagaatcgaccatggagtaaagtgtactgaagataaaaaactcttagagcgcatcgttcgagaacaaatacccttaactgtttgcccactttcaaatatcaagctatgtgtgtttgataaaatggaaaatcacaaccttaaaaaaatgcttgaccacggtattagagtgacaattaattcagatgatcctgcatattttggaggctacattaatcaaaattttattgctacacagcgggccctgaagttgagtgaaaatgaaatcattgaaatagcaaaaaacggattccgctccagcttcctgccccaggatagcataaattatcatattgaaaacattgacgaatttgttcgaaaaatgaaaagctcagcttga

SEQ ID NO: 266752 - DNA, 918 bp, Unknown
  Bacterial polypeptide expressing nucleotide sequence isolated from the Sargasso Sea
catattgaaggaacattggaacctgaactaatgttctccttagcaaaaagaaataacattaagatcccttttaaaaatataaatgatgttaaaaaagcttataattttagtaatttagactcttttttaaaaatatactacgaaggtgccaaagtattaattaaagaacaagatttttttgatctcacatgggcctacatattgaaatgtagagaagataacatagtacatactgaaattttttttgacccacaaactcatacagatagaggaattgattttgacactgttataaatggaatttttaatgcattaaaaaaaggtgaaaaagaatttgggttgagttttaaaataataatgtgctttttgagacatttaaatgaagatgagtgttttaaaattttagataaagcactagctcacaagaataagatttttggtgttggactagactcatcagagacaggtaatcctcctaaaaaatttaaaaatttatttaaaaaagctatagaaaatgaatttataacagtcgctcatgcaggagaagaggggccaccagaatatatttgggaagccttaaattttttgaatgttcatcgaattgaccatggagttcaatgtcttaaggatgacaaattggttagaatattatcagaaagccaaattcctttaacagtgtgtccactctcaaatgtaaaattaaaagtattcaataaattagaagaacataacttaaaaaaaatgttagataaaaaattaatggttatggtaaattcagatgatcctgcttattttggtggttatttaaataaaaatttaaccgaaacacaggcagccttgaatctatcgtacgaacaagtaaaaacactgcttgttaattcatttaaatcctcttttttaaaagatacagaaaagaaa

SEQ ID NO: 266753 - DNA, 872 bp, Unknown
  Bacterial polypeptide expressing nucleotide sequence isolated from the Sargasso Sea
tttataaaaaaaactccaaaaactgaattacatttgcatattgaaggtagtttagaacccgagctaatgtttaaactttccaaaagaaataaagttgaaattccttttaaaagtgtagatgaaataagatctgcttataattttagtaatttagatagttttttaaaaatttattatcaaggatcgaatgttttaataactgaagaagatttttttgatttaacttgggaatatatcttaagatgtaagcaagataacatagtacatacagagatattttttgatccacaatcacatttaccaagaggagttagttttaaaactattataaacggtatcaataaagctctaaacaaagctagggatgaattaaatatttcctcaaaaataataatgtgttttttaagacatttagatgaagagtcatgttttgaagttttaaaacaagcatgtaatcataaagataaaattattggtgtaggtttagactcatctgaaaaaggaaatcctcccactaaatttaaaagattatttgaaaaagcaatcaaggaaggtttcttaacagttgcacacgcaggagaggaagggcctccagaatatatttcagatagtttagatattttaaaagttaaaagaatagatcacggtgttcaatgcttgaatgatgaaaaattagttaacagattatcctctgaaaaaatacctctaacagtatgcccattatcaaatgtaaaattatgtatttttgataaacttgaaaatcacagcttaaagaaaatgttagataaaggtttaagagttatggtgaattctgatgacccagcctattttggaggttatttaaatgaaaatttaattgaaatatcaaaagc

SEQ ID NO: 266754 - DNA, 849 bp, Unknown
  Bacterial polypeptide expressing nucleotide sequence isolated from the Sargasso Sea
aatggaaccgggattcattgaggggattcccaaagcagaactgcatctgcacatcgaaggttcgctcgaaccggaattgatgtttgccctggcagaaaggaatggggttgatctgccttacaactccgttgaagagctaagacaggcgtatcagtttaccaacctgcagtcttttcttgacatctactacgcgggagccagggttctgctggttgagcaggatttttacgatatcacctgggcttatctgacacgcatgcaggaacagaatgtcaagcatgtggaaatcttttttgatccccaaacccataccgaaagaggagttgcattctcaaccttgattgaaggcattgattctgccctgagggatgcaagacgggagtatggaatttcttcctacctgatcctctgttttttacgtcacctcagcgaagatgatgccttcaagaccctggaggaggctcttccgttccgtgaaaaaatcattggggtcgggctcgattcctcggaagtgggacatcctccggagaaatttcagcgtgtcttccagcgtgcttccaaagagggtttccggcgtgtcgctcatgccggagaagaaggacctccggaatacatcatcggggcgttggatcttctgggtgtggaacgcatcgatcatggcgttcagtgtgaaaaagatcccgaactactccgcaggctggcggtatcaagaatgccccttaccgtctgcccgctttccaatacccgtctctgcgtctttgaaaaaatgaaggaccataacctgaaacgacttctggacgcaggactctgtgtcaccgtcaattctgatgatcctgcttatttcggggg

SEQ ID NO: 266755 - DNA, 680 bp, Unknown
  Bacterial polypeptide expressing nucleotide sequence isolated from the Sargasso Sea
aatggaaaaattgatcaggggaattccaaaggcggagttgcatctgcatatcgaagggagtttggaaccagaacttatgtttgaactggcagagcgcaatggagttgatatcccatattcttcagttgaggaaatccgtactgcatatgaattcagtgatcttcagtcttttttggatatttattacgcaggagcagaagttctgaagaatactgaagatttctttgatttgacctgggcatacttgaatagaataaataatgaaaatgtaagacacgtagaaatattttttgatccacagacgcatacagaccgtggtattccatttaaaacaattataactggcattcacaaagcactggaagcagcaagagaaaaatttggaattacttcttacctgatactttgttttttaaggcacctgagtgaagaagcagctcttgaaactcttgaagaggcactgcctttcagggactggattgaaggagtaggacttgattcttcagaaattggattccctccagaaaattttgaaaccgctttcgctaaggcagcgaaaaatggatttcgtaaagttgcacacgctggagaggaaggtcctcctgaatatatttggaactcactggacatacttggagtttcgagaatagatcatggagtaaagtgtactgaaaatgaaa

SEQ ID NO: 266756 - DNA, 795 bp, Unknown
  Bacterial polypeptide expressing nucleotide sequence isolated from the Sargasso Sea
ttgatctgactttggcatacctaaaaaaaatgtataacgaaaatgttaagcacgtagaaatattttttgatccacagacccatactgaccgcggcattcctttcagaacagttgtaactgggattcacgatgccttggaagcaggtaaagaaaaatatggtattagttcattcttaatcctatgttttttgaggcaccttagtgaggaagcctcgcttaatacacttgaggaagctttacctttcaaggattggattgaaggagtaggacttgattcctcagaagttgggtttcctccagaaaattttactcgcaccttcagcgtggccgctgaaaatggattacgaaaggtcgcacacgctggggaagaaggtcctccagaatatatctggagctctctggattcactaggagtttcacgaatagatcatggagtgcggtgtacagaagatcaaaaactggttgaacgcattataaaagaacaaatacctttaacggtatgcccgctttcaaatataaagctttgtgtttttgataagatggaagatcacaaccttaagaaaatgcttgatcagggaattcgtgtgaccatcaattcagatgatcctgcatattttggaggatacattaatcaaaattttatttcagtacagcaggcacttaacttaagtgaaaatgaaattattgaaattgccaaaaacggattccgatccagtttccttcctcaacaaaccataaactctcatattgaaagcattgaagaattttcccgtcaggtaaataaatcagcttgaa

SEQ ID NO: 266757 - DNA, 835 bp, Unknown
  Bacterial polypeptide expressing nucleotide sequence isolated from the Sargasso Sea
gagggttcgctggagcccgagctgctgttcgccctggccgaacgcaaccagatcgccctgccctgggccgatgtcgagaccctgcgcgcggcctacgccttcaacaacctgcaggaatttctcgacctgtattacgccggtgccaacgtgctgcgtaccgagcaggatttctacgacctgacctgggcctacctgcaacgctgcaaggcgcagaacgtcatccacgtcgaacctttcttcgacccgcaaacccacaccgaccgtggcattcccttcgaggtagtgctgcgtggcatccagcaggcgctgctcgacggcgagaaacagctgggcatcagccacggtctgatcctcagcttcctgcgccatcttcctgaagaagaggcgttcaagaccctggaacaggccatgccgttccgcgatgccttcatcggcgtcggcctcgacagctcggaaaagggcttcccgccgcgtctgttcgaacgggtgttcgccaaggcacgtagcgaaggtctgcatgcggtggcgcacgctggcgaggaaggcccgcccgagtacatctgggaagcgctggacctgctcaagatcaagcgcatcgaccacggcgtacgcgccatcgaagacgagcgactgatgcagcgcatcatcgacgaacagatcccgctgaccgtctgcccgctgtcgaacatcaagctgtgcgtgttcgaacatatgggccagcacaacatcctcgagatgctcgagcgcggcgtgaaggtgacggtgaactctgatgaccctgcctacttcggcggctacgtcggcgagaacttcgccgccctgcacgaacacctgg

SEQ ID NO: 266758 - DNA, 700 bp, Unknown
  Bacterial polypeptide expressing nucleotide sequence isolated from the Sargasso Sea
tttttttgatcctcaaactcatacaaatagaggaattagttttgatatagtaataaatggaatttataaagctcttaaaaaagcagaaaaaaaatttggcttaagttttaaaattatcatgtgttttttaagacatttaagtgaagaagaatgttttaaaattttagatgaagctcttgctcataaagataagatatttggagttggattagactcttcagagatgggcaatcctccgaaaaagttcgaaaaattatttaaaaaagcagcagaaaataactttataactgttgctcatgcaggtgaagaaggaccgccagaatatatttgggaagcgataaatcttcttaatgtaaaaagaattgatcatggtgttcaatgtcttaaagatgaaaaattagtagaaaaactttcgacaaataaagttcctttaacagtttgtcctctctcaaatataaaattaaaagtttttgataaattacatgatcataatttaaagaaaatgttggataaaaaattaatggtgactattaactcagatgatccagcatattttggcggttatttaaatcaaaatttaattgaaacgcaagcagcattaaatctttcttttgaagaaataaaaactttattaattaactcttttaaatcttcatttttaagcgaagaaagaaaaaaggagtgtattaataaaatataa

SEQ ID NO: 266759 - DNA, 946 bp, Unknown
  Bacterial polypeptide expressing nucleotide sequence isolated from the Sargasso Sea
attgcatttgcatatagaaggaactcttgagcccgaacaaatgttttcattagctaaaagaaataatattcaaattccatttaaaaatattaatgaagcgaaaaaagcatataattttagtaacttagagtcttttctaaaaatatattatgaaggagcaaaagtgttgttaaaagaaaaagatttcttcgaactcacatgggcttatgcattaaaatgtaaacaagacaatattgttcatacagaaattttttttgatcctcaaactcatacaaatagaggaattagttttgatattgttataaatggaatttataaagctcttaaaaaagcagaaaatgaatttggtttaagttttaaaattatcatgtgttttttaagacacttaagtgaagaagagtgttttaaaattttagaccaagctcttgttcataaagataaaatatttggagttggattagactcttcagagatgggcaatcctccaaaaaagtttgaaaaattatttaaaaaagcagttgaaagtaactttataactgttgctcatgctggtgaagaaggaccaccggaatatatgtgggaagcgttaaatcttcttaaagtaaaaagaattgatcatggcgttcaatgtcttaaagatgaaaaattagtagaaaaactatcaataaatcaagttcctttaacagtttgtcctctctcaaatataaaattaaaagtttttgataaattatatgatcataatttaaagaaaatgttggataaaaaattattggtgacaattaactcagacgatccagcttattttggcggttatctaaatcaaaatttaattgaaacacagtctgcattaaatctttcttttgaagatataaaaactttattaattaactcttttaaatcttcatttttaagtgaagaaagaaaaaagaatatatttaataaataa

SEQ ID NO: 266760 - DNA, 514 bp, Unknown
  Bacterial polypeptide expressing nucleotide sequence isolated from the Sargasso Sea
agaaaccctcgaccaggcgctgccgttccgtgacgcgttcgtggccgtcggcctggacagctcggaaatgggccacccaccgagcaagtttcagcgcgtgttcgaccgtgcccgtcacgaaggcttcctgaccgtggcccacgccggtgaagaaggcccgcccgagtacatctgggaagccatcgacctgctgaaaatccagcgcatcgaccacggcgtgcgagccattgaagatgaacgcctgatgcagcgcatcatcgacgaacagatcccgctgacggtatgcccgctgtccaacaccaagctctgcgtgttcgacgacatggcccagcacaacatcctcgacatgctcgagcgtggtgtaaaagtcaccgtgaactcggacgaccctgcctacttcggcggttatgtcaccgagaacttccacgcgctgcacacctccctgggcatgacccaggaccaggccaaacgcctggcgcagaacagcctggatgcgcggctcgtgaaaccgtaa

SEQ ID NO: 266761 - DNA, 856 bp, Unknown
  Bacterial polypeptide expressing nucleotide sequence isolated from the Sargasso Sea
cctgagcaaatgttttctttagctaaaagaaataatgttcaaattccatttaaaaatattaatgaagcaaaaaaagcatataattttagtaacttagaatcttttctgaaaatatattatgaaggagcaaaagtgttattaaaagaaaaagatttttttgatcttacgtgggcttatgcattaaaatgtaaagaagataatattgtccatacagaaattttttttgatcctcaaactcatacaaatagaggaattagttttgatattgttataaatggaatttataaagctcttaaaaaagcagaaaaagaatttggcttaagttttaaaattattatgtgtttcttaagacatttaagtgaagaagagtgctttaaaattttagatcaagctcttgctcataaagataagatatttggagttggattagattcttcagagatgggcaatcctccaaaaaagtttgaaaaattatttaaaaaagcagttgaaaataactttataactgttgctcatgcaggtgaagaagggccaccagaatatatatgggaagcgttaaatcttcttaatgtaaaaagaattgatcatggcgttcaatgtcttaaagatgaaaaattagtagaaaaactttcgacaaatcaagtccctttaacagtttgtcctctctcaaatataaaattaaaagtttttgataaattatacgatcataatttaaagaaaatgttggataaaaaattaatggtgacgataaactcagatgatccagcttattttggtggttatctaaatcaaaatttaattgaaactcaagcagcattaaatctttcttttgaagatataaaaactttattaatta

SEQ ID NO: 266762 - DNA, 707 bp, Unknown
  Bacterial polypeptide expressing nucleotide sequence isolated from the Sargasso Sea
aatggaaccaggattcattgaggggattcctaaagcagaactgcacctgcacatcgaaggttcgctcgaaccggaactgatgtttgccctggcagaaaggaatcgggttgatctgccttacaactcggttgaagagctaagacaggcttatcagtttacaaacctgcagtcttttcttgacatctactacgcgggagccagggttctgcttgttgagcaggatttttacgatctcacctgggcttatctgacacgcatgcaggaacagaatgtgaagcatgtggaaattttttttgatccccaaacccataccgaaagaggagtagcattctccaccgtgattgaaggcattgattctgccctgaaggatgcaagacgggagtatggaatttcttcatacctgatcctctgtttcttacgtcacctcggcgaagatgatgccttcaagacactggaggaggctcttccgttccgtgaaaaaatcattggggttgggctcgattcctctgaagtggggcatcctccggagaaatttcagcgtgtcttccagcgtgcttccgaagagggtttccggcgtgtcgctcatgccggagaagaggggcctccggattacatcatcggggcgttggatcttcttggtgtggaacgcatcgatcatggcgttcagtgtgaaaaagatcccgaactgctccgcaggctggtggaat

SEQ ID NO: 266763 - DNA, 1006 bp, Unknown
  Bacterial polypeptide expressing nucleotide sequence isolated from the Sargasso Sea
atgaacaacttaaatactaacattgattttataaaaaaatctccaaaaacagaattacatctccatattgagggcagtttagaaccagaactaatgttcaagctctcaaaaagaaataaaattgaaattccttttaaatcagttgatgagattagatctgcttataacttcactaatctagatagttttttaaaaatttactacgagggatcaaatgtattaattagagaagaagacttttttgatttaacttgggaatatgtcttaagatgtaagcaggataacatagttcatacagaaatattctttgacccccaatcacatttgccaagaggaataagttttgaaacagttattaatggaattgataaagcattaaaaaaagctgaaaaagattttggtatttcctcaaaaataataatgtgttttttaagacatttagatgaagagtcttgttttgatgtattaaaaaaagcttttgatcataaagataaaataattggagttggtttagactcatctgaaaaaggcaatccaccatctaaatttaaaagattatttgaacaggcagtgaaagaaggatttataacagtcgctcatgcgggtgaagaaggtccaccagaatatatttgggacagtttagatattttaaaagtaaaaagaattgatcatggtgttcagtgtttaaatgatgaaaaactagtaaataaattagtcaaagaacaaatccctctaacagtgtgtccattatctaatgttaaattgtgtgtgtttgataaacttgaaaatcataatttaaaaaagatgcttgataaaggtttgagagtaatggttaattctgatgatccagcttattttggtggttatttgaataaaaatttgattgaaacatcgagagctcttaatcttaatctcgtggacataaaaaaattaattgaaaattcttttaaatcttcttttttagaaaaagaaaaaaaagagaattggttaaaaaaaattaattaat

SEQ ID NO: 266764 - DNA, 1003 bp, Unknown
  Bacterial polypeptide expressing nucleotide sequence isolated from the Sargasso Sea
atgaacaatattgataacattataaatttcataaacaagactccaaaatcggagctgcatcttcatatagaaggaagtttggagccagaactaatgtttaaactttcaaaaagaaataaaattgaaatcccatttaaatcagttgaagacattaagtctgcctataatttttcaaatttagattcttttttaaaaatttattatgaaggatctaatgtattaattacagaagaggatttttttgatttaacttgggaatatattttaagatgtaaaaaagataacatagtacatacggagattttttttgatccgcagtctcatacatctagaggaattaaatttgatataataataaatggaattcataaagctttggccaaagccaatgatgaatttggtattacttcaaaaattataatgtgttttttgagacacttagacgaaaaactttgttttgatgttttaaaagacgccatacagcataaggataaaattattggggttggtttagactcatctgaaaaaggaaatccccctaaaaaatttaaaagattatttgaagaagcaattaaagaaggatttttaactgttgcacatgctggagaggaaggtccaccggaatatatttgggatagtttaaatttgctaaaagtaaaaagaatagatcacggagttcaatgtttaaaagatgatgatcttgttaaaaatcttaaagaaaacaacatacctttaactgtatgtccgctatccaacattaaattatgtgtttttgataaacttgaaaatcataatttaaaaaaaatgttagaaaaaggacttagagtaatggttaattctgatgatcctgcatattttggaggctatttaaataaaaatttaattgaaatttctaaagctttaaacttaaatttagagcaagtaaaagttttgattcaaaattcatttaaatcatcattcttggataaaaaaagtaaaagtaagtggttgagtaaggtataat

SEQ ID NO: 266765 - DNA, 910 bp, Unknown
  Bacterial polypeptide expressing nucleotide sequence isolated from the Sargasso Sea
tatgttttctttagcaaaaagaaataacattaagattccttttaaaaacatcaatgatgttaaaaaagcttatgattttagtaatttagactcttttttaaaaatttattatgaggggtctaaagtactaataaaagaacaggattttttcgatcttacatgggcttacatattaaaatgtagagaagacaacattgtacatactgaaatcttctttgatccacaaactcatacagatagaggaattgattttgatattgttataaatggaatttttaatgctttaaagaaagctgaaaaagaatttggtttaagttttaaaataataatgtgttttttaagacatttaagtgaagatgagtgttttaaaatattagataaagcgctggcacataaagataagatatttggcgttggattagattcatcagagacaggaaatccacctaaaaaatttaaaaatttatttaaaaaagcgatagaaaatgaatttataacagtagctcacgcaggcgaagaggggccaccagaatatatttgggaagccttaaattttttgaatgttcatagaattgaccatggagttcaatgtcttaaggatgacaaactggttggaatgttatcagaaagccaaattcctttaacagtatgtccactttcaaatgtaaaattaaaagttttcaataaattagaagatcacaacttaaaaaaaatgttagataaaaaattaatggtcatggtgaattcagatgatcctgcttattttggtggttatttaaataaaaatttgactgaaacacaagcagccctggatctttcctatgaacaagtaaaaacgttacttgttaattcgtttaaatcctcctttttaaatgatacagaaaagaaaaaatggatttctaaaatctaa

SEQ ID NO: 266766 - DNA, 1027 bp, Unknown
  Bacterial polypeptide expressing nucleotide sequence isolated from the Sargasso Sea
atgaccccgacattcaaggacaagattgcccgcgcgccgaaagcggagctgcacatccatatcgaaggctcgctcgagcccgaactgattttcgcgctggcgcagcgcaacggcgtgaagctcgcgtacgactcgatcgacgcgctacgcgccgcgtacgcgttcaccgacctgcagtcgttcctcgacatctattacgccggcgcgagcgtgctgctgaccgagcaggatttctacgacatgacggccgcgtattgcgaacgcgcgctcgccgacaacgtcgtccacaccgagctgttcttcgatccgcaaacgcacaccgagcgcggcgtatcgatcgagacggtggtcgcgggtatcgagcgggcactcgccgatgccgaacaacgcgggctgtcgagcaagctgatcctgtgcttcctgcgtcatctgtccgaagaggacgcgctcgcgacgttcgaatccgcgctgccgctgttcgagcgctatcgccatcgcctgatcggcgtcggcctcgactcgtccgagctcggccatccgccgacgaagttcgcacgcgtgttcgagaaggcgcgcgcgctcgggctgaagctcgtcgcgcacgcgggcgaggaaggcccgcccgcttacatctacgaagcgctcgacgtgctgaaggtcgacaggatcgaccacggcgtgcgcagcatcgaggacgaggcgctcgtcgagcgcctcgcgaaaacccgcacggcgctcaccgtctgcccgctgtcgaacctgaagctgtgcgtgttcgacgacatggcgaagcacacgctgaaagcgctgctcgatcgcggcgtcgcggtgacgatcaactccgacgatccggcctatttcggcggctacgtcaatgaaaactacttcgcgacggccgaagggctgcaactcacggatgccgaagtccatgcggtgatccgcaacggcttcgaggcgtcgttcatcgaaccggcgcagcgcgacgcactgtacgcgcgcctagacgcgtactggcaggccgcgtgac

SEQ ID NO: 266767 - DNA, 976 bp, Unknown
  Bacterial polypeptide expressing nucleotide sequence isolated from the Sargasso Sea
atggataactttattgccggtctgcccaagctggagctgcacctccatatcgaaggctcgctcgagccggaactgatgtttgccctgggccagcgcaacggcgtggccctgccctggcccgatgtggccagcgtgcgcgccgcctatgagttcgactgtctgcaatccttcctcgatctctactacctgggggccagcgtgctcatcaccgagcaggatttcttcgacctcacctgggcctatctggagcgctgcgccgccgacaaggtggtgcacgtggagattttcttcgacccccagacccacaccgcccgcggcgtgcccttcgccaccgtgctgggcggcatcgagcgtgcgctgcagcgcggagagtgggagtttggcatcagctggcggctcatcatgagcttcctgcgccacctgagcgaggaggatgcctttgccacgttggcagaggccactcccttcctgtcgcgcattcacggcatcggcctcgactcgggggagaagggcaacccgcccagcaaatttgcccgggtctttgcccgctgccgcgagctggggttgccggtggtggcccacgccggcgaagaggggccggcggactacatctggcaggccatccgggagcttgaggtgcggcgcatcgatcacggggtgcgctgcgtcgatgatcccgatctgctgcgctatctggccgatacccggctgccgctcaccgtctgccccctctccaacacccgtctcaaggtgtttgaccagatggcccaccacaacgtgctggcgctgctggagcaggggctgtgcgtcaccatcaactccgacgatcctgcctattttggcggctacatgaatgccaacttccacgccctggcccatgaactgggggccagcatgaaccagctttgccgcttgtcactgaacgcggtggaggcgagctggctgagcctggccgacaaggcgcggctgacccggg

SEQ ID NO: 266768 - DNA, 805 bp, Unknown
  Bacterial polypeptide expressing nucleotide sequence isolated from the Sargasso Sea
tatgagggagctaaagtactaataaaagaacaagattttttcgatcttacatgggcttatatattaaaatgtaaagaggataatatagtacataccgaaatcttctttgatccacaaacccatacagatagaggaattgactttgatattattataaatggaatttttaatgctttaaaaaaagctgaaaaagagtttggtttaagttttaaaatcataatgtgctttttaagacacttaactgaagatgagtgttttcaaattttagataaagcactagctcacaaggataaaatttatggagttggtttagattcatctgagaaaggcaatcctcctaaaaaatttgaaaaattatttaaaaaagcatcagaaaatgaatttattacagttgctcatgctggcgaggaaggaccgccagaatatatttgggaagctttaaatcttttaaatgttagtagaattgaccacggtgttcaatgtcttaaggatgaaaaattagttgaaatattaacgaaaaaccaaattcctctgacagtttgccctttatcaaacataaaattaaaagtttttaatactcttgaagatcataatttaaaaaaaatgttggaaaaaaaattaatggtaatggttaactcagatgatcctgcatattttggtggatatttaaataaaaattttattgaaatacaaaaagccttgaatctttcttatgaagaaataaaaacacttcttgcgaattcttttaaatcatcttttatgaaagataccaaaaaagaggaatggatttctaaaataatatgaa

SEQ ID NO: 266769 - DNA, 771 bp, Unknown
  Bacterial polypeptide expressing nucleotide sequence isolated from the Sargasso Sea
aaaaaatgcatagtgaaaatgtaagacacgtagaaatattttttgatccacagacacatactgaccgaggcattccttttaaaacagttataactggcattcataaagcactggaagcagcaagagaaaaatttggaattacgtctttcctgatactttgttttttaaggcacctgagcgaagaagcagctcttgaaactcttgaagaggcactacctttcaaagattggattgagggagtaggacttgattcttcagaagttggattccctccagataattttgaaaccgctttcgcaaaggcagcggaaaatggcttccgtaaagttgcacacgccggtgaagaaggtcctcctgaatatatatggaactcactggacatacttggagtttcgagaatcgaccatggagtaaagtgtactgaagataaaaaactcttggagcgcatcgttcgagaacaaatacccttaactgtttgccctctttcaaatatcaagctatgtgtatttgataaaatggaagatcacaaccttaaaaaaatgcttgaccatggtattcgagtgacaataaattcagatgatcctgcatattttggaggctacattaatcaaaattttattgccacacaacgggccctgaagttgagtgaaaatgaaatcattgaaatagcaaaaaacggattccgctccagcttcctgccacaggatagcataaattatcatattgaaaccattgacgaatttgttctaaaaatgaaaaattcagcttgat

SEQ ID NO: 266770 - DNA, 997 bp, Unknown
  Bacterial polypeptide expressing nucleotide sequence isolated from the Sargasso Sea
tatgatcaatacatccattccattggtggatttgcatcgtcacttagatggtaacgtgcgagtgaacaccatttgggaactcggacaccaacacggtattgctttgcctgccgattctttagagactctcgcgccatttgtacaaattcaggggaaagaaaccagcttagtcgccttcttgaagaagcttgactggatggtggccgttctcgctgatttagatgcggtaaaacgtgtcgcctatgaaaacgtggctgatgcggcgttatctggccttgattatgcggagctgcgttttagtccatattacatggcgatgaaccataaactaccgattgaaggtgtggttgaagcggttatcgacggggtgaaagcgggcctgaaagattaccaagttaaaatcaatcttatcgggattatgtcgcgctcttttggccaagccgcttgtactcaggagcttgaaggcctgctcgcccataaacaacatttagtcgcgatggatttagccggcgatgagcttggcttccctggcgaattgtttaacgagcactttaagcgagtgcgagatgcgggcttagccattaccgcccatgcgggggaagcggcgggttcacaaagtatgtggcaagcgattcaggagctgggggcgacacgtattggccatggtgtgaatgcgattcacgatcctaagctgatggaatatctcgctaaacaccgtatcggtatcgaatcttgccctaccagcaacctgcacacgtcgaccgtgtcttcctatgcggaacatcccttcagaacctttatggatgcgggtgtgttgataagccttaacaccgatgatcctggtgtgagtgcgattgatatcaagcatgaataccgcattgctaagtctgaactaggtctaagcgatgctgagctggctcaggtgcaacgcaacggggtggaaatggcgtttttatccgagagtgagcgcaaggcgctgtatgcggcgaaagcttaa

SEQ ID NO: 266771 - DNA, 997 bp, Unknown
  Bacterial polypeptide expressing nucleotide sequence isolated from the Sargasso Sea
atgatcaatacatccattccattggtggatttgcatcgtcacttagatggtaacgtgcgagtgaacaccatttgggaactcggacaccaacatggcattgctttgcctgccgattctttagagactctcgcgccatttgtacaaattcaggggaaagaaaccagcttagtcgccttcttaaagaagcttgactggatggtggccgttctcgctgatttagatgcggtaaaacgtgtcgcctatgaaaacgtggccgatgctgcgttatctggccttgattatgcggagctgcgttttagcccatattacatggcgatgaaccataagctaccgattgaaggtgtggttgaagcggttatcgatggggtgaaagcaggcctgaaagattaccaagttaaaatcaatcttatcggaattatgtcgcgctctttcggccaagccgcttgtactcaggagcttgaaggcttactcgcccataaacaacacttagtcgcgatggatttagccggcgatgagttaggttttcctggcgagttgtttaacgagcactttaagcgagtgcgagacgcaggcttagccattaccgcccatgcgggcgaagcggcgggttcacaaagtatgtggcaggcgattcaggagttgggtgcgacacgtattggccatggggtgaatgcgattcacgatcctaagctgatggaatacctcgctaaacatcgtatcggtatcgaatcttgcccaaccagcaatctgcatacttcgactgtgtcttcctatgctgaacatcccttcagaacctttatggatgccggtgtgttgataagcctgaacaccgatgatccgggtgtgagtgcgattgatatcaagcatgagtatcgcattgctaagtctgaactgggacttagcgatattgagctgactcaggtgcaacgtaatggggtggaaatggcgtttttatccgagagtgagcgtaaggcgctgtatgcggctaaagcttaag

SEQ ID NO: 266772 - DNA, 1054 bp, Unknown
  Bacterial polypeptide expressing nucleotide sequence isolated from the Sargasso Sea
catgaatacaacaaccgctacctcactatcgctcgtcgagaaaaccgctcgcgcaccgaaggccgagctgcacatccatatcgaaggctcgctcgaacccgagttgatcttcgcgctcgccgagcgcaacggcgtgaagcttgcgtacgactcgatcgacgccttgcgcgccgcgtacgcgttcaccgatctgcaatcgtttctcgacatctactatgccggcgcgagcgtgctgctgcacgagcaggacttctacgacatgacgatggcctatgtcgaacgctgcctcgccgacaacgtgatccacagcgaaattttcttcgacccgcagacgcacacagagcgtggcgtaccgatcgcaacggcagtggccggcatcgaacgcgcgctcgccgacgcggaaaagcgcggcatgacgagcaagctgattctgtgtttcctgcgccatctatcggaagaagatgcgctcgctacctttgaagaagcgcggcccttgttcgagcagtacaaacaccgcctgatcggcgtagggctcgattcttccgagcgtggtcatccgccgtcgaagttcgaacgcgtgttcgccaaggcgcgcgcgctcgatctgaaactggtcgcgcatgcgggcgaagaagggccgccgtcgtatatctacgaagcgctcgatctgctgaacgtggatcgcgtcgaccacggggtgcgcagcatcgaagatccggcgctcgtcactcgcctcgccgacacgcgcgtcgcgctgaccgtgtgcccgttgtcgaacctcaagctctgcgtgttcgacgacatgactcaacacactctgaaggacctgctcgatcgcggcgtcgccgtcacggtgaattccgacgatccggcttatttcggcggttacgtgaacgccaactatttcgccatcatcgacgcgttgaagctcaacgatgccgaggtctacacgatcatccgcaacagcttcgaagcgtcgttcgtcacgcccgagcaacgcagcgaactgatcgcgaagctcgacgcgcactggcacccaggcggcccgcactga

SEQ ID NO: 266773 - DNA, 709 bp, Unknown
  Bacterial polypeptide expressing nucleotide sequence isolated from the Sargasso Sea
cttggcgaaaccgcctatcagcgagttttacgtcggcgcaattgccaaagggaaaagtggcgacatctatatgggcgccaacctagaactgcccggcgaggccctgtttcactctgtgcatgcggagcaaagcgccatcagtcacgcttggttaagtggcgagagccaaattgtcgatatgatagtcaatgctagtccctgcggtcattgccgtcagtttatgaacgaactggtagagggtggccaaattaagatccatttgccctcgcaagacagccatttactgtcctattacctgccctacgcatttgggcctaaggacttaaatgtgcagtcgcccttgctggtcaagcaggaaaccgaatttgccctcgatagcagcgatcctatggtgattgaggcgttagatcatgcgggtttaagctatgccccttatacccaaagttacgcagccgtcgtattagaaacagccgatggcgcaacctattgtggtcgctacgctgaaaacgcggcgtttaacccttccatgctgccaatgcagatggccttatcgaatctgactcgacataaccgtgattttggcgagatccgccgcgcggtgctggtcgagtcatcacaggggaaaatcagtttagtgggcgcaaccatggatgcgttacatgccgttgcggccatcgaacttgagcatattgtggtcgaccccgtctaa

SEQ ID NO: 266774 - DNA, 892 bp, Unknown
  Bacterial polypeptide expressing nucleotide sequence isolated from the Sargasso Sea
aatgcaagatagatttatcaaaagcataacccagctgccaacaccattggctgacacattaattcccctattacatcaaaactttgcgggacatattgatgcgcagcaattggcagagttagtccaaagcagcaaaatgaccgaagccgaagtattactggcgctgctgcctattgccgccgccttggcgaaaccgcctattagcgagttttatgtcggcgcgattgccaaagggaaaagtggcgatatctatatgggcgccaaccttgaactgcccggcgaggccctgtttcactctgtgcatgcggagcaaagcgccatcagtcacgcttggttaagtggcgagagccaaattgtcgacatgatagtcaatgccagcccctgtggtcattgccgtcagtttatgaacgaactggtcgagggtggccaaatcaagatccatttgccatcgcaagacagccatttactgtcctattacctaccctatgcgtttgggcctaaggacttaaatgtgcagtcgcccttgctggtcaagcaggaaaccgaatttgccctcgatagcagcgatcctatggtgattgaggcattagatcatgcgggtttaagctacgcgccttatacccaaagttacgcggccgtcgtattagaaacagcggatggcgcaacctattgtggtcgttacgctgaaaacgcggcgtttaacccttccatgctgccgatgcaaatggccttatcgaatctgactcgacataaccgtgattttggcgagatccgccgcgcggtgctagtcgagtcatcacaggggaaaatcagtttagtgggcgcaaccatggatgcgttacatgccgttgcggccatcgaacttgagcatattgtggtcgaccccgtctaa

SEQ ID NO: 266775 - DNA, 892 bp, Unknown
  Bacterial polypeptide expressing nucleotide sequence isolated from the Sargasso Sea
atgcaagatagatttatccgaagcataacccagctgccaaccccattggctgacgcattaattcccttattacatcaaggttttgcgggacatatcgatgcacagcaactggcagagttagtcaaaagcagcaatatgaccgaatcagaggtgttactggctttgttacctattgccgccgccttggccaaaccaccgattagtgagttttatgttggtgcaattgccaaaggaaaaagtggcgacatttatatgggtgccaacttagaactgcctggcgaagccctcttccactcagtacacgctgagcaaagcgctattagtcacgcgtggcttagcggcgaaagccagattgtggatatgatagtgaacgccagtccctgcggtcattgccgtcagtttatgaatgaattagtcgaaggcggccaaatcaagatccatttgccatcacaggatagccatttactatcctattatctgccctatgcgtttggaccaaaagacttaaatgttcagtcaccgctattagtcaagcaggaaactgaatttgcactcgatagcagtgatcctatggtaattgaagccttagatcatgcgggcttaagctatgcaccttatacccaaagctatgcggcggttgtattagaaaccgcggatggcgcaacctactgtggtcgctacgctgaaaacgccgcgtttaacccatcgatgctcccaatgcaaatggcgctatcgaatctgactcggcataatcgtgattttggtgagatccgccgcgcggtattggtggaatcctcccaaggtaaaatcagcttagtgggcgcagcgatggatgcattgcatgctgttgccgcgatagaactcgaacatattgtggttgatcctatctagc

SEQ ID NO: 266776 - DNA, 643 bp, Unknown
  Bacterial polypeptide expressing nucleotide sequence isolated from the Sargasso Sea
ttgtttgttgctaatcaaatcaaaaatttgattgaagaaaaagcaagtaaaggagagtatgctgtattaggtcttgcaacgggagtatcaccaatttacttatacaaagaattggtgaaaatgcatgagagcggattaagtttttcaaatgtaattacgtttaacttggatgagtattatccaatggatcctaaagccatacagtcttaccataggtttatggaagaaaatttgtttgataaaattgatattttaaaagaaaacatcaatatcccaaaaggtaccttaaccatggatgaaattccagattactgtaagcagtatgaagaaaaaatagatgatttaggaggtattgacattcaaattttaggaataggaagaaccggtcatattgggtttaatgaacccgggtcaacatcacgatcctacacaaggctggttaccttagataaaaaaaccagaagagatgcttccaaagactttaaaagcattgaaagtgtcccaagaaaagccataacaatgggggtgggtacaatttttaaagcaaaaagtatctacttaatggcttggggagaaaagaaatcaaagattgtttccaaagcggtagagagtaacgtttcaccattaattcccgcaacttttc

SEQ ID NO: 266777 - DNA, 373 bp, Unknown
  Bacterial polypeptide expressing nucleotide sequence isolated from the Sargasso Sea
gatgcagaagcgagggttagatattcaaattttaggaattggaagaactggtcatattggatttaacgagccaggttcagagttggattctgttactcgacaagtaactctcgctcaaattacaattgatgatgcagccccaggttttggtggtgtggaaaatgttccagcaaaagcaatcactatgggtgttgcttcggttttaaaagcaagatgtatttaccttatggcttacggtgaaaataaggctcaaattgtttcggatactttaacgaatgacataacagaccaagtaccagctacttatcttcagaaacattcaaatacggtatttgtattggatacagaagcatctgcgttattaccagcgtaa

SEQ ID NO: 266778 - DNA, 742 bp, Unknown
  Bacterial polypeptide expressing nucleotide sequence isolated from the Sargasso Sea
atggaaaaaattcaaaataaagtattcgcttcagctaaagaaggaacgctgttcgtggctaatcaaattaaaaatttaattgaggaaaaagcaagtaaaggagagcaggctattttaggacttgccactggtgtctcacctatttctttgtacaaagaattagtgaaaatgcacaagcaaggattaagcttttccaatgttgttacttttaatttggacgaatactaccccatggatcctaaagcaatccagtcttatcatcgatttatggaagagcatttattcgataaaattgacattttgaaggataatattaacataccaaaaggtactcttacaatggatgaaattcctaagtactgtaagcaatatgaggataaaattgacgaactaggtggtatagatattcaaatactcggtattggccgaaccggacatattggattcaatgagccaggatcaacatttcgatctttcactaggttagttaccttagataaaaaaacaagaagagatgcttcaaaaaattttaaaagtatcgaaagcgtcccaagaaaagccattactatgggcgtgggaactattttcaaggctaaaagcatttacttaatggcatggggagagaaaaaagctcaaattatatctaaagctgttgaaagcaatgtgtctcatttaattcctgccacttttcttcaaaatcatccaaatgccacattaataattgatacagctgctgcctcag

SEQ ID NO: 266779 - DNA, 622 bp, Unknown
  Bacterial polypeptide expressing nucleotide sequence isolated from the Sargasso Sea
ctgagttttcaggactgtaccagtttcaatctcgatgagtatgtaggacttcctcctgaggatgaacgttcgtaccaccattacatgcgcacccatctttttgatcaggtggacatggaccctgagcatgtccatttgccgaatggttgcgctggagacctgcgtcaagcttgcagggattatgaacagaaaatcaaagaaagcggaggtatcgatttacaggttttgggaattggagcgaatgggcacatcggtttcaacgaacctaccggctcactggcttccaggacctgggtcaagattctcagtgaacagaccattcgtgataatgcagtatattttgatcgccccgaggatgttccacgtcacgttgtaacgatgggtattgccacggttatggagacacgccactgcctgctgttggctaatggcgcgaaaaaggcagatgcagttcgtaacatgatcgaaggaccggtttcagccagttgtcctgcttcaatacttcaaatgcaccgaagggtaacgatcgtccttgatgaggaagcagcgtatttattaaccttcaaggatcattataaatgggtggaacagaataaactcgactggcagaaactggattgat

SEQ ID NO: 266780 - DNA, 580 bp, Unknown
  Bacterial polypeptide expressing nucleotide sequence isolated from the Sargasso Sea
attggtgttaccaacaggttcaacaccacttggattatatgatgaacttgtaaaaagagagttagattggagtaatattactacatttaatcttgatgagtatgtcattaacccaaatcacttacagagttatcataattttatgagaatgaatttatttgataagacaaatatttatccaaaaaattataactttccaaatagaaatacacaggcatatgaagataaaataaaagaaaagggtggaattgatttatgtattttaggtataggaactaatggacatatagcatttaatgaaccttgttcttcgtttgagtcaaggacgagagtagtaaatttagctccacagactattagagataattcaagattctttgattcaatagatgatgtacccaaacaagccattacgatgggattggggactattatggaatcgaaaagaataatactaatggcacaaggtcataaaaagaaagagattttagataaagcgttgtttggtaaaataacagaagaaataccagcatcggttttacaacttcacgaaaatatggaggcagtttattgtgattga

SEQ ID NO: 266781 - DNA, 778 bp, Unknown
  Bacterial polypeptide expressing nucleotide sequence isolated from the Sargasso Sea
cctgattcgtgacacacctgaagaaggtgcgcgtgtagcatccagattagttaggaagatccttagcactcgctcaaaccctgtcctgggattggctaccggaggcacaccattgcgtttgtatcgtgaaatgattcgcatgcaccaggccggtgaactgagttttcaggactgtaccagtttcaatctcgatgagtatgtaggacttcctcctgaggatgaacgttcataccaccattacatgcgcactcatttttttgatcaggtagacatggcccctgagcatatccatttaccgaatggttgcgctggagacctgcgccaagcttgcagggattatgaacagaaaatcaaagaaagcggaggaatcgatttacaggtattgggacttggagcaaatgggcacatcggtttcaacgaacctaccggttcactggcttccaggacctgggtcaagattctcagtgaacagaccatgcgtgataatgcagtatattttgatcgtcccgaagatgttccacgtcacgttgtaacgatgggtattgccacggttatggaaacacgccaatgcctgctgttggctaatggcgcaaaaaaggcagacgcagttcgtaacatgatcgaaggaccggtttcagccagttgtcctgcttcaatacttcaaatgcaccgaagggtaacgatcgtccttgatgaggaagcagcatatttattaaccttcaaggatcattataaatgggtggaacagaataaactcgactggcagaaactggattga

SEQ ID NO: 266782 - DNA, 778 bp, Unknown
  Bacterial polypeptide expressing nucleotide sequence isolated from the Sargasso Sea
cctgattcgtgacacacctgaagaaggcgcgcgtgtagcatccagattagtcaagaagatccttagcagtcgctcaaacccggttcttggattggctaccggaggcacaccattgcgtttgtatcgtgaaatgattcgcatgtatcaggccggtgaactgagttttcaggactgtaccagtttcaatctcgatgagtatgtaggacttcctccagaggatgaacgttcgtaccaccattacatgcgcaaccatctttttgatcaggtggacatggaccctgagaatattcatttgccaaatggttgcgcgggagacctgcgtcaggcttgtagggattatgaacagaaaatcaaagaaagtggaggaattgatttacaggttttaggaattggagcaaatgggcacatcggtttcaacgaacctaccggttcgctggcttcaaggacctgggtcaagattctcagtgaacagaccatgcgtgataatgcagtatattttgatcgtcccgaggatgttccacgtcacgttgtaaccatgggtattgccacggttatggaaacgcgccactgcctgctgttggctaatggcgcgaaaaaggcagacgcagttcgtaacatgatcgaaggaccggtttcagccagttgtcctgcttcaatacttcaaatgcaccgaagggtaacgatcgtccttgatgaggaagcagcctatttattaaccttcaaggatcattataaatgggtggaacagaataaaatcgattggcagaaactcgattga

SEQ ID NO: 266783 - DNA, 811 bp, Unknown
  Bacterial polypeptide expressing nucleotide sequence isolated from the Sargasso Sea
catggaagttctcattttccctgacgccgaaagcctggccaagaaaagcgcagacctcgtcgaatcacaaataacaaagtacgccgactcggtccttggtttggccacaggttcgactccgcttggtttgtatcgggagttgatcgaaagacacaaaacacacggtttgagtttcaaaaaggtaaaaactttcaacttggatgaatacgtgggaatcccttccgatcatccgcaaagctaccgtactttcatggatgagcattttttcaatcaaatcgacattgaaaaatcgaacaccaaagtaccggaggggatggcggaaaaccccttggaaatcggtcccgcctatgagaaaagcattgaggaggcgggaggcctcgacctccaggtgctgggtgtcggaaccgatggacacatcggattcaacgaacccacttcaagccttggttccatcacccgggtcaagactcttacccagcagaccatagaggataactcccggtttttcgaacccgatgagtttcagcctaaactcgccatcaccatgggcataaagaccattctcgacgcccggcgcattttgcttctggccaatggagaaaacaaagctcaagcggttcgcgatatggtcgaaggtccgctgtccgccttttgcccggcatccgccctacagcttcaccaacgaacgacggttctgattgatgaaccggccgcttccaaattaaccctcaagggatactacaaattcgttggagagatgcaggacgatttgcttcgcaagcacaggccttcggactggataagcagatag

SEQ ID NO: 266784 - DNA, 1533 bp, Unknown
  Bacterial polypeptide expressing nucleotide sequence isolated from the Sargasso Sea
cagatggtgatatggataagaaaatggtagataagttttgtaaagaatatgaaaaaaagattaaatcttttggtgggatgatatttcaaattttaggaattggtgctaatgggcacattggatttaatgagccaggctcaaatttaaattcaataacaaggttagttaaactagattaccaaacccgacacgatgcaaggctaaattttaatggaattaagaatgttccatcatctgcaataacaatgggcatcaaaacaattttagcctccaagaggattattttaatggcatggggaaaaagtaaatcgaatgctataaaaaatgcagttgaagtaagacaaaatgtaaaagtacccgcaagcttaattcagtctcatggtaacgcaactatcatcctggacaaggattcctcatcattactaacccgaatttcccagccttggcaagttggagaacaacctttagatgatgaaatgaaaaatagagctattcactggctttcaagcaaaactgaaaaaccaatattgagacttactgaaaaagattacaaccaaaataatctttcagatttattagttcaaaaatctcattacgacattaatttggaggccttcaacaaattacaaagaacaattactggatggccaggtggaaagcctaatgcagatgatactcacagacctgaaagaaaaaatccagctcaaaagagagttataattttcagcccacaccctgacgatgatgttgtttcaatgggtggtacatttgataggcttgtaagtcaaggtcatgatgtccatgttgcctatcaaacctcaggtaatatagcagtctctaatgaagaggtgttaaagtttgtcgagctttatgaagatttttttgatagatcttcaaatttaattagtgaattaaagaatttattatctgatgaaaagaaaataataaaagaccgaagtgtaagaaaactggcgtcactaattagagaaaaagaatcattggcggccacaagatttataggagtaaatgattctaatgttcactttttaaagttacctttttatgagactggtaaaattaaaaagaataaacccacatcaaaagatttaaaaattatgtatgatttaattaaatcaattaaaccacatcaaatatttgctgctggtgatttagctgacccacacgggactcataaggtttgtattgagttattatttgaatctcttaagcatttaaagaaacttaattttatgaaagactgttgggtatggttatatagaggtgcatggcatgagtgggattcacatgaaattgatatggcagttcctttaagtccagagcaagttttacgaaaaagaagagctattttttatcatcaatctcaaaacaatagcgttatgtttcaaggtgacgacgaaagagagttttggcagagggttgaagaaaggaatagagaaatagccataacctataatgaccttggtatggccgattaccaagcaatggaaacatttagacgatatcatttctaaa

SEQ ID NO: 266785 - DNA, 245 bp, Unknown
  Bacterial polypeptide expressing nucleotide sequence isolated from the Sargasso Sea
aatgaggattagaagtaacacatatcaaaaagtttgtcatttaatatcaaataatattcgtgatttagtaagaactcactctaatccagtattgggtttagcaacaggttcaacaccgattggaatttatcaagaactatctaagatgagagatacaaatttttctgatacgattacttttaatcttgatgaatatgttggattaaatgggtggcatccacaatcatataatcattttatgtatg

SEQ ID NO: 266786 - DNA, 513 bp, Unknown
  Bacterial polypeptide expressing nucleotide sequence isolated from the Sargasso Sea
tatgtcggaatattttggattaggattagcaacaggttcaacaccacttggtatatataaatatatgcgtgatgagacttgggattctaaaaaggtatttacttacaatcttgatgagtatgccgacttaccatataatcatccacaatcatacgaacactttatggaagagaatttatttgcatatagacaatttagaaaaagttatttcccaagtgagaagaactatagaaactatgatgtaatgatacagagatttcctattgatatacagatacttggtattggaactaatggacacatagcattcaatgagccaggtacatcaagagattctcttacaaggaaagtagagttaactgataatacaagaaaagataatagtaggttctttgattctatggatgatgttccaactcatgcttatagtatgggaatagaaagtattatgagagccaaacaaatatatctattagcaaatggtaaacacaagaaagatatattagagaaagc

SEQ ID NO: 266787 - DNA, 628 bp, Unknown
  Bacterial polypeptide expressing nucleotide sequence isolated from the Sargasso Sea
attgattcaattacaaaataattggataccaaatagttctttaaatcaagttaaacccggcctcaacgaagaagaagaaaatatatcaacttatgaaaaaagcatatttcaagaaagaatcaacttagaaatatataagaattcagaagaaggatcaaaaattgctgctaatgaaattgcagaattaataagaaaaaaacagaaggtaggaaaaaattgtattttaggcttagctaccgggtcatctcctatttctgtatacaaaaagctaattcaaatacataaaaatgaaggtcttagttttaaaaatgtcattacatttaatttggatgaatatgtgccgatgaatccaaaatctaaacatagctatcatttgtttatgtatgaaaacctattcaatcatattgacataaaaaaagaaaatatttatataccaaaaggagatttggatgtcaaaaaaatacaagatcattgcatgggctttgaaaaaaaaattaaagattatggaggtattgatttgcaattgctaggaataggaagaactggtcatattggatttaacgagcctggagctttacgctcttcaataactagactagtaaatatagattttttaacaaaatttgat

SEQ ID NO: 266788 - DNA, 495 bp, Unknown
  Bacterial polypeptide expressing nucleotide sequence isolated from the Sargasso Sea
ttaatcttgatgaatatgtaggacttgataaacaccacgaacaatcatatcattattttatgaataaacatctgttcagtaatttaaattttagaaaacattatttcccaaccgaagaaaattataatgaatatgatttgatgattaaaaatagtggtggtattgatatacaaatattgggaattggaactaatggacacatagcctttaacgaacctggttcaaatagatattcatctacgagaatagttgatttaaccgaaaacaccataaaagataatagtagatttttcgaaagtatagaagatgtccctacacaggcatatacgatgggaatgtcaagtattatgggtgccgaaaaaatatacttggttgcagttggtaaacacaaaaaagaaattttagaagaagcagtgtatggggatgttacagaagatataccagcttctttattacaagaacatcctaattgtgaggtttattatagtgaataaa

SEQ ID NO: 266789 - DNA, 780 bp, Unknown
  Bacterial polypeptide expressing nucleotide sequence isolated from the Sargasso Sea
aatgagactgatccccctgaataccgctgaacaagtcggcaaatgggctgctcgccatatcgttaaccgtattaacgcgttcaaaccaacggcagatcgtccgttcgttctgggcctgccgactggcggtactccgctgacagcttataaagcattggttgaaatgcacaaagcgggccaagtgagcttcaagcatgttgttactttcaatatggacgaatatgttggcctgccgaaagaacatccggaaagctaccacagctttatgcaccgcaatttctttgatcacgttgatattccagcagaaaacatcaacctcctcaatggtaacgcgccggatattgatgcagaatgccgtcagtatgaagaaaaaatccgttcttacggtaaaatccacctgtttatgggcggtgtaggcaacgatggtcacatcgcgttcaacgaaccggcttcctctttggcttcccgtacccgtatcaaaacgttgactcacgacacacgtgttgctaactcacgcttctttgacggcgacgtaagccaggtgcctaaatatgcgctgaccgttggcgtgggtaccctgctggatgcagaagaggtgatgatcctggttctgggccaccagaaagcacaggcgctgcaagccgccgttgaaggcaacgttaaccacatgtggaccatcagctgcctgcagttgcatccaaaagccgttgtggtctgcgatgagccttccaccatggaactgaaagtgaagacgctgaaatacttcaacgagttagaagc

SEQ ID NO: 266790 - DNA, 802 bp, Unknown
  Bacterial polypeptide expressing nucleotide sequence isolated from the Sargasso Sea
aatgcgcctgatcccgttgaaatctgccagccaagtgggcctgtggtctgcccgttacatcgttgaccgtatcaatgggttcaaacccactgccgagcgccccttcgtactgggtctgcccactggcggcaccccgctcaacacttacaagcgcctgattgaactgcataaagccggtgaagtgagcttccagaacgtggtcaccttcaacatggacgagtacgtcggcctgccggaagatcacccggagagctaccacagcttcatgcacaacaacttcttcagccacatcgacattcgccccgagaacatcaacatcctcaacggcaacgcgccggatctggtggccgagtgcaagcgctacgaagacaagatcaagtcctacggcaagatccacctgttcatgggcggtgtcggcaacgacggccacatcgcgttcaacgagccggcctcatccctctcctcccgcacccgggtcaagaccctgaccgaagacacccgcatcgccaactcccgcttctttggcggcgacatggagcaggtgcccaagctggcgctgaccgtgggtgtcggcaccctgatggatgcggaagagatcatgatcctggtcaccggtcacggcaaggcccaggccctgcaggccgcggtggaaggcagcgtcaaccacatgtggaccatctccaccctgcagctgcatccgaagggaatgatggtgtgtgacgagccttccaccatggagctcaaggtcaagacggtgcgttacttccagcagctcgaagccgccaacatcggccgtctgtaa

SEQ ID NO: 266791 - DNA, 141 bp, Unknown
  Bacterial polypeptide expressing nucleotide sequence isolated from the Sargasso Sea
tatgaatttagataaatttgagaaatattctcttacttttggtcctactccaatagaatatttgcctcgtttaactgaagcaataggagctgatgttgaaatatacgccaaaagagatgactgtaattcaggtttggctat

SEQ ID NO: 266792 - DNA, 205 bp, Unknown
  Bacterial polypeptide expressing nucleotide sequence isolated from the Sargasso Sea
atgaatttaaataaatttgaaaaatattcacttacttttggtcctacaccaattgaatatttgcctcgtttaactgaagcaataggagctgatgttgaaatatatgccaaaagagatgattgtaattcaggtttagctatgggtgggaataaactaagaaaactagaatacattgttccgagatgcaattgcttccggagctgat

SEQ ID NO: 266793 - DNA, 487 bp, Unknown
  Bacterial polypeptide expressing nucleotide sequence isolated from the Sargasso Sea
gaagttcgcgaacaagaaaaagaaattaggatttaaatttgattattttattgtttgtgttgtaacaggatcaacacaagctggaatgatagtaggatttgccgaagataatagagctgatagagttattggcattgatgcttcagcaacttatgatcagacacgaactcaagttaaacaaatagttgataatacagccgaattagttgaacttggaaggaatgtaagagatgacgaaatcattattaatcctgattatgcatatcctgcatatggagtaccaagcgaagaaacaaatagcgcaataagattagcggcaagaacagaagcattaattactgatccagtttatgaaggaaaatcaatgcaaggattaattgatctagcaaataaaaacttttttccagagcattctaaaattctttatgctcatttgggaggagcgcctgcattaaatggatatagttattattataaagatggttaa

SEQ ID NO: 266794 - DNA, 568 bp, Unknown
  Bacterial polypeptide expressing nucleotide sequence isolated from the Sargasso Sea
tagcggtggtaagccttatgcaattccagccggggcatctgtgcataaatatggtggactgggatacgtaggatttgctgaagaagttcgaatgcaagaaaaagagatgtcattaaaatttgattacatcattgtgtgtgtagttacaggctcaactcaggcagggatgatcgttgggttcgcagaagatgatcgtgcacacagagtaataggtatagatggatcgggtacgccagataaattggccaagcaagtaagagaaattgttgataatacagctgatttagttgaacttggaagaacaattagagatgatgaaataataataattcctgactatgcatatccagcatacggcgttccgagtgaagaaacgaacgaggctattcgtatggcagcaaaaactgaagccatgatcactgatcctgtttatgagggcaaatctatgcaaggaatgattgatttagctagaaaaggttactttaaaaaaggatctaaaatactctatgctcatcttggcggagttccagctattaatggctactcatatacctaccgtaatggataa

SEQ ID NO: 266795 - DNA, 655 bp, Unknown
  Bacterial polypeptide expressing nucleotide sequence isolated from the Sargasso Sea
gatgggagcagatagcaggctagtacctgacggttttgatattgggattaggaaaagttgggaagacgcaattcaatccgtgaaagatagcgggggtaagccttatgcaattccagctggggcatcagttcataaatatggtggactgggatacgtaggatttgctgaagaagttcgaatgcaagaaaaagagatgtcattaaaatttgattacatcattgtgtgtgtagttactggctcaactcaggcggggatgattgttgggttcgcagaagatgaccgtgcacacagagtaataggtattgatggatcgggtacaccagataaattagtcaagcaagtaagagaaattgtagataatacagctgatttagttgaacttggaagaacaattagagatgatgaaataataataattcctgactatgcgtatccagcatatggagttccgagtgaagaaactaatgaggctattcgtatggcagcaaaaactgaagccatgattaccgatcctgtttatgagggcaaatctatgcaaggaatgattgatttagccaggaaaggttactttaaaaaaggatctaaaatactctatgctcatcttggcggagttccagctattaatggctactcatatacctaccgtaatggttaa

SEQ ID NO: 266796 - DNA, 820 bp, Unknown
  Bacterial polypeptide expressing nucleotide sequence isolated from the Sargasso Sea
ttccggagctgatactcttgtttcaataggaggggtgcaatcaaaccacaccagacaagttgctgcggtagccgcaaaaattggcatgaaatgtcatttggtacaagaaagctgggttccttttgaagatcctgtttacgataaggttggaaatattcttatgagtcgacttatgggggcaaagacagaattggttgatgagggatttgatattggaattcgagaaagctggaaaagagcaattgatcaagtcaaaaagaacggtggaaaaccatacccgattccagcgggagcctctgaacataaatatgggggcttgggttatgtaggttttgcagaggaagtaagaaatcaagaaaatgaaatggaaataaattttgattacattattgtttgtaccgtaactggatcgactcatgctggcatggtagtaggtttttcaagcgacaatcgacaacaaaaagtcattggtattgatgcctcctgcacaccaatacagacaaaggcgcaagttttaaaaattgcacaaaatacagctgatttaatcgagcttaacaaacaactcacaaatgacgatattgtcctaatagaagattatgcatatcctgaatatggtgttccttccaatgaaacaaacgatgccattagtctatgtgcaaaactcgagggcatgattacggaccctgtttacgaaggaaaatccatgcaaggattaattgatttggtaaaaaaaggtttttttccggaaggctcaaatattctctatgcccatcttggtggcgtccctgccattaatggttatcatacaatttacagttaa

SEQ ID NO: 266797 - DNA, 160 bp, Unknown
  Bacterial polypeptide expressing nucleotide sequence isolated from the Sargasso Sea
catgaagctgttagatcaattcgagcgttacccgcttacgttcggccctacccccattgaatcccttccccgtctgaccgaggcgcttggaggcgacgtagcaatctacgccaaacgagatgactgcaactcaggactggcactgggggaaacaagttga

SEQ ID NO: 266798 - DNA, 711 bp, Unknown
  Bacterial polypeptide expressing nucleotide sequence isolated from the Sargasso Sea
ttccccatgaagatgcagtttatgatcgtgttggtaatattttaatgacgcgtttgatgggagcagatagcaggttagtttcagacggttttgatattgggattcggaaaagttgggaagacgcaattcaatctgtgaaagatagtggcggcaagccttatgcaattccagctggggcatctgtacacaaatatggtggactgggatacgtaggatttgctgaagaagttcgaatgcaagaaaaagagatgtcattaaaatttgattacatcattgtgtgtgtagttactggctcaactcaggcagggatgatcgttgggttcgcagaagatgaccgtgcacacagagttataggtattgatggatcgggtacaccagataaattagccaagcaagtaagagaaattgtagataatacagctgatttagttgaacttggaagaacaattagagatgatgaaataataattattcctgattatgcatatccagcatacggagttccgagtaaagaaactaatgaggctattcgtatggcagcaaaaactgaagccatgattactgatcctgtttatgagggaaaatctatgcaaggaatgattgatttagccaggaaaggttactttaaaaagggatctaaaatactctatgctcatcttggcggagttccagctattaatggctactcatatacctaccgtaatggataaa

SEQ ID NO: 266799 - DNA, 706 bp, Unknown
  Bacterial polypeptide expressing nucleotide sequence isolated from the Sargasso Sea
atgaatcttgaaaaatttgaaaagtattcgctcactttcggaataactccgattgaacatctgccaaggcttactgcggccatagacgcggatatacaaatttttgcgaaaagagaggactgtaattcagggctggctttgggcggaaacaaactccgcaagcttgagtacatagtcccggatattctagcctcgggcgcagatactttagtttccattgggggggtgcagtctaatcacactagaatggttgcagccgttgccgccaagctaggattgaagtgtctggtaatccaagaaagttgggtgccgcatagtgatgcagtctacgatcgagtcggaaacatcctagtgacgcgtttgatgggagcccaaagtcagattgttgaaagcggctttgacataggtatccgagaaagttgggaagacgcgattcaatctgttatcgattccggcggtaaaccttacgcgatacccgcgggtgcctcggtacataagtttggagggttgggttacgtagggtttgcacaagaagtcaaaaaacaggaagccgaaatgggcctcaagtttgattacatagtcttatgtagcgtgactggctcgacacaggcgggaatgattgttggtttcgctgatgataatcgagcggatactgttatcggcgtggatggttccggaacacctaagcagctattacgcaaataag

SEQ ID NO: 266800 - DNA, 451 bp, Unknown
  Bacterial polypeptide expressing nucleotide sequence isolated from the Sargasso Sea
gatgaaatgcgtgctcgtgcaggagcactgggtcaactacgaagatccggtgtacgaccgggtcggcaacatccagctgtcgcgcatgatgggcgcggacgtgcggctcgtgtccgacggcttcgacatcggcattcgccgcagttgggaagaagcgatggagagtgtgcggcaggcgggcggcaagccttacccgattccggccggctgctcggagcacccgctcggcgggctcggcttcgtcggtttcgcggaagaagtgcgtgcgcaggaggcgcaactcggcttcaggttcgactacatcgtcgtgtgctcggtcacgggcagcacgcaggcggggatggtcgtcgggttcgcggccgacgggcgcgccgaccgcgtgatcgggatcgacgcgtcggccacgcccgagcgcacgcacgagcagatcacgcgcatcgcgcggcacacc

SEQ ID NO: 266801 - DNA, 627 bp, Unknown
  Bacterial polypeptide expressing nucleotide sequence isolated from the Sargasso Sea
acggcttcgacatcggcattcgccgcagttgggaagaagcgatggagagtgtgcggcaggcgggcggcaagccttacccgattccggccggctgctcggagcacccgctcggcgggctcggcttcgtcggtttcgcggaagaagtgcgtgcgcaggaggcgcaactcggcttcaggttcgactacatcgtcgtgtgctcggtcacgggcagcacgcaggcggggatggtcgtcgggttcgcggccgacgggcgcgccgaccgcgtgatcgggatcgacgcgtcggccacgcccgagcgcacgcacgagcagatcacgcgcatcgcgcggcacaccgccgagctcgtggatctcggccggccgatcaccgccgcggacgtcgtgctcgacacgcgctacgccggccccgaatacgggctgccgaacgacggcacgctcgaagcgatccgcctgtgcgcgcggctcgaaggcatgctgacggatccggtgtacgaagggaagtcgatgcacgggatgatcgacaaggtacggctcggggaattcgagccggggtcgaaggtgctgtatgcgcatctcggcggcgtgccggcgttgagcgcgtatagcgggattttccgggagggctgat

SEQ ID NO: 266802 - DNA, 820 bp, Unknown
  Bacterial polypeptide expressing nucleotide sequence isolated from the Sargasso Sea
gtgtgacacgctggtatcgattggcggcatccagtcgaaccagacccgtcaggtcgcggcggttgccgcgcatctggggatgaagtgcgtgctggtgcaggagaactgggtcaactattcggacgccgtatacgaccgggtcggcaacatccagatgtcgcgcattctgggcgctgacgtccggctggtttccgacgggttcgacattggtttccgcaagagttgggaggacgctctggcgagcgtgcgtgctgcgggcggcaagccgtacgcgatcccggccggctgttcagatcatccgctgggcggcctggggtttgtcggttttgctgaagaggtacgccggcaggaggtcgaactcggtttcaagttcgactatatcgtggtgtgttccgtgacgggcagcacccaggccgggatggtggtgggtttcgctgccgacggccgtgccgagcgcgtgattggcattgatgcatctgcgaaacctgcgcagacgcgggagcagatcatccgaatcgcgaagcagactgcggaaaaagtggcgcttgagcgcgacattacgagcaaggacgtggtattggacgagcgctacggcggcccggagtatggcttaccgaacgacggcacattggaggcgattcgcctgtgcgcgagactcgagggcgttctgactgatccggtgtacgaaggaaaatcgatgcacggcatgattgacatggttcgaaacggcgaattcccggatggctcacgcgtgttgtacgcgcacctgggtggcgtccccgcactgaacggctacagcttcctgttccgaaacgggtaa

SEQ ID NO: 266803 - DNA, 808 bp, Unknown
  Bacterial polypeptide expressing nucleotide sequence isolated from the Sargasso Sea
agtttctataggaggtgtgcaatctaatcatactagaatggttgcagctactgcagtaaaaataggaatgaaatgcaggttagttcaggaaaaatgggtacctcaaaatgatgcagtttatgacagggtggggaatattttattaactcgtctaatgggagcagatagcagattagttgatgatggttttgacattggaattagaaaaagctgggaagaagctatgcaatctgttcgagatgaaggaggaaaaccttacggcatacctgcaggtgcttctgtccataaatatggtggtttaggttatgttggttttgcagaagaagtaagacaacaagaaaaagaattaggatttatgtttgattatattatcgtttgtgtagttactggctcaactatggcaggaatggtggttggttttgcagaagacaatagagcaaataaagttattggtattgacgcatctggaactccaaaacaaacatgggcgcaagtaaggaaaatagttagtgatacagcagagttagttgagctaggaaaaaaagtagaagatgaggaaataattataaaaaatgaatatgcttatccagcttatggagttcctagtgaagaaacaaataatgcaattagattagcagcaagaactgaagctatgataacagatccagtttatgaaggtaaatctatgcaaggattaattgatcttgctaataaaaatttttttcctgagaactcaaagatcctttatgcccatcttggaggagctccagctttaaatggatatagttactattacaaagatggataa

SEQ ID NO: 266804 - DNA, 798 bp, Unknown
  Bacterial polypeptide expressing nucleotide sequence isolated from the Sargasso Sea
gcggtgttcaatctaaccatactagaatggtagctgcaactgctgcgaaaattggaatgaagtgtgttgttgttcaagaaagttgggttcctcatgaagatgcagtttacgatcgtgttggtaatattttaatgacgcgtttgatgggagcagatagcaggttagtgcctgacggttttgatattgggattagaaaaagctgggaagacgcaattcaatcagtgaaagataagggtggtaagccttatgcaattccagccggggcatctgtacataaatatggtggactgggatacgtaggatttgctgaagaagttcgaatgcaagaaaaagagttgtcattaaaatttgattacatcattgtgtgtgtagttactggctcaactcaggcagggatgatcgttgggttcgcagaggatgaccgtgcacacagagttataggtattgatggatcgggtacaccagataaattagcaaagcaagtaagagaaatcgtagacaatacagctgatttagttgaactaggaagaacaattagagacgatgaaataataattattcctgactatgcatatccagcatatggagttccgagtgaagaaactaatgaggctattcgtatggcagcaaaaactgaggccatgattactgatcctgtttatgagggtaaatctatgcaaggaatgattgatttagcaaggaaaggttactttaaaaaaggatctagaatactctatgctcatcttggtggagttccagctattaatggctactcatatacgtaccgtaatggataaa

SEQ ID NO: 266805 - DNA, 953 bp, Unknown
  Bacterial polypeptide expressing nucleotide sequence isolated from the Sargasso Sea
attgcatttcttccgcgtttatcaaaagaaattaaaggcaatctaaaagtttttgcaaaaagagatgattgtaattcaggtcttgcttttggtggaaataaattaagaaaacttgagtatataattcctgatgcaatagcttctggtgcagatacattagtttcaataggtggtgtacaatcaaatcatacaagaatggtagcagcagttgctgctaaaataggaatgaagtgtaggctagttcaagaaaaatgggtccctcaaaatgatgctgtttatgatagagttggtaatattttgttaactcggataatgggcgctgatagtcgattggttgatgatggttttgatattggtataagaaaaagctgggaacaagctttacaatcagtgcgtgatgaaggaggaataccttatggtattccagcaggtgcatcagttcataaatatggtggtttaggatatgtaggttttgcagaagaagttagagaacaagaaaaaaaattagggtttaagtttgattatattattgtttgtgtcgttacaggttcaacaatgggtgggatggtagttggttttgcaaaagataacagagctgataaagttataggaatagatgcatctggaactccaaaaaaaacaagagaacaagtaaaacttataattgaaagaacttctgagcttgttgaaatagaaaaaaaaataaaagatgaagaaattataattaaaaatgattatgcttatcctgcatatggaattcctagtgaagaaacaaataatgccattcgtttggcagcaagaactgaggctatgataactgatcctgtatatgaaggcaaatctatgcaaggtttaattgacttagctaaaaaaaatttttttccagaaaattcaaaaatattatatgctcatctaggtggtgctcctgcaataaatggctatagttattatta

SEQ ID NO: 266806 - DNA, 1034 bp, Unknown
  Bacterial polypeptide expressing nucleotide sequence isolated from the Sargasso Sea
atatcaaatttatattatgaatttaaaaaaatttaaacgttatccattaacttttggtccaactcctatagaatttttgccgcgcttaacaaaagcactaggctctgatgttcaaatatacgcaaaacgcgatgattgcaattcaggacttgcaatgggaggcaacaaactacgtaagcttgaatatattgttcccgaagcaatttcatctggtgcagataccttagtatcaattggtggagtacaatcaaatcatacaaggatggttgcagctactgcagcaaagattggaatgaagtgtgttgttgttcaggaaagctgggtacctcatgatgatgcagtttatgatagagtaggtaacattttattaactagattaatgggagcggatagtcgacttgtagatgaaggttttgatattggaattcgtaaaagctgggaagatgcacttcaatctgttcgtgataaaggaggagttccttatgctattccagctggagcttcagtacataaatatggtggacttggatatgttggatttgcagaagaagtaagagaacaagaagctcaaatgggtataaaatttgattatataattgtttgtgttgttacaggctctactcaagcaggaatgatagttggttttgctgaagataatcgtgcagatcgtgtcataggaattgatggttctggaacacctgaaaaacttaaaaaacaagtaaaagaaatagttaataatacagcaaaacttgttgagctaggaagaaaagtgcgtgatgatgaaataattatcaatcctgattatgcttatcctgcatatggtgttccaagcaacgagactaatgaagcaattcgtcttgctgctagaacagaagcaatgataactgacccagtatatgaaggcaaatcaatgcagggaatgattgatttagcaaaaaaaggtttctttccaaaaggatcaaaaattctttatgctcacttaggtggcgctcctgctataaatggttacagctatacgtatcgtaacggataaa

SEQ ID NO: 266807 - DNA, 1018 bp, Unknown
  Bacterial polypeptide expressing nucleotide sequence isolated from the Sargasso Sea
aatgaatttaaaaaaatttaaacgatatcctctaacatttggagtaactccaatagaacatttgccaagactttccaaagaattagaaggtaatttagaaatttatgcaaaaagagatgattgtaattcaggtttagcttttggcggaaataaattaagaaaacttgaatatattgttccagatgcaattgaatctggcgcggatactttagtatccattggtggagttcaatctaaccataccagaatggttgcagcaacagctgctaaaataggaatgaaatgtaggcttgttcaagaaaaatgggttccacattttgatggagtatatgatcgagttggcaacatacttttgactcgtttaatgggggctgatagtcgactagttgatgatggttttgatataggcattagaaaaagttatgaagaagctattcaagctgtaaaggatgaaggaggaaagccttacggtattccagcaggagcatctgttcataaatatggcggacttggttatgtaggctttgctgaagaagtaaaagagcaagaaaaggaattaggatttaaatttgactatattattgtgtgtgttgtaacaggatctactcaagctggaatgattgtgggttttgcagatgataatagggctgaccgtgtcataggaatagatgcttcagcaacttatgagcaaacaagatctcaagttaagcaaattgcttccgatacagctaaactagttgaacttggaagagaaattaaggatgatgaaataattataaatcctgattatgcatatccatcttatggagtaccaagtgaagagactaatgatgcaatacgattagcagcaaaaacagaaggaatgataactgatcctgtttatgaaggaaaatcaatgcagggtttaattgaccttgcaaaaaaacaattttttccagaaggttctagaattctttacgcacacttgggtggcgctcctgctttaaatggatacagttattattataaagatggttaa

SEQ ID NO: 266808 - DNA, 733 bp, Unknown
  Bacterial polypeptide expressing nucleotide sequence isolated from the Sargasso Sea
atgaatttagataaatttgagaaatatccacttacttatggaccgactccaattgagtatctgccacgtttgactgaagcgataggcgctgatgttgagatatatgcaaagagagatgactgtaattcaggtttggctatgggtggaaataaattaagaaaactagaatatattgttccagatgctattgcctctggagctgatacattagtttctattggcggtgttcaatctaaccatactagaatggtagctgcaactgcagcgaaaattggaatgaagtgtgttgttgttcaagaaagttgggttcctcatgaagatgcagtttacgatcgtgttggtaatattttaatgacgcgtttgatgggagcagatagcaggttagtagctgacggttttgatattggcattaggaaaagttgggaagacgcaattcaatccgtgaaagatagcggcggtaagccttatgcaattccagctggtgcatctgttcataaatatggtggactgggatacgttggttttgctgaagaagttcgaatgcaagaaaaagagatgtcattaaaatttgattacatcattgtgtgtgtagttactggctcaactcaggcggggatgatcgttgggttcgcagaagatgaccgtgcacacagagtcataggtattgatggctcgggtacaccagataaattagtcaagcaagtaagagaaattgtagataatactgctgatt

SEQ ID NO: 266809 - DNA, 1018 bp, Unknown
  Bacterial polypeptide expressing nucleotide sequence isolated from the Sargasso Sea
gatgaacctgcaacgtttctcccgttatccgctcacgttcggcccgacgccgatccagccgctcaagcgcctgagcgcgcacctcggcggcaaggtcgagctgtatgcgaagcgcgaggactgcaacagcggcctcgcgttcggcggcaacaagacgcgcaagctcgaatacctcgtccccgacgcgctcgcgcagggcgcggatacgctcgtgtcgatcggcggcgtgcagtcgaaccagacgcgccaggtcgcggccgtcgccgcgcatctcgggatgaaatgcgtgctcgtgcaggagcactgggtcaactacgaagatccggtgtacgaccgggtcggcaacatccagctgtcgcgcatgatgggcgcggacgtgcggctcgtgtccgacggcttcgacatcggcattcgccgcagttgggaagaagcgatggagagtgtgcggcaggcgggcggcaagccttacccgattccggccggctgctcggagcacccgctcggcgggctcggcttcgtcggtttcgcggaagaagtgcgtgcgcaggaggcgcaactcggcttcaggttcgactacatcgtcgtgtgctcggtcacgggcagcacgcaggcggggatggtcgtcgggttcgcggccgacgggcgcgccgaccgcgtgatcgggatcgacgcgtcggccacgcccgagcgcacgcacgagcagatcacgcgcatcgcgcggcacaccgccgagctcgtggatctcggccggccgatcaccgccgcggacgtcgtgctcgacacgcgctacgccggccccgaatacgggctgccgaacgacggcacgctcgaagcgatccgcctgtgcgcgcggctcgaaggcatgctgacggatccggtgtacgaagggaagtcgatgcacgggatgatcgacaaggtacggctcggggaattcgagccggggtcgaaggtgctgtatgcgcatctcggcggcgtgccggcgttgagcgcgtatagcgggattttccgggagggctga

SEQ ID NO: 266810 - DNA, 1018 bp, Unknown
  Bacterial polypeptide expressing nucleotide sequence isolated from the Sargasso Sea
atgaacctgcaacgattcgcacgttaccccctgactttcgggcccacgccgatccagccgctgaagcgtttgagtgaccacctgggcggcaaggtgcatttgtatgcgaagcgtgaggactgcaatagtggttttgcatttggcggcaacaagacgcgcaagcttgagtatctgattcctgaggcgttggcgcaggggtgtgacacgctggtatcgattggcggcatccagtcgaaccagacccgtcaggtcgcggcggttgccgcgcatctggggatgaagtgcgtgctggtgcaggagaactgggtcaactattcggacgccgtatacgaccgggtcggcaacatccagatgtcgcgcattctgggcgctgacgtccggctggtttccgacgggttcgacattggtttccgcaagagttgggaggacgctctggcgagcgtgcgtgctgcgggcggcaagccgtacgcgatcccggccggctgttcagatcatccgctgggcggcctggggtttgtcggttttgctgaagaggtacgccggcaggaggtcgaactcggtttcaagttcgactatatcgtggtgtgttccgtgacgggcagcacccaggccgggatggtggtgggtttcgctgccgacggccgtgccgagcgcgtgattggcattgatgcatctgcgaaacctgcgcagacgcgggagcagatcatccgaatcgcgaagcagactgcggaaaaagtggcgcttgagcgcgacattacgagcaaggacgtggtattggacgagcgctacggcggcccggagtatggcttaccgaacgacggcacattggaggcgattcgcctgtgcgcgagactcgagggcgttctgactgatccggtgtacgaaggaaaatcgatgcacggcatgattgacatggttcgaaacggcgaattcccggatggctcacgcgtgttgtacgcgcacctgggtggcgtccccgcactgaacggctacagcttcctgttccgaaacgggtaaa

SEQ ID NO: 266811 - DNA, 1018 bp, Unknown
  Bacterial polypeptide expressing nucleotide sequence isolated from the Sargasso Sea
atgaatttaaaaaagtttaagcgatatccattaacttttggagtaacaccaatagagcatttaccgagactttctagagaattacaaggtaatttagaaatttatgcaaagcgagatgactgtaattcaggtttagcttttggaggaaacaaactaagaaaacttgaatatattgttcctgatgcaattgattctggtgctgataccttagtttcaattggtggcgttcaatccaaccatactagaatggttgcagcaacagctgctaaaataggaatgaaatgcagacttgttcaggaaaagtgggttccacattatgatggagtatatgatcgagttggcaacatacttttaactcgtttaatgggcgctgatagccgattagttaatgatggttttgatataggtattagaaaaagttatgaagaagctattcaagctgtaaaagatgaaggtggaaaaccttacggtattccagctggagcatcagttcataaatatggtggacttggttatgtaggctttgctgaagaagtaaaagagcaagaaaaggaattaggatttaaatttgattacattattgtgtgtgtagtaacaggatctactcaagctgggatgattgtaggttttgcagatgataatagagctgaccgtgtcataggaatagatgcttcggcaacttatgagcaaacaaggtctcaagttaaacaaattgtttctaataccgctaaactagttgagcttggaagagaaattaaggatgatgaaataattataaatcctgattatgcttacccatcttatggagtaccaagtgaagaaactaatgatgcaattcggttagcagctaaaacagaaggaatgataactgacccagtttatgaaggaaaatcaatgcaaggcttaattgatctcactaaaaagaaattttttcctgatggatctaaaattttatatgctcatctaggtggagctccagctataaatggatatagttattattataaggatggttaaa

SEQ ID NO: 266812 - DNA, 478 bp, Unknown
  Bacterial polypeptide expressing nucleotide sequence isolated from the Sargasso Sea
tatgaatttagataaatttgagaaatattcacttacttttggtcctactccaatagaatatttgcctcgtttaaccaaagaaataggagctgatgtcgaaatatacgccaaaagagatgactgtaattcaggtctggctatgggtgggaataaactaagaaaactagaatacatcgttccagacgctattgcatccggagctgatacattagtttctattggtggcgttcaatctaaccatactagaatggtagctgcaactgcagctaaaattggcatgaagtgtgttgttgttcaagaaagttgggtccctcatgaagatgcagtttatgatcgtgttggtaatattttaatgacgcgtttgatgggagcagatagcaggctagtatctgacggttttgatattgggattaggaaaagttgggaagacgcaattcaatccgtgaaagatagcgggggtaagccttatgcaattcca

SEQ ID NO: 266813 - DNA, 687 bp, Unknown
  Bacterial polypeptide expressing nucleotide sequence isolated from the Sargasso Sea
aatggaaaaggttttagtcacaggcgcttcaggatttatagctgaacactgcataattgaacttcttaaaaatggctatacggtaaagggatcgctacggtcaatgaatagagaacaagaagtaagagacgcagtaaagactgaaacagatgacactaaattagaattttgcaaacttgatctacttgaagatgaaggttgggaagatgcaatgtgggattgtgattatttaatgcatgttgcttctccatttgtaatagaagatccaaaagatgaaaatgaacttatcaagcctgcaaaggaaggaactcttagagcactcaatgcagcaaaaaaagctggtataaaaagagttgttctcacttcttctgttgctgctgttaactcacatatgatgtctggaacaagcgatcatacaacttggacggatattaatagtaagtatgttactccttatcaaaaaagtaaaacaattgcagaaaaagctgcttgggatttttataataatcaagacaacagcaataaaatggagttggcagttattaatcctggtggcgtgatgggtcctcaacttggaaatgacttaggcggcgcttcaactcaaatagtttcacaacttatttctggaaagtttccaatgatacccgctttgtcattcccattcattgatgtgagagatgtagccat

SEQ ID NO: 266814 - DNA, 758 bp, Unknown
  Bacterial polypeptide expressing nucleotide sequence isolated from the Sargasso Sea
gattgaagatcttaaagacgaaaatgactttattaaacctgcaaaggaaggaactcttagagcattgaatgcagcaaagaaggctggaataaaaagggttgtaattacttcatcagttgcagcaataaactctcacatgatgtcgggaaaatgtgatcataatacgtggactgatattaatagtaaatatgtaactccttatcagaaaagtaaaacaattgctgagaaggcagcatgggatttttataatagtcaagatgataataaaattgaaatggtagtcgttaatcctggaggtgtaatgggaccgcaacttggaaatgatttaggtggtgcctctacacaaatagtttcacagttgatatctggaaaatttccaatgatacctgcattgtcgtttcctttcatagatgttagagatgttgcaatacttcatttaagagcaatgattactcctgaggctaatggtaaaagatttatcgctgctcacgcagagcccacatggatgtttcaggtggctaaagtattaagtaaagctggttatggtaaaattaaattaaaaaaagcaccatcacttatattaaaattaattggtttatttgataacaaaacaaaaagtctaataccaatgcttgataaatatgtaccctgtgacatatctcaaacagttgagatacttaaatggaaacctatgccgtgggaacaggcttttattgaacatgcaaaatctattgaggcaattgaagataaagcttaaa

SEQ ID NO: 266815 - DNA, 1006 bp, Unknown
  Bacterial polypeptide expressing nucleotide sequence isolated from the Sargasso Sea
ctggctcttgcaaaagatatgccctcttacaaaaagttatttaaatatatgcttactatgtctttggttttgaccctcatacatatcctcattgcttttactccaatattcttttttgtcgcaagagatttgatgaatgtaccagaatctcttctagagcccggtaaaataggccttcagattatgacaccttggacattaatgattgcttggaggagactgaatcagggagtgatgattaagcatggcagctcgaatatggttgcaattggaacatcaattcgattaatcactctagtgcttgtactatcttatgggagatggttctctaatttatcaggaatagttgcaggttcttctgcggttgctttagcggtaacagctgaagctatatatgctcaattagcagttagaaaaatattaagaaaaactcttcctaaagaaaatgtatcaaatcaaatcactagaaaaagcttcactaaattttatttacctttggcaattacacccctggcttctctattaattcatccagttggttcggctgggatgagtcgtatgcctgaagcgctaccatcgcttgcagcatggccggtagtttatggactggtatttataacaagatctatgggatttgcatttaatgaagttgttgttgctttattaccacgaccaaatggaaaatatgagcttttaagatttacccgaattctggcattctcaaccagcgcatttttaggtttgctagctttaactcctattgggagttattggtttatttacatatcaggcctctcaagtgagctcgctcatctatcctcaattactctaatttttgcagttattatgccgagctatcaagtctatcaagcttggtatgctgggttattagtaaataagaatcaaactaacggtatcagctatgcagtattagtttatgctataattgctattatagggttgtggattggaacacattttgctagctttccaggaatatattggg

SEQ ID NO: 266816 - DNA, 346 bp, Unknown
  Bacterial polypeptide expressing nucleotide sequence isolated from the Sargasso Sea
ttgcacaactcgccgctctatgccgccatcgacctcggctccaacagctttcacatgctggtggtgcgcgaggtcgccagtgccctgcgcaccgtcaccaaggtcaagcgcaaggttcgcctcgccgccgggctcgatccggagtttcgtctcagccgtgccgccatggagcggggctgggactgtctgcgtctgttctccgaacagttgcaggacattccggccgacaacatccgggtagtgggcaccgccaccctgcgccttgccaccaacgtcgacgagttcctcagcgaagcggaacgggtgctcaaccacagcatcgagatcatctcgggcgaggaagagg

SEQ ID NO: 266817 - DNA, 457 bp, Unknown
  Bacterial polypeptide expressing nucleotide sequence isolated from the Sargasso Sea
aatgggacgcaaacttggaaatgatttaggtggtgcctctacacaaatagtttcacagctgatatctggaaaatttccaatgatacctgcgttgtcatttccttttatagatgttagagatgttgcaatacttcatttaagagcaatgattactcctgaggctgatggtaaaagatttattgcagctcactcagagcccacatggatgtttcaggtagctgaagtattaagtaaggctggttatggtaagattaaattaaaaaaagcaccatctcttattttaaaattaattggcctatttgataacaaaacaaaaagtctaataccaatgcttgataaatatgtaccctgtgacatttctcaaacggttgagatacttaagtggaaacctatgccatgggaacaggcttttattgaacatgcaaaatccattgaggtaattgaagataaagcttga

SEQ ID NO: 266818 - DNA, 1015 bp, Unknown
  Bacterial polypeptide expressing nucleotide sequence isolated from the Sargasso Sea
aatggaaaaggttttagtcacaggcgcttcaggatttatagctgaacactgcataattgaacttcttaaaaatggctattcagtaaagggatcgctacggtcaatgaatagagaacaagaagtaagagacgcagtaaagactgaaacagatgacactaaattagaattttgcaaacttgatctacttgaagatgacggttgggaagatgcaatgtgggattgtgattatttaatgcatgttgcttctccatttgtaatagaagatccaaaagatgaaaatgaactgatcaagcctgcaaaggaaggaactcttagagcactcaatgcagcgaaaaaagctggtataaaaagagttgttctcacttcttctgttgctgctgttaactcacatatgatgtcaggaacaagcgaccatacaacttggacggatattgacagtaagtatgttactccttatcaaaaaagtaaaacaattgcagaaaaagctgcttgggatttttataataatcaggacaacagcaataagatggagttggcagttattaatcctggtggtgtaatgggtcctcaacttggaaatgatttaggtggcgcttcaactcaaatagtttcacaacttatttcaggaaaattcccgatgataccagcattgtcatttccattcattgatgtgagagatgtagccattcttcatttaaaagctatgaccacacccgatgctgatggaaaaagatttattgctgcacattctgaacctacttggatgtatcaagttgcagaagtcttaagtgcagctggatatgaaaaaatcaaactgaagaaggcaccttcattcatgctcaaattgattggcttgtttgacaacaagacaaaaagcttagtaccaatgctggataaatatgtaccgtgcgataactctcaaactgttgagatacttaattggaaacctatgccatgggagcaagcttttattgaacatgcaaaatctattgaggcaattaaggataaagcctaa

SEQ ID NO: 266819 - DNA, 802 bp, Unknown
  Bacterial polypeptide expressing nucleotide sequence isolated from the Sargasso Sea
aatggaaaaggttttagtcacaggtgcttcaggatttatagccgaacattgcataattgaacttcttaaaaaaggctattcagtaaagggatcgctcaggacaatgggcagagaacaagaagtaagagacgcagtaaagactgaaacagatgacgctaaattagaattttgcaaactcgatctactcgatgatgacggctgggaagaagcaatgagggattgtaattatttaatgcacgttgcttccccatttgtaatagaagatccaaaagatgaaaatgaactaatcaagcctgcaaaggaaggaactcttagagcactcaatgcagcaaaaaaagctggtataaaaagagttgttcttacttcttctgttgccgctgttaactcacatatgatgtcaggaacaagcgatcatacaacttggactgatattaatagtaagtatgttactccttatcaaaaaagtaaaacaattgcagaaaaggctgcttgggatttttataataatcaggacaacagcaataaaatggagatggcagttattaatcctggtggcgtaatgggtcctcaacttggaaatgatttaggtggtgcttcaactcaaatagtttcacagcttatttctggaaaatttccgatgatacctgcattgtcatttccattcattgatgtaagagatgtagccattcttcatgtaaaagctatgaccacccctgaagctgatggaaaaagatttattgcagcacattctgagcctacttggatgtatcaagttgcagaagtcttaagtgcagctggatag

SEQ ID NO: 266820 - DNA, 991 bp, Unknown
  Bacterial polypeptide expressing nucleotide sequence isolated from the Sargasso Sea
atgaatgatacttttggtgtgcttgatctagggtcaaacagctttcatttagtaatttcagaatatcacgataatctttttcgtaaaaaatataaaaaaaaagagtatacgtacttaggaagtggtttaaaacctgatggcacaatagaagctaaacttgctgataagtccattcaggctttagatagttttaaagtcaatattgaagagcaaaatccaactttcttaaaagtcattgcaactaattctttcaggagaattagtgattatgattttcttactcaatcagaaaaagcacttggaaataaaattaatattataactcctttagaagaggctaaccttatttatcaaggcgtaacacacactacagaaattaattataaaaatttttatattatagatattgggggttcaagttcagaggtcattaccgtaaaagataaaaaacttaccaatttggcaagttttcaatttggaagttctactattaataattatttttttgatataggagatattaaaaggcaatggtataaagcatgttttcatgtttttaatgaaataaacaaatcaagcgactctgccagcttgcaaggtaaatatgtatatcgaggctctgaaaataaagccattgataaacttttaattaattcaaatgataatattgcctttggcggatcaggtacaattaaagcagttcacaaggctttaaaagctatacttatagatcaagatgaaattgatatttcgaagattgattatcttgtgcaaatcttacttaatcaacacgacaaggtttacgattctgactttaaaaaaattactttggttataaacccagaaagattaagagttttcttagcagggttgtcaatattacacagtttaatggttattttagacattagtattttaagtaaagcaaatggtgcattaagagaaggcgctatgtatgagctattaaaagattcaaatattaagtcttaaa

SEQ ID NO: 266821 - DNA, 136 bp, Unknown
  Bacterial polypeptide expressing nucleotide sequence isolated from the Sargasso Sea
aagcaaattgagcactttttcgagcactataaagatcttgaagaaggcaaatgggtgaagattgacggttgggcagacgcagccgctgcaaaagaagaaattaccgcaagcatcgcgcgtttcgaagcagaataat

SEQ ID NO: 266822 - DNA, 409 bp, Unknown
  Bacterial polypeptide expressing nucleotide sequence isolated from the Sargasso Sea
atggaccttagttcaatacctccatctccaatgaagggaatagtaaatatcgttgttgaaatacctgcagggagtaggaataaatatgaatattgctctgatgcaggaataatggccctagacagagtattgcattcttcagtgagatacccttttgattacggttttatcccaaatacccttgctgatgatggggctcctcttgatgcaatggtgataatggatgagcctacttttgctggttgtttaataaaagctagacctattggagttttggatatgcatgattgtggtgcctatgatggaaaacttttatgtgtgcctgtggctaatcctagacaggctaatatagtgagtattaatcaaattgctcctaatcagcttgaggatgttgctgaattcttttagg

SEQ ID NO: 266823 - DNA, 892 bp, Unknown
  Bacterial polypeptide expressing nucleotide sequence isolated from the Sargasso Sea
ctccccagttatttttatagcattagcatttgggctaattacatacttagatatttcactaaatgtttggttttgtgtacttacaggagctgtaggtggtgtattaattggacttataactgaatactataccgggggcacacctgtagaaaagattgcaaaatctggtgaaacaggatctgcaactgtaatgatttctggtctttctgtggggatgcagtcggttgtgattcctatcttaattctggcaacaattatctttatttctacaacattatttgatttatatggtgtaggtattgctgcagttgggatgcttgctacagttggcataacgatggcaattgatgcatatggtcccgtcgctgataatgctggtggaattgcagagatgtcaggaatgggagacgatgttagggaaattactgattctttagatgagcttggaaatacaaccgcagctattggaaaaggatttgcgataggcgcagctgccttggctgcattagctataatcgctgcttttgttcaagtagtcggtgtaaataatgatggattcgagttgattttatcagatccaatagtcctggtaggaatgtttattggaggctcaattccatttttagtttcctcaattacaatgactgccgttggtgatgcagcatttgagatgatcaatgagataagaagacaatttagagagattccagggattctagaaggcacaggagaaccagatactgacaaatgtgttgagattgctacaagagcagcacttcagagaatgttattacctggagttattgcagtttcaatgcctccattagttggtttattattaggagcaaaagctcttggcggaatgttagctggcggattacttggttgcgtt

SEQ ID NO: 266824 - DNA, 598 bp, Unknown
  Bacterial polypeptide expressing nucleotide sequence isolated from the Sargasso Sea
atggataatttaatcattccaccagctttaggtttattgggtatggtcatggcatttgtagtttatatgcttgtcatgaaatatcctgatggtgaagataaagtaaagaaaattggcgaccaaattcacactggagcattaacctttatgaaaacagaatataaatatctgtttatttttatggctgtgatcgttgtcttagcttggtatgccttaggtccttatacagcaatagcggttattgtaggtgctttatgctcatcaattgcaggatttattggaatgtatgccgctacaaaagcaaatgtgagaacagcgacagcagctcaaaaagatggctcagccgcagctttaacagtttctttttatggcggctcaataatgggtctttgtgtagcatcattgggcttaattggtttgggaggcttatattttttctatatacctgctgaaattgatcctcataagcttgaaggttttgctatgggggcatctgtagtagccctcttttctagagtaggcgggggaatttttacaaaaagtgcagatgttggagctgatcttgttggtaagattgaagcaggaatacctgaagatg

SEQ ID NO: 266825 - DNA, 856 bp, Unknown
  Bacterial polypeptide expressing nucleotide sequence isolated from the Sargasso Sea
atgagtctacctctagcactagcatctattggtttaatatcatcaatcttaggtatcttaattgtaagggctcaatctgcgaaagcacctgctgcagcattgaggactggaacaataggttccccagttatttttatagctttagcttttggattaatctcatatttggatatttcattaaatgtttggttttgtgttcttacaggagctgttggaggcgtattaattggattaataactgaatactatactggtagcacacctgtagagaagatagcaaaatcaggtgaaacaggatctgcaactgtgatgatttctggtctttcggttggaatgcagtctgttgtaattcctatcttaattttggcaacaattatttttatttctacaacattatttgatttatatggagttggcattgcagcagttgggatgcttgctacagttggcataacaatggcaattgatgcatatggtcctgttgcagataatgcaggtggaattgcagagatgtcagggatgggagaagatgttagagaaattactgattctcttgatgagcttggaaatacaactgcggccatcggtaaggggtttgcgataggtgcagctgccttggctgcattagctataatcgcagcttttgttcaagtagttggtgtaaacaatgatggattccaattgattttatctgatccaattgttttagttggaatgtttattggaggctccatcccattcttagtttcctcaataacaatgactgccgtaggtgatgcagcatttgagatgattaatgagataagaagacagtttagagagattccaggaatattagaaggcacaggagagccag

SEQ ID NO: 266826 - DNA, 845 bp, Unknown
  Bacterial polypeptide expressing nucleotide sequence isolated from the Sargasso Sea
tttatcgtaaagcttcaatctgctaaagcacctgcaagtgctttaaggtcaggaacacttcttgcaccagttatatttgtagctatggcttactttatagttgattcttttgaaggtgtagaaatgaaagtttggtggtgtgttattgctggagcagtcggaggagttcttataggattaatcacagaatactacacaggtggaaagccagtaagaaaaatagctgagtctggagaaactggatcagcaactgtaatgatttcaggactttcagtaggtatgcaatcagttgtaataccaattgtaatattagctggaataatatttgtttcaactcaattagcagatgtttatggtgttggaattgcggcagttggtatgttagctactgttgggataactatggcaattgatgcttacggtcctgttgctgataatgctggtggtattgctgaaatgtcaggaatgggtaaagaggttagagatattactgattctttagatgagcttggaaatactacagctgcaattggtaaaggttttgccattggagcggcagctttagcagcgttggcgataatttcagctttttcaactgttgtaactaaggcgaatccagaattttcattagcacttacaaatccaatagtgcttgtaggaatgtttattggaatttgcataccttttttggtttcatctataacaatgactgcagttggagacgctgcattcgaaatgataaatgaaattagaagacaattcagagagatttctggattgatggaaggaacagctgaaccagattcacaaaaatgtgttgaaattgctactactgctgctttaaa

SEQ ID NO: 266827 - DNA, 488 bp, Unknown
  Bacterial polypeptide expressing nucleotide sequence isolated from the Sargasso Sea
accaaggaatcaaggagcttcattaacttcatatgaattaaatgaagaaggtgttccaaatactgttatagctgataatgctggtggtattttaatgcaaagagggcaggtagacatgtgcattgtgggaaccgatagaacactttctactggtgatgtagcaaataaaattggaacttatctaaaagcgctagctgcaaaagataataacgttccattttatgtagctcttccaagctcaactatagattggaatattaaagattttaaaaaaatccctattgaagaaagaaattccgaagaactgtctcatgtggaaggtctagatgaaaataaaaacttaaaaaaagttagaatttatccagaaaaaagcaaaactttaaatttagcatttgacattactccttcaaaatatgttactggcttaatcactgaaaaaggtgtctgcgaagcatctgaaaaaggattgaaagaattatttaagtgaa

SEQ ID NO: 266828 - DNA, 582 bp, Unknown
  Bacterial polypeptide expressing nucleotide sequence isolated from the Sargasso Sea
tatgaatttagtaccgataatattaggcttttctggtctactagcggcatatctactctacgcagcagtaaagaaatatcctgccggagaaaaaaacttaacagatatttctgatgaaatacatctaggtgcgatggcatttatgaaaaaagaatattccatactttttgtattctctctaatacttgtttttgggatatatataggacttggattagacagcacaatagcattcattgtgggtgctttaagttcctcaataactggttttattggcatgtatacagctacaaaagcaaatgttagaacagctacagccgcacaaaattcgggtgttagcgacagtttatcagtcgcattcttcggagggtcaattatgggcttaactgtagctgctatgggattgctaggtttagggctcttatatatcctatatggttctgatcctacaactgcatcaacgatccatggttttggaatgggggcatcaaccgtagcattattctcaagagttggcggtggaattttcacaaagtctgctgatgttggggcagatctagtgggtaaagtagaaaaagatat

SEQ ID NO: 266829 - DNA, 840 bp, Unknown
  Bacterial polypeptide expressing nucleotide sequence isolated from the Sargasso Sea
tatgccattagccttagcttcaattggcctaatctgctcaatgattggaatttactctgtaaaacttttctcttcaaagagtccggaagttgcccttcgaataggaacaatgggttcttcaattatatttataattgctgcattcattttaattaaagaactaggagtatcggttaatgtctgggtcgctgttttaactggtgctgttggtggaattgttattggtcttgtcacagaatattacacaggtggctcacctattagaaaaatagcgcaaggcggtgaaactggtccggctaccataatgattaccggtcttgcggtgggaatgcagtccgttgccatacctgttataacaatttgtgcaatcatttttatttcaagtcacttcacgggtctctatggtgtgggtattgcagccgtcggtatgttaagtacagttgggataacaatggcaatcgatgcatatggcccggttgcagataatgctggtgggattgctgaaatggctgaacttggaaaggagacacgccagattactgactcacttgacgaggttggaaatactactgcggcaattggaaaaggttttgcaattggtgcagcggcacttgcagcattagcattaatcagtgcatatatagaaaaagtatcacttggtaatgaagactttatattaaaaataaatgacccaatagttttaagcggtatgttccttggtgctatcttcccctatctggtcagctcaatcaccatgactgcagttggtgatgctgcatttgatatgattaaagaaatacgacgtcaatttaaagaaatccctgggctaatggagggtac

SEQ ID NO: 266830 - DNA, 805 bp, Unknown
  Bacterial polypeptide expressing nucleotide sequence isolated from the Sargasso Sea
gcagttggtggaattatgatcggtctgataacagaatattacacaggcggtgatacagaagattctcctgttggtaaaattgctaagtctggtgaaactggacctgctacagtaatgattactggcttaagtgtcgggatgcaatctgttgtcctacctctgtttgtcatcgcaggtattattggagtttctacatacttttctggactgtatggtgttgggatagcggccgtaggtatgctggccacagttggtataaccatggctatagatgcgtatggtccggtagctgacaatgctggtggtatagcagaaatgagtggcatgaaaccagaagtaagagaaattactgactcgctagatgaattaggaaatacaactgcagcaatcggtaaaggttttgcaattggtgcagcagctttagcagcacttgctattatcgcagcctacatgcttgcaacaggacttgagtctctgtcgctcaacgatccaagggtgcttatgggtatgttcattggtgggacaataccattcttagtatcatctatcacaatgacagctgtcggtgatgcagcatttgaaatgatcgaagaaattagaagacaatttagagaaatacccggtctactagaaggtaaagcagaaccagataatgctaagtgcgttgatattgcaactaaagcagccttaaacaaaatgcttttgcctggagcgattgctattggttcgcctgtattggtaggttttgctttaggacctgtccatcttggcggcatgcttgcaggagcactattaggttgtgtac

SEQ ID NO: 266831 - DNA, 427 bp, Unknown
  Bacterial polypeptide expressing nucleotide sequence isolated from the Sargasso Sea
gatggaccttagttcaatacctccatctccaatgaagggaatagtaaatattgttgttgaaatacctgcaggtagtaggaataaatatgaatattgctctgatgcagggattatggccttagacagagtattgcattcttcagtgaggtacccttttgattatggttttatcccaaatacccttgctgatgatggtgctcctcttgatgcaatggtgataatggatgagcctactttcgcgggctgtttaataaaagctagacctattggagttttggatatgcatgattgtggtgcatatgatggaaaacttttatgtgtgcctatagctaatcctaggcaggataatatagtgagtattaatcaaattgctcctaatcagcttgaggatgttgctgaattttttagaacaagtaaaaggacttga

SEQ ID NO: 266832 - DNA, 809 bp, Unknown
  Bacterial polypeptide expressing nucleotide sequence isolated from the Sargasso Sea
aacataggttccccagttatttttatagctttagcgttcgggctaattacgtatttagatatttcactaagcgtttggttttgtgttcttacaggagccgtaggtggagtattaattgggctcataactgaatactatactggtagcactcctatagaaaagattgcaaaatccggtgaaacaggatctgcaactgtgatgatttctggactttctgtgggtatgcaatcggttgtaattcctatcttaattctggcaacaattatctttatttctacaacattatttgatttatatggagtaggtattgcagcagtcgggatgcttgccacagttggcataacaatggcaattgatgcatatggtcctgtcgctgataatgcaggtggaattgctgagatgtcaggaatgggagaagatgttagagaaattacggattctttagatgagcttggaaatacaactgcagctattggaaaaggatttgcgataggcgcagctgccttggctgcattagctataatcgctgcttttgttcaagtagttggtgtgaataacgatgggttccagttaattttatctgatccgatagtcctggtaggaatgtttattggaggctcaattccatttttagtttcctcaataacaatgactgccgtaggtgatgcagcatttgagatgatcaatgagataagaagacaatttagagagatcccagggattttagaaggcacaggagagccagatactgataaatgtgttgagattgccacaagagcagctcttcagagaatgttattacctggagt

SEQ ID NO: 266833 - DNA, 189 bp, Unknown
  Bacterial polypeptide expressing nucleotide sequence isolated from the Sargasso Sea
gagcttgggacaatgctaagaagtatatcgaagctggaggaggagcaggtaaaggttcagaagaacacaaggctgctgtaataggagacacaataggtgatccatttaaggatacatctggtccagcaatgaatattgtcattaaagttatgacaattgtaagccttatatttgcatctgctttttaaa

SEQ ID NO: 266834 - DNA, 115 bp, Unknown
  Bacterial polypeptide expressing nucleotide sequence isolated from the Sargasso Sea
gcaggcattcctgaggatgacccaggaaatccagccgtaatagctgacaatgttggtgacaatgtcggtgattgcgcaggaatggcagctgacttattgaaacttatgcagtaac

SEQ ID NO: 266835 - DNA, 722 bp, Unknown
  Bacterial polypeptide expressing nucleotide sequence isolated from the Sargasso Sea
tttaaaaaagtcagctgaagatttaatagcgtctagacctacggctataaacttaaaatgggctgtcgatagaatgatgaagagaatatcaggcattaatagcaatgaagtttttaagatagctttaaatgaagctaaaaaaattgtagaggaagatgtaacattttgcaaaaacatcggtgaaaatggtcttaaaattatagaagaaatatcaaacaaaaaaaaagataagataaatattttaactcattgtaatgctggctggcttgcaacaataaattggggaacagcgacttcccctatttatcatgcacatcaaaaaggaattaaagttcatgtgtgggtagatgaaacgagaccaagaaatcaaggcgctaatttaacctcctatgaacttaacgaagaaggaatttctaatactataataactgataacgctggaggtattttaatgcaaagaggccaagtagatatgtgcattgttggaactgacagaactttatctaatggcgatgtttgtaataaaattggaacttatttaaaagctttatctgcaaaagataataacgttccattttatgtcgctttaccaagttcaacaatagattggagcattaaagaccacaaacaaattcccattgaagagcgaaattcagaagagttatcccatgttgaaggtgttgatgaaaacaatgaaattaaaaaggtgagaatttacccac

SEQ ID NO: 266836 - DNA, 277 bp, Unknown
  Bacterial polypeptide expressing nucleotide sequence isolated from the Sargasso Sea
atccgctgtcgagccgtcgggatgtttcgcatgaccgatgaggcgggtggagacgacaaggtcttgtgcgtccctgctggtgatccgcgcatggaacacgtccgcgacatccatcacgtcgccgaattcgatcgactagaaatccagcacttcttcgaggtgtacaaagacctcgagccgggcaagtcagtggaaggcgctacctgggtggggcgctcagacgcggagatcgagatccaccagtcgtgggagcgctaccgctcttcgcacacatagc

SEQ ID NO: 266837 - DNA, 469 bp, Unknown
  Bacterial polypeptide expressing nucleotide sequence isolated from the Sargasso Sea
taacttaacctcttatgaattaaacgaagaaggagtatcaaacaccgtaatcacagataacgctggcggtatattaatgcaaagaggagaagtagatatgtgtatcgttggaaccgatagaactttatcaaacggtgacgtttgtaataaaataggaacatatttaaaagctttatctgctaaagataataatgttcctttttatgttgccttaccaagttcgactatagattggagcattaaagatcataaacaaattcctatcgaagaaagaaattcagaagaattatcacatgttgagggagtagatgaaaataatgaaatgaaaaaagtaagaatttacccacaaaaaagtaagtcattaaatctagcctttgatgtaacacctgctaaactagtaacaggattaattacagaaaaaggcatttgtgaagcatcagaaaaaggattgaaaggattatttaaatga

SEQ ID NO: 266838 - DNA, 748 bp, Unknown
  Bacterial polypeptide expressing nucleotide sequence isolated from the Sargasso Sea
taatgataaagatattttgaatattgctatagatgaagccaaatctatcaccgaggaagatgttggattttgtaaaaatattggtttgaatggtctaaaaataattgaaaaaatatttgataagaaaaaagatacagttaatattttaactcattgtaatgcaggttggctggccacaatagattggggtacagctacttcaccaatatatcatgctcaccaaaaaggaattaaagttcatgtttgggtagatgaaactagaccaagaaatcaaggtgcaaacctaacttcatacgaattaaatgaggaaggcgtttcaaatactgttatcactgataatgcaggaggcattttaatgcagagaggccaggtagatatgtgtattgttggaactgacagaactttatccaatggggatgtctgtaataaaataggcacttatcttaaagctctttcagcaaaagataacaaaattcctttttatgtagcactgcctagctcaacaattgactggaatattaaagatcataaagaaataccaatagaagaaagaaattctgaggaattatcccacgtagagggagtagatgagaataataaaattaaaaaaataagaatttacccacaaaaaagtaagtcactaaacctagcctttgatgtaactcctgctaaactagtaactggtttaattacagaaaaaggtatctgcgaggcatcagaaaaaggattgaaaggactatttaagtga

SEQ ID NO: 266839 - DNA, 728 bp, Unknown
  Bacterial polypeptide expressing nucleotide sequence isolated from the Sargasso Sea
agtagctttagacgaagcaaaagcaatttgtgaagaagatataagtttttgtaaaaatataggtttaaatggattaaaattaatagaagagatttcaaagaaaaaaaaagatactgtaaatatattaactcattgcaacgctggttggcttgcaacaatagactggggtacagcaacatctccaatttatcacgcacatcagaaaggaattaaagttcatgtttgggttgatgaaactagaccaagaaatcagggagctaacttaacatcttatgaattaaatgaagagggaatttcaaacactgtaatagctgataatgcaggtggtattttaatgcaaagaggacaagtagatatgtgcattgttggaactgatagaactttatccaatggtgatgtgtgtaataaaattggaacctatttaaaagctttatctgcaaaagataataacgttcctttttatgttgctttacctagctcaaccattgactggaatattaaagaccataaaaaaattcctattgaggagagaaattctgaggagctgtctcatgttgaaggagttgatgaaaataataaaattaaaaaggtaagaatttacccacagaaaagtaagtctttaaacctagcctttgacgtaacacctgctaaactagttactggtttaattacagaaaaaggagtttgtgaagcatcggaaaatggattgaaaggattatttaaatgaa

SEQ ID NO: 266840 - DNA, 547 bp, Unknown
  Bacterial polypeptide expressing nucleotide sequence isolated from the Sargasso Sea
gatggaccttagttcaatacctccatctccaatgaagggaatagtaaatatcgttgttgaaatacctgcagggagtaggaataaatatgaatattgctctgatgcaggattaatggccctagacagagtattgcattcttcagtgagatacccttttgattatggttttatcccaaatacccttgctgatgatggagctcctcttgatgcaatggtgataatggatgagcctacttttgctggttgtttaataaaagctagacctattggagttttggatatgcacgattgtggtgcatatgatgggaaacttttatgtgtgcctgtggctaatcctagacaggctaatatagtcagtattaatcaaattgctcctaatcagcttgaggatgttgctgaattttttaggacaagtaaaggacttgatggaagaacagttcaaatcgatggttggagggattttgatgtggtggaaaatttattgaaaagttgtatacccctaaaaaagaaaaactttaaagtacttaagaaatcaaagattagttaa

SEQ ID NO: 266841 - DNA, 165 bp, Unknown
  Bacterial polypeptide expressing nucleotide sequence isolated from the Sargasso Sea
gaaaaaggaaattaggaggcaaagggtctgaaacccattctgcaactgttgtcggtgatactgtaggagatccttttaaagatacatcaggaccatctatgaacattcttattaatgtgatggcaatagtaagtcttgtaatagcccctctgctttcaatttagt

SEQ ID NO: 266842 - DNA, 241 bp, Unknown
  Bacterial polypeptide expressing nucleotide sequence isolated from the Sargasso Sea
atggaccttagttcaatacctccatctccaatgaagggaatagtaaatattgttgttgaaatacctgcagggagtaggaataaatatgaatattgctctgatgcaggaataatggccttagacagagtattgcattcttcagtgagatacccttttgattatggttttatcccaaataccctcgctgatgatggagctcctctcaatgcaatggtgataatggatgagcctacttttgctg

SEQ ID NO: 266843 - DNA, 535 bp, Unknown
  Bacterial polypeptide expressing nucleotide sequence isolated from the Sargasso Sea
atgcaatcaagttttgaattattatatttaattacttttacaggcattttagctgttgcttatagttatttattatctggtcaaattttatcttcaagtccaggaaacgataaaatgcaagaaatagcaggagctatacagataggagctaaagcatatttaaatcgtcaatataagacaatagcaattgtcggattcattgttcttattatagtaagttatttttttagtttattagttggactaggttattttattggagcatttttatcaggggctgctggttatgtaggaatgttaatttcggttaaagcaaatgttagaacagcagaagcatctagaaaaagtttacaagatggattaacaatagcatttaaatctggagctataaccgggctattggtagctggtttagctctattagcaattaccgtatattatactgttttactttcacttggtgttgagaatagagaaattattaatgctctagttgctttaggatttggagcatcattaatatcaattttgcgag

SEQ ID NO: 266844 - DNA, 907 bp, Unknown
  Bacterial polypeptide expressing nucleotide sequence isolated from the Sargasso Sea
ggttcggatgtatacgaatcttacattgtaacaattttagcatcattattaattgcagcacttattggttctccagaaaactttgcatatccaattctaattggagcttctggactagtggcatccattattggtactgcaacaatcggttcaagaaaaattactgacgttatgaagccactgaatatttcattttatgtttcagcagctattgcaattgcattaaattttgtatttacctatgtacttttaggaacatctccaatcgcttatgcattatttggttcaacagttattggtgtaattctagttcctgtaatacaaaaaattaccgactattacacaaatgccaattctaagcctgtagaagaaatatctgaatctgcaaagtgggggtatgcatcattgacattaatgggaattatcaaaggattacaatcaactggaccatttatgattgctttagttgcagcaattatcatttcatttgcactaacatcttctatggccccagaaggaagtgacccacttctatatggaatatttggaacatcacttactgcaatggcgatgttgtctcttgctggaattgttctttcaattgatgcatttggtccaattgcagataatgctggaggaatagtagaaatgactgaaatgggtgaggataatcgtaaaattactgatgaaattgatgcagttggaaataccaccaaggctgtgactaaaggatttgcaattgcaagtgctgcactagctgcattggcaatgattcaggcattccaatttgaagcatcacattatttcaaagacctagtcattgactatggtctatcaaatccttcagttgtaattggtctattagtaggtggattattccatttatcattactggtcaataattagt

SEQ ID NO: 266845 - DNA, 607 bp, Unknown
  Bacterial polypeptide expressing nucleotide sequence isolated from the Sargasso Sea
atattaacacactgtaatgcaggatggttagccactattgactgggggacagctacttcaccaatatatcacgcacatcaaaaaggaattaaagtacatgtttgggttgatgagacaagaccacgaaaccaaggagctaacttaacctcttatgaattaaacgaagaaggaatatcaaataccgtaataacagataatgctggcggtatattaatgcaaagaggagaagtagatatgtgtatcgtcggaactgatagaactttatcaaacggtgacgtttgtaataaaataggaacatatttaaaagctttatctgctaaagataataatgttcctttttatgttgctttacctagctcaactatagactggagtattaaagaccaaaaacaaattcccatagaagaaagaaattcagaggaactatctcatgttgagggaattgatgaaaataatgaaattaaaaaagtgagaatttacccacaaaaaagcaagtctttaaatctagcgtttgatgttacgcctgctaaattagtaacaggtttgatcactgaaaaaggtgtttgtgaagcatcagaaaaaggattgaaaggattatttaaatgaa

SEQ ID NO: 266846 - DNA, 418 bp, Unknown
  Bacterial polypeptide expressing nucleotide sequence isolated from the Sargasso Sea
accgataacgctggcggtattttaatgcaaagaggagaagtggatatgtgtattgttggaaccgatagaactttatctaatggcgatgtgtgtaataaaattggtacttatctaaaggctttatcagcaaaagataataacgttcctttttatgtcgccttgccaagttcaactatagactggggtataaaagatcataaacaaattcctatcgaaaagagaaactcggaggagctatcacatgttgagggaatagacgaaaataacgaaattaaaaaggtaagaatttacccacaaaaaagtaaatcattaaacctagcctttgatgtaacacctgctaaattagttacaggattaattacagaaaaaggtatttgtgaagcatcagaaaaaggattgaaaggattgtttaaatgaa

SEQ ID NO: 266847 - DNA, 667 bp, Unknown
  Bacterial polypeptide expressing nucleotide sequence isolated from the Sargasso Sea
gatattccaagtcaaaatattttttattcaactattgtttgtttagctgttggttatttaatctctgcttttactgaatattatactgcacttggaaaaaaacctgtattgaatattgttcaaaactcctcaactggtgcagcaacaaatattatagctggtttagccacaggtatgaaatcaactttctcttcagtaattttgtttgcactagctatttggggtgcctatgaacttggaggtttttatggtgtagctatttctgcatctgcaatgatggctacaacagccatgcaattggcaattgatgcttttggccctatttctgataatgctggaggtgtcgcagaaatgagtgaattaccaaaagaagtaagagaaagaacggatattttagactctgttggaaatactaccgctgctactggaaaaggttttgctatagcatcagctgcactaacagctcttgcactttttgctgcttatgtaacattcactggaatcgatggtatcaatattttcaaagctgatgtactcgctgcgttatttataggagggatgattcccgtgattttctcagcacttgctatggaatcagttggaaaagctgctatgaaaatggtacaggaagttaggagacagtttaaagaaatacctggtattcttg

SEQ ID NO: 266848 - DNA, 808 bp, Unknown
  Bacterial polypeptide expressing nucleotide sequence isolated from the Sargasso Sea
ctgtgcaatgtgattggtctggcctgcggtgtgctgatcggggaggccacagagcaagccacctcctttgcatatcgccccaccatctccatcgcggaagcgggtaggaccggcgccgccaccgtgattatccaaggcttgggtgtgggtatgatgtcttgcgtgccccccgccttccttgttgtcgtcacggtgctcgcttgctacgctctgggcagcgtgtacggtgtggccatcgccgcggtgggtatgctatccactctaggtgtgacgctggctactgatgcatacgggccggtcgctgacaacgcgggcggcattgcggagatggcagagctgggccacggtgtgcgggagatcacggataaactagatgcgctgggcaacaccaccgctgcaacgggcaaaggtttcgccgtgggctccgctgtgctgactgctctggctctgatgaccgccttcgcgcagcagtcaggcgtgcattcgatctctctcaccgagcccatcgtgttggcgggaacactggtgggtgccgtgctgccctacctgttcgcctccatgtctatgctctccgtacgcgccgccgcgcagaaaatcatcgaggagattatttaccagttctacgacgatccagagttagaagggctgctagcaggcaaggagggcgtcgagcccaactccaagagatgcgtcgagatcgccacaaagtccagcctcagagagatgatcatgccgggcatcgtcgccaccttcatgcccagtgtggtgggcttgctggtgggcgctaaggcgctggggggcatgcttg

SEQ ID NO: 266849 - DNA, 320 bp, Unknown
  Bacterial polypeptide expressing nucleotide sequence isolated from the Sargasso Sea
gatggatcttagttcgattcctccatctccaatgaagggcatagtaaatatagttgtcgaaatacctgcaggtagtagaaataaatatgaatattgttctgaagcaggaataatggcattagatagagtattgcattcttcagtgaggtacccttttgattatggcttcatcccaaatacccttgctgatgatggtgctcctctagatgcgatggtgataatggatgagcccacttttgctggttgtttaataaaagctcgacctattggagttttggatatgcatgattgtggtgcatatgacggaaaacttttatgtg

SEQ ID NO: 266850 - DNA, 116 bp, Unknown
  Bacterial polypeptide expressing nucleotide sequence isolated from the Sargasso Sea
ccagaggatgacccctaggaatccggcaacaatcgcagacaatgttggtgacaatgttggtgatgtagcaggtattggtgctgacttgtttgaatcatatgtggtggagtcatagc

SEQ ID NO: 266851 - DNA, 729 bp, Unknown
  Bacterial polypeptide expressing nucleotide sequence isolated from the Sargasso Sea
aaccgaatactacaccggaggtaaacctgtccgaaaaattgctgaaggaggagaaactggtgcggccacaataatgataaccggattggcagttggcatgcagtcagtagcaattcctgtacttgctattgttgtaataatttttacggcaaactcttttgctggtctttacggtgttgggatggccgctgttggaatgttaagcactgttggaattacaatggcaattgatgcctatggtcctgtagctgacaatgctggtggtatagctgaaatgtcagagatgggcaaagaaacacgagagattactgacagtttagatgaagttgggaatactacagctgctataggtaaaggctttgccattagtgccgcagcattggcagctttggcattgataagtgcatacatagaaaaaattagtggaagcgatgcaagttttatactagctattaatgatcctttagttctagctggaatgttccttggtggcattttcccattccttgtcagctcaatgacaatgacagctgttggtgatgcggcttttgacatgataaaagaaatcaggcgtcaatttaaagaaattcctggtcttctagaaggaaaagcaaagccagatacagcaaaatgtgtagacatagcgaccaaagctgcactaagaaaaatgatcgctccaggagctcttgcagttttagccccagttgtagtcggttcaattctagggcc

SEQ ID NO: 266852 - DNA, 556 bp, Unknown
  Bacterial polypeptide expressing nucleotide sequence isolated from the Sargasso Sea
gatggaccttagttcaatacctccatctccaatgaagggaatagtaaatattattgttgaaataccttcagggagtaggaataaatatgaatattgctctgatgcaggaataatggctttagatagagtattgcattcttcagtgaggtacccttttgattatggttttataccaaataccctcgctgatgatggagctcctcttgatgcaatggtcataatggatgagcctacttttgctggttgtctaataaaagctagacctattggagttttggatatgcatgattgtggcgcatatgatggaaaacttttatgtgtacctatggctaatcctagacaggctaatatagtgagtattaatcaaattgctcctaatcagcttgaggatgttgctgaattttttagaacaagtaaaggacttgatggaagaacagtgcaaattgacggttggagggattttgatgttgttgaaaatttattgaaaagttgtatccctctaaaaaagaaaaactttaaagtacttaagaaatcaaatattggtaaattaaattga

SEQ ID NO: 266853 - DNA, 130 bp, Unknown
  Bacterial polypeptide expressing nucleotide sequence isolated from the Sargasso Sea
gttgttggggacactgttggtgatccatttaaagacacatctggaccttctatgaacatcttaattaatgtaatggcaatcgttagtttagttatagctccattgttaacattaaacggaatgttataaa

SEQ ID NO: 266854 - DNA, 826 bp, Unknown
  Bacterial polypeptide expressing nucleotide sequence isolated from the Sargasso Sea
catgggaagtcttctttggtctctaagaacaggtattttttcagctggtgtaattgtattagctgtaacattatttatggcgttaaccaatgcatttccaatggaaatattttggattattttaactggattaatagctggggtcattattgggactgcttctgaaatagctacatcttatgaatatagttatacaaaaaatttagctgaacaagccaaaactggtgcagccacaataataattggtggtttgggattaggaatgataagtactattatccctacccttgtgataataatatcaatggcaatagctcatgcacttggcgatttttatggaatagctttggctgcagtgggcatgctttcaacattgggaattacccttgccacagatgcttatggacctgtggctgataatgccggaggaattgctgaacaagcaaaattaaaacctgaggttagagaaagaactgatgctttagattcattaggaaacacaacagcagctacaggtaaaggttttgctattggatctgcagtattaactgcaggtgcattattattttcatatgcccaaattgctggtatcagtaaaatagatattatgcaagtggaagttttgatagggcttataattggtacccttatgccatttgttttttcagctttaacaatgcaggctgtggggtcagctgcaatagacatggtaaatgaggtcagaagacaatttaaagaaataaaaggattaatggaagggaaagctgttgctgattatgcaaaagcagttgaaataagtactgacggatctttaaaagcaatgata

SEQ ID NO: 266855 - DNA, 520 bp, Unknown
  Bacterial polypeptide expressing nucleotide sequence isolated from the Sargasso Sea
attaaagtacatgtttgggttgatgagacaagaccaagaaatcaaggagctaacttaacttcctatgaacttaatgaagaaagaattcctaatactgtaataactgacaatgctggtggtattttaatgcaaagaggtcaagtggacatgtgtattgtagggactgatagaactttatctaatggcgatgtttgtaataaaattggaacttatctaaaagctttgtccgcaaaagacaacaatgttccgttttatgtggcattaccaagctcaacaattgattggaaaatcaaagaccacaaacaaattccaattgaagaaagaaattcagaggaactatcacatgttgagggaatagatgaaaataatgaaataaaaaaagtaagaatttacccacaaaaaagtaagtcattaaacctagcctttgatgtcacacctgctaaactagttacaggtttaatcactgaaaaaggaatttgtgaagcttcagaaaaaggtttgaaaggtttatttaagtgag

SEQ ID NO: 266856 - DNA, 347 bp, Unknown
  Bacterial polypeptide expressing nucleotide sequence isolated from the Sargasso Sea
tatgtctgttgatacaattttattatacacaatttttgctgggatcttatccattgtttatggatttgtaacaggatcttcaattttgaatgccagtgcagggaatgcaaggatgcaggaaattgcttctgctattcaaataggtgcaaaagcctatttgaacagacagtacaaaacaatcgctatagttggtgttgttgttttagttattattagttttgcattttcattattagttggaattggatatttaattggtgcagctttgtcgggtatcgctggttacgttggaatgttggtgtctgttcaagcaaatgtacgtacagcagaagcttcaagaaaaggtt

SEQ ID NO: 266857 - DNA, 455 bp, Unknown
  Bacterial polypeptide expressing nucleotide sequence isolated from the Sargasso Sea
tgagttaaatgaagagggaatttctaatacaattattactgacaatgcgggtggaattttaatgcaaagaagacaagtagatatgtgcattgttggaactgatagaaccttatctaatggtgatgtttgtaataaaattggaacttatttgaaagctttatcagcaaaagacaataatgttccattttatgttgctctacctagctctacaattgactggagcattaaagattacaggcaaattcctatcgaagagagaaactcagaagaattatctcatgttgaaggagttgataaaaataatgaaattaaaaaggtgagaatttacccacaaaaaagtaagtcacttaacctagcctttgatgtaacacctgctaaactggtaacaggattaattacagaaaaaggaatttgtgaagcatcggaaaatggattgaaaggattatttaaatgaa

SEQ ID NO: 266858 - DNA, 742 bp, Unknown
  Bacterial polypeptide expressing nucleotide sequence isolated from the Sargasso Sea
gaaagatattttgaaaatagctctaagtgaggcaagatcgattacagatgaggatgaaaaattttgtaaaaatatcggtttgaatggtctaaaaattattgaagacatttccaaaaaaaaaaaagatagagtaaatatcttaactcattgtaatgctggatggttagcaactatagactgggggacagctacttcaccaatttatcatgctcatcaaaaaggtattaaagtacatgtttgggttgatgagacaagaccacgaaaccaaggagctaacctaacctcatatgaattaaatgaggaaggaatatcaaacactgtaattactgataacgctggaggaatacttatgcaaagaggagatgtagatatgtgcattgttggaactgatagaactttatctaatggtgatgtgtgtaataaaattggaacttatttgaaagctttatctgcaaaagataataatgttccattctacgttgctttgcctagttcaacaatagactggaacattaaagatcacaaaaaaattcccatagaagaaagaaattcagaggagttatcccatgttgagggaattgatgaaaacaatgagattaaaaaagtaagaatttacccacgtaaaagtaagtctttaaatctagcctttgatattacgcctgctaaattagttacaggtttaatcactgaaaaaggagtttgtgaagcttcagaaaaaggtttgaaaggtttatttaagtga

SEQ ID NO: 266859 - DNA, 763 bp, Unknown
  Bacterial polypeptide expressing nucleotide sequence isolated from the Sargasso Sea
aggaatgggatcagatatatttgagtcgtattgtggctctatgattgcatcaatagcgatagcttatacacttggtaacaaagatatgatgatgcttcctctagctttagcatctactggtttggtggcttcaataataggtatatttatagtaaaacttcagtctgcaaaagcacctgctagtgctttgagatcaggaacacttttagcgccagtaatatttgttgcaatggcttatttcataataaattcttttgatggagtgggcatgaatgtatggtggtgcgtaatagctggtgcagtaggcggagtattgataggactcattacagaatattatacaggtggaagtccagttaaaaagattgctgaatcaggagaaactggatccgcaacagtaatgatttcaggactatcagtcggaatgcaatcagttgtaatacctatttctattttagctggcattattctagcttcaactcagttatcaggaatatatggtgttggaattgctgctgttggtatgcttgcaactgttggaataacaatggctatagatgcatatggaccagttgcagataatgctggtggtatagctgaaatgtctggtatgggagaagaggtaagagaaattactgattctttagatgagttaggaaatactactgctgcaattggaaaaggctttgcaattggagctgcagctttagcagccctagctataatttcagctttctcagctgtagtagcggatgcaaatcct

SEQ ID NO: 266860 - DNA, 832 bp, Unknown
  Bacterial polypeptide expressing nucleotide sequence isolated from the Sargasso Sea
agcatagaattaatcgcatctagacccactgcaatcaatcttaaatgggcagtagacagaatgatgaaaaagttatctggagtaaacgataaagatatcttgaaaatcgctcttgatgaggcaaaggcgattacagaagaagatataaacttttgtaaaaatattggcttgaatggtctcaaaattattgaaaatattgcaaacaaaaaaaaagatacagtaaatattttaacccattgtaatgcggggtggttagcaactatagattggggcacagctacttcaccaatttatcatgctcatcaaaaaggaattaaaatacatgtttgggtggacgagacaagaccgcgaaatcaaggagctaacctgacttcatatgaattaaatgaagaaggaatatcaaacactgttatcactgataatgctggcggaatattaatgcaaagagggcaagtagatttgtgtattgttggaaccgacagaactttatctaacggtgatgtatgtaataaaattggaacttatctaaaagctttagcagcaagagataataatattcctttttatgtagccttaccaagttcaaccatcgattggaaaattaaagaccataggcaaattcctattgaagaaagaaactcagaagaattatcctatatggaaggtgttgatgataataataaaattacaaaagtaagaatttatccaaaaaaaagtaaatcattaaatttagcttttgatataactcctgctaaatttgtttcaggtttaatcactgaaaagggagtatgtgaagcatcagaaaaaggactaaaaggtttattcaagtgag

SEQ ID NO: 266861 - DNA, 424 bp, Unknown
  Bacterial polypeptide expressing nucleotide sequence isolated from the Sargasso Sea
aatggatgccatctactggttcgctctcgcctgtggggtcgtttcacttctttatggtatttatgctgtaaggtcggtgtttgcggcaagcactgggtccgaacggatgcaagaaattgctgctgctgtccaagagggcgcgcgggcttatttaaatcgacaatatataacaataggtattgttggaattgtcatttttggaattttaacaggtctcttaggctataaagttggtattggatttgcaattggtgccatactttctgcagcggctggatatatagggatgtatgtctctgttagggctaatgtaagaacagcccaagcagctacagagggcttgaaggccgcattatcaatagcttttcgttctggtgcagtaactgggatgcttgtagttggactcggtcttctcggggtttga

SEQ ID NO: 266862 - DNA, 306 bp, Unknown
  Bacterial polypeptide expressing nucleotide sequence isolated from the Sargasso Sea
tatttacaccaattataattggcttggtattgggtcaaaaagaaatgcttggtggtattttagctggagtgacagtaactggtgtgttactagcaatctttatgtcaaatgctggtggatcttgggacaatgcaaaaaaatacattgaatctggtaatcatggcggaaaaggtagtacagcacataaagctgcagttgttggtgatacagttggggacccttttaaagatactgcgggaccatcactaaatattttaatcaaattaatatcagtggtatcgcttgtaatcgcaccacttatataat

SEQ ID NO: 266863 - DNA, 196 bp, Unknown
  Bacterial polypeptide expressing nucleotide sequence isolated from the Sargasso Sea
ggagaaaattgatcctttccaagctgaaataaaggacttagacgatttatcaaataaaaccaaggaacgaatagctcatttctttgaacactataaggatctagaaaaagggaaatgggttaagctactgggctgggggaatagagttgaggctttaggaattataaaagattcaataaagcagggcgaaaagtaa

SEQ ID NO: 266864 - DNA, 143 bp, Unknown
  Bacterial polypeptide expressing nucleotide sequence isolated from the Sargasso Sea
tatagctgtttattactatttattattgtcatttaacgtcgaagaaagagaaattgtaaatgcacttgttgcacttggctttggagcatctttaatatcaatttttgcaagaatgggtggaggtatatttaccaaaggcgctg

SEQ ID NO: 266865 - DNA, 949 bp, Unknown
  Bacterial polypeptide expressing nucleotide sequence isolated from the Sargasso Sea
aataaatgcaattaaaaaaatggaagtaagaggggccccattgattggtgcaacagcggcttatggtcttgttttatcaattattgaaaagaatgatctttcattcttaaataaatcaagtgaagatttaattaaatcaagaccaacagcaataaatctaaaatgggcagtagatcgaatgatgaaaaagttatcaggtaaaaatgataaagaaattctaaacatagctttaaatgaagcaaaaactattgttgaggaagatataaaattttgtgaaagcattggtaaaaatggtcttaaaattatagaggaaatatcaaataaaaaaaaagatacagtgaacatccttactcattgtaatgcaggatggttagcaacgatcgattgggggacagcgacatcaccaatctatcacgctcatcaaaaagggataaaagttcatgtttgggttgatgaaacaaggcctagaaaccaaggagctagcttaacctcatatgaattaaatgaagaaggggtcccgaacacagttatcacagataatgctggtggtattttaatgcaaagaggtcaggttgatatgtgcatagttggaacagatagaacgctctctaatggagacgtatgtaataaaattggaacttatttaaaggctttagccgctaaagataataatgtccctttttatgtggctttacctagttcaacaattgattggagcattaaagatcataataaaattccaatagaagaaagaaattcagaagagctctctcatgttgaagggatagacgaaaataattctattaaaaaagtaagaatttacccacaaaagagtaaatcattaaacttagcattcgatgttactcctgctaaatatattactagcttaatcacagaaagaggaatttgtgaagcatccgaaagaggactaaaaaatttgtttaaatga

SEQ ID NO: 266866 - DNA, 578 bp, Unknown
  Bacterial polypeptide expressing nucleotide sequence isolated from the Sargasso Sea
tatgacagacaatatcgccctatggctatctatttcagctggtggactggcaattttatatggaattttttctgctcaatggattgtaaaacaatcagcaggtaatgaaaaaatgcaacaaattgctggcttcatccaagaaggtgctaacgcatacatgaacagacaatacaggactataggtattgttggtctagttttgttcatactgctgtctgtataccttgatattgcaacaggtattggctttgcaattggtgcaatcttttcagccttggctggctacattggaatgtttgtctctgtgagagctaatgtaagaacagcggaagcagcaagaattggtgtcaatcctgccctaaacattgccttcaagggtggcgcgataactggtctacttgttgtgggtttaggtctatttggagttgctggttactacctaatacttatgaacatgggtatgacatctgaggatgccatccattctcttgtagggcttgcttttggtggatcactcatctcaatattcgcaagatttggtggaggaatattcacaaagggtgcagatgtcggtgctg

SEQ ID NO: 266867 - DNA, 740 bp, Unknown
  Bacterial polypeptide expressing nucleotide sequence isolated from the Sargasso Sea
gctaagtctgagggaaacaggacctgctacagtaatgattactggcttgagcgttgggatgcaatctgttgttctgcctctgtttgtcattgcaggtattattggtgtttctacatacttttctggactatatggcgttggaattgcagctgtaggtatgttggctacagtgggtataactatggctatagatgcttacggacctgtagctgataatgctggaggtatagcagagatgagtggtatgaaacctgaagtaagagaaattactgactcattagatgaattaggaaatacaactgcggcaatcggtaaaggatttgcaattggtgcagcagcattagcagcattagctattattgcagcttatatgcttgcaacaggacttgagtctctttcactcaatgatccgagagtacttatgggtatgttcattggtgggacaataccattcttagtttcatccatcacaatgacggctgtcggagatgcagcttttgaaatgatagaagagattagaagacaatttagagaaataccaggcctgctggaaggtaaagcagaaccagacaatgctaagtgtgttgatatagcaactaaggcagcgctgaacaaaatgcttctaccaggagcaattgctattggttcgccagtcgttgttggatttgctctagggccagtccatcttggcggtatgcttgcaggagcactattaggttgtgtgcttatggcattaatga

SEQ ID NO: 266868 - DNA, 532 bp, Unknown
  Bacterial polypeptide expressing nucleotide sequence isolated from the Sargasso Sea
atgttaaattatttagaacttctttatttgatttctttcacaggtatacttgctgtagcttatagttaccttctttcaggtcaaataatctcatccagcccaggtaacgctaaaatgcaagagattgccgaagcaatacaaattggagctaaagcttatttaaacagacaatacaaaacaatagccattgtaggtgtaattgttttagcaattgttacttatttttttaattatttagtaggactaggatattttattggggcttttttatcaggagtagctggatatgtgggaatgcttatatctgtaaaagccaatgttcgtacagctgaggcttctagaaatagtttacaatctggtttaacaattgcatttaagtctggtgcaataacaggtttattggttgctggtttagccttattagcaataactatttattatatcattttaattaatttgaatgtagataatagagaaataatcaacgctttagtcgctttgggttttggggcatctttaatttcaatttttg

SEQ ID NO: 266869 - DNA, 940 bp, Unknown
  Bacterial polypeptide expressing nucleotide sequence isolated from the Sargasso Sea
aggcgattccgctaaagccatccatttatataaaaaagccattgagttaaatcctgatcgtcctttttcctatgtgaatctatttatactatacatggatcaaggtaattacactaaagcgatcaaattattagaggaagctattgatgtacgcccagaattttctgaatattatgtcaacctgggacttgcttactatcgccaaggcaaccttagcaaagccatccagagttatgagaaagccattgcgttagattataattatgctaatgcctataacggcctgggacttgcttactatcaccaaggcaaccttagcaaagccatccagagttatgagaaagccattgcgttagatcccaattttgctctagcctattacaacctggggattgtttacgattatcaaggcaatacaaccaaagccatagagctatataagaaagccattgccttagatcccaattttgctctagcctattacaacctggggtttgcttacaaaaaccaaggcaaccttaccaaagccatccagagttatgagaaatccattgcgttagatcctgataatgctgatatctatgtcaatctggggcttgcttacaaaaaccaaggcaaccttaccaaagccatccagagttatgagaaatccattgcgttagatcctgataatgctgatgtctattacaacctggggattgtttacgacaaccaaggcaatacaaccaaagccatccagagttatgagaaatccattgcgttagatcctgataatgctgatgtctattacaacctggggcttgcttacaaaaaccaaggcaacctcaccaaagccatccagagttatgagaaagtcatagagttgtttgagaaagccattgtcttagatcctgatcataacccattttatgctaatgcctatgcccaacctgggggttgc

SEQ ID NO: 266870 - DNA, 883 bp, Unknown
  Bacterial polypeptide expressing nucleotide sequence isolated from the Sargasso Sea
aatgagtctacctctagcattagcgtctattggtttaatatcatcaattttaggtatcttaattgtaagggctcaatctgcgaaagcacctgctgcagcattgaggactggaacaataggttccccagttatttttatagctttagcttttggtttaatttcatatttggatatttcattaaatgtttggttttgtgttcttacaggagctgttggaggtgtattaattggattaataactgaatactatactggcagcacacctgtagagaagatagcaaaatcaggtgaaacaggatctgcaactgtgatgatttctggtctttcggttggaatgcagtctgttgtaattcctatcttaattttggcaacaattatttttatttctacaacattatttgatttatatggagttggcattgcagcagttgggatgcttgctacagttggcataacaatggcaattgatgcatatggtcctgttgcagataatgcaggtggaattgcagagatgtcaggaatgggagaagatgttagagaaattactgattctcttgatgagcttggaaatacaactgcagccatcggtaagggatttgcgataggtgcagctgccttggctgcattagctataatcgcagcttttgttcaagtagttggagtaaataatgacggattccagttgattttatctgatccaattgttttagttggaatgtttattggaggctccatcccatttttagtttcatcaataacaatgactgccgtaggtgatgcagcatttgagatgattaacgagataagaagacagtttagagagattccaggaatattagaaggcacaggagagccagacactgacaaatgtgttgagattgct

SEQ ID NO: 266871 - DNA, 550 bp, Unknown
  Bacterial polypeptide expressing nucleotide sequence isolated from the Sargasso Sea
cacgacgatcccatgccagacgactccgacgaaggatggaagatcttcgcctgcatccagatcggtctggtcgctggtatcctgatcggcgagtgcaccgagtactgcaccagctacgcgtaccagcccacgaagtcgatcatgatggcgggcaaaacgggtccggctactgtcattatccagggactgggcgtcggcatgctctcgtgcgtcggaccggtcgtgatcattgtcgctgccattctgggctgcacttcgctctccggcgagtacggcgtcgccattgcggctgtgggtatgctgtccaccctgggcatcaccctcgccaccgacgcctacggtcccgtggctgacaacgccggcggcatcgccgagatggccgaactgccggacgacgtgcgcgagactacggacgctctggacgcgcttggcaacaccacggccgcaacaggcaagggcttcgccatcggctcggccgtgctcacagcgctgtctctgctgtcggccttcaaggaagagattggcacacccttcgctggcgagagcctgg

SEQ ID NO: 266872 - DNA, 691 bp, Unknown
  Bacterial polypeptide expressing nucleotide sequence isolated from the Sargasso Sea
acctatagcttgcattattctcattatttatatttcaactgaattaactggcctttatggtgttggtattgcagcggtcggtatgttgtcgactgtaggtataaccatggctatagatgcttatgggcctgttgcagacaatgctggagggatagcagaaatggcaggtatgccttctgagactagagtaattacagatgaattagatgagcaaggtaatactaccgctgccattggtaagggtttcgctatcggagctgctgctttagcagcattagcaatcatctcggcttttgttgaaacagtttctgccaatagggccgagccacttcaacttgttctatctaatcctacagtactaataggtatatttattggaggagcaatacctttcttaatagcttcaattactatgacagctgttggagatgctgcctttgagatgattaatgaaataagaagacaattcaaagaaatcccaggacttttagaaggtaatgcagagccagacactgcaaaatgtgtagatattgcaacagcagcagcacttaagaaaatgctcctacccggagttattgctgtttcggcaccacctttagttggactaggaattggagctgaggctttgggtggaatgcttgcgggaggtcttctagtttgcgtgcttatggcattattcatggcaaatgct

SEQ ID NO: 266873 - DNA, 730 bp, Unknown
  Bacterial polypeptide expressing nucleotide sequence isolated from the Sargasso Sea
gaaatagctctgaatgaagcaaaagaaatttgtgaggaagatataaaattttgcaaaaatattggtgaaaatggtcttgaaataattgaacaaatagcaaataaaaaaaaagataaggtaaatattttaacacattgtaatgctggttggctcgcaacaataaattgggggactgcaacttctccaatctatcatgcccacgaaaaaggaattaaaattcatgtatgggttgatgaaactagacctagaaaccaaggagcaaacttgacatcttatgaattaaatgaggagggaatttctaatactgtaataactgacaacgcaggtggtattttaatgcaaagaggacaagtagatatgtgcattgttggaactgatagaactttatctaatggagatgtttgtaataaaattggaacttatttaaaagctttatctgcaaaagataataatgttcctttttatgtagccttaccaagttcaactatagactggagcatcaaagatcataaacaaatccctatagaagaaagaaattcagaggagctatcacatgttgagggaatagatgaaaataatgaaattaaaaaagtaagaatttacccacaaaaaagtaggtctttaaacctagcctttgatgttacacctgctaaactagtaacaggattaattacagaaaaaggagtttgcgaagcttcggaaaacggattgaaagaattatttaaatgaa

SEQ ID NO: 266874 - DNA, 439 bp, Unknown
  Bacterial polypeptide expressing nucleotide sequence isolated from the Sargasso Sea
agatttttctcaaaaagtaaataaggatggaccaagagttattgattatttaccttatcctttcaattatggttttatacctcaaaccttaattccactaaaagaaggtggagacggagatgctttagatattattgtaattggtccgaatttgaaaagaggctcagtagtgaaagctaaaccaattggtgcagtggaaatgttagacaaaggggaaattgatacaaaaataatttctttatcgataaatgatttaggaatttcatactctaattctattgacgatttaaatagagattatattggtgtaatggaaataattaaagtttggttagagaattacaaaggaagcgaagtaaaaattctaaatatctcaggtaaaaatagagctcttgagtacattaaaacttttcatagcaagtttttaagtcaaaaataa

SEQ ID NO: 266875 - DNA, 429 bp, Unknown
  Bacterial polypeptide expressing nucleotide sequence isolated from the Sargasso Sea
gatggaccttagttcaatacctccatctccaatgaagggaatagtaaatattgttgttgaaatacctgcagggagtaggaataaatatgaatattgctctgatgctggaattatggccttagacagagtattgcattcttcagtgagatacccttttgattatggttttatcccaaatacccttgctgatgatggtgctcctcttgatgcaatggtgataatggatgagcctacttttgcgggctgtttaataaaagctagacctattggagttctggatatgcatgattgtggtgcatatgatggaaaacttttatgtgtgcctatagctaatcctaggcaggataatatagtgagtattaatcaaattgctcctaatcagcttgaggatgttgctgaattttttagaacaagtaaaggacttgatgg

SEQ ID NO: 266876 - DNA, 706 bp, Unknown
  Bacterial polypeptide expressing nucleotide sequence isolated from the Sargasso Sea
gcgattacagaagaggatgaaaaattttgtaaaaatatcggcttgaatggtcttaaaattatcgaggacatttctaataaaaaaaaagatacagtaaatattttaacccattgtaacgcaggatggttagcaactattgactggggaacagctacttcaccaatttatcacgcacatcaaaaaggaattaaagtacatgtttgggttgatgagacaagaccacgaaaccaaggagctaacttaacctcttatgaattaaacgaagaaggaatatcaaacaccgtaattacagataatgctggcggtatattaatgcaaagaggagaagtagatatgtgtatcgttggaactgatagaactttatcaaacggtgacgtttgtaataaaattggaacttatctaaaggctttatctgcaaaagataataatgttcctttttatgtagccttaccaagttcgactatagactggagcactaaagatcataaacaaattcctatcgaggagagaaattcggaggagctatcacatgttgaaggaattgacgaaaataatgaaattaaaaaagtaagaatttacccacaaaaaagtaagtctttaaacctagcctttgatataacacctgctaaactagttactggtttaattacagaaaaagggatttgtgaagcttcaaaaaaaggattgaaaggattatttaaatgag

SEQ ID NO: 266877 - DNA, 910 bp, Unknown
  Bacterial polypeptide expressing nucleotide sequence isolated from the Sargasso Sea
ttgaaaacttttccacctaattatccaatcaatgatttagctctaactggctgcctttcattaataaatctcaaagttgaagatatttcaataatagcaaacaattcaagttgtgaagatacagtaaatttaataaatgtaaacggaacggtaaatgaaattagaataaatgattcatttagtgatgctttagatatagatttttctgacttatatataagcaaaattaaaattaaatctgcgctaaatgattgttctgacttttcaggtggtaattacaatcttaatgaattagaactaaacaattgtggcgataaagctttatcagtcggtgaaaaatcaattattaaattaaacaatattttagctgaaaacgtcaatataggtatagcttcaaaagacagctcggtagtaactttaaaaaatgcaaaaatgaaaaatttaaaaacatgcgtatctgcctacaacaaaaaacaagaatttaatggcggtattattaaaatgcagaatttagattgtaaaaattattttagaaaagcagatatcgattatatgtcaaaaatttttgaaggagataaaaacatagtaaataatttatatggttcaaaatatgatccttctgcattgaaagtttcaaaagttaaagatgaagatgctgttaaaaattttcataaagattacaaaaccttttatgaagataaaagtataaacgctgtaattgaaatacctgctggtatgaatgaaaaatggcaagtttcaaaacaaaccggatctttgagcagggaattttttatgggtaaaccgcgcatcattaattacgagccttacccaattaattacggcatgattcctagaaccgcacttccaacaagaattggtggggacggagaccctttagatattatagttt

SEQ ID NO: 266878 - DNA, 556 bp, Unknown
  Bacterial polypeptide expressing nucleotide sequence isolated from the Sargasso Sea
atggaccttagttcaatacctccatctccaatgaagggaatagtaaatattattgttgaaatacctgcaggcagtaggaataaatatgaatattgctctgtcgcaggaataatggctttagatagagtattacattcttcagtgaggtacccttttgattatggttttatcccaaataccctcgctgatgatggtgctcctcttgatgcaatggtgataatggatgagcctacttttgctggttgtttaataaaagccagacctattggagttttggatatgcatgattgtggtgcatatgatggaaaacttttatgtgtgcctatagctaaccctaggcaggataatatagtgagtattaatcaaattgctccaaatcagcttgaggatgttgctgaattttttagaacaagtaaaggacttgatggaagaacagttcaaattgacggttggagggattttgatgtggttgaaaatttattgaaaagttgtatacccctaaaaaagaaaaactttaaagtaattaataaatcaaaaattggtaaattaaattgaa

SEQ ID NO: 266879 - DNA, 529 bp, Unknown
  Bacterial polypeptide expressing nucleotide sequence isolated from the Sargasso Sea
catgagcttcaatcatgttccggccggcaaggacctgccgcaagatttcaacgtgatcatcgagattcccgcgcaaagcgatccggtgaagtacgaggcggacaaggagctgggccttctcgtcgtcgaccgcttcatcggcacgggcatgcgctatccggtgaactacggctacattccgcagacgctgtcgggcgacggcgatccggtcgacgtgctcgtgatcacgccgttcccgctgctggcaggctcgatcgtgcgctcgcgcgtgctcggcatgctgcagatgaccgacgaatcgggtgtcgacgcgaagctggtcgccgtgccgcacgacaaggtgtgcccgatgacggcaaacctgaagtcgatcgacgacgtgcccgagtacctgaaggaccagatcaagcacttcttcgagcagtacaaggcgctcgagaagggcaagtgggtgaaggtcgaaggctgggcaggcatcgaagccgcgcacaaggaaatcaccgacggcgcagcgaactacaagaagtaa

SEQ ID NO: 266880 - DNA, 560 bp, Unknown
  Bacterial polypeptide expressing nucleotide sequence isolated from the Sargasso Sea
gatggagaaccttcccatgatcagcgcgttggttggcgtcgcgggtgtggtctttgctgcaattctcgcgggagttgtaaaaggagcgcctgcgggcaacgaaaaaatgcgcgaaattgcggatgccataagcgaaggtgcaatcgcgtatctgaatcgtcagttaatcaccatgtccatgacgggaatcgtgattttcgtcataatctggttgagcatcgatttgaaaaccggcgtcggttttctggtgggcgcggtggcctcattcattgcggggtatgttggaatgcgggtttcggtactggccaatgtccgaaccgctgaagctgcaagacaaggacttgccgcaggactttccctggcattcaaaggcggggcggtaaccgggatgatggtcgccggactggctttgacggcagtcgcgggcttttaccacttcacccacgatgtcatcgcactggtagcgctcggtttcggtggaagtctgatctcgatctttgcacggcttggaggaggaatcttcaccaaaggtgctgatgtgggagctgatctcgtcggta

SEQ ID NO: 266881 - DNA, 181 bp, Unknown
  Bacterial polypeptide expressing nucleotide sequence isolated from the Sargasso Sea
cttggtggaaaaggttcagatacacatgctgctgcagttgtgggcgacacagtaggagatccttttaaagatacttccggacctgcgatgaatatcttaattaatgtgatggcaattgtaagcttagttattgctggtcttctaccagttgatggcctaatagttaccttatttaattaag

SEQ ID NO: 266882 - DNA, 747 bp, Unknown
  Bacterial polypeptide expressing nucleotide sequence isolated from the Sargasso Sea
taaacgataaaaatattttgaaagtagctctagctgaggcaaagaaaattacagaagaggatgaaaaattttgtaaaaatataggtttgaatggccttaaaattattgaagagatagctaacaaaaaaaaagatacagtaaatattttaactcattgtaatgcaggttggttagcaactatagattggggaacagctacttcaccaatttatcatgcacatcaaaaaggaattaaggtgcatgtttgggttgatgagacaagaccacgaaaccaaggagctaatttaacttcatatgaattaaatgaggaaggaatatcaaacactgtaattacagataacgccggaggtatacttatgcaaagaggagaagtagatatgtgtatagtaggaactgacagaactttatctaatggcgatgtatgtaataaaattggaacgtatttaaaagcattatctgcaaaagataataatattccattttatgttgccttaccgagttcaacaattgattggagcattaaagatcatagggaaattcctattgaagaaagaaattcagaggagctttcacatgttgaaggagtggatgaaaataatgaaattaaaaaggtaagaatttatccgcaaaaaagtaagtcacttaatttagcctttgatgttacacctgctaaactagttacgggtttaataaccgagaaaggtgtatgtgaagcatcagaaaaaggactgaaaggtttattttagt

SEQ ID NO: 266883 - DNA, 1030 bp, Unknown
  Bacterial polypeptide expressing nucleotide sequence isolated from the Sargasso Sea
atgccgcttcgtctgccacctctgcccgcgcttcgcttcttcgaggcggccggcaggcatcagagtttcaagctcgccgccgccgagttgaacgtcacgcctagcgcgatcagtcacggcatcgttggcctcgagcagtcgctcggtgtggaactgttcgtgcgcgagccgcgtggcatttcgcttacggcagcgggcgccgactatctgtcgtacgtatccgaagcgttttcgctgatcgccatcggcacgcagcgcctgccgaaccaccgcgcgaatcgcccgatcgcgctaagttgcgcgcccacgctagcctcgcgctggctgctgccgcgcctcggcgcgtttcgctcgcgctggccggacgcgaacatcaccgtcgacacatcgcatcgtcaggtcggttttcccgtcgacggcttcgatttcgccattcgcctgagccgtgccccggtcgcgggaaccgcctggacccgtctgttcggcgaacgcctcgtgccggtgtgcagtcccgcctatctggacaatctacgcaacgggcacgggcatctcgatctgcgccgcgcgacacttattcacgtgaactcggccagcgaggactggcaggcgtggctcgatggtgtcgccgtcgagggcgaccccgtcgagggcgacaccgtcgatggcgaccccgtcgatggcgaccccgtcgacctcagcgacgggttgcgcgtcgacacgatccagctcgctttcgaagccgcaagcatgggtctcggcgtcgcgctcggcagacgtccgctgatggaccgcgatctggcgagcggcgcactggtcgaggcctgtccacaaaccatcgcctcagccaacgcttattggctcgtgagcgcgcaagacgcggatagcgcggcgcatcgcccggaattgctcgacttcaaacagtggctgctcggcgaggcagcgcaattcgccaatccgtccggtagcgaagtcactgaaccgcccgctgaatcgctgaatctccgaagcgctaaatctacgaatctctgaa

SEQ ID NO: 266884 - DNA, 171 bp, Unknown
  Bacterial polypeptide expressing nucleotide sequence isolated from the Sargasso Sea
aatgagcttgagtgctatttctgctggtaaaaacgtaccagacgaagtaaatgtgatcatcgaaattccagcacacgctgacccggtgaagtacgaagtagacaaagacacaggtgcactatttgttgaccgtttcatggcaacttgcatgcactacccaactaactacgg

SEQ ID NO: 266885 - DNA, 492 bp, Unknown
  Bacterial polypeptide expressing nucleotide sequence isolated from the Sargasso Sea
ctgcaggcagtaggaataaatatgaatattgttctgaagccggaataatggcattagatagagttttacattcttcagttaggtatccttttgattatggttttatcccaaataccctcgctgatgatggagcccctcttgatgcgatggtgataatggatgagcctacttttgctggttgtctaataaaagctagacctattggtgttttggatatgcatgattgtggtgcatatgacggaaaacttttatgtgtgccgatggctaatcctagacaggccaacatagtaagtattaagcaaattgctccgaatcagcttgaggatgttgctgaattttttagaacaagtaaaggactggatggaagaacagttcaaattgatggctggagggattttgatgttgttgaaaatttattgaaaaattgtacacccctaaaaaagaaaaactttaaagtgcttaagaaatcaacttttaataaagtcaattgaa

SEQ ID NO: 266886 - DNA, 1072 bp, Unknown
  Bacterial polypeptide expressing nucleotide sequence isolated from the Sargasso Sea
atgaaaatagagggaaaatcatacaaaacaatctggtttgagaacaatttagtaaaaattattgatcaaacaaaacttcctcatcagtttatcgttaaagatttaaaaaccgtccaagacgcaattaatgcaattaaaacaatggaggtgagaggcgctccattaattggcgcaacggctgcatatggtttagttttatcaattattgaaaaaaatgatttatcttttctaaagaaatctagcgaggacttaattgcatcaaggcccacagcaattaatcttaaatgggcagtagacagaatgatgaaaaagcttaccggagttaatgataaagatatattgaaaatagctttagttgaggcaaaagctattacagaagaggatgaaaaattttgtaaaaatattggtttaaacggtcttaaaattattgaagatattgcaaacaaaaaaaaagatacagtaaatattttaacccattgcaatgcaggatggttagcaactatcgattggggaacagctacttcaccaatttatcatgctcatcaaaaaggaattaaagttcatgtttgggttgatgaaacaagaccaagaaatcaaggtgctaacttaacatcttttgaattaaatgaagaggggatatcgaacactgtaataaccgataacgctggtggtatattaatgcaaagaggaaaagtggatatgtgtattgttggaaccgatagaactttatctaatggcgatgtttgcaacaaaatcggaacttatcttaaagctttatccgcaaaagataataacgttcctttttatgtagccttaccaagctcaactatagactggagcatcaaagatcacagaaaaattcctatcgaagagagaaattcagaggaactatcacatgttgaaggaatagatgaaaataatgagattaaaaaagttagaatttacccacaaaaaagtaagtctttaaacctagcctttgatgttacacctgctaaactagttacaggtttaatcactgaaaaaggaatttgtgaagcttcagaaaaaggtttgaaaggtttatttaagtgag

SEQ ID NO: 266887 - DNA, 496 bp, Unknown
  Bacterial polypeptide expressing nucleotide sequence isolated from the Sargasso Sea
atacctgcaggtagtaggaataaatatgaatattgctctgatgcagggattatggccttagacagagtattgcattcttcagtgaggtacccttttgattatggttttatcccaaatacccttgctgatgatggtgctcctcttgatgcaatggtgataatggatgagcctactttcgcgggctgtttaataaaagctagacctattggagttttggatatgcatgattgtggtgcatatgatggaaaacttttatgtgtgcctatagctaatcctaggcaggataatatagtgagtattaatcaaattgctcctaatcagcttgaggatgttgctgaattttttagaacaagtaaaggacttgatggaagaacagttcaaattgacggttggagggattttgatgttgttgaaaatttattaaaaagttgtatacccctaaaaaagagaaactataaagtacttaagaaatcaaaaattagtaaattaaattgaa

SEQ ID NO: 266888 - DNA, 138 bp, Unknown
  Bacterial polypeptide expressing nucleotide sequence isolated from the Sargasso Sea
aaggaactgatactcattcagcagcagttgttggtgatactgttggagaccctttcaaggacacatcaggaccttcaatgaatattctaattaatgtaatggcaattgtaagtttagtaattgctcctttgctttaaa

SEQ ID NO: 266889 - DNA, 460 bp, Unknown
  Bacterial polypeptide expressing nucleotide sequence isolated from the Sargasso Sea
taaatatgaaaccgacgccaaaaccgggtttatcgttgccgatcgcttccagtcaatgccggttgcctatcccgccaactacggttcactaacccagtctttagccggtgacggcgacccgctggatgttatcttttatactcgtgcgccgctggctccagggacgttaattaagctgcgcgcaataggcgtcctgaagatgatcgacggcggtgaaaaggacgacaaaattgtcgccgtgccggccagtaaaattgaccccacttatgacaacatcaaagaattgagcgatctgcccaagattgaagttcaacgtctggaatctttcttccgcgtgtacaaagatctgccggaagggcgcaagaaggtcgaattaaacggtttcaacgacgccgctacggcaaagcaagagatcaaacaggcctgggatgcctggaaagagaaaaaatcacagcaataa

SEQ ID NO: 266890 - DNA, 556 bp, Unknown
  Bacterial polypeptide expressing nucleotide sequence isolated from the Sargasso Sea
gatggaccttagttcaatacctccatctccaatgaatggaatagtcaatattgttgttgaaatacctgcagggagtaggaataaatatgaatattgctctgaagcaggaataatggccctagacagagtattacattcttcagtgaggtacccttttgattatggttttatcccaaatacccttgctgatgatggagctccccttgatgcaatggtgataatggacgaacctacttttgcgggttgtctaataaaagctagacctattggagttttggatatgcatgattgtggtgcttatgatggaaaacttttatgtgtgcctatggctaatcctaggcaggctaatatagtaagtattaatcaaattgctcctaatcagcttgaggatgttgcagaattttttagaacaagtaaaggactcgatggaagaacagttcaaattgatggttggagggattttgatgtagttgaaaatttattgaaaagttgtatggctccaaaaaagaaaaactttaaagtacttaagaaatcgaatattagtaaattaaattga

SEQ ID NO: 266891 - DNA, 448 bp, Unknown
  Bacterial polypeptide expressing nucleotide sequence isolated from the Sargasso Sea
ttgttttttattatattttttgtttttaatttcaattcatattcaaatgaaatttcaagtcaagtcacgaaagttgatgaatttaaaatagtaggtaaaaaaaattttctatttgactacaaaaactttataacaccattaacagtaaacgtagttattgaaataccaaaaaatactagtgaaaaatgggaagtgtcaaagttagatggatctttagaacatgaattttttatgggggaacctagaataattaattatctgccatatcctatgaattatggaatgatacctaggaccgttatgcctcttcagcttggaggtgatggtgatcctgtcgatgcgattgtacttggagatgcccttcctagaggagaagtggttgaagcaaaagtattagggctaataaaaatgaatgatatgggtgaagtcgacgataaggtaataacag

SEQ ID NO: 266892 - DNA, 554 bp, Unknown
  Bacterial polypeptide expressing nucleotide sequence isolated from the Sargasso Sea
tatgactgaagttttatattttgctattgctagtggggtaatagctctaatttatggtttaataactgctaagtcagttataggtgcagatgccggttctaaaaaaatgcaggaaattgctggggctattcaagcaggagcttacgcttatttaaatagacaataccgaacaatttttattgttggaattgtaatatttgctttattagcatttttactaggaatcaaagtagcactagcttttgcagttggtgcaatattatctggagctgcaggatatataggaatggttgtttctgtaaaggcaaatgtaagaacggcacaagcagctagtgaaggattggctcaaggtttaagtatagcatttaagtctggagcagtaactggaatgttagttgcaggtttggctctattagcagtaactggaacttactatattttactattaaatggtgcagaaggaagagaattgatagatcctcttgtagctttaggttttggagcatcattaatttcaatttttgctaggctaggtggaggaatattactaaagg

SEQ ID NO: 266893 - DNA, 127 bp, Unknown
  Bacterial polypeptide expressing nucleotide sequence isolated from the Sargasso Sea
aattgctgatcatgttggtgataatgttggtgacgtagctggaatgggtgcagatctattcgggagttatgttgcaactgtattagcatcaatggtattaggtaattatataattactgccccctaa

SEQ ID NO: 266894 - DNA, 544 bp, Unknown
  Bacterial polypeptide expressing nucleotide sequence isolated from the Sargasso Sea
tatgccagcattcataccaccacttttaggtctaataggtcttcttatcgccctaggaatatttagagttgttcttagctatccagaaggaaatcctgaagtaaagaaaatcggtgacatgattcattcaggcgcaatgagttttatgaaaactgagtatatgtacttggttgtttttgttcttgttttagctgttttagttttctttgccctgggctgggaaacagcaactgcagttttagttggcgcttcaagttcagctttagctggatttattggaatgtatgccgcaactaaagctaatacaaggacagctgcagcagcccaagatagtggggcagcctcagctttatcaatttctttttacggtggatcaataatgggtctctgtgttgcttctttgggccttcttggcttgggaggattattttattttttaggagagggtcattaccttgaagggtttggaatgggagcttcagttgtagcactattctcaagggttggtggaggaatctttactaaaagcgctgatgtccggggc

SEQ ID NO: 266895 - DNA, 758 bp, Unknown
  Bacterial polypeptide expressing nucleotide sequence isolated from the Sargasso Sea
atctggagttaatagtgaggaaattttaaatatcgctataaaagaagcaaaaaatatttgtgaagaagatgttggcttttgtaagaatattggggttaatggcttaaagataattgaagaaatatctaaaaaaaagaaagatacaataaatatcttaactcattgtaacgctggttggttggcaactattgattggggaaccgcaacttctccaatatatcatgcacataaaaaaggtattaaagttcatgtttgggtagacgaaacaagacctagaaaccaaggggcaaatcttacatcatatgaactaaatgaggagggaatatcaaatacaataattactgataatgcaggtggtattttaatgcaaaggggacaagtagatatgtgtatagttggaactgacagaactttatctaacggggatgtttgtaataaaattggaacttatctaaaagctcttgctgcacatgataacaaggtccctttttatgtggcattacctagttcaacaatagactggaatataaaaaattctaaagatattccaatcgaagagagaaattccgaagaactctcccatgtagaggggttagataaaaataataaattaacaaaagttctaatttatccaaaaaaaagtcaatcaatgaatttagcatttgatattaccccggccaaatatgtaacgggcttaatcacagaaaaaggtgtttgtaatgcatcaaaggagggattagaaagtttatttaaatgaa

SEQ ID NO: 266896 - DNA, 317 bp, Unknown
  Bacterial polypeptide expressing nucleotide sequence isolated from the Sargasso Sea
cggagttattgctgtttcggcaccacctttagttggactaggaattggagctgaggctttgggtggaatgcttgcgggaggtcttctagtttgcgtgcttatggcattattcatggcaaatgctggaggtgcttgggacaatgctaagaagtacattgaaaaaggaaaccttggcggaaaaggaactgatactcattcagcagctgttgttggtgacactgttggagaccctttcaaggacacatcaggaccttcaatgaatattctaattaatgtaatggcaattgtaagtttagtaattgctcctttgctttaga

SEQ ID NO: 266897 - DNA, 532 bp, Unknown
  Bacterial polypeptide expressing nucleotide sequence isolated from the Sargasso Sea
aattccattcttagtttcctcaataacaatgactgccgtaggtgatgcagcatttgagatgattaatgagataagaagacagtttagagaaattccaggaattttagaaggcacaggagagccagatactgataaatgtgttgagattgctacaagagcagcacttcagagaatgctattacctggagttattgcagtttcaatgcctccattagttggctttttattaggagcaaaagctcttggtggaatgttggccggtggattacttggttgtgttcttcttgctttaatgatggctaatgccggaggcgcttgggacaatgctaagaaatatattgagaaaggtaatcttggtggaaaaggctcagatacccatgccgctgcagtagttggagatacagttggcgatccttttaaagatacttcaggacctgcgatgaatatcctaataaatgtgatggcaattgtaagtttagtgattgctgggcttctaccagttgatgggttaatagttaacttatttaattaa

SEQ ID NO: 266898 - DNA, 274 bp, Unknown
  Bacterial polypeptide expressing nucleotide sequence isolated from the Sargasso Sea
ggtggattacttggttgcgttcttcttgccttaatgatggctaatgccggaggcgcttgggataatgctaagaaatacattgagaaaggaaatcttggtggaaaaggctcagatactcatgctgctgcagttgtgggagatacagttggagatccatttaaagatacttcaggacctgcgatgaatattctaattaatgtgatggcaattgtaagtttagttattgctggccttcttccagttgatggcttaatagttaccttatttaattaag

SEQ ID NO: 266899 - DNA, 97 bp, Unknown
  Bacterial polypeptide expressing nucleotide sequence isolated from the Sargasso Sea
tgttggagatccatataaagatacagctggtcctgctgttaatccgatgattaaaattacaaatattgttgcacttttacttttagctgctctgtaa

SEQ ID NO: 266900 - DNA, 991 bp, Unknown
  Bacterial polypeptide expressing nucleotide sequence isolated from the Sargasso Sea
gggtggtaatccacaaaaagcattaaatattggcgaatttggctcatctgcaattatgattgctgtaatgtattttttaatttcaaatcttttgcctaactcatttaccctaggtgataattcgtattcaaatttaggtgttttctgggcttcaactattggtctacttgcaggtcttggcattggtttgattacagagcattacactggaacaaatacatcaccaactctttcaatagctcgacaatcattaacaggtcccgcgacaaatatcatcgcaggtcttggtgttggtatgcagtcaacagctgggcctattttgattattgctgcaggtattgttggtgctcattattttgcaggactttatggtgtagccatggcagcattaggaatgcttgcaaatacaggaattcaacttgcggtagatgcatatggtcctatttcagataatgccggaggcattgctgaaatggcagagcttccagccgaagttcgcgagaggacagataagctagatgctgtaggtaatacaaccgctgcaataggtaaagggtttgctataggttctgcagcattaaccacactagcgctatttgcggcttatatggtaaagagcggaattattgataaaggaattgatatagcaaatcctgctgttatggctggattgtttgttggtggaatgcttccgtttcttttttcatcaatggcaatgggggctgttggaagagcagctatgtctatgattgaagaagttcgtcgacagtttagagatattcctgaacttaaatcagccctagaaattttaaataaaagtgaagagtcacaatggtcagaaaaggaccgtgaagtttatgagttaggattaatgaaagctgatcatggtcagtgtgttgaaatttccacacaagcagcaataaaagaaatggtcttacctggtctacttgcagtgattacgccagttgtttttggttttggaccaaaaatt

SEQ ID NO: 266901 - DNA, 179 bp, Unknown
  Bacterial polypeptide expressing nucleotide sequence isolated from the Sargasso Sea
agaagatgatccacgaaatccaggagtaattgctgacaatgttggagataacgttggtgatgttgcaggaatgggctcagatatatttgaatcatattgcggctcaatgattgcaactatagcaattgcttacactatgacagaagcaaataatggtcctttgatgagctacctctagc

SEQ ID NO: 266902 - DNA, 736 bp, Unknown
  Bacterial polypeptide expressing nucleotide sequence isolated from the Sargasso Sea
atcgctgaaatgtcaagcatgggcgaagaagtaagagaaatcactgattctcttgatgaattaggaaatactactgctgcaattggaaaaggttttgcaattggggctgcagcattggctgctctagcaataatttcagcattttcagctgtagttgcagatgcaaatccagaattttcactagcacttacagagccaattgttttagttggaatgtttattggagtatgtatacctttcttagtttcttcaataaccatgacagcagttggagatgcagcttttgaaatgattaatgaaataagaagacagtttaaagaaataccaggattaatggagggtacagcagagccagattctgaaaagtgtgttgaaattgctacaacagcagcccttaagaaaatgatgttgcctggaataatagctgtatcaatgccaaccattgttggttttgggttaggtgcacaggctttgggtggaatgcttgctggtggattgcttggttgtgtttcattagcgctaatgatggcaaatgctggaggagcttgggataatgccaaaaaatatgttgagaaaggtaatttaggaggtaaaggttcagacactcatgcagctgctgtagttggagatacggttggagatccatttaaggatacctcaggaccatcaatgaatattcttattaatgttatggcaattgttagtttggttatcgcgccactcttaagcatttaat

SEQ ID NO: 266903 - DNA, 568 bp, Unknown
  Bacterial polypeptide expressing nucleotide sequence isolated from the Sargasso Sea
ttgtctcttggacaaccaattgttttagtaggaatgtttataggaatctgtataccgtttttaatctcatcaattaccatgacagctgttggtgacgcagcatttgaaatgattaacgaaattcgaagacaatttagagaaataacaggtttaatggagggaaccgcagatcctgactcagaaaaatgtgttgagattgcaactaaagccgccctcaagaaaatgatgttacctggcattattgctgtagctatgccagcagttgttggatttggactgggcgctatggctttaggtggaatgcttgcaggcggcctattaggttgtgttgcgcttgctttgtttatggcaaatgctggcggagcttgggataatgctaagaaatatgttgagaagggtaaccttggtggaaagggttctgatacccatgccgcagctgttgttggagacactgttggtgatccattcaaagatacatctgggccttcaatgaacatcttaattaatgtaatggcaattgtaagtctagttatagctcctttattaacattgaacggaatgttgtaag

SEQ ID NO: 266904 - DNA, 840 bp, Unknown
  Bacterial polypeptide expressing nucleotide sequence isolated from the Sargasso Sea
ctctggattaattgttggcctttgcgttgggaaagttactgaatactacactgcaactggaaaatcgcctgtactttcgatagttagacaatctgaaacgggtccagcaactactattattgcaggtctaggagttgggatgatatcaactgctatcccaattttattgatttcagtagcaattctctcatcatattattttgcaggattatatggtattgcgatatctgcagtaggtatgctagccaataccggaattcaactagctgtcgacgcctacggtccaatatcggataatgctggcggaatagccgaaatggctgaattacctccagaggttagagaaagaaccgataaattagatgcagttggaaataccacagcagcaattggtaaaggttttgcaattgcatcagcagccttaacagctcttgctctttttgctgcttttatgcaaactgcaaaaattaaaagtatagatatttcaaatcccaccgtcatggttggtcttttaattggtgcaatgctaccatttgttttttctgcactttctatgaatgccgttggaaaagcggcgatgagtatgattgaagaagtaaggcggcaatttaaagaacttccaaaactaaaagcagctttagaagtaatgaaaaaatacgattccgacttatcaaaagctagcaaaactgatttgaaaattttcgaagaagccgatggaattgcagaatacagtaaatgtgtagaaatttctaccaatgcagcattaaaagaaatgatattgcctggattaatggccatattggttcctgtaattattggttttggcgggggtgctgaaat

SEQ ID NO: 266905 - DNA, 511 bp, Unknown
  Bacterial polypeptide expressing nucleotide sequence isolated from the Sargasso Sea
tatgtagaagatttaaaattagttgaaaacttaacacccaattttagtcttgaaaatccttatgttgtagttggtttattaattggtggtttattgccatatttatttgcttcaatgggaatgatggccgttggccgagcaggtggtgcagtagttgaagaagttagaaaacaatttgctgataatccaggtatcatgacaggtgattcaaagcctgattactccagatcagtcgatatgcttacacgttcagcaatcaaagaaatgataattccatctatgcttcctgtattgtcaccaataatacttttctttattgtttcaattgtagctgatcagaatgcagctgtttctgcagtaggagcgatgttgcttggtgtaatagttacaggtatatttgttgcaatctcaatgactgctggcggtggcgcatgggacaatgcgaagaaatatgttgaagatggaaattttggtggcaaaggatcagaggctcataaagctgcagttacaa

SEQ ID NO: 266906 - DNA, 631 bp, Unknown
  Bacterial polypeptide expressing nucleotide sequence isolated from the Sargasso Sea
tatgagcggaataatcgaaacaatattattatatacaattggagctggtttactatctatcgtttatggatttttaactggaaaaaatattcttaattcaagtgcaggaaattcaaaaatgcaagatatcgcgtcagctattcaaattggtgctaaggcatatttagcaagacaatataagactatagctattgttggtgctgtagtgttagtaattgttagtattgcatttagtcctttagttggtcttggatatttaattggagccgctttatctgggattgctggatatgtaggtatgctagtttctgttgaagcaaatgtaagaaccgctgaggcatcaagaaaagggttagcacaaggtctttccgttgcatttaaatctggtgctgtaactggaatgctggttgctggtttggcactactatcaatagctgtttattattacatacttttaaaatctggtgtagatgaaagagaaattgtaaatgctttagttgcattaggttttggtgcatctttgatctcgatttttgcaagattaggtggtggaattttcacaaaaggtgctgacgtgggtgctgatctagttggaaaggttgaggcaggaattccagaagatgatcctaga

SEQ ID NO: 266907 - DNA, 304 bp, Unknown
  Bacterial polypeptide expressing nucleotide sequence isolated from the Sargasso Sea
agtgttttccccgttatcgtaggattgggttttggtcctgaaatgcttggtggacttttaggtggtgggttacttagctgtgtactattggcattaacgatgtccaatgcaggaggtgcctgggataatgcaaagaaatttgtcgagcatggaaatcttggtggcaaaggatctgatgtacataaagctgccgtagtaggtgatacagttggagatccattgaaagatacatctggcccatctatgaatattttaattaacgttatggcaatagttagtctcgtaattgcgccattattataaa

SEQ ID NO: 266908 - DNA, 88 bp, Unknown
  Bacterial polypeptide expressing nucleotide sequence isolated from the Sargasso Sea
aaagatacagcaggaccagctgtgaatcctatgataaaaataacaaatattgtagcattacttttattagcagttattgctggttaat

SEQ ID NO: 266909 - DNA, 688 bp, Unknown
  Bacterial polypeptide expressing nucleotide sequence isolated from the Sargasso Sea
atgaatttaagcttaatatatgttttaggagcaggaactctggccatggctttttcattttggaaaacgatttggatttcaaatcaaaaggaaggtaatgaccgaatgaaatcaataggccttagtatttctaaaggtgccatggcttttttaagagctgaatatcgtattcttgcaatctttgtgatttttgttgccatgttattggctttttcaaataggaatgctgaaaattctagtccacttattgctatgtcttttataattggtgctgtagcctccgctttggcaggttatcttggtatgaaagttgcaaccaagtctaacaatcgaactactcatgctgctaaaacaagcctttcatctgctttaaatgttgcgtttacaggtgggtctgtaatgggacttagcgtagttggtctcggcgttatgggtttggcgggtctattttttgtctattctagtgggttattatttgatgtagatccattaatgaataaatcaataaataaaatactaaatatattatctggattttctctgggggcatcttctatcgcattatttgcgcgtgttggtggaggtatttataccaaggctgcagatgttggagcagaccttgttgggaaagttgaagcgggaattcctgaggatcatccactaaaccctgcgacgattgcagataatg

SEQ ID NO: 266910 - DNA, 589 bp, Unknown
  Bacterial polypeptide expressing nucleotide sequence isolated from the Sargasso Sea
atgaataataatgtcgaaacgattttaatctactcaatcctagctggtattttatcaatagtttatggatattttacaggaaaaaatattttagcttcaagcacaggaaattccaaaatgcaagaaattgcatctgcaattcaaattggagcaaaagcatatttaaacagacagtataaaactatcgcaatagttggtttagtagttcttgttattataagtttctcatttagttttttagtgggcctaggttacttaattggtgctgcattatctggtatcgcgggctatgtaggaatgttagtttccgttcaagcaaatgttagaactgctgaagcatctagaaaaggtttatcaagcggtttatcaattgcatttaagtctggtgcggttactggaatgttagtcgctgggttagctttattatcaatcgctgtttactattatttacttttaaagtttaacgttgataaaagagaattgattaatgcacttatcgcattaggatttggtgcttcacttatttctatatttgcacgactgggtggaggtatttttacaaaaggagctgatgtggagcagatttagt

SEQ ID NO: 266911 - DNA, 505 bp, Unknown
  Bacterial polypeptide expressing nucleotide sequence isolated from the Sargasso Sea
aggaagagcagctagttcagttgtcttagaggttagacaacagtttaaagaaaaaaaagggatcatgtctggaaaagagaaaccagattatggaagatgtgttgatattcttacaaaatctgcaatcaaagaaatgatcattccatcgttacttcctgttttatcgccagtagttgttttctttggcgtttattctctcacaggtagtgtcaataccgcttttcaagcactaggcgctcttttaattggagttattattactggtttttttgtagccatttcaatgactgctggaggtggtgcttgggataatgcaaaaaaatatattgaagatggtaatttaggcggaaagggtagtgaaactcataaagcttctgtcacaggtgatacagttggagatccttataaagatactgcgggtccagctgttaaccctatgattaaaataacaaatattgtatcaattctattgctatcaatagttgtccatttaaatatagtttaa

SEQ ID NO: 266912 - DNA, 436 bp, Unknown
  Bacterial polypeptide expressing nucleotide sequence isolated from the Sargasso Sea
gcatttagagaaattcctgggtctaaaggaaggtaaaaaaggcgttaagcctgatgttgcaaaagctgttgaaatatcaacaactggttcattaaaagctatgattgcaccaggacttttagctgtaattgttccaatagttgttggtttattaccattcttaggtcctgaagctttaggtggtcttttggtaggatcaattgtttcaggatttcttctagctatttttatggcaaactcaggtggtgcgtgggataacgcaaagaaatatattgaattaggtaatcatggtggaaaaggttcagatgctcacgcagcagcagttacaggtgatactgtaggagatcctttcaaagatacctcaggtccagctataaatattcttatgaaattaatggcgattgtttctattatatttggaccattgtttttataa

SEQ ID NO: 266913 - DNA, 517 bp, Unknown
  Bacterial polypeptide expressing nucleotide sequence isolated from the Sargasso Sea
accattaacgccatagtagaaattccagcaggaacctctgagaaatggcaagtatcaaaagatggttttgaaatttctaaagaaatttataacagcgatacaagagttatagattatttgtcatatccttttaattatggctttataccacaaacttatttgtcagcaaaactaggtggagatggtgatcctctagacattataattataggatctaatataaaaagaggatccgctattaaagcaaaacctattggaactttagttttgcttgataaaaatgagatagattctaaagtcatagcattaatgattaatgatacaaatatttctaaaatgaattcaatagatgatttagaaaaatattatattggtttaatggatatcattaaaatatggattataaattacaaaggtgagtcattagagttaaaaagagtattgggaaaaacagctaccaaagaatacatacagaaataccacgaagcttttcttaatagctcaaaaaaaccataaa

SEQ ID NO: 266914 - DNA, 685 bp, Unknown
  Bacterial polypeptide expressing nucleotide sequence isolated from the Sargasso Sea
ttcgttagatgaagtaggcaatacaacagcagcgataggtaaaggctttgccataagtgcggcagctttggcggctttggcgttaataagcgcatacatagagaaaatcagtggcactgatagcagttttgtgcttgctattaatgaccccctggttcttgcgggaatgtttcttggtggtattttcccattcctagttagctcaatgacgatgacagctgttggcgatgccgcttttgacatgatcaaagagataaggcgtcaatttaaggaaattcctggccttctagaaggaaaagcaaaaccagatactgcgaaatgcgtggatatcgcaacaaaagcggcactaagaaagatggtagcccctggtgcacttgcggttttggctccggtcgtagttggcacaattttaggtccgaaggcattaggaggaatgcttggaggggcactgatttgttgtgtcatgatggcattgatgatggccaatgccgggggtgcttgggataatgccaaaaaatacgtggagaaaggtaacttaggcggaaaaggttccgaggtacataaagctgcagtcgttggcgacactgttggtgaccctctaaaagatacgtcaggcccttcgatgaatattttgattaatgtaatggcaattgttagcttggttatcgctccactacttgtttag

SEQ ID NO: 266915 - DNA, 584 bp, Unknown
  Bacterial polypeptide expressing nucleotide sequence isolated from the Sargasso Sea
aatgactgttttaacaataactattgcttgcggtgtttgtgcattgatttatggtctttgggccagtcaaagcattttaacatcaagtgcaggatcagaaaaaatgcaagaaattgctggtgcaattcaagaaggtgcggctgcatatttaaatagacaatatacaacaattactattgttggtgtaatcgttgctataatattatttttaactttagggctatatgtatcaattggttttctcattggagctgttttatctggtatagctggttacataggtatgaatgtttccgttagagctaatgtaagaacaacacaagctgcaacggaaggacttcaacccgctcttgatattgcttttaaatctggcgctattactggtttattagttgttggtttaggtttgctaggtgttgcaggatattatgcttttttattatctgctaatgttgaaacaagattgctaatagaatctttggttgcattgtcttttggagcatcattaatttcaatttttgcacgtcttggtggtggtattttcaccaagggtgcagatgtaggtgcagatttagttggcaagg

SEQ ID NO: 266916 - DNA, 787 bp, Unknown
  Bacterial polypeptide expressing nucleotide sequence isolated from the Sargasso Sea
atattaatgccggtatttattgctggggttggcttaatattctcaatagttggtacatgggttattaaaataaagaataatgaatctaaggaaaaagaagtgcaaggagcatttaatttaggtaattggggctcattattattaactgctgttgcttcattttttattattcaatggatgttgcctaataaaatgaatatgacattttttggtgaggggataaaggaaattgggtataatagagttttttatgcggttttaattggtttagctgttgggggattaatatctgtcttaacagaatattacacagctatgggcaaaaaacctgtaaatggtataatcaagaattcttctactggagcggcaactaatattatttcaggtctctcattagggatgatgtcaactgcagctcccgtaattttatttgcagcagctatttggggagcttatacatgtgcaggattttatggtgttgcaattggagcatctgcgatgatgtcaacaactgctttacaattagcaatagatgcttttggacctattgcagataacgctgggggaattgctgaaatgtcagaattagatccagaagttcgtgaaagaacagatattttagatgcagttggaaatacgacagcagctgttggaaaaggttttgctattgcatctgcggcattaactgctttagctttatttgcagcatatgttacttttactggaattgatggaattaatattttcaaagctaaggtactttcggcattatttattggaggcatga

SEQ ID NO: 266917 - DNA, 675 bp, Unknown
  Bacterial polypeptide expressing nucleotide sequence isolated from the Sargasso Sea
tgagtactacaccggaattgaagatgtattcttcttcaaggtaaaggcaatcccctacatcggggaagcgagcaagaccgggagtgcgaccaacgcaatcgctggactagcagtaggaatgcaatccgtattcctcccagttttactgatggcagcgggaatcttcggggccaatcacgtcatgggtggcggggaactgggtctttacgggattgcaatggcggcaatgggaatgctgggcacagttggcgtaaccatgacagtggatgcctatggtcctgtagcagacaacgctggagggattgcagagatgtcaggcctgggggatgatgtcagagaaatcacagatgggctcgactcgatcgggaacacaaccgcagcaatcggtaagggattcgcaattggaagtgcggcattgactgcactggctcttttcgctgcgttcaagacaagtgctaaccttgaggcggaggatctgagtctgaccgagcctatggtagtaataggactgctgatcggtgctgcactaccattcgtggttgcggcgatgaccatgaagtcagttggaagagcagccgaagatatgatcaccgagataaggaggcagttcaaggaaatagatggacttctagagggtcgagagggagttgagccagacagtgccacctgcgtgga

SEQ ID NO: 266918 - DNA, 838 bp, Unknown
  Bacterial polypeptide expressing nucleotide sequence isolated from the Sargasso Sea
tttgatttctatgcaaaaaggggtatggatcggattttggacagcaatttcttatgcagttggagctgggtgttccatgcttgccggtttttttggtatgaatgcagcaacaacatcgggtgtacgtacctcacaagcggctgttgacggagggcagtccaaagcattgctcctcgcattcaatggcggggcagtaatgggactaagcgtggcgagtctgggtctgctgggggttggtgggttattccttcttttcggtcgtggtgattcatttactgttattagtggattcgcaatgggcgcgagttctattgcgttatttgctcgtgtgggcggcggtatctatactaaaacagcagatgtaggctctgatcttgttggtaaagttgaagcgggaatacctgaagatgatccacgtaatcctggcgtaatcgctgacaatgttggcgattgcgtaggtgatacagctggactgggtgccgacatatttgagtcctattgcgggtccatgattgcagctatagttataggtgccagtatggctaccttacgcttcgaatacatggcattgccgattatgatagctatggtcggtctgatagcttcggtcattggtatacgagctatgaccacgttagggagtatggacccttctgcagcgctcagaaactgcacattcatcagtgcgggggctatgctattcgtggcattttttctcattaaagttatgggcctgccttcaggcgtatttatagcccttttgtttggttgtctggcaggtatcggtattggtctgatcaccgaatactacacagctagtaagcccgttattcgaata

SEQ ID NO: 266919 - DNA, 124 bp, Unknown
  Bacterial polypeptide expressing nucleotide sequence isolated from the Sargasso Sea
ggtggaaaaggttctgaagcacacaaagcagctgtaacaggtgacacagttggtgatccttataaggatacagccggtcccgcagttaatccaatgattaaaattattaatattgttgctctta

SEQ ID NO: 266920 - DNA, 296 bp, Unknown
  Bacterial polypeptide expressing nucleotide sequence isolated from the Sargasso Sea
attaccattgattattggattttggaataaagaagctctaggtggtttcctgccggggtcccttgtaacaggcttcttgttagcaatatttatggctaactcaggaggcgcttgggataatgcaaagaaatatattgaagcaggaggtggagcagggaaaggttctgatgaacataaagctgctgtaattggggatacaatcggagacccatttaaagatacctctggtcctgcaatgaatatagttataaaagtaatgactattgttagcttaatatttgcttcagcattttaat

SEQ ID NO: 266921 - DNA, 874 bp, Unknown
  Bacterial polypeptide expressing nucleotide sequence isolated from the Sargasso Sea
tgctgcatctggtataatcatatctgtgattggcacttttatggtatctgtaaaggaaggaggtgatccacaaaaagccctgaatcaaggtgaatttggaagtgcggcgataatggtgggtgttatttttcttttaactcaaaaatttcttcctgaaacttttaatcaaggatctgaaatctatacaagtctaggtgtattttatgccactgtaattggcctcttagctggtttaggcataggtttgattacagagttttatactggaacaggaacttcccctgttaaatcaatatctaaacaatctattacgggtccagctacaaacattatagcaggattaggcgtgggtatgcagtctacagctattcctattcttattatagcttctagtattgttggagcattccatttttcaggactctatggtatagcaatggctgctttaggtatgcttgcaaatacgggtatacaattagctgttgatgcttatggtccaatttcagacaatgctggcggaatagctgagatggcagaattaccaaaagaagtaagagaaagaaccgataagctagatgcagttggaaatactacagcagcaattggcaaagggtttgcgataggatctgcagctcttacagccctagcgttatttgccgcttttatggttcagagtggtataaaaaatattgatatagcaaatccttgggttatggcgggactttttgttggaggaatgttaccatttttattttcttcgatggcaatgggagctgtaggaagagctgcgatgtccatgatagaagaagttaggagacaattcagagacatccctgaattgaagaaagcattagaattaatgaatttaaaaaaa

SEQ ID NO: 266922 - DNA, 150 bp, Unknown
  Bacterial polypeptide expressing nucleotide sequence isolated from the Sargasso Sea
gtggtaaaggatctgaaacccataaggctgctgtgactggagatactgttggtgatccatataaagataccgctgggcctgcggttaacccaatgattaaaattactaatatcgttgcacttcttttgttagcagtaatttctcattagt

SEQ ID NO: 266923 - DNA, 595 bp, Unknown
  Bacterial polypeptide expressing nucleotide sequence isolated from the Sargasso Sea
atgaatgaaggtcaagctttatggattgcattaactgcgtcagtagtggcaatcatttgcggagttgttttttcgctccaaatcatcaaagaatcagacggtaatgaccgaatgagagagattgcaggggcaattcaagaaggagctcaagcttatctaactagacaatattctacaattgcaatcgtgggagttgtcatatttatattaatgggtgtcagcggaattggttgggctagtgcaattggttttgcaattggtgcaatcttctctggtctagctggatacattggcatgagtatttcagtcagagccaatgtgagaaccgctcaagcagctcatcaaggaatgaatgctgctctctctatggcatttagaggcggtgctgttactggactactcgttgttggtttgggtttattaagtattgcaggatactatctcattctgacatcttccggtgtttctgttgatgacagcctgcatgcattaataggattggcatttggtggttcattgatatctatatttgcaagacttggtggtggaatatttacaaaaggtgccgatgtcggtgctgaccttgtggaaagat

SEQ ID NO: 266924 - DNA, 661 bp, Unknown
  Bacterial polypeptide expressing nucleotide sequence isolated from the Sargasso Sea
tggtattcctgaagatgatccaagaaatccaggcgttattgcggataatgttggggataatgttggtgatgttgctggaatgggttcagatatatttgagtcatattgtggctctatgattgcatcaatagcaatagcttatacgcttggaaaccaagatatgatgatgcttccactggctttagctgcgactggcttaatagcttcaataatcggaatatttatagttaagcttcagtcagcaaaagcacctgcaagtgcattgagatctggaactcttttagcgccagtaatatttgtggctatggcctatttcataattaattcttttgacggagttggaatgaatgtatggtggtgtgttattgctggagctgttggcggtgtattgattggacttattacagaatattacacaggcggcggcccggttaagaaaattgctgaatcaggggaaactggttctgcaactgtaatgatttcaggtttatcagtaggaatgcaatcagttgtgatacctattgttattctagccggcatcatccttacttcaactcaactatcgggcatttatggtgtaggaattgccgctgttggtatgcttgctactgtcggaataactatggcaatagatgcatatggaccggttgctgacaatgct

SEQ ID NO: 266925 - DNA, 580 bp, Unknown
  Bacterial polypeptide expressing nucleotide sequence isolated from the Sargasso Sea
aatgtattatattatagcggctggaatattatccatcgtttacggttttataacaggaagaaatattttaaattcaagctcaggtaatgctaaaatgcttgagatcgcatctgcaattcaggaaggtgctagagcatatttaaacagacagtacaaaactattgcaattgtcggtgttgtagttttaattgttattacaattttgttcagtcctttagttggattaggttatttaattggagctacgttatcaggtattgcaggttacgtgggtatgattgtatctgttcaagcaaacgttagaactgctgaagcatcaagaaaaagtttagctagtggcttatcgattgcatttaaatcaggtgctgttactggtatgttagtagctggattagctttactagcaatagctgtatattattattttttagtaaaaaatggtgttgatgagagagaaatagttaatgctttagttgcattaggctttggtgcttcattaatctcaatttttgcaagactgggtggaggaatttttacaaagggagcagacgttggtgctgatttagtaggtaaggttgaa

SEQ ID NO: 266926 - DNA, 256 bp, Unknown
  Bacterial polypeptide expressing nucleotide sequence isolated from the Sargasso Sea
atgctgctgggtgggctgttaggatgtgtatctctcgcacttatgatggcgaatgccggaggtgcatgggataatgcaaaaaaatatgttgagaagggtaacctaggtggcaaaggttcagatactcacgcagcagttgtagttggcgataccgtaggcgatcctttcaaggatacgtcaggaccatcaatgaatattttaataaatgtaatggccatagttagtcttgtaattgcgccattattaagtatataaa

SEQ ID NO: 266927 - DNA, 553 bp, Unknown
  Bacterial polypeptide expressing nucleotide sequence isolated from the Sargasso Sea
ttggaaaatttatatttaattattttggctggtattattgctgttgtttacagttacattctaagtaatcaaattgtttcagcaagcccaggcaactcaaaaatgcaagaaattgctgaagcaatccaaattggagcaaaagcttatttaaataggcaatacaaaactatcgctatcgtaggtgtagttgttttgattataattagttatttttttagtttgcttgttggactgggctatttaatcggagctttattatcaggtgttgctggctatataggtatgctaatttctgtaaaagctaatgttagaacagctgaagcatcaagaaaaagtttacaaagtggtttgacaatggcttttaagtctggagctatcactggactattagttgctggattagctcttttggcaatctcactatattatttggctctgttagcttttaatgtagatagcagagaactaattaatgctttaatagcactaggatttggagcttctctaatatcaatttttgctagacttggtggtggtattttacgaaaggagc

SEQ ID NO: 266928 - DNA, 739 bp, Unknown
  Bacterial polypeptide expressing nucleotide sequence isolated from the Sargasso Sea
cgagtcttacgtgggttctataattggtactatggtattgggtgctgtttatgctacattaccagaatttcaatctcagtttgatggtttaggtgctgtttatcttccattagctttagctgctgttggtattatcatgtcaatcattggttcatttttcgttaaagtaaaagatgatggttcacctcatactgctcttaatatgggagagtttggttctgcaggcttaatgttagtagcttcttggtttatcattcaagctatgcttccagagtcttgggtagaaagcggtatacagtacacttcaatgggggtcttttgggctactattgctggtcttgttgcaggtttattagtaggtaaggttacagaatactatacaggtacaggaactagaccggtcaattctattgttaagcaatcagaaacaggttctgcaacaaatattatcgctggtttgggtgttggtatgatgtcaacagctattccaatcatattaattgctgctgctattatcgtttctcataaattcgctggtctttatggtattgcaatcgctgctgtaggtatgttagctaatacaggtattcaattagctgtagatgcttatggtcctatttctgataatgcaggtggtattgctgagatggctgagttagaccctgaagttagagaaagaacagataaaaaagatgctgtaggcaatactactgctgctataggtaaaggctttgctatt

SEQ ID NO: 266929 - DNA, 891 bp, Unknown
  Bacterial polypeptide expressing nucleotide sequence isolated from the Sargasso Sea
ggtcggtgcgctgggcggcatcgtgatcggactcgtcaccgagtactacacagcgggtgctccggtgaaaaagatcgccggcgcaggggagacgggcccagcaacaatcatgatcacaggactctcagtgggaatgcagtctgtggtggtgccggtcctcatgctatgcgtcatcatcctggtctcgagctggcttgccgggctttacggggtgggtatcgccgcagtcgggatgctggcaacggtgggcatcacgatggcaattgatgcctatggaccggtcgcggacaacgccggcggcatcgctgagatggcagggttgggtgaagaagtccgtgagatcaccgataccctggatgaactgggcaacaccaccgcagctatcggtaagggctttgctattggtgcggctgccctggcggcacttgccattatctcggcctatatcgaaacggtcacctttcatcttccggatttcagtcttgagattaatgatccggtggtactggccgggatgttccttggcggcattttcccgtttttggtcagcagcatgactatgacggcggtcggggacgccgcgttcgacatgattcgcgagatccgccgtcagttcaaggagattcccggattattggaaggtactgcggagccggacacggatcgctgtgtcgagatcgccaccacggcggcactcaagcggatggtgcctcccggggtgctcgctgtcggtgcgccggtggtcgtcggttttacccttggccccgcggcgctgggcggcatgctgggcggcgcacttttgggctgcgtcctccttgcactgacgatggcgaatgccggcggcgcctgggacaacgcaaaaaagtacatcgaaaaaggcaatctcggggg

SEQ ID NO: 266930 - DNA, 654 bp, Unknown
  Bacterial polypeptide expressing nucleotide sequence isolated from the Sargasso Sea
atgcttgctaatacaggtatccagttagcagttgatgcatatggacctatttcagataatgctggaggtattgctgaaatggcagagttagatcctaaagttagagagagaacagataagcttgatgcagttggaaatacaactgcagcaataggaaaaggttttgctattgcatcagctgctcttacagctttagctttatttgcagcatttatgcaaactgcagaaattactgctattgatatttcgaaaccagttgttatggctggacttttactcggcgcaatgctgccatttgttttttctgccctttcaatgaaggcagttggtaaggcagcaatgagtatgattgaagaagtaagaagacaatttaaagaccttccaaaattgaaagcagctcttgaagtaatgaggaagtatgactcagatctttctaaagcatcaaaagaagatctaaaaatatttaacgatgctgatggtgttgcagaatatagtaaatgtgttgaaatttcaacacaggctgcattaagagagatggttcttccaggattaatggctatatcagttccggttataattggattcgctggtggtgcagaaatgctcggtggtcttttggatggtgttacatcatgtggtgttctaatggcgatt

SEQ ID NO: 266931 - DNA, 740 bp, Unknown
  Bacterial polypeptide expressing nucleotide sequence isolated from the Sargasso Sea
tggtttagaccctgaagtaagagaaagaactgatgctttagatagtttaggaaacactactgctgctactggaaaaggaatctcagttaccagtgctgtactaacttcccttgctcttctagcaacatacgcaacggttgctggtattgattcattgaatttactaaatccaaaaattttagttggagctattataggtggtttattgccatttatttttgctggattaactatggctgcagtaggtagagcagctggagcaatgatagaagaagttagacgtcaatttagagaaatcaaaggacttaaagaaggtaaaaaaggtgtaaaacctgatgtagcaaaggctgttgaaatttcaaccaatggtgcattgaaagaaatgatagttccgggaacattagcaatacttgctccaatcgccgtaggaattattccattccttgggcctgaagctttaggaagtatgcttgcaggatctattatttctggatttttacttgctatatttctaaataactttggtggtgctgctgacaacgcaaaaaaatatatcgagttaggtaatcatggtggtaaaggatctgatgctcatgaagcaggtgtcataggagacactgtcggagatccaactaaagacactagtggtccagctcttaacattttgttaaagctaatggcaatggtatcaatagtttttgggcccattatttttaggaaattggtggatagaagttaag

SEQ ID NO: 266932 - DNA, 856 bp, Unknown
  Bacterial polypeptide expressing nucleotide sequence isolated from the Sargasso Sea
aatgagaattgctgtttattcaaatgccagaacaacaattgctgcgagtagatcttggtcagagggatttttaactgcatttaggggaggagcagttatgggattttctttatgttcacttggtttattaattttgtatgcttgtatatcattatttaatttatattatgatttaaatgttcttggaaacagtcaagcattatttgaggcaatttcaggttttggattaggtggttcatcaattgctttatttggtcgtgttggtggtggtatttatacaaaagcagcagatgtaggagcagatttggttggaaaagtcgagaataatattccagaggatgatgttagaaatccagcaacaatagcggataatgttggtgacaatgttggagatgtggctggaatgggttcagatttgtttggttcttttggggaagccacatgtgctgcattggtagtagcatccacaagtcctgatttaaatagtaattggacgtctttgttattcccgctaatgataacatctattggtatattggcgggtattttaacaacatttgtgaattattgttgtaaggttacaaatgagaagcatgttgagaggaatctcaagcttcaattaattttatcgacaattttaacgtctccatttattgcgttagtttcatatttatttttaccaaataaattttgtgttcagttatcagataatattgatagtttaaattttacttggacttctgacaatccagattggtgcgatcatgtatcaacaaattggggatcgatgatttgtattttaagtggattatggtctggattaattattggttatttcacagacatatatgacaag

SEQ ID NO: 266933 - DNA, 274 bp, Unknown
  Bacterial polypeptide expressing nucleotide sequence isolated from the Sargasso Sea
agccgaagcacttggcggtatgcttgcaggatcaattgtttcaggttttttacttgctatatttatggcaaattctggtggagcatgggacaatgcaaaaaaatatatagaacttggcaaccatggcggaaaagggtctgatgctcataaagctgccgttactggagatactgttggagacccatttaaagatacttcagggccatctataaacatattattaaaattaatgacaatagtagctttagtttttggcccattatttattggttaa

SEQ ID NO: 266934 - DNA, 184 bp, Unknown
  Bacterial polypeptide expressing nucleotide sequence isolated from the Sargasso Sea
aatgcaaaaaaatatattgaagatggcaattacggtggaaaaggttctgagtcacataaagctgctgttactggagatacagttggggacccttataaagatacagctggtccagcggtcaatccaatgattaaaattacaaatattgttgcactattattactagctgtcatagcgcattaat

SEQ ID NO: 266935 - DNA, 361 bp, Unknown
  Bacterial polypeptide expressing nucleotide sequence isolated from the Sargasso Sea
aatgctattacctggagttattgcagtttcaatgcctccattagttggctttttattaggagcaaaagctcttggtggaatgttggccggtggattacttggttgtgttcttcttgctttaatgatggctaatgccggaggcgcttgggataatgctaagaaatatattgagaaaggtaatcttggtggaaaaggctcagatacccatgccgctgcagtagttggagatacagttggcgatccttttaaagatacttcaggacctgcgatgaatatcctaataaatgtgatggcaattgtaagtttagtgattgctgggcttctaccagttgatgggttaatagttaacttatttaattaa

SEQ ID NO: 266936 - DNA, 716 bp, Unknown
  Bacterial polypeptide expressing nucleotide sequence isolated from the Sargasso Sea
acttaatattggagtttttggttcaggcgctgtcttgacgattgtgagttattttttaattggtaagctgattgaaaatccagtagcgctagctgatgggtatcaaaatgttcaagctttagacctttttcttgcaactgttgttggtttagtatctggtattttgattggagttttaactgaatattatacctctgatcaccaaaaaccttctcagaacgtagcagctgctagtgaaactggctcagccactaacattatttctggtttagctaatggaatgttttctactgctttaccggtgttagtaattgcaatgtctatattaggagcatatcattttgcccatctatatggaattgcgttagctgcacttggtatgttgtcaacaattgggattcaattagccgttgacgcttatggaccaattgctgataatgcaggtggtattgcagaaatggcggaactaccaaaagaagtccgtgaaagaactgataaacttgatgcagttggaaatacaacagccgcaattgggaaaggctttgctattggttccgcagcattgacttctctagcactttttgcagcatttagagaaacagttggtgggcttactttagatatcaacaacccatatgttatggtagggttattaattggctcagctttaccatttgtattttctgcactagctatgcaggctgttggagatgctg

SEQ ID NO: 266937 - DNA, 373 bp, Unknown
  Bacterial polypeptide expressing nucleotide sequence isolated from the Sargasso Sea
actgctaagtgtgttgatatagctacctctgcagctcttaaaaagatgcttatacctggaattattgctgtatctgcacctcctttagtaggttttatattgggtccggaatctttagggggaatgctagcaggaggtttattggcttgtgttttaatggctttattcatggcaaatgctggcggagcctgggacaacgctaagaaatatattgaaaaaggtaacctaggaggaaagggcaccgatactcacgcagccgctgttgttggagatacggtgggcgatccgttcaaggacacatctggtccttccatgaatatcttaatcaatgtcatggcgatagttagtcttgtaattgcacccttactctgat

SEQ ID NO: 266938 - DNA, 538 bp, Unknown
  Bacterial polypeptide expressing nucleotide sequence isolated from the Sargasso Sea
gtgtacctgttcaccgcgtacgcgtgcgccgccgtcgggcggtccgcgcaggaggtggtgaacgaagtgcggagacagttcgcggaaaaacccgggatcatgacgagggagtgcaaacccgactacggccgatgcgtctccatcgtcgccgcgtcggcgctgagggagatggtcaagcccggggcgctggcggtcctggggcccgtgtgcgtcggcctggcgttcagaaccgtcggggcgtggacggggcaggagctcctgggcgcgagggcggtcgcggggatgctcatgttcgcgacggtgagcgggatcctcatggcgctcttcctcaacaccgcggggggggcgtgggataacgccaagaagtacatcgaaacaggggcgcacggggggaaaaactcggacgcgcacagagccgcggtcacgggggataccgtgggggacccgttcaaggataccgcggggccgagcatacacgtgctcatcaagatgctcgcgaccatcaccctcgtcatggccccgatgttcctagactgaa

SEQ ID NO: 266939 - DNA, 538 bp, Unknown
  Bacterial polypeptide expressing nucleotide sequence isolated from the Sargasso Sea
aggctcaattccattcttagtttcctcaataacaatgactgccgtaggtgatgcagcatttgagatgatcaatgagataagaagacaatttagagagatcccagggattctagaaggcacaggtgaaccagatactgacaaatgtgttgagattgctacaagagcagcacttcaaaggatgttattgcctggagttattgcagtttcaatgcctccattagttggtttcttattaggagcaaaagctcttggtggaatgttagctggcggattacttggttgcgttcttcttgccttaatgatggctaatgccggaggcgcttgggataatgctaagaaatacattgagaaaggaaatcttggtggaaaaggctcagatactcatgctgctgcagttgtgggagatacggttggagatccatttaaagatacttcaggacctgcgatgaatatcctaattaatgtgatggcaattgtaagtttagttattgctggccttcttccagttgatggcttaatagttaccttatttaattaa

SEQ ID NO: 266940 - DNA, 232 bp, Unknown
  Bacterial polypeptide expressing nucleotide sequence isolated from the Sargasso Sea
ttcttagcatatcacttggcaaacaccggtggtgcatgggataacgcaaagaaactcattgaaatgaaaggtgaaaagggtactgaagaacacaaagtcgcagtagtcggtgatattattggtgatccttacaaagacacagcaggtcctgcactaaacacagtaatcaaactcttaaacacaattgcaatcgtattcgtaccagtattctttgcagttattgtattatagt

SEQ ID NO: 266941 - DNA, 220 bp, Unknown
  Bacterial polypeptide expressing nucleotide sequence isolated from the Sargasso Sea
tatgttgttgtagggttgttaattggtggtcttttcccttttctatttggtgcaatgagtatgacagctgttggaagggcagctggggctgttgtagttgaagttcgtcgacaatttaaagaaattcccggaattatggaaggtaagggtaaacccgagtatggtccctgtgtagatattttaactaaagctgcaataaaagaaatgttcataccatcaa

SEQ ID NO: 266942 - DNA, 382 bp, Unknown
  Bacterial polypeptide expressing nucleotide sequence isolated from the Sargasso Sea
gatggtgttgctgagtatagtaaatgtgtagagatttctacgcaagctgcattaagagagatggttctgcctggattaatggcaatatctgtacctgttataattggttttactggtggtgctgaaatgctaggaggtctattagctggtgttacttcatgtggagtattaatggctatatttcaatcaaattctggaggtgcttgggataatgcaaagaagatgattgaggaagacgggagaaaagggactgaagctcataaagctgcagttgtaggagacactgttggtgatccatttaaggatacttcagggccttctttaaatatcttgctaaaattaattgcagttgttgctcttgtaatagctcctttactttaag

SEQ ID NO: 266943 - DNA, 574 bp, Unknown
  Bacterial polypeptide expressing nucleotide sequence isolated from the Sargasso Sea
cctcaacaagaccgacaaggaccacttcgacgcgacggttgttggcgacacggtcggcgaccccttcaaggacacctcgggcccggccctcaacatcctcatcaagctgatgtcggtcatctcgctcgtcatcgcgccgatgctcaagtcgctccaggtcgagaacggcgtcgtccaagagtggaagcccgtgtcggtcgccatcggctgcggcatcctcgtcgtcctcatcatcgcgtgctacctcctccagcggtacattgacgccggctacgacgtcaagcgcaaggaggttgaggcgtcgatcgccgagcagaaggagctcgcgaagaaggcggaggaggcggcggtcgcggccaacccggccgcgtatgcggcgctcaaggcgatgcacaaggccgagcagaacgcggccggcgtcggcgcggccgacatgatggcccagctcaaggagtcggccgcggagctcatcgccgcgatcgccaacccgaagccgcaggtccaggcgacgccgagccaggcggtcgccgcgccggtctcggcgatggaggttgaggtcaagacgtcgaagtaa

SEQ ID NO: 266944 - DNA, 271 bp, Unknown
  Bacterial polypeptide expressing nucleotide sequence isolated from the Sargasso Sea
ggaccagaaatgttaggaggccttctcgctggagtaacctcctttggtgtgttaatggctatcttccagtctaatgctggaggagcatgggataacgcaaaaaaaatgatagaggaagcaggaaataagggaacagaagctcataaagctgctgttgttggtgatactgtaggtgatccttttaaagacacttcaggaccatcactaaatattctactaaaattaatttctgtagttgccctagtaattgctccactacttgtctcataaa

SEQ ID NO: 266945 - DNA, 867 bp, Unknown
  Bacterial polypeptide expressing nucleotide sequence isolated from the Sargasso Sea
ggggtggcggtggggatggagtcgaccacgtacgccaccatctgcaccggcgtctccatcctcatcgcctaccacctcggcgactgggccatccccggcggcgggctcttcggcacgtcggtcgcgacgatgggcatgctgtcgtccgccgtgtacgtgcttgcgatggacacgttcgggccgatcgccgacaacgcgggcgggatcgtcgagatgtcggaccagcccgagattgtgcgcgacatcaccgaccgcctcgacgccgtcggcaacgtcaccaaggccgcgaccaagggctactctatcggctcggccgggctggcctgcttcctcctcttctcagccttcatggaggtggtggagacgcagtcggggctgccgttcaagacggtcgacttcgccatcccggccgtcttcgtgggcgggctgatgggcgggatgctcgtcttcgccttctccggcatggccatccaggccgtcggcaagtgcgcgcaggacgtggtgaacgaggtgcgagcgcagttctcggagcggccgggcatcatggactacaaggagaagccggactacgggcgctgcgtcgcgatcgtgacgcaggcggcgctggccgagatgacgaagccgggcgccttcgtgctgctcacccccatcaccgtcggcttcatcttccgtttcgtcggctcgctccaggggcggcccctcctcggcccaatggtgctcgccggcctgctcatggtctcgacgatcaccggcatcttgctctcgttattcctcaacaatgcgggcggcgcgtgggacaatgccaagaagtacgtggagacgggcaagtatggcggcaagggctccgaggcgcacaaggccgccgtg

SEQ ID NO: 266946 - DNA, 361 bp, Unknown
  Bacterial polypeptide expressing nucleotide sequence isolated from the Sargasso Sea
aatgttattacctggagttattgcagtttcaatgcctccattagttggtttcttattaggagcaaaagcacttggtggaatgttagctggtggattacttggttgcgttcttcttgctttaatgatggctaatgccggaggtgcttgggataacgctaagaaatacattgaaaaaggaaatctcggtgggaaaggctcagatactcatgccgctgcagttgtgggtgatacagttggagatccgtttaaagatacttcaggacctgcgatgaatatcctaatcaatgtgatggcaattgtaagtttagttattgctggccttcttccagttgatggcttaatagttaccttatttaattaa

SEQ ID NO: 266947 - DNA, 130 bp, Unknown
  Bacterial polypeptide expressing nucleotide sequence isolated from the Sargasso Sea
gaggctcataaagctgcagttacaggagatactgttggagacccatataaagatactgcgggccccgctgttaacccaatgatcaaaattactaatattgtagctttattattattagctgcactataat

SEQ ID NO: 266948 - DNA, 529 bp, Unknown
  Bacterial polypeptide expressing nucleotide sequence isolated from the Sargasso Sea
tcaagtgcaggaaatgcaaaaatgcaagatattgcatctgcaattcaaattggtgcaaaagcatatttagcaagacaatacaaaactattgctattgttggtgttgtagttttagtaattgtgagtattgcatttagtccactagtaggtcttggttatttaattggtgctgctctatcaggtattgcaggttatgttggaatgttagtttctgttgaagcaaacgtaagaacagcagaggcatctagaaaaggcttagctcaaggtctatccgttgcatttaaatctggtgctgtaactggaatgttggttgctggtttggcgctattatctatagctgtttattattatatattgttaaaatctaatgtagatgaaagagaaattgtaaatgctttagttgcattgggttttggagcatcattaatttcaatttttgcaagattaggtggtggaattttcacaaaaggtgctgatgttggcgctgatttagttggaaaagttgaggcaggaattcctgaagacgatc

SEQ ID NO: 266949 - DNA, 133 bp, Unknown
  Bacterial polypeptide expressing nucleotide sequence isolated from the Sargasso Sea
agctcacaaagctgcggtaacaggagatactgttggtgatccttataaagatactgccggcccagcagtaaatccaatgattaaaattacaaatattgtagctcttttacttttagcagttatagctcactaa

SEQ ID NO: 266950 - DNA, 311 bp, Unknown
  Bacterial polypeptide expressing nucleotide sequence isolated from the Sargasso Sea
tgcagttcttgcaccagtgatagtaggatttattttgggtccgaaagctcttggaggaatgttaggaggtgctttgatatgctgtgttatgatggctttaatgatgtcaaatgccggtggagcttgggacaatgctaaaaaatttgttgaaaaaggtaactatggtggaaaaggatctgaagttcacaaagctgctgtagttggagacacagttggtgatccattgaaagacacttcaggaccttcaatgaatattttaattaatgtaatggcgatagttagtttagtaattgctccattactgatttaat

SEQ ID NO: 266951 - DNA, 600 bp, Unknown
  Bacterial polypeptide expressing nucleotide sequence isolated from the Sargasso Sea
tatgagcggaacagtcgagacaatactattatacacaattggagctggtttattatctatcgtttatggatttttaactggtaaaaatattctaaattcaagtgcaggaaatgcaaaaatgcaggatattgcatctgcaattcaaattggtgcaaaagcatatttggcaagacaatacaaaactatagctattgttggtgctgtagttttagtaatcgtaagtattgcatttagtccgctagtgggtctgggttatttaataggtgctgctttgtctggtattgcgggttatgtgggaatgttagtttctgtagaggcaaacgtaaggacagcagaagcatcaagaaaaggcttagctcaaggtctttctgttgcatttaaatctggtgctgttactggaatgttggttgccggtttagcattattatccatagcagtttattattatattttattaaagtctaatgtagatgaaagagaaattgtaaatgctttagttgcattaggttttggtgcatcattaatctcaatttttgcaaggttaggtggcggaatttttacaaaaggtgctgatgttggtgccgatttagtttggaaaag

SEQ ID NO: 266952 - DNA, 456 bp, Unknown
  Bacterial polypeptide expressing nucleotide sequence isolated from the Sargasso Sea
tatgagtgcttcttttgaattaatatacttaataatttttactggcatcttagctgttgcatacagctatttactctcgggacaaattttgtctgcaagtccaggaaatgctagaatgcaagaaattgctgaagcaattcaaattggagcaaaagcatatcttaataggcaatataaaactattgcaattgtaggtatcatagttttatttatagtaagctatttttttaattttttagtagggattggatattttattggtgcttttttgtctggcgttgctggatatgtaggaatgcttatatcggtaaaagctaatgtaaggactgcagaagcctcaagaaaaagtttacaagccggtttatcgattgcatttaaatcgggcgctattacaggattattagttgctggcttagctttattagccataactttttattatttgattcttttaaa

SEQ ID NO: 266953 - DNA, 376 bp, Unknown
  Bacterial polypeptide expressing nucleotide sequence isolated from the Sargasso Sea
gcaaagtgtgtggatattgctactaaggccgctttaaacaaaatgcttttacctggtgcgatagcaattctttcgccaataattgttggttttgttttagggccagtccatttaggtggtatgttagctggagcattacttggatgcgttttaatggcattgatgatggcaaatgctggcggtgcatgggataacgctaaaaaattcgttgaaaagggtaattttggaggtaaaggaacggagacacactcagcaacagtagttggtgatacagttggagatccatttaaagatacatctggaccagcaatgaatattcttataaatgtaatggcaattgtaagtttagtaatagcacctttattgagcatctaat

SEQ ID NO: 266954 - DNA, 490 bp, Unknown
  Bacterial polypeptide expressing nucleotide sequence isolated from the Sargasso Sea
cttatagcttcaattactatgacagctgttggggatgccgcctttgaaatgattaatgaaataagaagacaattcaaagaaattccgggacttttagaaggtaatgcagagcctgatactgcaaaatgtgtagatattgctacggcagcggcacttaagaaaatgctcctacctggagttattgctgtttcggcaccacctttagttggactgggaattggagctgaggctttgggtggaatgcttgcgggaggtcttctagtttgcgtgcttatggcattattcatggcgaatgctgggggtgcttgggacaacgctaagaagtatatcgaaaaaggaaaccttggtggtaaagggactgatactcattcagcagctgttgttggtgatactgtcggagatcctttcaaggacacatcaggaccatcaatgaacattctaattaatgtaatggcaattgtaagtttagtgattgctcctttgctttaaa

SEQ ID NO: 266955 - DNA, 421 bp, Unknown
  Bacterial polypeptide expressing nucleotide sequence isolated from the Sargasso Sea
aacaggagagccagatactgataaatgtgttgagattgcaacaagagcagctcttcagagaatgttattacctggagttattgcagtttcaatgcccccattagttggtttcttattgggagcaaaagctcttggcggaatgttagctggtggattacttggttgtgttcttcttgctttaatgatggctaatgccggaggtgcttgggataatgctaagaaatacattgagaaaggaaatctcggtggaaaaggttcagatactcatgccgctgcagtcgtaggcgatacagttggagatccgtttaaagatacttcaggacctgcgatgaatatccttattaatgtgatggcaattgtaagtttagttattgctggccttctaccagtagatggcttaatagttaacttatttaattaa

SEQ ID NO: 266956 - DNA, 600 bp, Unknown
  Bacterial polypeptide expressing nucleotide sequence isolated from the Sargasso Sea
aatggaagcagcatacgaatatttatatttaataatttttaccggaattttagcagtaggatatagttttttactatctaaggatattctatcatcaagctccggcaataatagaatgaaagaaatagccgaggccattcaaattggagcaaaagcttacttaaatagacaatacaaaacaattgccatagttggttttatagtattaataatagtaagttatttttttaacttgttagttggtctgggatatcttattggcgcaactttatctggtgttgctggatacgttggaatgttaatatctgttcaagctaatgtcagaactgctgaggcttcaagaaaaaatttacaatcaggtttaacaattgcttttaaatcaggcgctatcacagggttattagttgcaggattagccttgcttgctatagcaatttactacgtaatcttaattaacttaaatgttgataatagagagataattaacgcactcgttgcattaggttttggtgcatcgttaatatcaatttttgcaagattaggtggaggtatttttaccaagggtgcggacgttggtgctgatttagttggcaaagttga

SEQ ID NO: 266957 - DNA, 559 bp, Unknown
  Bacterial polypeptide expressing nucleotide sequence isolated from the Sargasso Sea
aatgctggaggtattgctgaaatggcagagttagatcctaaagttagagagagaacagataagcttgatgcagttggaaatacaactgcagcaataggaaaaggttttgctattgcatcagctgctcttacagctttagctttatttgcagcatttatgcaaactgcagaaattactgctattgatatttcgaaaccagttgttatggctggacttttactcggcgcaatgctgccatttgttttttctgccctttcaatgaaggcagttggtaaggcagcaatgagtatgattgaagaagtaagaagacaatttaaagaccttccaaaattgaaagcagctcttgaagtaatgaggaagtatgactcagatctttctaaagcatcaaaagaagatctaaaaatatttaacgatgctgatggtgttgcagaatatagtaaatgtgttgaaatttcaacacaggctgcattaagagagatggttcttccaggattaatggctatatcagttccggttataattggattcgctggtggtgcagaaatgctcggtggtcttt

SEQ ID NO: 266958 - DNA, 106 bp, Unknown
  Bacterial polypeptide expressing nucleotide sequence isolated from the Sargasso Sea
tacagttggtgacccatacaaagatactgctggacccgccgttaatcctatgatcaaaattacaaatattgtagctcttttattgttagctgttatagcgcattaa

SEQ ID NO: 266959 - DNA, 299 bp, Unknown
  Bacterial polypeptide expressing nucleotide sequence isolated from the Sargasso Sea
gttgaagaagtgagaagacagtttaaggaaataccttgcattatggaaggtaagggtaaacctgaatatggaacttgtgtagatatattaactaaagcagcaattaaagagatgattattccttccatgcttccagttttatctccaatagtagtttattttgtaattttgtttattgccggacaaacagcagccttagcttgtttaggagctttacttttaggagttattgttactggattatttgttgctataagtatgactgcaggtggcggggcatgggataatgcaaaaaaata

SEQ ID NO: 266960 - DNA, 364 bp, Unknown
  Bacterial polypeptide expressing nucleotide sequence isolated from the Sargasso Sea
tgttgatatagcaacaaaagcagccttaaaaaaaatgatacttcctgcctttattgcgatttcaatgcctgcaatagtgggatttggtctcggtgctcagagcctcggaggaatgcttgcgggagctttgctagggtgtgttcttttagccttgatgatggctaatgctggtggtgcctgggataatgcaaaaaaatatatagagaaaggaaacctagggggcaaaggttcagaagttcatgctgcggctgttgttggtgacacagttggtgatccgtttaaagatacgtcgggaccatcgatgaatatcttaatcaacgtaatggcgatagttagcttagttattgccccactgctcgtataa

SEQ ID NO: 266961 - DNA, 256 bp, Unknown
  Bacterial polypeptide expressing nucleotide sequence isolated from the Sargasso Sea
tccttctttgcttccagttctatcccctatagtactatatttttttattttaccaataggtggtcaagtagcagcattatcttcagttggagcaatgttgttgggcgttattataacagggttatttgttgcaatatctatgacagcaggaggtggtgcatgggataacgcaaaaaaatatattgaagatggtaactatggtggaaaaggatctgaagcacataaagcagcagttacaggtgatacagttaggtga

SEQ ID NO: 266962 - DNA, 139 bp, Unknown
  Bacterial polypeptide expressing nucleotide sequence isolated from the Sargasso Sea
tctgaagcacataaagcagcagttacaggtgatacagttaggtgatccatataaagatacagccggtccagcagttaacccaatgattaaaattacaaatattgttgcacttttattattggcagttatagcaggttaa

SEQ ID NO: 266963 - DNA, 389 bp, Unknown
  Bacterial polypeptide expressing nucleotide sequence isolated from the Sargasso Sea
tatgactctaactttggcttgtggtgtattgggaataatatacggcatatgggcgactaattctattttgaaagcttcggcaggttcaaagaaaatgcaggaaatagcttcatctattcaaattggagccaaagcatacttaaataggcaatattcaacaatatcgattgttggtgtaatagtgaccgtattgctatttataacgcttggtagctatgttgcagttgggtttataattggtgcttttttatctggaatagcaggctatgttggtatgaatatatctgttagagctaatgttagaaccactgaagcggcaaaatctggattagttccagcattagatatagcttttaaatctggagctattacaggaatgcttgtggttg

SEQ ID NO: 266964 - DNA, 307 bp, Unknown
  Bacterial polypeptide expressing nucleotide sequence isolated from the Sargasso Sea
ttctttcccggcagcggagccgtgatgcttggcggtttgcttgccggggttactgcctccggcgtcctgatggccctctttcaatcgaatgccggcggagcctgggataatgccaagaaaatggtggaggaaggttatgagatcgctggaaccaaacacggaaaaggttctgaggtccacaaggcgactgtcgtcggtgatacggtgggggatccgctcaaggacacctccgggccatccttgaacatcctactcaaactgatgtccgtggttgccctggtgttggccccctttatcaagaactgag

SEQ ID NO: 266965 - DNA, 442 bp, Unknown
  Bacterial polypeptide expressing nucleotide sequence isolated from the Sargasso Sea
aatgattaatgaaattagaaggcaatttaaagaaataccaggacttctggagggcaatgctgagccagatacagaaaaatgcgtagacatagctacggcagcagctttgaagaaaatgttattgccaggcattattgcagtatctgctcctcccttagttggattaggcatcggtgcagaggctttaggcggtctgctcgcaggcggtcttttagtttgcgttttaatggctcttttcatggcaaatgctggaggtgcttgggacaatgctaagaaatttattgagaaaggtaatttaggaggaaaaggcacagatactcactctgcagctgtagtcggagatactgtgggtgatcctttcaaggatacctcgggtccttcaatgaatattcttattaatgtaatggcaattgtgagcctagtgattgctccattattgtaa

SEQ ID NO: 266966 - DNA, 558 bp, Unknown
  Bacterial polypeptide expressing nucleotide sequence isolated from the Sargasso Sea
ctttagagttattgttaagtaacccaatggttcttataggaatgtttatagggggggcaatcccattcttaatagcttcaataacaatgaccgctgtaggtgatgcagcttttgaaatgataaatgaaatcaggagacagtttaaagaaatacctggtcttttagaaggcaatgctgagccggatacagcaaaatgcgtagatatagcaactgctgcagctttaaagaaaatgttaattcctggagttatagctgtttcagcaccccctttagttgggtttggtctaggagcagagtctctaggtggaatgcttgctggaggactattagcttgtgtattgatggcactttttatggcaaatgcaggcggagcttgggataacgctaagaaatatatagaaaaaggaaacctaggagggaagggaacggatactcattctgctgcagtagttggagacacagtaggagatccatttaaagatacttctggcccttctatgaatattcttattaatgttatggccattgttagtttagttattgctccactattataac

SEQ ID NO: 266967 - DNA, 355 bp, Unknown
  Bacterial polypeptide expressing nucleotide sequence isolated from the Sargasso Sea
cgtcaccaagttcgccctaaaggagatgatcctgcccgcacttttgcccgttgttgctccaatccttgtcgggctgatcctcggcaaagttgcattgggcggcctgctgatcggaagcatcgtcaccgggattttcgtcgccctgtcgatgaccaccggcggtgcagcctgggacaatgcaaagaagtacattgaagacggaaatatcggcggcaaaggcagcgatgcccacaaggccgcggtcaccggcgacaccgttggtgatccttataaggataccgctggaccagccatcaacccaatgatcaaaattctcaacgtcgttgccttactgatggtccccttcctcatctaa

SEQ ID NO: 266968 - DNA, 613 bp, Unknown
  Bacterial polypeptide expressing nucleotide sequence isolated from the Sargasso Sea
gttgctaaacaaacaaactttattatttatattctgtgtttttgtctattcattaataatagaaaaaagcttttccagtcaaaataaaattataggaaaaaaaaattattttcacgaatacaattcatttaatgatgatggaacaattaatgtagtaattgaaattccagctggagataacgaaaaatgggaattgtggaaaaaagatggatctattagatgggaatttaaaaataatagttttagaaaaataaattatcttccttacatatctaattatggatttattcctcaaactttattttctaaggagataggtggagatggtgatccaatagatgttatattaatcagtgaaagaataaagagaggttctgttataaagagtaagatattaggagttataaatatgattgatgagggcaacaatgatagtaaaatagttgctgtaaacctagatagctttgcatttaatgcttctatattaaataatttaaatgatttaaggcttaattatcctggagcgttagaaataattgaaatatggtttagaaattataaattaaatagtaatattattataaatggttacggagatattgatgatgcaaaa

SEQ ID NO: 266969 - DNA, 469 bp, Unknown
  Bacterial polypeptide expressing nucleotide sequence isolated from the Sargasso Sea
tatgtataatgaaaatgatgatattgatgtagtaattgagataccttataaatcaaatgtaaaatatgaaataaaaaaaaatgaattacaagtagacagggttttaagtacagctatgttttatccaggaaattatggatatataccgcatacattggctggagatggagaccccgtagatgtacttataataaatgaaactcctttctatccaacttcgcatattcgttgtaaggtattaggtatgttatttacaaccgatgaaaaaggtgaagaccaaaaagtattagcacttcctattagtaaagtagacccaagttattcaaatataaatgatatatctgatataaatgatagtaaattagagttgataaaaaatttttatgaaaattataaaaaattagaaaaaaacaaaacagttacagtgaaagattattttaataaagctgatactattaaatttataaaa

SEQ ID NO: 266970 - DNA, 384 bp, Unknown
  Bacterial polypeptide expressing nucleotide sequence isolated from the Sargasso Sea
cagataatgcaaagtgcgtggatattgctactaaggctgctttaagtaaaatgcttttaccaggcgcaattgcaattctttcgccaataattgttggttttgttctagggccagttcatttaggcggcatgttagctggagcattacttggatgcgttttaatggcattgatgatggcaaatgctggtggcgcatgggacaacgctaagaaattcgtggagaagggaaattttggaggtaaaggaacggagacacactcagcaacagtagttggtgatacagttggagatccatttaaagatacatctggaccatcaatgaatattcttataaatgttatggcaattgtaagtttagttatagcacctttattgagtatctaat

SEQ ID NO: 266971 - DNA, 867 bp, Unknown
  Bacterial polypeptide expressing nucleotide sequence isolated from the Sargasso Sea
ccatctaggagctaaagtcttcatgttcactgaatacaaaattttaacgccagtggttatagctttagtaatagcttgtggtttttctccacttggttgggataccgcaaccgcaatagcagttggagcattatcttcagcaattgcaggatttataggtatgtattcagcaacacaagctaacgtaagaaccgcaactgcagcagaagagtcaggacaagagcaagctctatcaatttcattttttggtggttcaataatgggtttatgtgttgcttctatgggtttagttggtctaggcggactttatttttattttagtggagttatagaagatcctaatgaacttgccaaagcattagaaggttttggggtaggagcatccgcagtggcattattttcaagagttggtggcggcatttataccaagagtgctgatgttggtgctgatcttgttggaaaaatagaagctggcatacctgaagatgatccaagaaatccaggcgtaattgctgataatgttggagacaatgttggagatattgctggcatgggttcagatatattcgaatcatattgtggagcaatgattgcttctattgctattgctgcaactatgggtaatagcgatctgatgtttttgcctttgtggcttgctgcttcaggattattctgttctttactaggtataggaattgttagaacacaagtttctagatcaccagcggttgcactaagatggggaacatttttatctcctgttttattcttattgtttgctggcgcaagtatttattattcgcctgctatagagatgaattatttttattctgtacttacaggagcagttggtggcatcttaattgg

SEQ ID NO: 266972 - DNA, 257 bp, Unknown
  Bacterial polypeptide expressing nucleotide sequence isolated from the Sargasso Sea
cggaggtttcttagctgggtcgttggttactgggtttctcttggcaatatttatggcaaattctggtggggcttgggataacgcaaaaaaatatattgaagctggaggtggagcaggaaagggttctgacgaacataaagctgctgtaattggagatacaataggcgatccatttaaggatacatctggtccagcaatgaatattgtcatcaaagttatgacaattgtaagccttatatttgcatctgctttttaaa

SEQ ID NO: 266973 - DNA, 670 bp, Unknown
  Bacterial polypeptide expressing nucleotide sequence isolated from the Sargasso Sea
catgtctcaaatacagtacttacaaatagtgatatttgctgcaatagcggcaattgctttcggaatatttacaactaacaaaatactaagtttacctaagggcacaaaaaaaatgacaacaatttctagtgccattcaagaaggagctaaggcttatcttaaccgccaatacacaactattgcaattgtaggtattgttatattttttgcattttttttaataccatttaaacatatttatgatgtacctgttggttttttgattggtgcagttttgtcaggccttgctggttatattggtatgaatgtctctgtgagagcaaatgtaataacagctcaagcagcaagctcctctttaaaaaaaggtctttatgtagctttcaatgcaggagcagtaacaggattgttagttgtaggactggctttagcaggtatagcaggatattttatgattctatattatggatttgaaagaacaggaagagaacttatagaaccgctagttgctcttggttttggatcctcattaatttccatatttgcaagattgggtggtggaatttttacaaagggtgcagacgttggagctgatctggttggaaaagtagaaaaaaatattccagaggatgacccaagaaatccagctgtgatagcagataacgtggagata

SEQ ID NO: 266974 - DNA, 91 bp, Unknown
  Bacterial polypeptide expressing nucleotide sequence isolated from the Sargasso Sea
tataaagatactgccggtcctgcagttaacccgatgaacaaaataactaatattgttgcattattattattggcagtaattgctagttagg

SEQ ID NO: 266975 - DNA, 135 bp, Unknown
  Bacterial polypeptide expressing nucleotide sequence isolated from the Sargasso Sea
aagcacataaagctgctgtaacaggcgatacagttggtgatccttataaagacacagctggtccagcagtaaaccctatgattaaaattaccaacatagtagctttacttcttttagcagttatcgctggttaat

SEQ ID NO: 266976 - DNA, 91 bp, Unknown
  Bacterial polypeptide expressing nucleotide sequence isolated from the Sargasso Sea
tataaggatacagcgggtcctgctgtcaatcccatgattaaaatcacaaatattgttgccttacttttattagcagttatcgctggttaat

SEQ ID NO: 266977 - DNA, 757 bp, Unknown
  Bacterial polypeptide expressing nucleotide sequence isolated from the Sargasso Sea
ctattcatcggtggaggatacttcgctcttgattatctggaactagatacaaccgtaatttgggcagtggcaattgggtcattagtaggtattctaatcggactagttaccgaatactacacaggaattgagcctgtattcggaatcaaggtacaagctattccgtacatcggagaggcttctaagactggcagtgcaacaaatgcgattgcaggtcttgctgtaggaatgcaatctgtattccttcctgttcttctaatggccggtggaatttactttgctaacgatgtaatgggcggcggagatgctgggctttacggaatagcaatggccgctatggggatgctaggaactgttggtgttaccatgacagtcgatgcttacggaccagtagcagataacgctggtggaattgcagagatgtcaggactaggaaaagaagtgagagaaatcacagatggcctagactcaattggaaactcaactgctgcaatcggaaaaggattcgcaataggtagtgccgcactaactgctttggcattattcgcagcatacaaaactagggcagaagaagccttgggagtaggtgaaactctagatctttccttaaccaatccagatgttgtaataggcctactaatcggtggtgcacttccattcctagtggctgctatgacaatgaagtctgtaggacgagcagctgaagacatgattacagaaattcgcagacaattcagagaaattgacggactattgg

SEQ ID NO: 266978 - DNA, 350 bp, Unknown
  Bacterial polypeptide expressing nucleotide sequence isolated from the Sargasso Sea
ggctgctttaaacaaaatgcttttaccaggtgcgatagcaattctatcgccaataattgttggttttgttttagggccagtccatttaggtggtatgttggctggagcattacttggatgcgttttaatggcattgatgatggcaaatgctggtggagcatgggataacgctaaaaaattcgtcgaaaaaggaaattttggaggaaaaggaacagagacacactcagcaacagtagttggtgatacagttggagatccatttaaagatacatctgggccatcaatgaatattcttataaatgtaatggcaattgtaagtttagtaatagcacctttattgagcacctaat

SEQ ID NO: 266979 - DNA, 160 bp, Unknown
  Bacterial polypeptide expressing nucleotide sequence isolated from the Sargasso Sea
gaagatggtcactgtggtggtaaaggatctgaggcacataatgcttcaatcacaggtgatacagtcggggatccatataaggataccgctggtcccgcaatcaacccattgatcaaaatcatcaatattgttgcactgttgttaatccctcttctctaat

SEQ ID NO: 266980 - DNA, 227 bp, Unknown
  Bacterial polypeptide expressing nucleotide sequence isolated from the Sargasso Sea
ttgtgtcttaatggcattgatgatggctaacgctggcggcgcttgggataacgccaaaaaatttgttgagaaaggcaactttggcggcaaaggcacagatactcatgcagctacagttgtgggcgatacggttggagacccatttaaagatacttcaggtccatctatgaatattcttatcaatgtgatggctatagtaagtcttgttatagcgccacttttataaa

SEQ ID NO: 266981 - DNA, 221 bp, Unknown
  Bacterial polypeptide expressing nucleotide sequence isolated from the Sargasso Sea
atttgttgcaatctcaatgacaactggaggcggagcttgggataatgctaagaaatacgttgaggatggaaactgtggaggtaaaggatcagatgctcataaagcagctgtaacaggtgataccgttggtgatccatacaaagacacagcaggtcctgctattaatcctctgattaaaataattaacatagtggcattattaattgttccactgatgtaag

SEQ ID NO: 266982 - DNA, 331 bp, Unknown
  Bacterial polypeptide expressing nucleotide sequence isolated from the Sargasso Sea
ggtgaccccctggacgtactggttgtcaccccctacccgatccaggccggttccgtgattcgctgccgcccggtgggtgtgctgaatatggaagacgaagccggtggcgacgccaagctggttgcagttccccatgacaagctgaccaccacttaccatgacgtgaaggaaattgacgatctgcccgagctgctgcgcgaccagatcaagcatttcttcgagaactacaagacgctcgagcccggcaagtgggtaaaagtgcaaggctgggacaacgccgacgccgccaggaaagccatcgtggattccgttaacgcctacaaaggctgag

SEQ ID NO: 266983 - DNA, 113 bp, Unknown
  Bacterial polypeptide expressing nucleotide sequence isolated from the Sargasso Sea
tatcgctctggctgcaacaccaatgttagcccttgcaggcatggttgtagctttagatgcatatggtccagtaactgataatgcaggtggtattgctgaaatgagtggttaga

SEQ ID NO: 266984 - DNA, 552 bp, Unknown
  Bacterial polypeptide expressing nucleotide sequence isolated from the Sargasso Sea
ggcggtgcttgccgatgtcatgctgctgccgctcgcgatctgcggcgtctgcatcctgacgtcgattgtcggcaccttcttcgtcaagctcggtacaaacggctcgatcatgggcgcgctctatcgcggccttatcgtgaccggcctgctgtcgatcgtcggcatcggtctcgccacctgggcgaccatcggcttcggctcgatcggcgaggtcgcgggacgcaacatcaccggtctggcgctgttcatctgcggcattgtcggcctgatcgtcacggcgttgatcgtggtgatcaccgaatattataccggcacgggcaagcgcccggtgacctcgatcgcccaggcctcggtctccggacacggcaccaatgtcatccaagggcttgcggtttcgcttgaggcgaccgcgctaccggcgctggtgatctgcggcggcatcatcgtcacctatcagctcgccggcctgttcggcaccggcatcgcggtcaccgccatgctggggcttgccggcatgatcgtggcgctcgacgccttcggcccggtcacgga

SEQ ID NO: 266985 - DNA, 337 bp, Unknown
  Bacterial polypeptide expressing nucleotide sequence isolated from the Sargasso Sea
gcagtttcatgcctccttagttggtttcttattaggagcaaaagctcttggcggaatgttagctggaggtttgcttggttgcgttcttcttgctcttatgatggctaatgctggaggagcttgggataatgctaagaaatatattgagaaaggaaatctcggtggaaaaggttcagatacacatgctgctgcagttgtgggagacacagttggagacccttttaaagatacttcgggacctgcgatgaatatcttaattaatgtaatggcaattgtaagcttagttattgctggtcttctaccagttgatggcctaatagttaccttatttaattaa

SEQ ID NO: 266986 - DNA, 583 bp, Unknown
  Bacterial polypeptide expressing nucleotide sequence isolated from the Sargasso Sea
tatgccagcattcataccaccacttttaggtctcataggtcttttcatcgccctaggaatatttagagttgttcttagctatccagaagggaatcaagaagtaaagaaaattggtgacatgattcattcaggcgcaatgagctttatgaaaactgagtatatgtacttggttgttttcgttcttgttttagctgttttagttttctttgccctgggctgggaaacagcaactgcagttttagttggcgcttctagttcagctctagctggatttattggaatgtatgccgcaactaaagctaacaccagaacagctgcagcagcccaagatagtggtacagccgcagctttatcaatctctttttacggtggatcaataatgggtctctgtgttgcttctttgggtcttcttggcttgggaggattattttattttctaggagagggtcattacctagaaggatttggaatgggagcttcagttgtagcactattctcaagggttggtggaggaatttttaccaaaagcgctgatgttggagctgaccttgttggaaaagtcgaagcaggaataccggaagat

SEQ ID NO: 266987 - DNA, 385 bp, Unknown
  Bacterial polypeptide expressing nucleotide sequence isolated from the Sargasso Sea
ttatgcaaagtgtgtagacgtagcaactcttgcatcaattggtgaattatggaaatcagcatcaattgcagtagcagcaccaatcattgtgggcattctattaggtccatctgcagttgcaggtctcttaatgggagcagttgtttctggaatattcttagcatatcacttggcaaacaccggtggtgcatgggataacgcaaagaaactcattgaaatgaaaggtgaaaagggtactgaagaacacaaagtcgcagtagtcggtgatatcattggtgatccttacaaagacacagcaggtcctgcactaaacacagtaatcaaactcttaaacacaattgcaatcgtattcgtaccagtattctttgcagttatcgtattatag

SEQ ID NO: 266988 - DNA, 658 bp, Unknown
  Bacterial polypeptide expressing nucleotide sequence isolated from the Sargasso Sea
aaagggtatttcagtaacaagtgcagtacttacatcactagcacttctagcaacatatgcaacagttgctggtataactgagctaaacttactcaatccaaaaatcttagtaggagcaataattggaggattattaccatttgtttttgctggattaactatggctgcggtaggaagagctgctggagcaatgattgaagaagtaagaagacaatttagagaaatcaaaggacttaaagaaggtaaaaaaggtgtaaagcctgatgttgcaaaagctgtagagatttctactaatggagccttgaaagaaatgatcattcctggaacattagcaattcttgcacctatagttgtaggtatattgcctttcttagggcctgaagcattaggaagtatgctagctggatcaattatttcaggatttttattagctttattcttaaataactttggtggagcagctgataatgcaaaaaaatatattgagctaggaaaccatggaggaaaagggtcagaagcacatgaagctggtgttattggagatactgtaggagatccaactaaagatacaagtggacctgctcttaacattttgttaaaacttatggctatggtttcaattgtatttggacctttgttcttaggtataagcggataa

SEQ ID NO: 266989 - DNA, 883 bp, Unknown
  Bacterial polypeptide expressing nucleotide sequence isolated from the Sargasso Sea
tttaggtgtttactttcttagtgagaacatgttttcttcatattcagagaattcaataggcctcttttttgcagtgataattgggcttgctgtaggattgttagtcggccaaatttcagaatggtttacatctgatcattattcaatagtaaaaaatattgccgatcaagctaaaacaggtccggcaacactagtattgtctgggatttcagaaggaatgcgatcagctgctttttccgtaatagttgtagtttttggaataggaggagcttacacagcaggggactgggctttaggatctggcggtggaatttatggtattgcgatagctgcaataggtgttttagctactttaggaataacagtcgctgtagatgcttacggaccaatagctgataatgctggaggtattgctgagatggcccaccttcctccagaagttagggaagctactgatgaattagactcacttggaaacacaacagctgcaattgctaaagggtttgcaataggttccgcggctgtcacagctttagcattattttctgcttttgttcaaagtgcaggtttaagtgaaattggattaaacataacgaaggtagaagttactgctggattatttttagggggaatgttcccattcctttttgcggcgatgacaataaatgctgtagggagggctgctttcaagatgattgaagaggttagaagacagtttaaagaaatacctggacttagagagggcaaagaaggagtaaagcctgattacacaagatgtgtagacattgccacttcagctgctttaaaagaaatgttgcttccaggaggtttagctatagcattgccattaattattggattttggaataaagaagctctaggt

SEQ ID NO: 266990 - DNA, 580 bp, Unknown
  Bacterial polypeptide expressing nucleotide sequence isolated from the Sargasso Sea
aatgcaaattttaataattatttgtggtttggctgcagttttatatggccttataacctcaagacaaattttatcattagattctgggaatgaaaaaatgcaagagattgcttctgcaattcaagaaggtgcaagagcatacttaaatagacagtatatgacaatcgcaattgttggtgttgtaatctttgttttaatttggtttgtttttgatctagcctcaggaattggttttttaattggtgcttttttttctggagcagctggttatgtgggcatgaatatttctgttcgctcaaatgttagaacaactcaagctgcaagtaaaagtctttctgaaggattgtcagtttctttcaaagctggagcagtaactggaatgttagttgctggttttgctttactttctattgcagtattttattttattcttcataattcaggagcttttcccggaagagaagttgttgcaccattggtttcacttggatttggagcttcattaatatcaatttttgcaagattaggtggtggaatttttactaaaggtgctgatgttggtgctgatcttgtaggtaaa

SEQ ID NO: 266991 - DNA, 580 bp, Unknown
  Bacterial polypeptide expressing nucleotide sequence isolated from the Sargasso Sea
cgatgcatttactttatctcttggccaaccaattgtattagtaggaatgtttataggaatatgtattccctttttgatttcttcaatcaccatgacagctgttggtgatgctgcttttgaaatgatcaatgagattagaagacaatttagagaaatcaccggtttaatggaagggactgctgatccagattcagaaaaatgtgttgagatagcaactaaagctgccttaaagaaaatgatgttaccgggtgtgattgcagtggcgatgccagcggttgtcggatttggtttaggtgctatggctttaggcggaatgcttgctggcggattattaggttgtgttgcacttgctttatttatggcaaatgcaggcggagcctgggacaacgctaagaagtatgttgagaagggcaacctcggcggtaaaggctctgatactcatgccgcagttgttgttggagatacagttggcgatccatttaaagatacttctggaccttcaatgaatatcttaatcaatgtaatggcaattgtgagtctagttatagctcctctattaacattgaacggaatgttgtaa

SEQ ID NO: 266992 - DNA, 1135 bp, Unknown
  Bacterial polypeptide expressing nucleotide sequence isolated from the Sargasso Sea
ctctagcacttgcttcaataggtttaatttcatctattctaggaatacttatgttaaggccgcttcatctcttgatgctgatgtggctttaaggactggaacaataggttcggctgtcatatttataattattgccttcttcctgactcaatccatgttaggagaggacggactaaatgtttggttggctgtcttaactggtgctgttggaggagttttaattggtttaatcacagaatactatactggcagcaagccggttgaaaatatagcaaaatcaggagaaacaggcccagctaccgtcatgatcaccggactggctgtcggaatgcaatctgttgtaataccgatattagttttagcttcgataatttggatttcaacctacttaacaggtttatacggagttggaattgctgcggtaggtatgcttgctactgtcggaataacaatggcaattgatgcttatggaccagttgcagataacgccggcggcatagctgaaatggctggtatgggagaagaaacaagaaagataactgactcattagatgaggtaggaaattctaccgcagctataggaaaaggttttgcaatcggcgcagcagccttagctgctttggcaatcattgcagcttttgtagaaacaattgctcatagcagaggaggcgaatttgttttattactttctgatcctaaagtcttagtaggaatgtttattggtatttctattccatttttaatttcttctataacaatgactgcagtgggtgatgcagcatttgaaatgattaatgaaattagaagacagttcaaggaaataccaggacttttagaaggaaatgctgaacctgatacagcaaaatgtgtagacattgcaacttcagccgcattaaaaaggatgttactgccaggaatcattgctgtctctgctcctgcggttgtcgggtttggtcttggagctgaatctttaggaggaatgttaggcggaggtcttattggttgcgtatctatggctttaatgatggcaaatgcagggggcgcatgggataacgctaaaaaatatatagaaaaaggaaatcttggaggcaaaggtacagaaactcatgctgcagcagttgtggcgacactgtag

SEQ ID NO: 266993 - DNA, 1090 bp, Unknown
  Bacterial polypeptide expressing nucleotide sequence isolated from the Sargasso Sea
atgacaccttgggggccatttgcatcaggttttataggattaatttttgcttttgtactttatggattaataatgaaatatcctgctggcaaagattctgttgtgaaaataggagatcaaattcatcttggagcaaaagtatttatgtttacagaatacaagattctcgctcctgttgttttagtgctagtgattgcttgtggtttttcgccactaggatggtataccgcgatggcgattgcagttggcgctttatcctcagcaatagctggattcattggtatgtattctgccacgcaggcaaatgttagaacagcaacagctgctgagaactcaggtgcagaatctgcgttatcaatttctttttttggcggatcaataatgggcttgtgcgttgcgtctatgggtctagttggattaggcggcttgtatttttatttcacaggcgctatggatgatcctgataaaattgctaaagcattagagggctttggagttggcgcatctgcagttgctctattttcaagggttggtggcggcatctatacaaaaagtgctgatgttggcgcagatttggttggaaaaatagaggctggtattcctgaagatgatccaagaaatcctggagtaatcgcagataacgttggggacaatgttggcgatattgctggaatgggttcagatattttcgaatcatactgtggagcaatgattgcttcaatagctatagcagcaacggtaggaaacactgatctcatgttcttgccactatggttagctgcacttggactattttgttctttgattggtattggaatagttagatcacaagtttcaagatctccagcagttgcactcagacttggaacatttttctcgccaatagtatttttgattattgccgcaatgagcataagtaagtcaccaaatattgaaatgaatatattttactcagtgctaactggggccgttggaggaattcttataggattaataacagaatattatacaggtggctctactgaatcttctccagttgggaagattgctaaatctggtgaaactggtcctgcaaccgtgatgatcacag

SEQ ID NO: 266994 - DNA, 164 bp, Unknown
  Bacterial polypeptide expressing nucleotide sequence isolated from the Sargasso Sea
tattgaagatggtaattttggtggtaagggctcagaagcacataaggcagctgtaacgggtgacaccgttggtgacccttacaaagacaccgcaggccctgcaattaatccgcttattaaaatcatcaatatcgtggctctgttgatagtgccgctgttgtaat

SEQ ID NO: 266995 - DNA, 367 bp, Unknown
  Bacterial polypeptide expressing nucleotide sequence isolated from the Sargasso Sea
tgttgagatagcaaccaaagcagccttaaagaaaatgatgttaccaggagtaattgcagtttctatgccagctattgttggttttggtcttggtgctcaagctttaggaggcatgcttgctggtgggctgttaggatgtgtatctctagcacttatgatggcgaatgccggaggtgcttgggataatgcaaaaaaatatgttgagaagggtaacctaggtggcaaaggttctgatactcacgcagcagctgtagtaggtgataccgtaggtgatccttttaaagatacgtcaggaccatcaatgaatattttaataaatgtaatggctatagttagccttgtaattgcgccattattaagcatataa

SEQ ID NO: 266996 - DNA, 478 bp, Unknown
  Bacterial polypeptide expressing nucleotide sequence isolated from the Sargasso Sea
ttaacaataactgcagtgggtgatgcagcctatagcatgatcaatgaaattagaagacagtttagggaaatacctggcttacttgagggaactggaaaacccgataatcaaaagtgcgttgaaatagcaactggtgcggctttgaaaaagatggtcatgcctggtgcaatagcggttttttcgcctgttactgttggatttttattcggacctgaaatgttaggtggccttctcggtggaggtcttgttagttgcatcttacttgccttgacaatgtcaaattccggcggtgcttgggataatgcaaaaaaattcgttgagaaaggcaattttggtggtaaagggtcggatacacataaagcagcggttgtaggtgataccgtaggtgatcctctaaaagatacttcaggaccatcaatgaatattttaataaatgtaatggcaattgttagcctcgttattgctcccctgctataaa

SEQ ID NO: 266997 - DNA, 1049 bp, Unknown
  Bacterial polypeptide expressing nucleotide sequence isolated from the Sargasso Sea
tatggaaagttttattattggcccaatgactccttggggtcctgttgtaactggcttaataggcctagtttttgcttttgttttgtatggattgattatgaaatatccagcaggcaaagattctgtagttaagatcggagatcagatccatctaggagctaaagtcttcatgttcactgaatacaaaattttaacgccagtggttatagctttagtaatagcttgtggtttttccccacttggttgggataccgcaaccgcaatagcagttggagcattatcttcagcaattgcaggatttataggcatgtattcagcaacacaagctaacgtaagaaccgcaactgcagcagaagagtcaggacaagagcaagctctatcaatctcattttttggtggttcaataatgggtttatgtgttgcttctatgggtttagttggcctaggcggactttacttttattttagtggagttatagaagatcctaatgaacttgccaaagcattagaaggttttggggtaggagcatctgcagtggcattattttcaagagttggtggcggcatttataccaagagtgctgatgtcggtgctgatcttgtaggaaaaatagaagccggcatacctgaagatgatccaagaaatccaggcgtgattgctgataatgttggagacaatgttggagatattgctggcatgggttcagatatattcgaatcatattgtggagcaatgattgcttctattgctattgctgcaactatgggcaatagcgatctaatgtttttacctttgtggcttgctgcttcaggattattctgttctttactaggtataggaattgttagaacccaagtttctagatcaccagcggttgcactaagatggggaacattcttatctcctgttttattcttattgtttgctggcgcaagtatttattattcacctgctatagagatgaattatttttattctgtgcttacaggagcagttggcggcatcttaattggtttaataactgagtactatactggcggagatacag

SEQ ID NO: 266998 - DNA, 334 bp, Unknown
  Bacterial polypeptide expressing nucleotide sequence isolated from the Sargasso Sea
ttatggaccagtaacacataatgcaggtggtatcgctgaaatgtcaaatcttgacaagaaagttaaaaaaactactgatacattaaacgcggttggaaatactacaaaggctgtaaccaaaggctatgctattggttctgcaggtttaagtgctctagttttattcgctgcttatacggaagacataaaacacttttcaaaagaggcaggttccgcattagaaggtattgttgtaacttttgatttatcaaacccttatgttgtggttgggttattaattggtgcgtatgttaccatatttatttggatcaatgggtatgcaggccgttggtag

SEQ ID NO: 266999 - DNA, 706 bp, Unknown
  Bacterial polypeptide expressing nucleotide sequence isolated from the Sargasso Sea
aagaaccgatgctttagatagtttaggtaacactactgctgctactggaaaaggtatatcagttactagtgctgtcctaacttcacttgctcttctagctacatatgcaacagttgctggtattgattcattgaatttactaaatccaaaaattttagttggagctattataggtggtttattgccatttatttttgctggacttacgatggctgcagtaggtagagctgctggagcaatgatagaagaagttagacgtcaatttagagaaatcaaaggacttaaagaaggtaaaaaaggtgtaaaacctgatgtagcaaaggctgttgaaatttcaaccaatggtgcattaaaagaaatgatagttccgggaacattagcaatacttgctccaatcgctgtaggaattattccattccttgggcctgaagctttaggaagtatgcttgcaggatctataatttctggatttttacttgctatttttctaaataactttggtggtgctgctgacaacgcaaaaaaatatatcgagttaggtaaccatggtggtaaaggatctgatgctcatgaagcaggtgtcataggagacactgtcggagatccaactaaagatactagtgggccagctcttaacattttgttaaagcttatggcgatggtatcaatagtttttggtcctctatttttagggataggtggatag

SEQ ID NO: 267000 - DNA, 529 bp, Unknown
  Bacterial polypeptide expressing nucleotide sequence isolated from the Sargasso Sea
catgagcttcaataacgtccccgcaggcaaagatctcccgcaagatttcaacgtcatcatcgaaatcccggcgcaaagcgatccggtgaagtacgaagccgacaaggaaacgggcctcctgcacgtcgaccgtttcatcagcacgggcatgcgctatccggcgaattacggctacatcccccaaacgctgtcgggcgacggcgatccggtcgatgtcctggtgatcacgccgttcccgctgctggcaggctcggtggttcgcgcacgcgcactcggcatgctgcaaatgaccgacgaatcgggcgtcgacgccaagctggtcgccgttccgcacgacaaggtctgcccgatgaccgccacgctgaagtcgctcgacgacgtgccggcgtacctgaaagaccagatcaagcacttcttcgagcaatacaaggcgctggagaagggcaagtgggtgaaggtcgaaggctgggcggatatcgacgccgctcacaaggaaatcagcgaaggcgtggcgaactacaagaagtaa

SEQ ID NO: 267001 - DNA, 181 bp, Unknown
  Bacterial polypeptide expressing nucleotide sequence isolated from the Sargasso Sea
gcaaaaaaatatatagaagatggaaactttggcgggaaaggttcagaatctcataaagcagctgtcacaggtgatactgtaggtgatccttataaagataccgctggtcccgctgtaaatccgatgattaaaattacaaatattgtagctttattattgttagcagtaattgctcactaaa

SEQ ID NO: 267002 - DNA, 331 bp, Unknown
  Bacterial polypeptide expressing nucleotide sequence isolated from the Sargasso Sea
gatgttgcctggaataatagctgtatcaatgccaaccattgttggttttgggttaggtgcacaggctttgggtggaatgcttgctggtggattgcttggttgtgtttcattagcgctaatgatggcaaatgctggaggagcttgggataatgccaaaaaatatgttgagaaaggtaatttaggaggtaaaggttcagacactcatgcagctgctgtagttggagatacggttggagatccatttaaggatacctcaggaccatcaatgaatattcttattaatgttatggcaattgttagtttggttatcgcgccactcttaagcatttaa

SEQ ID NO: 267003 - DNA, 166 bp, Unknown
  Bacterial polypeptide expressing nucleotide sequence isolated from the Sargasso Sea
tacaatagatggtcaaaaattagtcaaaggatccgaggcccataaagcctctgttgtcggtgatactgtcggagatccatttaaagacacttctggtccatcattaaatattttaataaaacttatgtcagtggtgtctttggtaattgcaccgttgattaaatag

SEQ ID NO: 267004 - DNA, 341 bp, Unknown
  Bacterial polypeptide expressing nucleotide sequence isolated from the Sargasso Sea
tgcagtttcaatgcctccattagttggtttcttattaggagcaaaagctcttggcggaatgctagctggcggattacttggttgtgttcttcttgccttaatgatggctaatgccggaggcgcttgggataatgctaagaaatatattgagaaaggaaatcttggcggaaaaggctcagatactcatgctgctgcagttgtgggagatacggttggagatccatttaaagatacttcaggacctgcgatgaatatcctaattaatgtgatggcaattgttagtttagttattgctggccttcttccagttgatggcttaatagttaccttatttaattaag

SEQ ID NO: 267005 - DNA, 754 bp, Unknown
  Bacterial polypeptide expressing nucleotide sequence isolated from the Sargasso Sea
tatgtctgaaattttatatggtgttattgcagcagtagtttctttactcacagcaggaattttatttttgagagttcaaagaattaatgttgttaatgaggatgttaagaacataggagatcttatcaaggaaggagctatggctttcttgaaaagagaatatactgttctatctatgtttgttatagcagtatttgtaatattagttgtatttatagatttagatgtatttggaataattggtactagccaaggtaatataaatatgtcgatttcttacctaattggtgcagctgggtctgctttagcaggatactttggaatggctgcagctgtaagagggaactctagaacaactgaagcttctcagaaaagtctaaacaatggattaagagttgcttttagtactggtgcagttcctggttttgctgttgttggtataggtcttcttggagtatcagttttatatttagtttttgaaagtgccacagtaatagctggttttggttttggagctagttcagtaggtctatttgcaagggtagcaggtggagtttataccaaagcagctgacgttggtgctgatctggttggaaaagtagaagccggccttcctgaggatgaccctagaaatccagcaacaatcgctgataatgtgggagatatggttggggatactgcaggaatgagtgctgatctttttgaatcctatgcgggatctcttattgctacaatcgctcttgcggttgctgca

SEQ ID NO: 267006 - DNA, 670 bp, Unknown
  Bacterial polypeptide expressing nucleotide sequence isolated from the Sargasso Sea
ttagactctctaggaaatacaacagctgcaatcgcaaaaggatttgcaattggatctgcagcagttaccgcattagctttattctcagcttttgtgcaaagtgcaggtatcgaaaaattagatattacagaggtggaagtaactttaggtttatttttgggaggtatgttcccatttttgtttgccgctatgaccattaacgcagtaggaagagcagcatttaaaatgattgaagaagttagacgacagtttaatgagatccctggtttgagagaaggtaaagaaggagttgttcctgactacacaaaatgtgtagacatagctacaacggcggcattaaaagaaatgcttcttccaggtggcttagctattgctcttccattaataattggtttttgggacaaggaagcactcggaggtttcttagctgggtccttggttactgggtttctcttggcaatatttatggcaaactctggtggggcttgggataacgcaaaaaaatatattgaagctggaggtggagcaggaaagggttctgacgaacataaagctgctgtaattggagatacaataggcgatccatttaaggatacatctggtccagcaatgaatattgtcatcaaagttatgacaattgtaagccttatatttgcatctgctttttaaa

SEQ ID NO: 267007 - DNA, 598 bp, Unknown
  Bacterial polypeptide expressing nucleotide sequence isolated from the Sargasso Sea
gctttttcggctgttgtagggaaagaaaatcctgaattttctttagcactcacagagccaattgttttagttggaatgtttattggagtgtgtatacctttcttagtctcatcaataacaatgacggctgttggtgatgctgcatttgaaatgattaacgaaataagaaggcaattcaaagaaataactggtttaatggaagggaccgcagaacctgattcagaaaaatgtgttgagatagccactaaagcagctcttaagaaaatgatgttaccaggtataatcgcagtatctatgcctgccatagttggctttggacttggcgcacaagccctaggcggtatgcttgctggcgggttattgggctgtgtatcattagctttaatgatggccaatgctggcggagcttgggataacgcaaaaaaatatgttgaaaaaggaaatttaggtggaaagggctctgatactcatgcagctgcagtagttggcgatacagttggagatccttttaaagatacctctggaccttcaatgaatatccttattaatgtaatggctattgttagtttggtaatagcacctcttcttagcatataat

SEQ ID NO: 267008 - DNA, 430 bp, Unknown
  Bacterial polypeptide expressing nucleotide sequence isolated from the Sargasso Sea
tttagaaggcacaggagagccagatactgataaatgtgttgagattgctacaagagccgcacttcagagaatgctattgcctggcgtaattgcagtttcaatgcctccattagttggctttttattaggagcaaaagctcttggtggaatgctggctggcggattacttggttgtgttcttcttgctttaatgatggctaatgccggaggcgcttgggataatgctaagaaatatattgagaaaggtaatctcggtggaaaaggctcagatacccatgccgctgcagtagttggagatacagttggcgatccgtttaaagatacttcaggacctgcgatgaatatcctaataaatgtgatggcaattgtaagtttagtgattgctgggcttctgccagttgatggtttaatagttaccttatttaattaa

SEQ ID NO: 267009 - DNA, 520 bp, Unknown
  Bacterial polypeptide expressing nucleotide sequence isolated from the Sargasso Sea
ggtatatttattggaggagcaatacctttcttaatagcttcaattactatgacagctgttggagatgccgcctttgagatgattaatgaaataagaagacaattcaaagaaatcccaggacttttagaaggtaatgcagagcctgacactgcgaaatgtgtagatattgcaacagcagcagcacttaagaaaatgctcctacccggagttattgctgtttcggcaccacctttagttggactaggaattggagctgaggctttgggtggaatgcttgcgggaggtcttctagtttgcgtgcttatggcattattcatggcaaatgctgggggtgcttgggacaatgctaagaagtacattgaaaaaggaaaccttggcggaaaaggaactgatactcattcagcagctgttgttggtgacactgttggagaccctttcaaggacacatcaggaccttcaatgaatattctaattaatgtaatggcaattgtaagtttagtaattgctcctttgctttaaa

SEQ ID NO: 267010 - DNA, 617 bp, Unknown
  Bacterial polypeptide expressing nucleotide sequence isolated from the Sargasso Sea
cggctgtcacagctttagcattattttctgcttttgttcaagtgcaggcttaagcgaaattggattaaacataacgaaggtagaagttactgctgggttatttttagggggaatgtttcctttcctttttgcggcgatgacaataaatgctgtagggagggctgctttcaagatgattgaagaggttagaaggcagtttaaagaaatacctggacttagagaaggcaaagaaggagtaaagcctgattacacaagatgtgtagacattgctacttccgctgctttaaaagaaatgttgcttccaggaggtttagctatagcattaccattgattattgggttttggaataaagaagctcttggtggttttcttgctgggtctcttgtaacaggcttcttgttagcaatatttatggccaactcaggaggcgcttgggacaatgcaaagaaatatatcgaagcaggaggtggagcagggaagggttctgatgaacataaagctgctgtaattggggatacaatcggagacccatttaaagatacttctggtcctgcaatgaatatagttataaaagtaatgactattgttagtttaatatttgcttcggcattttaat

SEQ ID NO: 267011 - DNA, 334 bp, Unknown
  Bacterial polypeptide expressing nucleotide sequence isolated from the Sargasso Sea
gctgttattactccagtgattgtgggtttttcttttggagcagaaactcttggtggattattagcaggagtcactgttagtggagttcttatggccattttccaatcaaatgctggtggtgcctgggataatgcaaagaagatgatagaagaaggggtcaatattgatgaagaagtgttaaagaaaggatcagaagcacataaagcatcagttgttggtgatacagtaggagacccatttaaagatacttctgggccttcattgaatattttaatcaaactgatgtctgtagtgtctttggttatagcaccattgttgaagtcattcagttaat

SEQ ID NO: 267012 - DNA, 907 bp, Unknown
  Bacterial polypeptide expressing nucleotide sequence isolated from the Sargasso Sea
tttgccaattggtttaggtttatttggactttttacagcagtatttgtttttttaaacataaaaaaatcacctgctggcgatggaaaacttaaagaaattgctgatgccattcatctgggtgcgatggtctttatgaatagtgaatataagcgtttggctatattctgtgttatctgtattagtgcaatttggttctccgaactcggaccaaatacagctttggcttttttacttggagcgatctgctctggctctgctggttattggggtatgtacacagcaacccacgccaatgtcagaacggcggttgcagccaacacaaaaggggcctctgaagcactcaatatcgctttttttggtgggtctattatggggctaactgttgcctcaatgggtctatttggtattggtattctctattattttttcgcaggagactctcacaccattcatgcaattgaaggattcgccatgggcgcctcctcggtagcattattttcacgtgttggcggagggatcttcacgaagagcgctgatgttggtgcggatttggtgggtaaagtggaagcggggattcctgaagatgacccaagaaaccctggtgtgatcgcagataacgtcggtgacaatgtcggtgatgtagctggtatgggttcggatattttcgaatcatactgtggctcaatgattgcaactatggcgcttgcagcaaccatgacttcaacaaaaatattcgacttggctccaatcggaggacaagaaattttaaccttcatgcctttagcgctcgcttcaattggtctaatttgttcaatgattggaatttattctgtaaaactcttctcctcaaaaagtcctgaggtcgctcttcgaattggcacaatgggctcttcaataatttttatt

SEQ ID NO: 267013 - DNA, 623 bp, Unknown
  Bacterial polypeptide expressing nucleotide sequence isolated from the Sargasso Sea
ttcaaaagttgctggatcaaatttagaaggaatagtagttacatttgatctatcaaatccttttgtagtagttgggttattagtaggaggcatgcttccatatctttttggatcaatgggcatgcaagcagttggtagagcaggtggtgcagttgtaatagaagttagaagacaatttaaaaaaattccaggaataatgaaaggtaaggccaaacctgattatggaaaattggtagatttattaactagagcagctattaaagaaatgattgttccttcattattacctgtattatcaccgattgttttatattttattatactacctataggtggacaggttgctgctttatcatctgttggtgcaatgttgcttggtgtaataataacaggattatttgttgctatatcaatgacagcaggtggtggtgcttgggataatgcaaaaaaatatattgaagatggaaattatggtggcaagggatctgaagcacataaagctgctgtaacaggagatactgttggagatccatataaagatacggcaggaccagctgtaaacccaatgataaaaattaccaacattgttgcattattattgttagcagtgatagctggataat

SEQ ID NO: 267014 - DNA, 163 bp, Unknown
  Bacterial polypeptide expressing nucleotide sequence isolated from the Sargasso Sea
atggtaaattttgggggtaaaggttcagaggcacataaagcagcagttacaggagatacagtaggtgatccctacaaggacactgcaggaccagctgtaaatccaatgattaaaattactaatatcgtcgctttgcttctcttagcggttatagctggttaat

SEQ ID NO: 267015 - DNA, 826 bp, Unknown
  Bacterial polypeptide expressing nucleotide sequence isolated from the Sargasso Sea
tggggtgctatggtttttatgagacgtgaatacacttaccttgcattgttcgtagctgttctaattgttctttcttatttatttttaggcctaaataccgctttagcagtaacagcaggggcattatcatcatctcttgctggatggctaggaatgttctctgcaaccaaagcaaacgtcagaactgcaactgctgcttccgagtctggagcgcaagctgccctttctgtggctttttatggtggatcaataatgggactgtgtgtcgcttctcttggattggtaggtctaggaggtctttacttctatttcggaggtgatcctgatactgcaagagcaatagaaggattcggaatgggagcttcttgtgttgctctattctctcgtgtaggcggcggaatttatacaaaaagtgctgatgttggtgctgatttagttggaaaagttgaagcaggaataccagaagacgatccaagaaatcctggagttattgccgacaacgtcggagataatgttggagatgttgctggcatgggttctgatatttttgaatcatattgcggagccatgattgcatcaatcgcaattgctgccacaatcgataataccggaatgatggcgttacctttagctttagcttcccttggactattggcatctatacttggaattataattgttagagtattttctaaagcagatcctggaacagcattaagaacaggaactataggatcagcgattctttttattactgcagcttactttttaattcaaatgattttgactgaaaatgccgtaaatacttggttggcagtattagctg

SEQ ID NO: 267016 - DNA, 1053 bp, Unknown
  Bacterial polypeptide expressing nucleotide sequence isolated from the Sargasso Sea
ggatctatcacttactcaagcatgggagtattctatgctacgataattggtttggctgcaggtttgggcataggcattattacagagcattatactggaacaggtacatctcctgtcaagtctataacagatcaatctgttactggtgccgcaactaacatcattgcaggtttaggggttggtatgcaatctacagcaatacctattttgatattagctgttgcaattataagcgcacattatttagcaggtctttatggtgttgcaatggcagccctaggaatgctggctaatacaggtattcaacttgccgtagatgcttatggtccaatttctgataatgctggaggtattgcagagatggctgaattacccgctgatgtaagggaaagaacagataaacttgatgctgttggtaatacaacagcagcaatcggtaaaggatttgcgataggctctgcagcactgactaccttagctttgtttgctgcctacatggtgcaaagcggtataattgatgttggaatcaacattgctgaacctgctgttatggctggcttatttattggaggcatgctaccattccttttttcatctatggctatgggtgcagtgggtagagcagcgatgtcgatgattgaagaagtaagaaggcagtttagagatataccagagcttaaaactgctttaaaaatattaaataaagaaaaaaatgaatctaaactatctaaaaaagatagagaagcatatgaattaggaatgtcaaaagctgaccatggaagatgtgttgagatctctacacaagccgcaataagagagatggttatgcctggacttttagcggttataactcccgtaatttttggttttggccctggcttgcttggcagtgaccttggaccacaaatcctcggtggacttttagccggagtaacagtttgcggtgttttgatggcaatatttcaatctaatgcaggaggtgcttgggacaatgctaagaaaatgattgaggagggagtggtagttgatggcaaatcttacggtaaaggttca

SEQ ID NO: 267017 - DNA, 1004 bp, Unknown
  Bacterial polypeptide expressing nucleotide sequence isolated from the Sargasso Sea
cacaggtaatttaaaaatgcaagagatggcatctgcaattcaaataggtgcaaaagcttatttagcacgacaatacaaaactatagcaatcgttggagttgttgttttagttatagttagttatgctttcagtcttctagttggtttaggttacctaataggagctgtattgtctggtattgctggatatgtaggaatgttagtatccgttcaagctaatgtcagaacagcagaggcatctcgaaaaggtttagctagtggtctttctgttgcttttaaatctggagctgtaactggaatgttagttgccggtctagcacttttagctattgctgtttattattatttattattaaaatttagtgttgatgaacgagagatagtaaatgctctcgttgccttaggtttcggtgcatctcttatttcaatttttgcaagattaggtggaggtatttttacgaaaggggctgatgttggagcagatttagttggtaaagttgaagccggaatacctgaggacgacccaagaaacccagcagtgatagcagataatgttggagacaacgttggggattgtgcaggtatggctgctgatctgtttgaaacttacgcagttacaatagttgctacaatggttttatcatcaatcttttttccaggtgatatgttaatgatgatatacccactgacaatcggtggtgcgtgtatcttaacatcaattttaggaactttttttgttaaacttggtaaaagtaaaaatgttatgggagctttgtacaaaggttttgttgtttctgctttagcttcattagtgattttatatcctgtaacagatttcgttttaggtcttgagaatacttacaatttaaataataaatcattttctggaatggatttatattattgtggtattataggattaattatcacaggattattaatatggattacagaatattatactggtacaaattatagacctgtaagaagtgtgctaactctca

SEQ ID NO: 267018 - DNA, 646 bp, Unknown
  Bacterial polypeptide expressing nucleotide sequence isolated from the Sargasso Sea
tctggctctcttttcagcttttctgacaagggcagatttgctggatccagaggcaaacataatggaaagcataaacctgcttgatccactcgttttgacaggattattcgtaggggcaatgctaccattccttttctctgcgatgacgatgaagtctgttggtaaagctgcttttgacatgattgaagaggtacgcagacaattccgtacaattcctggaatcatggatggaaaagctgagccagattatgagaaatgtgtggggatttccacaacagctgctttacgtgaaatgatacctcccgggattctgattatgggaacgcctcttctggtggggttcctttttggagtaccagccgttgcaggaatattggcaggctcactggtgtcagggggggtgcttgctatttcttccgcaaactccggaggtgcgtgggataacgcaaagaagtacattgaaaaaggtaatttcggaggtaaaggcacagagactcataaggccgctgtcgtaggagacactgttggtgacccattcaaagacacctctggtccatcactgaatatacttataaagctttcagctatcctcagcttggtttttgtcccattttttattaactatggaggtttactgaccggttga

SEQ ID NO: 267019 - DNA, 1033 bp, Unknown
  Bacterial polypeptide expressing nucleotide sequence isolated from the Sargasso Sea
cccgaggatgatccaagaaatccagcagtaatagcagataacgttggagataatgttggagattgcgcaggtatggcagctgacttatttgagacttacgcagtaacaatagttgctactatggttttatcttcaatattttttcatggtgatttaaacatgatgatttaccctttatctattggcggagcttgtatacttacttctatttttggaactttttttgttaaattaggaaaatctaaaaatattatggctgccttgtataaaggttttgttgtaactgcgattacatcactaatcattttatatcctattactgataaagttttaggattagatagcacttattcagtttcagataaatcattttcaggaatgagtttatatatttgtggaattataggattagttataactggtctattaatatgggttactgaatattatactggaacaaattatagaccagtaaaaagtgttgcttcctcatcaacaactggacatggaacaaatgtaattcaaggattggcagtttcaatggaagctacagcaatacctgcattaattattgttggaggaatacttttaacaaattatattgcaggcctttttggaatagcaattgctgtaactacaatgttagctttagcaggaatggttgtagctcttgacgcttatggtccagtaactgacaatgctggtggtattgcagaaatgtcaaatttaccaaaaaatgtaagaaaaactactgacgctttagatgctgttggtaatactactaaagctgttacaaaaggttatgctattggttccgcaggattaggagctttggttttatttgctgcctatactgaagatattaaacatttttcaaaagttgctggttcacaattagagggtattatcgtaacatttgatctatctaatccttttgtggtagtgggattgttagttggtggaatgcttccatatttgtttgggtcgatgggtatgcaagctgttggtagagcaggaggtgcggttgttgttg

SEQ ID NO: 267020 - DNA, 925 bp, Unknown
  Bacterial polypeptide expressing nucleotide sequence isolated from the Sargasso Sea
gatggtttatcctttatcaattggtggagcttgtatacttacttcaattgttggaactttttttgttaaattaggaaaatctaaaaatattatggctgcgctttataagggatttgttgtaacagctataacttcattaattattttatatcctattactgattatgttttgggtttggataacacttatacaatttcggataaaacatttacaggaatgagcctttatatttgtggaattattggtttaattattactggtttaattatatgggtaacagaatattatactggaacaaattatagaccagtaaaaagtgttgcttcttcatcaactactggacacggtacgaatgttattcaaggacttgcagtttctatggaggctacagcagtacctgctttaattattgtagctggaatattattaacaaattacatcgctggactttttggtatagcaattgctgtaacaacaatgctagcattagctggtatggtagttgcattagacgcatatggcccagttacagataatgctggtggtatagcagaaatgtcaaatttgccaaaaaatgttagaaaaactacagatgctttagatgctgttggtaatactactaaagcggtcactaagggttatgcaattgggtcagctggtttaggtgcattagttttatttgctgcctataccgaagatattaagcatttttcaaaagtagcaggatcaaatcttgaagggatagttgttacatttgatttatcgaatccttttgtagtggttggtttattagttggtgggatgcttccatatttatttggttcaatgggcatgcaagctgtaggaagagctggtggagctgtagttgtagaagtaagacgacaatttagaaaaattccaggtattatgaaaagaaaagcaaaa

SEQ ID NO: 267021 - DNA, 211 bp, Unknown
  Bacterial polypeptide expressing nucleotide sequence isolated from the Sargasso Sea
gatgactgcaggaggaggtgcttgggataacgctaaaaaatatatcgaagatggaaattttggaggaaaaggttccgaagctcataaatctgcagtaacgggagatacggttggtgatccttataaagatacagcaggccctgcagttaatccgatgattaaaattactaatattgtagcattactacttttagctgtgatagctcattaa

SEQ ID NO: 267022 - DNA, 919 bp, Unknown
  Bacterial polypeptide expressing nucleotide sequence isolated from the Sargasso Sea
atgagctcaacagtcgaaacaatattattatatacaatagcagcaggcctcttgtccattgtttatggatttttcacaggaaaaaacattctaaactcaagtgcaggtaatgctaaaatgcaggaaattgcatctgctattcagattggtgctaaagcatatttggcaagacaatataaaactatagcaattgttggtgttgttgttttagtaattgttagtatagcttttagtcctttagttggtgtaggatatttaattggtgctgctttatcaggtatagctggttatgttggtatgttggtatctgttgaagctaacgtaagaacagctgaagcttcaagaaaaggtttagctcaaggcctttctgttgcttttaaatcaggtgctgtaacaggtatgcttgttgctggcttagcattattgtcaatatctgtttattactttctattattaaaattaaatgttgatgaaagagaaattgttaatgctcttgttgcactaggtttcggtgcttctttaatttcaatttttgcaagattaggtggtggaattttcacaaaaggtgctgacgtaggtgctgatttagttggaaaagttgaggctggaataccggaggatgatccaagaaacccagcagttattgctgataacgttggagacaatgtgggtgattgtgcaggaatggctgctgatctatttgaaacttatgcagtgactatagttgctacgatggttttatcttctatcttttttgttggagatttaaacatgatgatttatcctttaagcattggtggtgcatgtatactaacttcaattcttggcaccttttttgtaaaacttggtaaagataaaaatgtgatgaatgctttatacaaaggtttcattgtatctgcagtagcatcattagtaattt

SEQ ID NO: 267023 - DNA, 1069 bp, Unknown
  Bacterial polypeptide expressing nucleotide sequence isolated from the Sargasso Sea
ttgcctcagctatccaaatttggtgcaaaagcttatttagcaagacaatataaaactattgctattgttggtgtagttgttttggtaattgttagtattgcttttagtcccctggttggtcttggttatttgattggagctgccttatctggaattgctggttatgttggtatgttagtttctgtggaggccaatgtcagaactgcagaggcatcaagaaaaggtttggcagaaggactttctgtggcattcaaatctggtgctgttacaggcatgttagttgcaggtttagctcttttagcaatagcagtttattactttttattgttaaaatttgaagttgatgagagagaaatagttaacgcacttgttgcattaggatttggtgcatctttaatctcaatttttgcaagattaggtggtggaatttttacaaaaggtgctgacgttggtgctgatttagttggtaaagtagaggcgggaataccagaggatgatccaagaaaccctgctgtaattgcagataacgttggtgataatgttggagattgtgctggaatggctgcagatttatttgaaacttacgctgtcactattgttgcaacaatggttctttcatcgatttttttcattggagatttaaatatgatggtttaccctttaactattggtgccgcatgtttgatcacatcaattattggaactttctttgtaaaacttggaacaaataacaatgtaatgaacgccttatataaaggttttatagtatctgcagtagcttcattattgattctttggcctgttactgattatgtaattggtttttcaaatgaatatacagttaatgacaaaacctttaatggcaaagatttatattattgtggagtgattggtctcgtgattactggtttattaatatggatcactgaatattatactgggactggttatagaccagttaaatcagttgctttatcatccacaacaggtcatggaactaatgtaattcaaggattagccgtatctatggaagcgactgcaatacctgctttgattattgttgcaggaa

SEQ ID NO: 267024 - DNA, 758 bp, Unknown
  Bacterial polypeptide expressing nucleotide sequence isolated from the Sargasso Sea
acctgttgcagataatgctggaggaattgcagaaatggcaggtatgcctgctgagactagagtaattacagacgaattagatgagcaaggtaatactactgctgctattggtaagggtttcgccataggagctgctgctctggctgcacttgcaattatctcagcttttgttgaaacagtttctgctaataggtctgagccacttcaacttattttatctgaccctacagtactaataggtgtgtttattggaggagcaatacccttcttaatagcttctataacaatgacagctgttggagatgctgcgtttgaaatgattaatgaaataagaagacaatttaaagaaatcccaggacttttggaaggtaatgcagagcctgatactgcaaaatgtgtagatattgcaacagcagcagcacttaagaaaatgcttcttccaggagtcattgctgtttcggcaccacctttagttggattaggaattggagctgaggctttgggtggaatgcttgcgggaggtcttctagtttgcgtgcttatggcattattcatggcaaatgctgggggtgcttgggataacgctaagaagtacattgagaaaggaaaccttggtggaaaagggactgatactcattcggcagcagttgttggtgatactgtaggggaccccttcaaggatacatcaggaccttcaatgaacattttaattaacgtaatggcaattgtaagtttagtgattgcacctttactttaat

SEQ ID NO: 267025 - DNA, 949 bp, Unknown
  Bacterial polypeptide expressing nucleotide sequence isolated from the Sargasso Sea
gctatatgctcatccgtagctggttttattggtatgtatgcagcaactaaggcaaatgtaagaacggcaactgcagcacaaaaagatggtccagcagcagctttatcagtctccttttatggcggttcaataatgggtctatgtgttgcatcattgggtctgataggtttaggcggcctatattatttttatataccagctgaaattgatcctcataaacttgaaggttttgctatgggagcatctgttgttgcccttttttccagagtaggcggaggaatttttacaaaaagtgcagatgttggagctgatcttgttggtaagattgaagctggtatacctgaagatgacccaagaaatcctggtgttatagcagacaatgttggtgataatgttggtgacgttgctggaatggggtcggatatatttgagtcatattgtggttcaatgatcgcatcaatagcaatagcttatacattaggcaatcaagatatgatgatgcttcctttagccttagcagcgactggcttaatagcatcaataattggaatatttatagttaaacttcaatctgcaaaggcacctgcaagtgctttgagatctggaacacttttagcgccagtaatatttgtggctatggcatatttcataatcgattcctttgatggggttggaatgaatgtatggtggtgtgttattgccggagctgtcggtggagtattaataggacttatcacagaatattacacaggtggaggtccagttaaaaaaattgctgaatcgggagagactggttctgcaacagtaatgatttcaggattatcagttgggatgcaatcagtagtaatacctattgttattttggccggtattattcttgcttcaactcaattatcaggtatctatggagtaggaattgccgcagttggtatgcttgcaactgttggaa

SEQ ID NO: 267026 - DNA, 808 bp, Unknown
  Bacterial polypeptide expressing nucleotide sequence isolated from the Sargasso Sea
tatgagcggaacagtcgaaacaatactattatacacaattggagctggtttattatctatcgtttatggatttttaactggtaaaaacattcttaattcaagtgcaggaaatgcaaaaatgcaagatattgcatctgcaattcaaattggtgcaaaagcatatttagcaagacaatacaaaactattgctattgttggtgttgtagttttagtaattgtgagtattgcatttagtccactagtaggtcttggttatttaattggtgctgctctatcaggtattgcaggttatgttggtatgttagtttctgttgaagctaacgtaagaacagcagaggcatctagaaaaggcttagctcaaggtctatccgttgcatttaaatctggtgctgtaactggaatgttggttgctggtttggcgctattatctatagctgtttattattatatattgttaaaatctaatgtagatgaaagagaaattgtaaatgctttagttgcattgggttttggagcatcattaatttcaatttttgcaagattaggtggtggaattttcacaaaaggtgctgatgttggcgctgatttagttggaaaagttgaggcaggaattcctgaagacgatcccagaaaccctgccgtaatcgcagataacgttggtgataacgttggagactgtgcaggtatggctgctgatttatttgaaacttatgcagttacaattgttgctacaatggttttatcttcaattttctttgttggtgatttaaatatgatgatttaccctttatctattggtgctgcatgc

SEQ ID NO: 267027 - DNA, 178 bp, Unknown
  Bacterial polypeptide expressing nucleotide sequence isolated from the Sargasso Sea
aaaaaaatatattgaagatggtaaatttggtgggaaaggctctgaagcacataaagcagcagtaacaggcgatactgtaggagatccttataaagatacagctggacccgcggtcaacccaatgattaaaataacaaatattgttgcattgttacttcttgctgtaattgcgggataa

SEQ ID NO: 267028 - DNA, 295 bp, Unknown
  Bacterial polypeptide expressing nucleotide sequence isolated from the Sargasso Sea
ttatagccggtcatcagcagctttatcttgtttaggagcattacttttaggagtcattataactggtttattcgttgcaataagcatgactgctggaggtggagcatgggacaatgcaaaaaaatatattgaagatggaaatcatggaggtaaaggcagtgaagctcacaaagcagctgtaactggagatactgtaggcgatccctataaagatactgcaggacctgctgtaaatcctatgattaaaataacaaatattgttgccttacttttattagcttcaattgcactttag

SEQ ID NO: 267029 - DNA, 697 bp, Unknown
  Bacterial polypeptide expressing nucleotide sequence isolated from the Sargasso Sea
aggttatgcaataggatcagctggtttgggagctttagttttgtttgctgcgtacacagaagatattaaatttttttcaaatgtaagtggttcaaatctagaaaatatatctgttagttttgatctttctaacccatttgtcgtagtaggattgttaataggtggaatgttaccgtatttatttggatcaatgtcaatgcaagctgtgggtagagctggtggagctgttgtagtagaggtgagaagacagtttaaacaaatacctggtataatgaaacgcaaaagaaaaccagattatggaaaattagttgatttattaactaaggccgcaattaaagaaatgattataccttcgttgcttcctgtattatctccaataattctttatttaatcatttatatgataggtggaattgaggctgctctttcagcagtaggagcaatgcttttgggagttattgttacaggattatttgtagctatttcaatgactgcaggaggaggagcttgggataatgctaaaaaatatattgaagatggaaaatatggtggaaaaggatccgaagcacataaagcagctgtgacaggagatacggttggcgacccatataaagatactgccggacctgcagtaaatccaatgataaaaattacaaatattgttgctttacttcttttagctgtaatagctcactaa

SEQ ID NO: 267030 - DNA, 911 bp, Unknown
  Bacterial polypeptide expressing nucleotide sequence isolated from the Sargasso Sea
ggtttgataattacagcatttgtttcgataattttaatttacatagttactgatatctttgtaggtgcagataaattaattataaatagtgatctcttcattgaatcatttttaggaatcgatttattttattgtgccataatcgggttatctgtcactggtttgatagtttggataacagagtactataccagcacagaatttggacctgttaaatcggttgctagatcttcacaatctggtcatgctaccaatattattcaaggtttagctgtttcaatgcaatccacggctctacccacatttgtaattattttaggaattgttctatcttataaatttgccggtctttacggaatttctatagcagctacaacaatgcttgctttagctggtatgattgtagcacttgatgcatatggtcctgttaccgacaacgccgggggtattgctgaaatgtctaacctacctgaagatgttaggaaaacaacagatgctcttgacgctgttggaaatacaacaaaagctgtaacgaagggttatgcaattggttcagctggactagcatctttagtcttattcggagcttatacacaagatttaaaatattattttccaaacctagatataaagtttgcactagatgacccttatgttgtcgttggtcttttgataggtggtatgttaccttatctttttggttcaatgggcatgactgctgtaggtaaaacagctgaaaagatagtaaacgaagtcagaagacagttttcggaaaataaaggtattatgacaggtaaatctaaaccagaatacggaaaggcggtagacattttaacaaaagaagcgatttatgcaatgatacttccttcaatgcttcctgttttagctccattcataacttattatttaat

SEQ ID NO: 267031 - DNA, 859 bp, Unknown
  Bacterial polypeptide expressing nucleotide sequence isolated from the Sargasso Sea
aagcatatttaaagttgatgacaaaggttttactggattagacttatattactgtggcgttgtggggttagcggtaactggcttaataatttgggttacagaatattatactggaacaaattatagacctgtaaagagtgtagctaaatcatcaaccacgggtcacggaaccaatgtcattcaaggattagcggtttcaatggaagctactgcgttacccgctttaattatagtagctggaataattattacaaatcaactagctggattatttggtattgcaatagctgtcactgcaatgttggcacttacgggaatggttgtagctttagatgcatatggacctgtaactgataatgccggaggtattgctgaaatgtcaaaattaccaaaaaatgtcagaaagaccaccgatgctttagatgctgttggcaataccactaaagctgttacaaaaggttacgcaataggttctgctggtctaggagctcttgtattattcgctgcttacaccgaagacatcaagtttttttcaacagtttctggttctaaacttgaaggaataaatgttagttttgatttgtcaaatccatttgttgttataggtcttttagttggtggtatgttgccttatttatttggatctatgggtatgcaggcagttggtcgcgcaggtggagcagttgtagtggaagttagaagacaatttaaaaaaatcccaggtatcatgaaaggtaaaagaaaacctgattacggaaggttggttgacttattaacaaaggcagcaataaaagaaatgatagtgccgtcacttttgcccgttctttctccaattgttttatattttattatttatttt

SEQ ID NO: 267032 - DNA, 880 bp, Unknown
  Bacterial polypeptide expressing nucleotide sequence isolated from the Sargasso Sea
cttgcaggtggtacagtggacgatcctataatgggactttatggtattgcattagcttcagtaggaatgcttagcacacttgctataacattgagtactgatagttttggacctgtaagtgataatgctggtggaattgcagaacaagctggtttagaccctgaagtaagagaaagaactgatgctttagatagtttaggaaacactactgctgctactggaaaaggtatatcagttactagtgctgtcctaacttcacttgctctgctagctacatatgcaacagttgctggtattgattcattgaatttacttaatccaaaaattttagttggagcaatcataggaggtttattaccatttatttttgcaggacttacgatggcagctgttggacgagcagcgggagctatgatagaagaagttagacgtcaatttagagaaatcaaagggctaaaagaaggtaaaaaaggtgtaaaacctgatgtagcaaaggctgttgaaatttcaaccaatggtgcattgaaagaaatgatcgtcccaggaacattagcaatacttgctccaatcgctgtaggaattattccattcctagggcccgaagctttaggaagtatgcttgcaggatctattatttctggatttttactagcgatcttccttaacaatttcggaggagctgcagataatgcaaagaagtatatcgagttaggtaatcatggaggtaaaggatctgatgctcatgaagcaggtgtcataggagacactgttggagatccaactaaagatactagtgggccagctcttaacattttgctaaagcttatggcaatggtatcaatagtttttggtcctttatttttaggactaggtggataga

SEQ ID NO: 267033 - DNA, 973 bp, Unknown
  Bacterial polypeptide expressing nucleotide sequence isolated from the Sargasso Sea
gggaattatagtatcaattctgggcacatttttggtttcggtcaaagaaggtggaaacccgaaaagagcactgaacatcggtgagtttggttcatcaattttaatgataattattatttacctattaatagaaaccttgctaccatcctcattcaaattaaatggattaacctatacatcaatgggtgttttctggtcaaccgtaatcggtttagctgcaggcttaggtataggattaattacagaatattatactggcacacacacatcgccaactaggtctattactaaacaatcagtgacaggagccgcaaccaatattatttcaggtctaggtgttgggatgcagtctacggctatcccaactttgattattgctgcaactatcataggggcatatgagctagctggtctatatggcattgcaatgtctgcgcttggaatgttagctaatacaggaattcaattagccgtagatgcatatggtccaatttctgataatgccggagggattgctgaaatggccgaacttccaagagaggtaagggaaaggacagataaattagatgctgttggaaatactacagcagcgattggaaaaggttttgcaattggatctgcagcattaacaactttagcgttgtttgctgcatacagaacaacagtctacaacgttcgattgaatgagggtattcctgaaacatcagcatttgttgctattgaccttactaatgcttgggtaatgtctgggttatttgtcggagcaatgctgccatttgtgttttcgtccatggctatgggagcagttggaagagctgcgatgtcaatgattgaagaagttagaagacaatttaatgaaatcccagaactgaaaaaagcgctggaggtaatgaatttaaaagaagaggataactgggatgagaacgacaaagaaatatacaaaacggcaataagtaaagcagaatacgggaaa

SEQ ID NO: 267034 - DNA, 1073 bp, Unknown
  Bacterial polypeptide expressing nucleotide sequence isolated from the Sargasso Sea
tgacggagttggaatgaatgtatggtggtgtgttattgctggagctgttggcggtgtattgattggacttattacagaatattacacaggcggcggcccggttaagaaaattgctgaatcaggagaaactggttctgcaactgtaatgatttcaggtttatcagtaggaatgcaatcagttgtgatacctattgttattctagccggcattatccttacttcaactcaactatcgggcatttatggtgtaggaattgccgctgttggtatgcttgctactgttggaataactatggcaatagatgcatatggaccggttgctgacaatgctggcggcatagctgaaatgtcaggtatgggtgaggaagtaagagaaattacagactctcttgatgaattaggaaatactactgctgcaatcggaaaaggttttgcaattggagctgcagcgttagctgctttagcaataatttcagctttttctgctgtagtaggtgtagcaaatcctgaattttcattagcacttacagagccaattgttttagttggaatgtttataggagtttgtataccgtttttagtttcttcaataactatgacggctgtaggtgatgcagcatttgaaatgattaatgagatcagaagacaatttaaagaaatttctggcttaatggagggcactgcagaacctgattcagaaaaatgtgttgagatagcaaccaaagcagccttaaagaaaatgatgttaccaggagtaattgcagtttctatgccagctattgttggttttggtcttggtgctcaagctttaggaggtatgcttgctggtgggctgttaggatgtgtatctctcgcacttatgatggcgaatgccggaggtgcttgggataatgcaaaaaaatatgttgagaagggcaacttaggtggcaaaggttctgatactcacgcagcagctgtagtaggtgataccgtaggtgatccttttaaagatacgtcaggaccatcaatgaatattttaataaatgtaatggctatagttagccttgtaatagccccattattaagcatataaa

SEQ ID NO: 267035 - DNA, 1097 bp, Unknown
  Bacterial polypeptide expressing nucleotide sequence isolated from the Sargasso Sea
gctacaagaatcaatgatgttatacccacttgcaataggtggagcttgcattgttacatctgtcataggaacattttttgtaagactagggcgtagtcaaaaaattatgccagctctttacaagggttttattgtttcagctgtactttcagggatagcattctggcctattacagaatgggtagttggttgggatacacaatttatggtaggcggtgtttcgtctagtggttctgacctttttctttgcggattaattggcttagttgtaactggtcttatggtttggataaccgaatattatacatctacagattttaagcctgtcaaatctatcgccaaagcttctgaaacgggggatgcgactaatattatacaaggtcttgctgtttcaatgcaggcctgtgcggttcctgctataataattgctgcaggtattatacttgcctacctatgcgcgggattattcggaatcgcagttgcagtgactgcaatgttagcgcttgccggaatggttgtagctctcgacgcatatggtcctgtcactgataatgcggggggcattgcagagatggcagagcttcctgatgatgtaagaaaaactactgacgctttggatgctgtgggtaacactactaaagcagtaactaaaggatatgcaatagcttcagcaggtcttgctgctcttgtgctatttgctgcatacactcaggatttaaagaaatattttccagacgtgccggtagagtttagtctgtcaaacccttatgtggtagttggcttgttttttggtggaatgttaccttttctatttgggtctatggctatgttatcggtgggtcgtgctgcagcatcagttgttatagaggtaagaaggcaatttaaagagataagtggtattatggagggtacagcaaagccagaatatgggcgagctgttgatttgctgactaaatctgcaattcgtgaaatgattattccttctctactacctgtagttgctcccatacttctgtatatagttatttgggcaatagctggacaatcagcaggcttttcagctcttggtgcttgtctaatgggcaccaattgtaact

SEQ ID NO: 267036 - DNA, 739 bp, Unknown
  Bacterial polypeptide expressing nucleotide sequence isolated from the Sargasso Sea
tttggaaaatttatatttaataatatttgttggattattagctgtactttatagttattttttaagtaaacaaattatctcatcaagtccaggtaatagtaaaatgcaagaaattgctgaagccattcaaatcggtgcaaaggcttatttaaacagacaatataaaactatagcagttgtcggtataattgttttatttatcattagttacttttttagcattctggttggtcttggttattttattggagctttgttgtcaggtgttgccggttatgttggaatgttaatttctgttaaagcaaacgttagaactgctgaggcgtcaagaacaagtttgcaaaatggtttaacaatggcatttaaatctggggcgataacaggtttattagtagcgggtctagctttattagcaatttcaatttattatttggcgcttttatcttttaacgttgaaagtagagagctaattaatgcactaatagcattaggttttggtgcttctttaatatcaatttttgcaagattaggtggcggtatttttacaaaaggcgcagatgttggagctgatttagttggaaaagttgaggcaggtattccagaagatgatccgagaaatcctgcggtgatagctgataatgttggcgataatgttggtgactgtgccggtatggcagcagatttattcgaaacgtatgccgttacaattgttgcgacaatggttcttgcatcatttttt

SEQ ID NO: 267037 - DNA, 839 bp, Unknown
  Bacterial polypeptide expressing nucleotide sequence isolated from the Sargasso Sea
atttggctcaggagctgtaatgaccgtagttagttactttttgattggtagactaattgaaaaccctgtagctttagctgatggataccaaaatgtacaagcacttgatttatttcttgctacagtagtaggtctagtttcaggaattttaataggagtattaacagaatattatacttctgatcatcaaaaaccatcacagaatgttgcagcttcaagcgaaactgggtcagcgacgaatattatttccggcttggctaatggaatgttttcaactgccttgccagtattagtaattgcactttccattcttggagcatatcactttgctcatctatatggtattgctttagcagcactgggtatgctatcaacaattggaattcaattagcagttgatgcttatggtccaattgcagacaatgcaggcggtatcgctgaaatggcagaacttccaaaagaagttcgcgaacgaactgataaacttgatgctgtgggtaatactactgcagctattggtaaaggttttgcgattggttctgctgctttaacatctttagcgctatttgcagcatttagagaaacagttggcggcttaacattagatattaataaccctcaagttatggcaggtctattaatcggatcatcattaccattcgtattttcagctcttgcaatgcaggctgttggagatgctgcttttgaaatgattgaagaggttagaagacaattcagagaaataaaaggtctgcttgatggaaaagcaaaagcagattatgctaaatgtgttgatattgctactacagctgcaatcaataaaatggttctacctggag

SEQ ID NO: 267038 - DNA, 987 bp, Unknown
  Bacterial polypeptide expressing nucleotide sequence isolated from the Sargasso Sea
gtaggaaaagtagaagcaggtatccctgaagatcacccattaaatccagcaaccatcgctgataatgttggagataatgttggagatgttgctggaatgggggcagatttatttgaatcttatgttggttcaattattggatctatggttcttggatcaagtatttggattgcttcaacatcttctgaggctgttaactttgtcttattgcctttatatattgctggggctggggtattggtatccataattggaactttcatggtatcggttaaagagggtggtgatccacaaaaatcattaaatcgtggtgagtttggaagtgcttttattatggttggcataatttattttttaactcaagaatttttacctgaaaaccttaaatggcaagataaggaaggtgttaagtttgctatttctagtattggggtattttacgcaacggccattggccttgcagcaggacttggaattggtctaattacagagcattacactggaactgggacatcacctgtcaagtctatcgtagaacaatctatcacggggcctgctacaaatattattgctggtttaggtgttggaatgcaatctactgcaattccaattcttattattgcagcaggtattactggagcatactattttgcagggctgtatgggatagctatggcagctttaggaatgttggccaataccggaatacagttagcagtggatgcatatggtcctatatctgataatgcaggtggaattgcagaaatggcagaattgccctctgaagttcgtgaacgaacagataaattagatgcagttgggaacacaactgccgcaattgggaaaggtttcgccattggatccgctgcgcttactgcactagcgttatttgctgcgtttatggtgcaaaccggaattaaaggtataaatatttcagaaccacaagttatggcagggctttttgtcggaggtatgcttcctttttta

SEQ ID NO: 267039 - DNA, 925 bp, Unknown
  Bacterial polypeptide expressing nucleotide sequence isolated from the Sargasso Sea
ggaggtatttatacaaaagctgctgatgtaggcgctgatttagtaggaaaagttgaagcaggtatcccagaagacgaccccagaaaccctgccacaatagccgataacgttggagataatgtaggtgacgtcgcaggcatgggtgcagatttatttgaatcatatgcaggatctttaattgcaacaatatctttagctatattagttggagtagacaatgtatcaactacctcattagtaatgctacctttaattattagtgcaattggaattatagcttcaattattggtacatttttagtaagaactaagcctgatgcttcaatgaattcattattatggtcatttagaataggtatttttggtgcagccattcttgcgcttgcaggaatatatttggcaaattcattattattcaatgaccccctgcccacatcattgttctttgtagtcttgacaggacttgctgtggggcaagtaataggaacagcaacagagtattttacttcttatgaatactttcctgttaaatggatatcaaaacaatccttaacaggtcacccatcaaatattattgcaggtatatcagtagggctatacagcacagctataccagctttatctattgtagttggaatattgatagcatttaatcttgctggtctttatggggttgggttagcagcggtagggatgctttctacattaggtataactttatctacggatgcctacggcccagttgctgataacgcaggaggactagcagaacaagctggcctaaaacctgaagtaagagagagaaccgatgctcttgatgctttagggaatacaactgccgctacaggaaaagggtttgcaattgggtctgcaattttgactgcattagcactattagctgcatacggcctagtaacaggtgtta

SEQ ID NO: 267040 - DNA, 1057 bp, Unknown
  Bacterial polypeptide expressing nucleotide sequence isolated from the Sargasso Sea
actggcttaattatatgggttactgaatattacacaggaacaaattatagacccgttaaaagcgtagccaagtcatctactactggtcatggtacaaatgttatacaaggtctagcggtttcaatggaggccacagcactacctgctttaataattgtagcaggaattattataacaaaccaattggcaggattatttggcatagctatagctgttacagcaatgttggcacttacaggaatggttgttgcactagatgcatatggaccagtcacagacaacgcaggaggaattgcagaaatgtcaaaacttccaaagaatgttagaaaaaccactgatgcattagatgcagtaggaaacacaactaaagcagttacaaaaggatatgcaattggatctgcaggtttaggtgcccttgttttattcgcagcctatactgaagatataaaattcttttctactgtttcaggatcaaaacttgaagggataaacgttagttttgatttatcaaatccttttgtagtcattggtcttttagttggcggaatgttaccttatctctttggttctatgggtatgcaagctgtaggtagagctggcggagcagttgttgttgaggtacgaagacaatttaaaagaatacctggtattatgaaaggtaaaagaaaacctgattatggaaggttggtagatttattaactaaagctgcgatcaaagaaatgattgttccatctctattaccagttctttctcctatagctttatattttatcatttacaatattggtggcttagaagctgctttatcatctgttggagcgatgcttttgggagtaatagttactggattatttgttgcaatatctatgacagcaggtggtggtgcctgggataatgcaaaaaaatttattgaagatggcaattacggtggaaaaggatctgaaacacacaaagcagcagttacaggcgatactgttggagatccatacaaggatacagctggaccagcagtaaaccctatgattaaaataacaaatattgtagctcttttacttt

SEQ ID NO: 267041 - DNA, 683 bp, Unknown
  Bacterial polypeptide expressing nucleotide sequence isolated from the Sargasso Sea
agcttcagcatcaaatatacttcaaattattattttatcaggtttgttatcaatcgtttatggtttttttacgggtaaaaatattttaagttctagcgcaggaaatagcaagatgcaggaaatagcttctgcaatccaagttggagctaaagcatatttaaacagacaatacaaaactatagcaattgtaggtgtggttgttttggttataattagtttttcatttagtattttggtaggactaggttatttaattggagcagcattatcaggtattgctggatatgttggtatgcttgtgtcaattcaagctaatgttagaactgcagaagcatcaagaaaaggattatcacagggacttgcaatcgcatttaaatcgggagctgtaacaggtatgttggtggctggtttagctcttttagcaattgcagtatattattatttattattatcttacggagttgaagaaagagaaattgtaaatgctttagttgcattgggttttggagcatcattaatttcaatttttgcaagacttggaggtggaatttttaccaaaggcgcagatgttggtgctgatttagttggaaaagtagaagctggaattcctgaagacgatccaagaaatcctgcagttattgcagataatgtaggtgacaatgtaggagattgtgctggtatgg

SEQ ID NO: 267042 - DNA, 902 bp, Unknown
  Bacterial polypeptide expressing nucleotide sequence isolated from the Sargasso Sea
ggtgctgatgtgggctccgatctggttggtaaaatcgaggctggtattcctgaagatgatccccgcaacgcgggcgtgattgccgataacgttggcgataacgtcggcgactgcgcgggtatggctgctgacttgttcgaaacctatgccgtgactttggttggaaccatgctccttggcgccatctacttcagcggtccggctcaggaggcaatgatgcttctgccattaatcattggcgcggcctgcattatcgcctcagtggtggcaacatggttcgtcaagctaggctcaagtcaatcaattatgggtgcgctttacaaaggttttattgccagcgccatcatttcagctgtgctgattgccggcgtggtttcgcagtttatcggctgggatacggtttacgaaatgagcggttctcaggtcactggaacggccctcttcacctgtgcgatcgttggacttgtggtcactggcctaataatatggatcaccgaatattatacgggtaccgactatcgtccagtgcggagtgtggcggcggcttccgaaacggggcacggcaccaacgtcattcaaggcttggcggtttccatggaagctaccgcgcttccggtaattgtcatctgtggtggcatcattatctcgtatctgcaggcgggcttgttcggaatttctatcgccgcgacagcaatgctcgccttagcaggcatggtggttgcactggacgctttcggtccggtaacggataacgccggcggaatcgctgagatggcggagctgcccgacgaagttcgtaacacaaccgatgcgctggacgcggtgggcaacacaacgaaagccgtcaccaagggttatgccattggctctgccgggctcgcagctctcgtgttgttcggtgc

SEQ ID NO: 267043 - DNA, 1059 bp, Unknown
  Bacterial polypeptide expressing nucleotide sequence isolated from the Sargasso Sea
gaccttatacagcaatttctatgttgttggagcaatatgctcatctgttgcaggttttattggtatgtatgcagctactaaagcaaatgttagaactgcaactgcagctcaaaaagatggtccagcagcggctttatcggtttctttttatggtggttctataatgggtctatgtgttgcatcattgggtctcattggtttaggtggattatattatttctacatcccagctgaaattgatcctcataagcttgaaggttttgctatgggagcatctgttgtagcacttttttccagagtaggtggaggaatttttacaaagagtgctgatgttggagctgatctcgttggtaagattgaagctggtattcctgaagatgatccaagaaatccaggcgttattgcggataatgttggggataatgttggtgatgttgctggaatgggttcagatatatttgagtcatattgcggctctatgattgcatcaatagcaatagcttatacgcttggaaaccaagatatgatgatgcttccactggctttagctgcgactggcttaatagcttcaataatcggaatatttatagttaagcttcagtcagcaaaagcacctgcaagtgcattgagatctggaactcttttagcgccagtaatatttgtggctatggcctatttcataattaattcttttgacggagttggaatgaatgtatggtggtgtgttattgctggagctgttggcggtgtattgattggacttattacagaatattacacaggcggcggcccggttaagaaaattgctgaatcaggagaaactggttctgcaactgtaatgatttcaggtttatcagtaggaatgcaatcagttgtgatacctattgttattctagccggcatcatccttacttcaactcaactatcgggcatttatggtgtaggaattgccgctgttggtatgcttgctactgttggaataactatggcaatagatgcatatggaccggttgctgacaatgctggcggcatagctgaaatgtcaggtatgggtgagga

SEQ ID NO: 267044 - DNA, 649 bp, Unknown
  Bacterial polypeptide expressing nucleotide sequence isolated from the Sargasso Sea
tatgaatttatcaccagaaacaattttacattatacaattttagcaggaattctctcggtagtttatgggtattttaccggtaaatatatactcaattcaagttcaggaaattcaaaaatgcaagaaattgcccatgcaatacaagtcggtgctaaagcatatttaaacagacaatacaaaacaattgctatcgtcggtatagttgttttaataattattagttatgcattcagtattttagttggtttaggatatttaattggcgcaacattatcagggttggctggttatgttggaatgttagtatcagttcaagccaatgtaagaacagcagaagcatcaagaaagggtctttctcaaggtttgtcaattgcttttaaatctggtgcggttactggtatgttagttgctggtttagcactactgtcgatttcagtatattattattttttaataaaaaccaatgtagaagaaagagaattaataaatgcactaatagcacttggatttggtgcttcactaatatctatttttgcaagattaggaggaggtatctttacaaaaggtgctgatgtaggagcggatttagttggaaaagttgaagcaggtataccagaagatgatcctagaaaccccgctgtaattgca

SEQ ID NO: 267045 - DNA, 937 bp, Unknown
  Bacterial polypeptide expressing nucleotide sequence isolated from the Sargasso Sea
gttactgatgaaaaagttgaagagctttctgcttctatacgcgaaggatcaatggcttttttaaaaaggatgtattcatggattagtgtttttgttgttgtattagcagtcttaatatcaacattaactgaatggggatatccatggggttcaatagcatttgtagctggagccttcctttcttcactagctggttttatcggaatgagaatagctacagctgccaatggaagaacaacagaagctgcaagagatggtggaacactaaaagcattaccagtagcttttagagggggtgctgtaatgggatttacagtcgctggactaggacttcttggtgtatcagtaggatattgggttttcattgatattttagaattaccaaatggttatgatgttttagcagcaattggacttggaggttcttcgattgctctttttgcaagagttggtggaggaatttatacaaaagctgcagatgtaggcgcagacctagtagggaaagttgaagccggcataccagaagatgatccgagaaacccagcaacaatagctgacaatgtaggagacaatgtaggagatgttgcaggtatgggagcagatctttttgagagctatgtaggttccttagttgctcctcttgcctatgcagcaatagtttttagtggccaaaatgttttaccttcattattattttttccattagcagttggaacgattggtatgggagcttctatagtttcatcttttcttgttaaaccaaaagaaggaaaattagctcaagctttacatagaggaacttatagcgctgcggctttaacaactttaggcgtttactttcttagtgatagtatgttttcttcatatacagagaattcaatcggcctcttttttgctgtaataattggacttgctgtgggattgctagtcggccaaa

SEQ ID NO: 267046 - DNA, 736 bp, Unknown
  Bacterial polypeptide expressing nucleotide sequence isolated from the Sargasso Sea
tcttgatgctgtaggaaatactactaaagcagtaaccaaaggttatgcaatagggtctgcaggtttaggagctttagttttatttgcagcttacacggaagatataaaatacttttcaactgtaaaaggttctgcattagaaggagttaatgtaacattcgatttatcaaatccatttgttgtagctggtcttttaattggtggaatgttaccttatttatttggttcaatgggtatgcaagctgttggaagagcagggggtgcagtagtgattgaagtgagaaggcagtttaaaaagatacctggtattatgaaaggcaaaagaaaaccagactatggaagattagttgatttacttacaaaagcagctattaaagaaatgataataccttctttgttaccggttctatcaccaattattttatactttataattttacaaattggaggtctagaagcagcattatcttctttgggtgccatgttgctaggagttataattaccggtttgttcgtagcagtttcaatgactgctggaggtggagcctgggataatgctaaaaagtacatagaggacggaaattttggaggaaagggttccgaagctcacaaatcagctgttaccggtgataccgtgggtgatccatataaagatactgctggccccgcagtaaatccaatgatcaaaattactaacatagtagctttattattattagcagttatagctcattaa

SEQ ID NO: 267047 - DNA, 490 bp, Unknown
  Bacterial polypeptide expressing nucleotide sequence isolated from the Sargasso Sea
ggaagagcagggggggcagtagttatagaagttagaagacaatttaaaaaaattcctggaattatgaaaggaaaaagaaaaccagattacggtagattagttgatttgttaacaaaggccgcgattaaagaaatgattataccatctttattacctgtgctttcaccaataattttatacttagtcatctactcaattggtggtatagaagctgcattatcttctgttggagctatgcttttaggagttatagtgacaggtctttttgttgcaatatcaatgacagctggcggcggagcttgggataatgccaaaaaatttattgaggatggaaattatggcggaaaaggttctgagtctcacaaggcagctgtgactggagatacagtcggagatccatacaaagacactgctggcccagcagtgaacccaatgataaaaattacaaatattgttgctttactattactagctgtaatttctcattaaa

SEQ ID NO: 267048 - DNA, 595 bp, Unknown
  Bacterial polypeptide expressing nucleotide sequence isolated from the Sargasso Sea
aaatgtatctgtaaattttgatttatcaaacccatatgtcgttgttggtttattaattggtggaatgttgccttatctttttggatcaatgtcgatgcaggcagttggtagggcaggtggagctgttgttattgaagtaagaagacaatttaaaaaaattccagggattatgaaaagaaagagaaaacctgactatggtaaacttgttgatttacttacgaaagcagcaattaaagaaatgataataccttctttactaccagttctttcaccaatagttttatattttattattttgtatgttggtggaattgaagctgccctctcttcagttggagcgatgttgcttggagtaattataactggattatttgtggctatttctatgacagcaggtggtggagcgtgggataatgcaaaaaaatttatcgaagatggaaaatatggaggaaaaggatccgaggctcacaaagctgccgtgaccggcgatacagtgggagacccatataaagatactgctggtccagcagttaacccaatgataaaaattacgaatattgttgctttgcttttgctagcaactatagcacactag

SEQ ID NO: 267049 - DNA, 865 bp, Unknown
  Bacterial polypeptide expressing nucleotide sequence isolated from the Sargasso Sea
acaggcacatctcctgtacggtctattgctcagcaatcacttactggcccagcaacgaatataatagcaggcttaggagttggtatgcaatctacagcaataccaattttaataattgcatctgctattattggggcgtatcactttgcaggtctttatggaattgctatggctgctttaggtatgttggctaatactggaatacaattagcagttgatgcctacggtcctatttctgataatgctggtggaatagcagagatggcagaactaccagaagaagttcgtaatcgtactgataaacttgatgcagtcgggaatacaactgcagctattggtaaaggatttgctattggctctgctgcattaactgcccttgctttgtttgcggcctttatggttcagactgatatccaatctattgatattgcagacccttgggttatggctggtttatttgtgggagggatgctaccattcttgttttcttcaatggccatgggcgcagtaggtagagctgcgatggccatgatagaagaggtaagacgtcaattcagagagattccagaattaaaaaaagcacttgaattaatgaacttgaaaaatgaaaatgattgggatgaggatgaccgtaatgtttatgaagatgcattaacaaaagctgaacacggacgatgtgttgaaatttccacacaatctgcaattaaagaaatggtagcacctggagtattggctgttattacccctgtagttgtaggattcgcttttggacctcaaactcttggtggattattagcaggagttactgttagtggagttcttatggctatttttcaatcaaatgctggaggtgcatgggataatg

SEQ ID NO: 267050 - DNA, 820 bp, Unknown
  Bacterial polypeptide expressing nucleotide sequence isolated from the Sargasso Sea
tgcttatggaccagttactgataatgctggaggaatagcagaaatgtcaaatcttgatgaaaatgtaagaaaaacaacagatgctcttgatgcagttggtaacacaactaaggctgtaacaaaagggtatgcaatcggctcagccggtctaggtgcacttgttttatttgcagcgtatacagaagatttagatcattttgctaaagatccaaaaagttccttatatggaattgaggtttcatttgacctatccaacccttatgttgtagttgggttacttttaggaggtcttttaccatttctttttggtgcgttaagtatgacagctgttggaagagctgctggatcagttgttttagaagttagaagacaatttaaagaaattccaggtatcatggaaggtaagggaaaacctgagtacggaacatgtgttgatattttaacaaaatcagcaataaaagaaatgataattccgtcaatgcttccagttctatctccaatcgtagtttactttgttattttatttattgcaggacaatcagcagccttatcttgtttaggagctttgctattaggagtcattataactggactttttgttgcaataagtatgactgcaggtggaggggcatgggacaatgctaaaaaatatatagaagatggaaatcatggcggcaaaggaagtgaagcacataaagctgcagtgactggtgatacagttggtgatccctataaagacactgcgggacctgctgttaatcctatgattaaaatcacgaatattgtcgcattgttattattagctgcaatatctttataa

SEQ ID NO: 267051 - DNA, 439 bp, Unknown
  Bacterial polypeptide expressing nucleotide sequence isolated from the Sargasso Sea
tttccaggcataatgaaaagaaaacaaaaaccagattatgcaaaattggtagatttgttaacagtagcagcaattaaagaaatgattataccttctttattacctgttttatcaccaattgttttatactttgtaatatttgctataggtggtcaagttgcagcattagcttcagttggtgcaatgttgttaggagttataattacaggtttatttgttgcagtatcaatgactgctggtggtggcgcttgggacaatgctaaaaaatttatagaagatggtaatcatggtggaaagggctcggaagctcataaagcagctgttactggagatactgtaggcgatccatacaaagatactgctggcccagctgtaaatcctatgattaagataactaatatcgttgctcttttattattggctgctatcgctggttaaa

SEQ ID NO: 267052 - DNA, 308 bp, Unknown
  Bacterial polypeptide expressing nucleotide sequence isolated from the Sargasso Sea
cataattttatccattggtggtcaagttgctgcgctagctgcggttggtgcaatgttgttaggtgtaattattacaggcctttttgttgctgtatcgatgacagcaggtggtggtgcttgggacaatgcaaaaaaatatatagaagatggtaatcatggaggtaaaggctcagaggctcataaagcggctgtaactggtgatacagttggagatccttataaagatactgctgggccagcagtaaatccaatgattaaaataacgaatatagtagcattgttattgcttgccgtaatagcaggataat

SEQ ID NO: 267053 - DNA, 651 bp, Unknown
  Bacterial polypeptide expressing nucleotide sequence isolated from the Sargasso Sea
aatggaaaacttatatttaattatttttactggtttattagctgtcgcttatagttatttattatcgggtcaaattcttagttctagctctggaaacgatagaatgagagagatagccgaagctattcaaattggtgcgaaggcttacttgaatagacagtataaaacgatagctgtcgtaggaattatagtacttattatagtgagttatttttttaacatcttagttggtcttggttattttattggtgctgcattatctggcgtcgccggatatgtggggatgcttatttcagtccaagcaaatgtaaggacagcagaagcatcaagaaatagtttgcaatctgggttatcaattgcttttaaatcaggagcgattactggcttactagtcgctggtttagcattattagcaattagtatttattatattattttaatcaatataaatgcagataagagagaaattattaatgcattagtcgccctaggttttggagcgtctctgatttcaatatttgcacgtcttggaggaggaatatttacaaaaggtgctgatgtaggggcagatcttgttggtaaagtagaagctggtattccagaggatgacccaagaaatcctgctgttattgctgataatgttggtgataa

SEQ ID NO: 267054 - DNA, 696 bp, Unknown
  Bacterial polypeptide expressing nucleotide sequence isolated from the Sargasso Sea
taattatacaatttataataaatcattcacaggaatgagtttatatatttgtggtgttataggtttaattattacaggtttattaatatgggtaacagaatattatactggtactaattatagaccagttaaaagtgttgcttcatcttcaacaacgggtcatggtacaaatgttattcaaggcctagctgtttcaatggaagctacagctattccagctttaattatcgtaggtggaatattattaacaaattatattgctggactttttggtatagcaattgctgttacaacaatgttagctttagcaggtatggttgttgcattagacgcatatggtcctgtaacagataatgctggtggtattgccgaaatgtcaaatttgccaaaaaatgttagaaaaacaacggacgctttagatgctgtaggaaatacaactaaagctgttacaaaaggctatgcgataggatcagcaggtctaggagcattagttttatttgcagcttatacggaagatattaagcatttttcaaaagtgactggatcaaaattagaaggcattgttgtaacattcgatttgtcaaatccttttgtagttgttggtttattggtgggaggtatgcttccatatttatttggttcaatgggcatgcaagctgtaagaagagccggaagcgctgttgttgttgaagttaa

SEQ ID NO: 267055 - DNA, 970 bp, Unknown
  Bacterial polypeptide expressing nucleotide sequence isolated from the Sargasso Sea
tgggatacctgaagaccaccctcttaatcctgccacgatagctgataatgtgggagacaatgtaggggatgttgctggtatgggagctgacttattcgaatcttatgtcggatctataataggctctatggtccttggttctagtattgttgttgccggtgcagttggggggtttgatattaactttatcttactacctcttatgatcgctgcatcaggaattattgtatccattgctggaacttttatggtatctgttaaagaaggtggagaccctcaaactgctcttaatagaggtgaatttggcagtgctttcatcatggttgctattatttatcttttaattcaaaattttcttcctgctgttttttcccaaggaggtgaaacttttagcaatatgggcattttttatgcaacagtgattggtttaatggctggtcttggaatcggtatgattacagagcactacacaggcacaggcacatctcctgtacggtctattgctcagcaatcacttactggtccagcaacgaatataatagcaggcttaggagttggtatgcaatctacagcaataccaattttaataattgcatctgctattattggggcgtatcactttgcaggtctttatggaattgctatggctgctttaggtatgttggctaatactggaatacaattagcagttgatgcctacggtcctatttctgataatgctggtggaatagcagagatggcagaactcccagaagaagttcgtaatcgtactgataaacttgatgcagtcgggaatacaactgcagctattggcaaaggatttgctattggctctgctgcattaactgcccttgctttgtttgcggcctttatggttcagaccgatatccaatctattgatattgcagacccttgggttatggctggtttatttgttggagggatgctaccattcttattttcttcaatg

SEQ ID NO: 267056 - DNA, 847 bp, Unknown
  Bacterial polypeptide expressing nucleotide sequence isolated from the Sargasso Sea
attggctggtatggttgtggcgcttgatgcatatggtcctgtaacagataatgctggcgggattgctgagatgtcaaatttacctaaaaatgtaagaaaaactactgacgcattagatgcagttggtaatacaactaaggcagttacaaaaggttatgcaataggatcagctggattaggagcattggttttgtttgctgcatatactgaagatatcaaacacttttctaaagaagctggatctaaattagaaggtattgttgttacttttgatttatcaaatccttttgttgtagttggtcttttaataggaggaatgttaccatacttatttggatcaatgggaatgcaagcggttggaagagcaggtggtgcagttgttatcgaagttagaagacaatttaaaaaaattcctggcattatgaaaagaaaagcaaaacccgattatggaaagttggtagacttactaacaaaagctgcaattaaagagatggttataccttcgttgctaccagttttatctccaatcgttttatatttgattattttaccaattggaggacaagtggcagcactatcttctgttggagctatgttattaggagtaattattacaggactgtttgttgcagtatcaatgacagcaggagggggcgcttgggacaatgctaaaaaatatattgaagatggaaaatttggtggaaaaggttctgaagctcataaggcagctgtcacaggagatacagtaggtgatccatataaagatacagctggacctgcagttaatccaatgatcaagatcacaaacatagtagctttactgttgctagctgttattgctggctga

SEQ ID NO: 267057 - DNA, 815 bp, Unknown
  Bacterial polypeptide expressing nucleotide sequence isolated from the Sargasso Sea
aatgttggttgcaggtctagctctattagccattgctgtttattattatttattattaaaatttaatattgaagaaagagaaattgtaaatgcactagttgcattaggatttggtgcttctttaatttcaatttttgcaagattaggtggaggaatatttacaaaaggtgctgatgttggtgcagatttagtaggtaaagttgaagcaggtattcctgaagatgatccaagaaatccagctgtaattgctgataatgttggagataacgttggtgactgtgctggtatggccgcagacttgtttgaaacatatgctgtaacaattgttgctacaatggttttatcctcaatattttttcatggagatttgaacatgatggtttatcctttaactattggtggagcatgtattgttacatcgattttaggaacttatttcgttaaacttggaaaaagtaaaaatgtgatgaatgctttgtataaaggttttgtagtcaccgcacttgcctcattggcaatattatatccagttacagactatgtaattggatttacaacagaatattcagttaatggaaaaaattttgatggcatgagtttatattattgtggaattattggtctggtaattacagggttattaatttgggtaacagaatattatactggtacaaattatagacctgttaaaagtgttgcagcatcttcaacaaccggtcacggtactaatgtgattcaaggtttagcagtttcaatggaggcaactgcggttcctgcattaattattgttggaggtattttatttactaatcaaa

SEQ ID NO: 267058 - DNA, 967 bp, Unknown
  Bacterial polypeptide expressing nucleotide sequence isolated from the Sargasso Sea
taagaatataatgagggcaatgtataaaggatttgtgataactgctataagctctctagttatattgtatcctattactaaatatgtgattggttttactacagaatatattgtaaatgaaaaaacatttactggattgagcttatatttttgtggaataattggtcttattattactggattaattatatggattactgaatactatacaggtacagattatagacctgttaaaagtgttgcccaatcctcaaccactggtcatggtactaatgttatccaaggtttggccgtatcaatggaagcaacagcaataccagcacttattattgttggtggtatactattaactaaccatatagcaggattatatggtattgctatagccgttactacaatgttggctcttgccggtatggtggtagccttagatgcatatggaccagtaactgataatgcaggtggtatcgcagaaatgtctaatcttccaaaaaatgtaaggaaaacgactgacgccttagacgctgtaggaaatactacaaaagctgtaaccaaagggtatgcaataggatctgcgggtcttggagcgttagtattatttgctgcatatacagaggatataaagcatttctctaaggttgccggttcaaatttagagggaataattgtaacatttgatttatcaaatccatttgttgttgttggtctattaataggaggaatgttaccatatctatttggatctatgggtatgcaggcagtcggaagggcaggcggagctgttgtaatagaggttagaagacaatttaaaaaaatacctggtataatgaagcgtaaagctaaaccagactatggaagacttgttgatcttttgaccaaagcagctatcaaagagatgataataccatccttattaccagttttatcgcccaatagttttgtatgtgattatttactttataggcgg

SEQ ID NO: 267059 - DNA, 937 bp, Unknown
  Bacterial polypeptide expressing nucleotide sequence isolated from the Sargasso Sea
gtaggtcttggttatttaatcggtgctgctttatctggaattgctggttatgttggtatgttagtttctgttgaagctaatgtcagaactgcagaagcatccagaagaggtttagcagagggactttctgttgcattcaaatcgggtgctgtcacaggtatgttagttgcaggattagctctattagctattgcagtttattattttttattactaaaatttgagattgatgagagagaaatggtcaacgcacttgttgcattaggattcggtgcatctttgatttcaatttttgcaagattgggtggtggaatttttacgaaaggtgctgatgttggtgctgatctagttggtaaagtagaggcaggaataccagaggatgacccaagaaatcctgcagtgattgcagataatgttggtgataatgttggagattgtgctggaatggctgcagatttatttgaaacttatgctgttacaattgttgctaccatggtcctttcttctattttttttgttggggatttaaatatgatggtttaccctttatcaattggtgctgcgtgtttgattacatcaattattggtacttttttcgttaaacttggaaaaaataaaaatgtgatgaatgccttatataaaggtttcattgtttcagcagttgcctctttattagttctttggccggttactgattatgtgattggtttttcaaacacatacactgttaataacaaatcttttaatggtatggatttatattattgtggagtaataggacttgtaattacaggtctattaatatggatcactgaatattatactggtactggttataggccagttaagtctgtagcgttatcctcaactacaggacatggaactaatgttatccaaggattggctgtatcaatggaggctacagcaatccctgcct

SEQ ID NO: 267060 - DNA, 892 bp, Unknown
  Bacterial polypeptide expressing nucleotide sequence isolated from the Sargasso Sea
cttattgccttagggatatttagagttgttcttagctattcagaaggaaatcctgaagtaaagaaaatcggtgacatgattcattcaggcgcaatgagttttatgaaaacagagtacatgtatttggttgtttttgtgcttattttggcttttttggtattttttgctctaggttgggaaacagcaactgcggtgctagtaggagcttcaagttcagctttggctggatttattggaatgtttgctgctactaaagccaatacaagaacagctgcagcagctcaagatagtggagcagcagcagctttgtctatttcgttttatggtggatcgataatgggtctttgtgttgcttctcttggccttcttggattaggaggattattttatttcctaggagagggtcattaccttgaaggttttggaatgggggcttcagtagtagcactgttctcacgggttggtggaggcatctttactaaaagtgctgacgtcggagctgaccttgttggaaaagtcgaagctggaataccagaagatgatccacgaaatccaggtgtaattgctgataatgttggggataacgttggtgatgttgcaggaatgggctcagatatttttgaatcatattgtggttcaatgatcgcaaccatagcaattgcttacactatgacagaagcaaataatggtcctttaatgagtttacctctagcactagcgtctattggcttaatatcatcaattttaggcatcttaattgttagagctcaatctgcaaaagctcccgctgcggcattgagaaccggaacaataggttccccagttatttttatagctttagcttttggattaattacatatttagatatttcactaaaacgtttggttttgt

SEQ ID NO: 267061 - DNA, 596 bp, Unknown
  Bacterial polypeptide expressing nucleotide sequence isolated from the Sargasso Sea
aggtataaatgttagttttgacttatctaatccttttgttgtaattggtcttttagttggtggaatgctaccttatttatttggatcgatgggaatgcaagctgtcggtagagcaggtggtgcagttgttattgaggttagaagacaatttaaaaaaatacctggaattatgaaaggtaaaagaaaaccagattatggaaaattagttgacttattgacaaaggcggcaattaaagaaatgattgttccgtctcttttacctgtcttatcaccaatagtattatattttgttatttattcaattggcggattagaagcagcactttcgtcagttggtgcgatgcttcttggtgtaattgtaactggtttatttgtagcaatttcaatgacggcaggcggtggagcttgggataatgcaaaaaaatatatagaagatggtaattatggtggtaaaggatctgaaacacataaggctgctgtaaccggagatactgttggagatccatataaagataccgctgggcctgcggttaacccaatgattaaaattactaatatagttgcactccttttgttagcagtaatttctcattagt

SEQ ID NO: 267062 - DNA, 520 bp, Unknown
  Bacterial polypeptide expressing nucleotide sequence isolated from the Sargasso Sea
cttatttggttctatgggtatgcaagctgtaggtagagcaggtggtgctgtagttgtagaagttagaagacagtttaaaaaatatccaggtattatgaaaagaaaacaaaaacctgattatgcaaaattagttgacttgttgaccgttgctgcgattaaagaaatgataattccatcattattaccagtgctatcacctgtagttttatattttataattttatcaataggtggtcaggttgctgctttagctgcagttggtgcaatgcttttaggagttattataacaggattattcgtagctgtttcaatgaccgctggaggtggagcttgggataatgctaaaaaatatatcgaagatggaaatcacggtggaaaaggttcagaagcacacaaagcagctgtaacaggtgacactgttggagatccgtacaaggatactgcaggtcctgctgttaatccaatgattaaaattacaaatattgtagctttattattgttagcagttatcgctggctaa

SEQ ID NO: 267063 - DNA, 619 bp, Unknown
  Bacterial polypeptide expressing nucleotide sequence isolated from the Sargasso Sea
tatggatttcttactggaaaaaacattcttaattcaaacgcaggtaataaaaaaatgcaagaaattgcatctgctattcaaattggtgctaaagcatatttagcaagacaatataaaactatagcaattgttggtgttgttgttttagtaattgttagtatagcttttagtcccttagttggagtaggttatttaattggtgctgcattatcaggtattgccggttatgttggaatgttggtctctgttgaagctaacgtaagaacagcagaggcttcaagaaaaggtttagcccaaggcctttccgttgcttttaaatcaggtgctgtaactggtatgctagttgctggtttagcgttgttgtcaatagctgtttattactatctcttattaaaattaaatgttgatgaaagagaaattgttaatgctcttgttgcattaggttttggagcctctttaatttcaatttttgctagattaggtggaggaatttttacaaagggtgctgatgtaggtgcggatttagttggaaaggttgaagcaggaataccagaagatgatccaagaaatccagccgttattgctgacaatgttggagataacgtaggagattgtgcag

SEQ ID NO: 267064 - DNA, 781 bp, Unknown
  Bacterial polypeptide expressing nucleotide sequence isolated from the Sargasso Sea
atgtctaaattacctaacaatgtaagaaaaactacagatgctttagacgctgtaggtaatacaactaaagctgtcacaaaaggttatgctattggttccgctggtttaggtgcattagttttatttgcagcttatacagaagatattaaacatttttcaaaagttgctggttctaagttagaaggtgtcgtagtaacatttgacttgtcaaatccttatgttgttgttggtttattaattggtggaatgcttccttatttatttggctcaatgggaatgcaagctgttggaagagcaggtggagctgttgttattgaggtacgaagacaatttaaaaaattcccaggtatcatgaaaagaaagcaaaaacctgattatgctaaattagttgatttattgacagttgcagcaattaaagaaatgataataccttcattactcccggttttatcaccaattgttctatattttgtaatttttgctatcggaggtcaagttgcagcattagcatctgttggagcaatgcttttaggtgtcattatcacgggtctttttgttgcagtatcgatgactgctggtggtggtgcatgggataatgcaaaaaaatatatagaagatggtaattatggtggcaaaggttccgaagctcataaagcagcagtgacaggtgatacagttggagacccttataaggacaccgctggacctgctgttaatccaatgattaaaattacaaacatagttgctttattattattagcagttgtagcaggacattaat

SEQ ID NO: 267065 - DNA, 562 bp, Unknown
  Bacterial polypeptide expressing nucleotide sequence isolated from the Sargasso Sea
agtcgctttgggtttcggagcttctttgatctcaatttttgcaagattaggcggcggtatttttacaaaaggtgctgatgttggggctgatctagttggtaaagttgaagccggtattccagaagatgatccgagaaatccagctgtaattgctgacaacgttggagataatgttggtgattgcgcaggtatggcagctgatttatttgaaacctatgcagtgactattgtcgcaactatggttctttcttcaatattctttccgacagattataatttgatgatttacccattagcaattggaggatcttgcattattacatctataattggaacctggtttgtaaaattaggaaatagtaaaaatataatgggtgcactttataaaggttttgttgttaccgcagtaacatcattgttaatcttatatcctgtaactgattcagtcttaggattaaatgaaatttatacaagtgatgaaaaaagtttttctggtttaaatctctatacctgcggtgttgttggatttgtaattacaggtttgttaatttggattaactga

SEQ ID NO: 267066 - DNA, 745 bp, Unknown
  Bacterial polypeptide expressing nucleotide sequence isolated from the Sargasso Sea
acttttatacccaataactaaatatgtcataggattttcaacggaatatttagctaatgaaaaaatttttacaggtttaagtttatattactgcggaattataggtctagtaattactggattgttaatttgggttaccgagtattatactggtactaattatagaccagtgaagagcgttgctcaatcttcaacaactggtcatggaacaaatgttattcagggtttagcagtttcaatggaggcaactgcaattccagcattaataattgtttcaggtatattggtaacaaattatatagctggattgtacggtatagctattgcagtaactactatgcttgctttagctggaatggttgttgcacttgatgcttatggaccagtaacagataatgctggaggtatcgcagaaatgtcaaatttaccaaaaaatgttagaaaaactactgatgctctcgatgctgtaggaaacactactaaagctgtaacaaaaggttatgctataggatctgcaggattaggtgctcttgtactatttgcagcttatacagaggatattaaacatttttcaaaagttgccggatcaaacttagaaggtattgttgtaacatttgatttgtccaatccatatgtcgttgttggattattgattggaggaatgttgccttatctttttggatccatgggcatgcaagcagttggtagagcaggtggagctgttgtaattgaggtcagacgacaa

SEQ ID NO: 267067 - DNA, 836 bp, Unknown
  Bacterial polypeptide expressing nucleotide sequence isolated from the Sargasso Sea
aatgacaatcatgcaaatatttatagtattatgtggtctagctgcagttttatatggctttatcacctcaagacaaattttatcattaaattcaggaaatgaaaaaatgcaagaaattgcaaaagctatacaagaaggtgcaaaagcttatttaaatagacaatatttaactatagcaattgtaggtgttgttatttttttcttaatttggattatatttgatttattttcagctatcggatttttaattggtgcttttttttctggagctgcaggttatgttggcatgaacatttctgtaagatcaaatgttagaactactcaagcagcaagctcctctttagctgaaggtttatcagtttcttttaaagctggagctgtaacaggaatgttagtagcaggttttgctcttttgtcagttgctgtttattattttattttagataattctggaaatttcgaaggaagagatattgtagctcctcttgtttctctaggatttggagcttcgttaatttcaatttttgctagacttggtggaggaatatttacaaaaggagcagatgtaggtgctgatttagtaggaaaagttgaagctggtattcctgaagacgatccaagaaatcctgccgttattgctgacaatgttggtgacaatgtaggtgattgtgcaggtatggcagcagacttgtttgaaacatatgttgtaactgttgtagcaactatggttcttgcttcaatattttttactggtgatttagttactacaatgatgatgtatcctttatcaatagctggagtctgcacaatagccagcattattggaacttattttg

SEQ ID NO: 267068 - DNA, 847 bp, Unknown
  Bacterial polypeptide expressing nucleotide sequence isolated from the Sargasso Sea
catgttcgccggcctctacggcgtgggcatggcggcggtcggcatgcttgccacggtcggcatcactatggcaatcgacgcctacggcccggttgccgacaatgccggcggcattgccgaaatggctgagatgggtcccgagacccgcgagatcacggactcgcttgacgaggtcggtaactccaccgcagccatcggcaagggctttgctatcagcgccgcggcactcgccgcactggctctgatcagcgcctatatcgccaaggtcagcaatggtgacccggacttcgttcttgcgatcaacgaccccatggttctcgtcggcatgttcatcggcggtgtcttcccgttcatcgtcagcgcgatgaccatgaccgctgtcggtgacgcggccttcgagatgatcgtcgaggttcgccgccagttcaaagagatcccgggccttctcgaaggcaaggccaagccggacaccgcgcgctgcgtcgatattgcgacgcgggccgcgctgcgccggatgatccttccaggttcgctcgccgtcctggcgcctgttgtcatcggcttcggcctcgggccgaaggcgctcggcggcatgctcggcggcgcgctgatctgctgcgtgatgatggcactgatgatggccaatgccggtggtgcctgggacaacgccaagaagtacgtcgaaaagggcaaccttgggggcaagggctcagacgtccacaaggcggcagttgtcggcgacaccgtcggcgacccgctgaaagacacctcgggcccgtcaatgaacatcctgatcaatgtgatggccattgtcagcctggtgattgccccgctgctgatcggctga

SEQ ID NO: 267069 - DNA, 769 bp, Unknown
  Bacterial polypeptide expressing nucleotide sequence isolated from the Sargasso Sea
atgagtggtatgttaaatctaattataatcgctggtctaatagcaattttatatggttacatagttggtaaacaaattttatcagctgattctggtaacaaaaaaatgcaagagatagctagtgctatccaagaaggagcaagggcttacttgtatcgccaatataaaacaattgctattgttggtgttgtaatacttgtaataataacttttgctttaggtgtgtgggtagggttaggatattttattggggcatttctatcaggtgccgctggttatgttggaatgcttatatctgttcaggctaacgtaagaacagcagaagcttcaagaaaaggtttagccgctggtttaaacataggttttaaatcgggtgctgttacaggaatgttggttgctggcttagctctattatcaatatcaatttattattttgttctattaaaccttaatgttgaaagtagagaagtaattaatgcattagttggtctaggatttggcgcctcattaatatcaatatttgcaagattaggtggtggtatttttacaaaaggcgctgatgttggtgcagatttagttggaaaagttgaagcaggaattccagaagatgacccaagaaatccggccgttatagcagataacgttggtgacaatgtgggtgattgcgcaggcatggcggcggatctttttgaaacttatgcggtgacaatagtggctactatggttctatcttctattttttttgtaaataatttaaatatgatgataa

SEQ ID NO: 267070 - DNA, 856 bp, Unknown
  Bacterial polypeptide expressing nucleotide sequence isolated from the Sargasso Sea
aatatgccagcattcataccaccacttttaggtctcataggtctactcattgccctaggaatatttagagttgttcttagctatccagaaggaaaccctgaagtaaagaaaatcggtgacatgattcattcaggcgcaatgagttttatgaaaactgagtatatgtatttggttgttttcgtccttgttttagctgttttagttttctttgccttaggctggcaaacagcaactgcagttttagttggtgcttcaagttcagcactagctggatttattggaatgtatgctgcaactaaagctaataccagaacagcggcagcagcccaaaatagtggagcagctgcagctttatcaatttctttttacggtggatcaataatgggtctatgtgttgcttctttgggtcttcttggcttgggaggattattttattttctaggagagggtcattaccttgaagggtttggaatgggagcttcagttgtagcactattctcaagagttggtggaggaatctttaccaaaagcgccgatgtcggagctgacctagttggaaaagtcgaagcaggaataccagaagatgatccacgaaatccaggagtaattgctgacaatgttggagataacgttggtgatgttgcaggaatgggctcagatatttttgaatcatattgcggctcaatgatcgcaactatagcaattgcttacactatgacagaagcaaataatggtcctttgatgagcttacctctagcattagcatctattggtttaatatcatcaattttaggtatcttaattgttagagctcaatctgcaaaagcacctgctgctgcattaaggactggaacaa

SEQ ID NO: 267071 - DNA, 973 bp, Unknown
  Bacterial polypeptide expressing nucleotide sequence isolated from the Sargasso Sea
aaagctgctgatgttggagctgatttagtaggaaaagtggaagctggtattccagaagatgacccacgtaatcctgctactattgctgataatgtaggtgataatgtaggtgatgtagctggaatgggagcagatttatttgggtcttatgttgctaccatgttagctgctatggttttaggtaattatgtaatttcagatatgggaggtgcagattattctgatagttttcgaaatatggggccaatcttaatgcctgtattaattgcgggtgttgggttagtattttctatcattggaacttgggtaattagaattaagaataatgatgctaaggaaaaagaagttcaaggcgcattcaatctaggtaactgggggtctatcatcttaaccggtgtcgcttcattttttattattaattggatgcttccagaatctattagtatgacgttttttggtgaaaatagcggtgatccaatagctattgaaagaatcagagtcttttatgcagtattaataggattagctgttggaggattaattgctatgttaacggaatattatactgcaatgggtaaaaaaccagttatggggattattaaaaactcttctactggtgcagctactaatattattgctggtctttcattgggaatgatgtcaacatttgcaccaatcattctttttgctggtgcaatttggggagcttatgcatgtgcaggtttttacggagttgctattgcagcatctgctatgatggctacaacagcaatgcaattagccattgatgcttttggacctattgccgataatgctggtggaattgctgaaatgtctgaattagagcccgaggttagagaaagaacagatatattggatgccgtaggtaatactacagctgctgtaggtaaaggttttgccattgcttctgcagctttaaccgcgctagctctttttgcagccctatgtcact

SEQ ID NO: 267072 - DNA, 880 bp, Unknown
  Bacterial polypeptide expressing nucleotide sequence isolated from the Sargasso Sea
aaggtaaagaaaataggagatcagattcatttaggtgcaatgacttttatgaaaacggagtacacctatttaagcattttcgctttagtggtgattgttctagtttatttttccttgacccctaataccgcactagctgtattagcaggagccttatcatcatctatagctggatggattggtatgtattctgctactaaagcaaacgtaaggacagctactgctgcatctgaatctggagcagaatctgctctttcagtagccttttacggcggttctattatgggcctttgtgttgcgtctttaggcttaatagggttgggttctttatattatattttaagtggtgatgctcattcgatagaaggttttgcaatgggagcttctatagttgctctcttttcaagagttggaggaggtatttacactaagagtgcagatgtgggagcggatctagttggaaaagtagaggccggcataccggaagatgatcctcgtaatccaggagtaatcgcagacaatgtaggagataatgtgggtgatattgccggtatgggttctgacatttttgaatcttattgtggttcaatggttgcttgtatagctattgcttctacttatgtaattacatcagaattttctcaaactcagaaagaaggaatgatgtttctgcctttagctttagcttctataggtctgatagcttctattcttggcatagtcatcgttagattgttttcaaagtcttcacctgcaaatgctatgagatggggcactatgggagctcctttaatctttattattgcggcgtattatttaacaggaactctagttggagacggtggatttaatgtatggctggcagttgtgtgtggctcag

SEQ ID NO: 267073 - DNA, 930 bp, Unknown
  Bacterial polypeptide expressing nucleotide sequence isolated from the Sargasso Sea
ggcgcacttttttcaggagcagcagggtaatgttggtatgaatatttcagtaagatctaatgttagaacaactcaagctgcaagctctagtttagctgaaggcctatcagtttcttttaaggctggtgctgtaactggaatgttagttgctggatttgctttattatcagttgctatttattattttgtattagataattcaggccaattccctggtagggaaattgttgctccattagtttctttaggttttggcgcttcacttatttctatttttgcaagattgggtggtggtatttttactaaaggcgccgacgttggagctgatcttgttggtaaagtagaagcgggtattcctgaagatgatccaagaaacccagcagtcatagcagataatgttggagataatgttggggactgtgcaggaatggctgcagatttgtttgaaacgtatgtagttactgttgtagcaactatggttctttcttcaattttctttgcagaaatatcatcaatgatggtttatccacttgcgattgctggagtatgcacaatagcaagtatcatcggtacatattttgtaaagctaggtaaaagcgaaaatataatggcagctctttataaaggttttgcagtttcagctcttttatctgcggtactactctactttattaccgatcatgttataggtttaggctcaatattttctgtagaagataaatcctttacaggaatgtctcttttttattgtggcttatttggtttgattattacaggcttaataatttgggtgactgaatactatactggaacaaattacagacctgttcaaagtattgctgaagcatcaaccacaggacatggaacaaatgttattcaaggtttagcaattagtttggaagcaactgccttacctgcaataattatagt

SEQ ID NO: 267074 - DNA, 766 bp, Unknown
  Bacterial polypeptide expressing nucleotide sequence isolated from the Sargasso Sea
gctggaaataataaaatgcaggaaattgcatcagcaatacaaattggtgcaaaagcctatctaaatagacagtacaaaactatagcaatagttggtgtagcagtactaattattataagttatgcatttagtattttagttggtttaggatatttaattggtgcagcattatccggaattgctggatatgttggcatgcttgtatcagtacaagcaaatgtaagaacagcagaagcttcaagaaaaggattatctcaaggtctttcgatagcttttaaatctggagctgtaaccggtatgttggttgctggtttagctcttttagctatagcagtttattattatttattattatcatttgaagttgaagaaagagaaattgtgaatgcattagttgcactgggttttggtgcttctcttatatcaatttttgctagacttggcggcggaatcttcactaaaggagcagatgtaggtgcagatttagttggaaaagtagaagcaggtattcctgaagacgatcctagaaatcctgctgttatagcagataatgtaggtgataatgttggagattgtgctggtatggcagcagatttgtttgaaacatacgctgtaacaatagttgctactatggttttatcatcaatattttttcatggagacttgaatatgatgatttaccctttgtctattggtggagcttgtatattgacttctattattggaactttttttgttaaattaggaaaatctaaaaatattatgg

SEQ ID NO: 267075 - DNA, 922 bp, Unknown
  Bacterial polypeptide expressing nucleotide sequence isolated from the Sargasso Sea
tattgggcttgtaactgaatattatacttctggagactttagtccggttaagaaaattgctgaagctggtaaaactggttctgctacaaatattatccaaggccttgccgttggtatgtattcttgtatcattcctacccttatcatctgcctaacaatttattttgcttaccactttgctggtctctacggaattggaattgctgcagttggtatgcttgcaacaacgggtgtaacaatgacagttgatgcttatggaccaatctcagacaatgctggtggaattgcagaaatgagtgaacttggtccagaagttagggccattacagacggtcttgactctattggaaatacaacagctgctatcggaaaaggcttcgccattggttcagctgctctgacagcacttgcaatgttctcagcttacgcatcagctgttggccttgaatctatcaatattatgactcctcaagttgttattgggcttttcattggtggggttcttcctttcttcgtcggtgccaacacaatgaattcggttggttcggctgccgctatgatggttcaagaggtaagaagacaattcaaagaaattccaggaattatggaaggcaaaggtactcctgatacagaaagatgtgttgctattgcaactgaagcttctctaaaagaaatgattgccccaggtatcgttgcagttgttgctccgattgctgttggcttccttcttggtaaagaagctctaggtggaactctagctggagcaactgtaacaggtgttcttcttgctcttttcatggccaatgctggtggtgcttgggataacgctaaaaaagcaattgaacaaggacaggttgaaggagaaaagaaagggacagaagctcacgctgcagctgtaacaggtgatactgttggtgaccat

SEQ ID NO: 267076 - DNA, 202 bp, Unknown
  Bacterial polypeptide expressing nucleotide sequence isolated from the Sargasso Sea
tggtggtggggcttgggataatgcaaaaaaatatattgaagatggaaaatttggaggtaaaggatcagaagctcataaggcagctgtaactggtgatacagtcggagacccttataaggatacagcaggtccagcagtgaatccaatgataaaaataacaaatatagttgcgttacttttactagctgttattgcaggctaa

SEQ ID NO: 267077 - DNA, 688 bp, Unknown
  Bacterial polypeptide expressing nucleotide sequence isolated from the Sargasso Sea
gatgatatatcctcttgcaataggtggtggctgtataatcgcctcaataattggaacattttttgtaagattaggtaaaagcaagaatataatgggtgctctttacaaagggtttatagtaacagccctaatatctttggttcttctttatccgattacatcacatgttattggattggaaaatacctttaaagtaagtgataaaagtttcacaggaatggatttatactactgtggagttgttggtttagcagttactggattaattatatgggttacagaatattatacaggtacaaattatagacctgtaaaaagcgtagctaaatcttcgacaactggacatggaacgaatgttattcaaggtttagctgtatcaatggaagcaacagctttgccagcaataataatagttgctggcataataattactaatcaattagctggcctgttcggaattgcaatcgctgtaactgcaatgttggcattgactggaatggtagttgcattagatgcttacggacccgtaacagataatgccggtggaatagcagagatgtctaaattaccaaaaaatgtaagaaaaacgacagatgctctagacgctgttggtaatacaacaaaagctgttaccaaagggtatgccatcggatcggctggtttaggcgccttagttttgtttgctgcg

SEQ ID NO: 267078 - DNA, 440 bp, Unknown
  Bacterial polypeptide expressing nucleotide sequence isolated from the Sargasso Sea
aaaaccaggaattatgactggagaagataaacctgattatagttcagctgttgatctactaacaaaatctgcaattaaagagatgattgtgccatctttactacctctattatcaccgatagtccttttttatactgttaattttattgctacaaaaagtgatgcattttcagctcttggagcaatgcttctaggcgttattgttacaggattatttgttgctctttctatgactgctggaggtggtgcatgggataatgcaaaaaaatatattgaggatggtaattatggtggaaaaggctctgaggctcataaagctgcagtaacgggtgatactgttggtgatccttataaggacactgcaggaccagctgttaaccctatgattaagataactaatattgtagctttattactattggcagttttagcgcattaag

SEQ ID NO: 267079 - DNA, 865 bp, Unknown
  Bacterial polypeptide expressing nucleotide sequence isolated from the Sargasso Sea
ttcttcttcaaggtaaaggcaatcccatacatcggggaagcgagcaagacagggagcgccaccaacgccattgcgggattagcagtagggatgcagtcggtgttcattccagtcctactgatggctgcaggaatcttcggagccaaccatgtgatggatggcggggatccggggctgtatggaatagcaatggcggctatgggcatgctaggcacggtaggcgttaccatgactgtggatgcctatggccctgtagcagacaatgcagggggaattgcagaaatgtctggcctaggcgatgatgttagggagatcacagatggactcgactcgattgggaacacaaccgcagcaatcggcaagggattcgcgattggaagtgctgctttgaccgccctcgctcttttcgccgcattcaagaccagtgctgatcttgaggcagcagacctgagcctgacagagccaatggtagtaatcggactcctaatcggggccgctctaccattcgttgttgcggctatgactatgaagtcagttgggagagcagccgaggacatgataaccgagattaggagacagttcaaggaaatcgacggtcttctggagggtcgcgagggagttgagccagacagtgcaacctgcgtggatatctccaccaaggcggccctcagggagatggtactgcctggcgtagtggccgtatcgagtccagtggtcattggtgtgctgctaggtagcgcagcactgggcggaaccctggcaggggcaactgctagcggggtcctgatggcgctattcatggcaaacgcaggaggagcatgggacaacgccaagaaagcaatagagcaggggcacatagagggag

SEQ ID NO: 267080 - DNA, 856 bp, Unknown
  Bacterial polypeptide expressing nucleotide sequence isolated from the Sargasso Sea
tttagcagtttcaatggaggctacagcaataccagctttaattatagttagtggtatattattaacaaattatatcgctggactttttggaatagccattgctgtaactacaatgcttgcattagcaggtatggtcgtggcattagatgcttatggtcctgtaactgataacgcaggcggaattgccgagatgtcaaatttacctaaaaatgttagaaaaactacagatgctttagatgccgttggaaatacaactaaagctgttaccaaaggttatgcaattggatcagcaggtttgggtgctctagtactatttgccgcatatacagaagatataaaacatttttcaaaagttactggatcaaaactagaaggtatagtagttacatttgatctatcaaatccttttgttgtagttggattattagtaggtggaatgttgccttatttattcggttcaatgggtatgcaagctgtaggcagagcaggtggagctgttgtaatagaagttagaagacaattcaaaaaaattcctggaatcatgaaaggaaaagctaaaccagattatggaaaactagttgatttattaactagagcagcaattaaagaaatggttataccttcattgttaccagttctatctccaatagttttatattttataattttaccaataggtggacaggtcgcagcattatcatctgttggagcaatgttgcttggtgtaattataacaggattatttgttgctatttctatgactgccggtggtggtgcgtgggataatgccaaaaaatatatagaagatggaaattttggaggtaaaggttctgaagctcacaaagctgctgttaca

SEQ ID NO: 267081 - DNA, 343 bp, Unknown
  Bacterial polypeptide expressing nucleotide sequence isolated from the Sargasso Sea
catgcaattcgacaacatccccgctggcaagaacccgccggaagacatctacgtagccatcgaaatcccggctaacagctccccggtcaagtacgaactggacaaagacatgggcgccctgctggttgaccgtttcatggctacccccatgttctacccggccaactacggtttcatcccgcacaccctggctgacgacggcgacccgctggacgtgctggtagtaaccccgtacccgatccaggcaggttccgttattcgctgccgtccggtgggtgtactgaacatggaagacgaagccggtggcgacgccaagctggttgcggttcccacgacaagctga

SEQ ID NO: 267082 - DNA, 865 bp, Unknown
  Bacterial polypeptide expressing nucleotide sequence isolated from the Sargasso Sea
ggtttgagtattgcttttaaatcaggtgctgtaacaggtatgcttgttgctggtttagctctacttgctgttgctgtgtattattatgttttgactaatttttgggaacctcaaaacgagagagtggttattgacgctttagtagcactgggttttggctcatctttaatttctatttttgcaagacttggtggtggtatttttaccaaaggtgctgatgttggtggtgatttagttggaaaagtagaagctggaattcctgaggatgatcctagaaatcctgcaactattgctgataatgttggtgataatgtaggtgactgtgctggtatggcggcagatctatttgaaacctatgccgttacagttgttgctacaatggttttagcctcaatattttttgctggcaatgagaccatgatgatttaccctctatcaatatgtggagcatgtgtaataacatctattcttggaacttactttgttaaattaggaaaaaacaactcaattatgggagctctttatagaggttttattgcaactgctattctttcattaattattttatattttgttacagatttagttgttggttttgatacagttctttctgtagccggacagagttttagcggtttagatttatacatatgtggtgttatgggtcttgctataacaggacttattatttggatcacagaatattatactggagtagattacagaccagttaaatcaattgcaaaatcatctgaaacaggtcacggaacaaatgttatacagggtttagctatatctatggagtctactgctcttcctgctttagtaattgtattcggaattattgttacttattctctagcag

SEQ ID NO: 267083 - DNA, 864 bp, Unknown
  Bacterial polypeptide expressing nucleotide sequence isolated from the Sargasso Sea
gctgaaggaatgcggtctgctgcattctcggtagtagtagttgtcattggtgttggcggagcttatacctctggagcatgggctttaggagagtctggtggaatctatggtgttgcagttgcagcaattggtgttttggcaacactcggaataactgttgcagttgatgcttatggtcctattgcagataacgcaggtggtattgcagaaatggctcatcttgatcctgaagttagaaaagctacagatgaacttgattcactaggaaatacaacagctgccattgcaaaaggatttgcaattgggtctgctgctgtaactgcattagctttattctctgcatttgtgcaaagcgcaggcctgacggaactagatattactcaagtagaagttacagccggactgttcttaggtggaatgttccctttcttatttgcagcaatgacaattaatgctgtcggaagagctgcttttaaaatgattgaagaagtcaggcgtcaatttagagaaatacctggattgcgtgaaggcaaagaaggtgtaactcctgaatatgaagaatgtgttgatattgcaactacagcagctttaaaggagatgctccttccaggcggtcttgcaattgtatcgcctttagttattggtttctggaataaagaggctcttggtggatttttagctggtgctttagtaactgggttcttgcttgcaatatttatggctaactctggtggcgcatgggacaatgcaaagaaatatatcgaagctggtggtggcgctggtaaaggatctgaagaacataaagctgcagtaattggagatactataggggatccatttaaagacacatctggtccggcaatg

SEQ ID NO: 267084 - DNA, 838 bp, Unknown
  Bacterial polypeptide expressing nucleotide sequence isolated from the Sargasso Sea
ccaagaaatcctgctgtaatagcagataacgttggtgataatgtgggagattgtgcaggtatggcagcagatttgtttgaaacttatgctgtaacaattgtggcaactatggttctatcctcaatattctttgttggtgatcttaaaatgatgatatatccattaacaataggtggagcatgtatattaacatcaattcttggaacattttttgttaagttaggaaaaacaaataatgtaatgaatgcattgtacaaaggatttatagtttctgctgtagcatctcttgctattttgtatcctgtaacagattatgtaattggttttacaaatgagtatacagttaataacaaaacctttaatggtatgagtttatattattgtggtgttattggcttaattatcactggcttattaatatggattacagagtattatacaggtactaactatcgtccagtaagatctgtggcagcatcttcaacaacaggtcacggaacaaatgtaattcaaggcttagcaatttctatggaagctactgcgataccagctgttattattgttggtggaattcttttaacaaattatattgctggtctttttggtatagcaattgctgttactactatgttggctttagctggaatggttgtagctttagatgcttatggtcccgtaacagataatgctggtggtatagctgaaatgtctaatttagataaaaaagtacgaaaaaccacagatgctttagatgcggtaggaaacacaacaaaagctgtaactaaaggctatgcgattggttcagctggtttgggcgctttagttttatttgctgctt

SEQ ID NO: 267085 - DNA, 871 bp, Unknown
  Bacterial polypeptide expressing nucleotide sequence isolated from the Sargasso Sea
gaaacaatattattatatacaattggagctggtttattatctatcgtttatggatttttaactggtaaaaatattcttaattcaagcgcagggaatgcaaaaatgcaagatattgcgtctgcaattcaaatcggagcaaaagcatatttagcaagacaatataaaactattgctattgttggtgctgtagttttagtaattgtaagtgttgcttttagtccattagtgggtcttggatatctaataggtgctgcattatctggtattgcaggatatgttggaatgcttgtatctgtagaagctaatgtaagaacagctgaagcatcaagaaaaggcttagctcaaggtctttctgtggcatttaaatctggtgctgttactggaatgttggttgctggtttagcattattatctattgccgtatattattttttattattaaaatatggtgttgatgaaagagaaatagtaaatgcattagttgctctaggtttcggtgcatcattaatatcaatatttgccagacttggcgggggtatctttaccaagggtgcggatgttggtgctgatttagttggaaaagttgaggcaggaattcctgaagatgatcccagaaatcctgctgtaatcgcagataacgtcggggataatgtaggtgattgtgcaggtatggcagctgatttatttgaaacttatgctgtaacaattgttgctacaatggttttatcttcaattttctttgttggagatttaaatatgatgatttatcctttaacaattggtgctgcatgtttgttaacatctattgttggaacatttttagtaaaacttggtaaaaacaaaaatgtaatgaatgctttatacaaaggct

SEQ ID NO: 267086 - DNA, 810 bp, Unknown
  Bacterial polypeptide expressing nucleotide sequence isolated from the Sargasso Sea
aggattaataatcacaggactaataatatgggtaactgaatattacactggtaccaactacagacccgttcaaagtattgccgaatcatctacaactggtcatggaactaatgtaatacagggtctcgctattagtttggaagcaacagctttacctgctttaattattgttgctggtattatatcaacctattccttagctggattgtttggtattgcaattgctgttacaacaatgttagcattagctggcatggttgttgccttagatgcatatggtccagtaacagataatgcaggtggtatagcagaaatgtcaaatctcgatgaaaatgtaagaaaaactacagatgcacttgatgccgttgggaatacaactaaagctgtaacaaaaggttatgcaataggctcagctggtttaggtgcactagttctgtttgcagcatatactgaagaccttgatcattttgcaaaagactcaagtagtcctttgtacggaattgaagtttcatttgatttgtctaacccttatgttgttgtcggattgttactaggtggattactacctttcctatttggagctttaagtatgactgcagttggaagagctgctggttcagttgtattagaagtgagaagacagtttaaagaaattccaggaataatggaaggtaaaggcaaacccgaatatgggacttgcgtagatattcttacaaaatcagcaattaaagaaatgattatcccatctatgttgcctgtattatctccaatagtagtatactttgttattttatttattgcaggtcaatc

SEQ ID NO: 267087 - DNA, 830 bp, Unknown
  Bacterial polypeptide expressing nucleotide sequence isolated from the Sargasso Sea
gctcggattagctggtatggttgtagctttagatgcctatggacctgtaacagataatgctggtggtattgcagagatgtcaaatttagatgaaagtgtaagaaaaacaactgacgcattagatgctgtaggcaatacaacgaaagctgtaactaaaggatatgcaattggatcagccggattaggagcactagttctttttgctgcatacgttaatgatcttaaaactgatcatttaagtcatattacccccaacttcagtcttgagaatccttatgtagttgttggattgttaataggaggtttattaccatatctttttggatcaatgggaatgatggctgttggaagagcaggtggtgcagttgttgaagaagttagacagcagtttgctgataaccctggaattatgactggtgattctaagccagattactctaagtctgtagatttattgactaagtctgcaatcaaagaaatgatcttgccatcaatgcttcctgttttatctccaatagttttatactttttagtatcctttgtagctgatcaaaatgcggccgtatccgccttaggagctatgttattgggtgtaattgttacaggtgtatttgtcgcaatatcaatgacagctggtggtggagcttgggataatgcaaaaaaatatgttgaagatggaaattatggtggaaaaggttctgaagcacacaaggcagctgttactggcgatactgtaggcgacccctataaggataccgcgggaccagctgtaaatccaatgatcaaaataactaacattgtagctttgttattacttgcagcattgtaat

SEQ ID NO: 267088 - DNA, 928 bp, Unknown
  Bacterial polypeptide expressing nucleotide sequence isolated from the Sargasso Sea
atcgtaagtattgcatttagtccgctagtaggtcttgggtatttaataggtgctgcattatcaggtattgctgggtacgtaggaatgttagtttctgtagaagctaacgtaagaacagcagaagcatctagaaaaggtttagctcaaggtctttcagttgcttttaaatctggtgctgtaactggaatgttggtagctggtttagcattattatctatagcagtttattactatatattattgaaatctaatgttgatgaaagagaaattgtaaatgctttagttgcattaggttttggtgcttctctaatttctatttttgcaagattaggtggtggaatttttacaaaaggtgctgatgttggtgctgacttagttggaaaagttgaagctggaattccagaagatgatcctagaaaccctgctgtgatagcagataacgttggtgacaacgtaggtgattgtgctggtatggctgctgatttatttgaaacatatgctgttacaattgttgccacaatggttttatcctcaattttctttgttggtgatcttaatatgatgatttaccctttatccattggtgctgcatgcttattaacatctattgttggaacatttttcgttaaacttggaagaagtaataacgttatgaatgctttgtataaaggatttgttgtctctgcagtagcatctttagtaatactatggcctgttacagatcatgtaattggttttacaaacgaatacactgtgaatgacaaaaccttcaatggaatggatctatactattgtggtgttataggtttagttattactggattattaatttggataaccgaatactacacaggaacaagttatagaccagttaaatctgttgcattatcatcaacaactggtcatggtactaatgttattcaaggat

SEQ ID NO: 267089 - DNA, 676 bp, Unknown
  Bacterial polypeptide expressing nucleotide sequence isolated from the Sargasso Sea
gcttttatggtccaaagtggaattacaacaatcgatattgcaaacccattagtaatggcaggattatttgtaggtgggatgttaccgtttttattttcatcaatggcaatgggtgctgttgggcgtgcggcaatggcaatgattgaagaggtccgcaggcagtttaatgaaatacctgaattaagaaaagcacttgagcttatgaatctaaagaatgaagatgattggagtgatagtgatcgtgttctttatgaagatgctctcagcaaagcagagcatggacgttgtgttgagatttctacacaatctgccattagagagatggtagctcctggacttttagctgttgtctctccagtagttgtgggttttatttttggtccagaaacacttggggggcttttagcaggtgttactgtttcaggtgttttgatggctatatttcagtcaaattctggcggtgcatgggataatgcgaaaaaaatgattgaagaaggtttttcaataggtggagaatctctgaataaggggtcagatgcccacaaagcagcagttgtaggagatacagttggtgacccatttaaagatacatctggtccatcactaaatatattaatcaaacttatgtctgtggtatcgctagttatagcaccactgctaaaagatatatcgtaaa

SEQ ID NO: 267090 - DNA, 930 bp, Unknown
  Bacterial polypeptide expressing nucleotide sequence isolated from the Sargasso Sea
ttacacaggcggtagcccagttaaaaaaattgctgaatcaggagaaactggttctgcaacagtaatgatttcaggattatcagttggaatgcaatcagttgtaatacctattgttatattagctggtattattcttgcctcaactcaattatcaggtatttatggtgttggaattgctgcagttggtatgcttgcaactgttggaattacaatggcaatagatgcatatggaccggttgcagataatgctggcggtatcgctgaaatgtcaggtatgggtgaagaagtaagagagatcactgattctcttgacgaattaggtaatactactgctgccattggtaaaggttttgcaattggagctgcagctttggctgccctagcaataatttcagctttttcagctgtggtagcggacgcaaatcctgaattttcattagcacttacagaaccaattgttttagttggaatgtttattggagtatgtatacctttcctagtttcttcaataaccatgacagcagttggagatgcagcttttgaaatgattaatgaaataagaagacagtttaaggagataccaggtttaatggaaggatcagcagagccagattctgaaaaatgtgttgaaattgctacaactgcggcccttaagaaaatgatgttacctggagtaatagcagtatcaatgccagctattgttggttttggtctcggcgcacaagccttgggtggaatgcttgctggtggattgcttggttgtgtttcattagcgctgatgatggcaaatgctggtggtgcttgggataatgcaaaaaaatatgttgagaaaggcaatttaggtggaaaaggatcagatactcatgctgcggcagtagtcggtgatacagttggagatccttttaaagacacttctggaccatcaatgaa

SEQ ID NO: 267091 - DNA, 876 bp, Unknown
  Bacterial polypeptide expressing nucleotide sequence isolated from the Sargasso Sea
ttacactgtgaatgataaaatctttaacggtatgagtctttattattgtggtgtaattggtttaattataaccggattgatcatatgggtaactgaatattatactggaacaaattacagaccagtaaaaagtgttgcttcatcttctataactggtcacggtactaatgtcatacaaggtcttgctgtttcaatggaagcaactgctattcctgcactaataattgtttctggaatattattaacaaattatattgctggtttatttggaattgcaatagctgttacagccatgttagctttggcaggtatggttgtagctttagatgcttatggtcctgtcacagataatgcaggcggaatagctgaaatgtctaatttacctaaaaatgtaagaaaaacaaccgatgcactcgacgcagttggcaatactacaaaagcagtcacaaaaggttatgcgattggttcagcgggattgggagcattagtattgtttgcggcgtacacagaagatataaagttcttttcacaattgaaaggttctaatctagaaaatgtagttgtgagttttgatctatctaacccatttgtagtagtaggtttattggttggtggaatgttgccttatctttttggttctatgggaatgcaagcagtaggaagagcagggggcgctgtagtaatcgaagtacgtagacaattcaaaaaaataccaggcataatgaaaagaaaagcaaaaccagattatggtaaattagttgatttgttaactcgtgcagctataaaggaaatgataattccttcactacttccagtcttgtctccaataattttatacttaataatttatcaaatttggtggacaggttgcagctt

SEQ ID NO: 267092 - DNA, 826 bp, Unknown
  Bacterial polypeptide expressing nucleotide sequence isolated from the Sargasso Sea
tattattgtagctggaattttaacaacaaattatatagctggtctatttggaatagcaattgcagttacttctatgttggcattggcgggaatggtggtggctttagatgcttatggtcccgttactgataacgctggtggtattgctgaaatgtccaagctaccaaataacgtcagaaaaactacagatgccttagatgctgtaggaaatactaccaaagctgttacaaaaggatacgcaatcggttccgcaggattaggtgcattagtactttttgctgcatatactgaagacattaaacatttttcaaaaatagcgggctcaaatctagaaggtattgttgttacatttgatttatcaaatccttttgtggttgttggtttgttagttggtggaatgttgccatatttatttggatcgatgggaatgcaggctgttggaagggcaggcgccgcagtggttattgaagtaagaagacaatttaaaaaattcccaggaataatgaaaagaaaacaaaaacccgattatgctaaattagtagacctgttaacaattgccgctattaaagaaatgattattccttcattattacctgtattatcacctatcgttttatactttgctatatacgcaataggaggtcaagttgctgctttagcatctgttggagcaatgttgttaggtgtcattatcactggattatttgtagcaatatcaatgactgctggcggtggtgcttgggacaatgcgaaaaaatatatagaagatggaaattacggtggaaaaggttcagaagcacataaagcggctgttactggtgatact

SEQ ID NO: 267093 - DNA, 676 bp, Unknown
  Bacterial polypeptide expressing nucleotide sequence isolated from the Sargasso Sea
atggaagcatcagtaacaaatatacttcaactaattattttggcaggattactatcaatcgtttacggtttttttacgggtaaaaatattttaagtgctagcgctggcagtactaagatgcaagaaatagcctccgctattcagataggagctagagcttatttaaatcgacaatacaaaacaataggaattgttggaattgtggtacttgttattattagttacgcatttagtattttagtgggtataggttatttaataggtgcagcattatctggtatagcaggttatgtcggcatgcttgtgtctgttcaagctaacgtgagaactgcagaagcttctagaaaaggattatcccaaggtctttcaattgcatttaaatctggagctgttactggaatgctagttgctggcttggctcttttagcaattgcagtatattattttttattattatcatttggagttgatgagagagagatagttaatgctttagttgcattaggttttggagcatcactcatttcaatttttgcgagacttggtggtggaatttttacaaaaggtgctgatgtaggtgctgatttagttggcaaagtcgaagcaggtataccagaagatgaccctagaaatcctgctgtaatagctgacaatgtaggagataatgtaggtgatt

SEQ ID NO: 267094 - DNA, 859 bp, Unknown
  Bacterial polypeptide expressing nucleotide sequence isolated from the Sargasso Sea
aattttttttcaaaatgatttaatgatgatggtttatcctctaactatcggaggcgcttgtatagttacttcaattcttggcactttttttgtgagattaggttcatcaagaaatataatgcttgctctttataaagggtttgttgttactgcaattacatctttactaattctatatccacttactgattatgttttaggtctagaaaaagtttattcagtaggcgacaaacaattttctggtttaagtctttattactgcagtgtgataggattaataataacaggtcttcttatatgggtaacagaatattatactggtacaaattatagaccagtaaaaagtgttgcctcttcatctaccactggtcatggtacaaatgtaatccaaggacttgctgtttctatggaagccacagcaataccagcgctaattattgttggtggaatcttattaacaaattatatagctggcttatatggtatagctattgcggtaactgctatgttagctcttgcaggaatggtagtagcattagatgcgtatggaccggtaacagataacgctggtggaattgctgagatgtcaaacttacctaaaaatgttagaaaaactaccgatgctttggacgcagttggtaacactactaaagctgttaccaaaggttatgcaattggttctgcaggattaggagccttggtcttatttgcagcatacactgaagatattaagtttttctcagatcttccagggtcgaaactagaaaatgttgttgtaagctttgatctttccaatcctttcgtagttgttggtttattagttggtggtatgttgccatatctttttggatccaatggg

SEQ ID NO: 267095 - DNA, 697 bp, Unknown
  Bacterial polypeptide expressing nucleotide sequence isolated from the Sargasso Sea
aggagcatgtatattaacctcaataattggaactttttttgtaaaattaggtaaaagtaaaaatgttatgggggccttatataaaggatttattgtatctgccttagcttcgctagctattctttatccagttactgattttgtccttggtttagataattattacaatcttaataataaatcattttcaggaatgagtttatattattgtggtgttattggattaattataactggtttgttaatttgggtaactgagtattatactggaactaattatagaccagtgagaagtgttgctaattcatctacaacaggacacgggacaaatgtaattcaaggtttagcaatctcattagaagcaacggccataccagcattaattattgtaaccgggattttattaactaatcatattgctggtctttatggtatagctattgctgtcacaactatgttggcattagcagggatggttgttgccttagatgcatatggaccggtaacagataacgctggtggaatagcagaaatgtcaaaattaccaaacaatgtaagaaaaactactgatgcattagatgcagttggtaatactacaaaagcagttactaaaggttatgccataggatccgcaggtttaggtgctcttgttctttttgcagcttatactgaggatattaaacatttttcaaaagta

SEQ ID NO: 267096 - DNA, 802 bp, Unknown
  Bacterial polypeptide expressing nucleotide sequence isolated from the Sargasso Sea
gtacaaaggatttgttgttacagctattagttctttattagttttatatccagtaacagattatgttattggtttatcttcagaatattctattgaaaataaaatatttaatggaatggatttatatttatgtgggatagtaggtttaattataactggattattaatttgggttacggaatattatacaggtacaaattatagaccagttaaaagcgttgcggagtcatctacaacaggtcatggaacaaacgtaatacaaggtttggcggtatcgatggaagcaaccgctgtgccagctttaataatagttgctggtattttacttacaaattcaatagctggactatatggaatagctatagctgttactactatgttagctttagctggtatggttgtagctttagatgcttatggcccagttacagataatgcagggggtattgcagaaatgtcaaatcttccaaaaaatgtaagaaaaactactgacgctttagatgctgttggtaatactacaaaggccgttacaaaaggttatgccataggttcagcaggtttaggtgctttagtattattcgctgcttatactgaagatattaaatatttttcaactgttgcaggatcaaaacttgagggtatatctgttacttttgatttatcgaatccatttgttgtcgttgggttattgattggtggtatgcttccgtatctatttggatctatgggaatgcaagctgttgggagagctggcggtgcagtagttattgaagtaagaagacaatttaaaaaaattccaggt

SEQ ID NO: 267097 - DNA, 661 bp, Unknown
  Bacterial polypeptide expressing nucleotide sequence isolated from the Sargasso Sea
tatgacagacaatatcgccctatggctatctatttcagctggtggattggcaattttatatggaattttttctgctcaatggattgtaaaacaatcagcgggtaatgaaaaaatgcaacaaattgctggcttcatccaagaaggtgctaacgcatacatgaacagacaatacaggactataggtattgtcggtctggttttatttatactgctatcagtataccttgatattgcaacagggatcggctttgcaattggtgcaatcttttcaggcttggctggctacataggaatgtttgtctctgtgagagctaatgtaagaacagcggaagcagccagaattggtgtcaatcctgccctaaacattgccttcaagggtggcgcgataacaggtcttcttgttgtgggtttaggtctctttggtgttgctggttattatctaatacttatgaatatgggtatgacatctgaggatgccatccattctcttgtagggcttgcttttggtggatcgctaatctcgatattcgcaagattgggtgggggaatattcacaaagggtgcagatgtcggtgctgatttagtgggtaaagtagaagcaggaatacctgaagatgatccaagaaatcctggagtaattgctgataatgttggtgacaat

SEQ ID NO: 267098 - DNA, 946 bp, Unknown
  Bacterial polypeptide expressing nucleotide sequence isolated from the Sargasso Sea
ctttagagcaacagcaattccagcattaataattgtatctggtatacttttaacaaataatattgctggtttatatggaattgccatagctgtaaccacaatgttagctttagctggtatggttgtagctttagatgcatatggccctgttacagataatgctggtggaatcgctgaaatgtctaaattacctaacaatgttagaaaaactactgatgcattagatgcagtcggtaatactacaaaagcagtcacaaaaggctatgcaataggttctgctggtttaggagcattagtattatttgcagcatacacagaagatattaaacatttctcaaaagttgctggctctaaattagaaggaattatagttacatttgatttatcaaatccttacgtagtagtaggtctgcttattggaggaatgttgccttacttatttggatcaatgggaatgcaggctgtcggtagagcaggtggtgctgtagttattgaagtaaggagacaatttaaaaaatatcctggtatcatgaaaaaaaaacaaaaacctgattatgcaaaattggttgatttgttaacagttgctgctattaaggaaatgataattccatcattgctaccagttctttctccaatagttttatattttataattttatcaattgggggacaggtcgctgcactagcatctgttggtgcaatgttacttggggtaattattactggtttatttgtagcagtttcaatgacagcaggaggtggtgcttgggacaatgcaaaaaaatatatcgaagatggaaattacggtggtaaaggttcagaggcacataaagcggcagttacaggtgatactgtaggcgatccatacaaagatactgctggacctgcagtaaatcccatgattaaaatcacaaatatcgttgctctgttattattggctgtaatc

SEQ ID NO: 267099 - DNA, 896 bp, Unknown
  Bacterial polypeptide expressing nucleotide sequence isolated from the Sargasso Sea
tctttttgagacttatgttgtaacagttgttgctacaatgcttttggcatcaatatttttcgtacaaaactcatatacaatgatgatatttcctctagctattgcaggagtttgtgcattaacaagtataattggaacttattttgttaggcttggtaaaaataataatattatggcagcgctttatagaggatttgcagtatcagctattttatctgcagtgttattgtattttgttactgattatatagttggtttaaataatgttttagtagttgaaggaacatccacacaattcacaggaatgtcactttttatttgtggtttacttggattaataattactggtttaataatatgggtaaccgaatattacacaggtacaaattatagacctgttcaaagtattgctcaatcatcaacaacaggtcacggtaccaatgtaatacaaggtcttgcaattagtttagaagctactgcacttcctgcactcataattgttgcggggattatttcaacctattcccttgctggattatttggtatcgctattgctgttacaactatgttagctttagctggtatggtagttgcattagatgcatatggacctgttacagataatgctggtggtatcgcagaaatgtctaacttagatgaaaatgtaagaaaaacaactgatgcccttgatgcagtaggtaataccactaaagctgttacaaaaggctatgctattggatctgcaggactaggtgcgctcgtactatttgcagcctatactgaggatcttgatcattttgctaaagaccctagtagtcccttgtatggaatagaagtttcatttgatttatctaacccttatgtagttgttggtttattactagggggattattac

SEQ ID NO: 267100 - DNA, 715 bp, Unknown
  Bacterial polypeptide expressing nucleotide sequence isolated from the Sargasso Sea
actaaggcagtaacaaaaggatatgcgattgggtctgctggattaggtgcattagtactttttgcagcttatacagaggacattaagcatttttctaaagtagcgggttcaaaacttgaaggtatagtggtaacttttgatttatcaaatccttatgttgttgtcggtcttttaataggtggaatgcttccatatttatttggttcaatgggtatgcaggctgtcggaagagcaggtggtgcggtcgtgatagaagtaagaagacaatttaaaaaatatccaggtattatgaaaagaaaacaaaaacctgattacgctaaacttgttgatttattaactgtagctgcaattaaagaaatgattattccttctttattacctgttttgtctccaatagttttatattttataatttttgcaataggtggacaagtagctgctttagcatcagttggggcgatgttattaggagttattataactggattatttgtggcagtttctatgacagcgggtggtggcgcatgggataatgctaaaaaatatatagaagatggaaaccatggtggtaaaggttctgaggctcataaagcagcagtaacaggagatacagtaggtgacccatataaggatacagcaggtccggcagttaatcctatgatcaaaattaccaacattgtggcattacttttattagctgtaattgctggttaat

SEQ ID NO: 267101 - DNA, 739 bp, Unknown
  Bacterial polypeptide expressing nucleotide sequence isolated from the Sargasso Sea
agacaatgctggtggtattgctgaaatgtcaaaattgccaaaaaatgttagaaaaactacagacgctttagatgctgttggaaatactacaaaagcagtaacaaaaggttatgccattggttctgctggtcttggcgctttagttttatttgctgcttacacagaggacatcaaattcttttctactgtttctggctcaccgttacaaggtgttaatgtaagttttgatttatccaatccttttgtagtaattggtcttttagttggtggaatgttgccatacctatttggatctatgggaatgcaagctgttggtagggcaggcggagctgttgtaattgaggttcgaagacaatttaaaaaaatacctggaataatgaaaggtaaaaggaaaccagattacggaaggttagttgatttattgacaaaagctgcaattaaagaaatgattgttccgtcgcttttacctgttttatccccaataatattgtatttagttatttattcaattggtggactagaggcagcactatcatctgttggagctatgcttctcggtgtaattgtaaccggattatttgtagctatatcaatgactgctggtggtggtgcatgggataatgccaaaaaatacatcgaggacggaaattatggtggcaagggatccgactctcataaagctgctgtaaccggagatactgtttggagatcttataagatacagctgggcccgcagtaa

SEQ ID NO: 267102 - DNA, 439 bp, Unknown
  Bacterial polypeptide expressing nucleotide sequence isolated from the Sargasso Sea
tatgaattaggaatgtctaaggctgaccatggaagatgtgttgagatctctacacaagctgcaattagagagatggttatgcctggactcttagcggttattacccctgtaatttttggttttggccctagtctgtttggcagtgatcttggaccgcaaattcttggaggacttctagctggtgtaacagtttgcggtgttttgatggcaatatttcaatctaatgcaggaggcgcttgggacaatgctaagaaaatgattgaggaaggtgtggttgttgatggtaaatcttacggtaaaggctcagacgtccacaaagctgcagttgttggcgatacagttggagatccatttaaagacacatcagggccatcattgaatattttgatcaaattaatgtcagttgtgtcacttgttattgcaccgttaatcgcgtaaa

SEQ ID NO: 267103 - DNA, 763 bp, Unknown
  Bacterial polypeptide expressing nucleotide sequence isolated from the Sargasso Sea
ttggaaaatctattctatataatattagtttcggtattggccgttgtttacagttattttttaagtaaacaaattatatcatctagtcctggaaatcgaagaatgcaagaaattgcagaagcgattcaaataggggctaaagcttatttaaacagacagtataaaactatagcaatagttggttttatagttttattaattataagttattttttcagtttattagttggtttgggttatttaataggcgctttgttatctggtgttgctggctatattgggatgttaatttctgttcaagcaaatgtaagaactgctgaagcatcaagatcaagtcttcaaaaaggtttaactatggcttttaaatctggagcaatcacaggtcttctagttgctggtttagccttattggcaatttcaatttattatttagccttattatctttcgatgttgatagtagggagtcaataaatgcattaattgcattaggttttggcgcatcattaatatctatttttgccagactaggcggtggaatttttaccaaaggtgcagatgttggtgcggatttagttggcaaagtagaggctggaatacctgaagatgatccgagaaaccctgcagttattgcagataatgttggagacaatgttggtgattgtgcaggaatggctgcagatttattcgagacttatgcggttacaattgttgccacaatggttcttgcctcaatcttttttttagataaccaaaagtatgatg

SEQ ID NO: 267104 - DNA, 682 bp, Unknown
  Bacterial polypeptide expressing nucleotide sequence isolated from the Sargasso Sea
tatgaactcaaacgttgaaactattcttttatatactattgcagcaggttttttatctattgtttatggatattttaccggaaaaaatattttaagttcaagtgcaggaaattccaaaatgcaagaaatagcttcagctattcaaattggagctaaagcatatttggcgagacaatataagactattgcaattgttggtgtagttgtattggtgatagtaagcattgcttttagtccccttgttggtttagggtacttaattggtgcagctttatctggtatagctggatatgttggaatgttagtttcagttgaagcaaatgtgagaaccgcagaagcatctagaaaaggtttagcaagtggtctttcagttgcttttaaatctggcgcagtgacaggaatgttggttgctggtttggcattattatcaatcgccgtttattattatttactattaaaatttaatgttgatgaaagagaaattgtgaatgctttagttgctttaggatttggcgcatctttaatatcaatttttgcaagattgggtggaggtatatttacaaaaggagctgatgtaggagctgacttagttggaaaagttgaggctggtataccagaagatgatcctagaaatccagctgtaattgctgataacgttggtgataacgtaggtgactgtgca

SEQ ID NO: 267105 - DNA, 643 bp, Unknown
  Bacterial polypeptide expressing nucleotide sequence isolated from the Sargasso Sea
cgccatcggttcagccggacttgcggcgctggtgctttttgcttgttatgtttatgaattcaagatcaaaggtgcaggagaaaccatcagtttcgaactgagtgatgtcaacgtcatcatcggtctcttcatcggcggtttgctgccttacctcttcgcctcggtagcgatgaatgccgtgggtcgagcagggggtgcagtggtggaagaagtccgcaggcagttcagagaaattcccgggatcatggaatacaaagcaaagcctgattaccgcagcattgtcgatattgtcaccaagtttgcccttaaggaaatgatccttccggcgttgctcccggtggtggctccgatcgtggtcggattgcttctaggcaaggtcgccctgggaggcatgttgattggaagcatcgtcaccggactttttgttgcgctttccatgacgaccggcggggcagcctgggataatgcgaaaaaatacattgaagacggaaacctcggcggtaaaggcagcgaagcccataaagccgcagtgactggtgatacagtgggcgatccctacaaggatactgccggaccggccgtcaatccgatgatcaagatcctcaacgtcgttgccttattgctggttcccttcctcatctga

SEQ ID NO: 267106 - DNA, 368 bp, Unknown
  Bacterial polypeptide expressing nucleotide sequence isolated from the Sargasso Sea
aattagggaaatgattgtgccttctatgttaccagttttatctcctattgtagtttattttattatcctttttattgcaggtcaatctgcagctttatcttgtttaggtgcattgttgttaggtgtaattattactgggctttttgtagcaataagtatgacggcaggtgggggagcatgggataatgcaaaaaaatatattgaagatggtaatcatggaggaaagggtagtgaagcacataaagctgctgtaactggagatactgttggtgatccatacaaagacactgctggtcctgcagttaatcctatgattaaaatcacaaatattgtagctttattactattagcatcaattgcactttaaa

SEQ ID NO: 267107 - DNA, 792 bp, Unknown
  Bacterial polypeptide expressing nucleotide sequence isolated from the Sargasso Sea
tatttttatttctacacattatttgatttatatggagtatgtattgctgcagttgggatgcttgctactgttggcataacaatggcaattgatgcatatggtcctgttgctgataatgctggcggaattgcagagatgtcaggaatgggagaggatgtaagggaaattactgattctttagatgagcttggaaatacaactgcagctattggaaaaggatttgcgataggcgcagctgccttggctgcattagctataatcgctgcttttgttcaagtagtcggtgtaaataatgatggattccagttaattttatctgatccgatagtcctagtaggaatgtttatcggaggctcaattccattcttagtttcctcaataacaatgactgccgtaggtgatgcagcatttgagatgatcaatgagataagaagacaatttagagagatcccagggattctagaaggcacaggtgaaccagatactgacaaatgtgttgagattgctacaagagcagcacttcaaaggatgttattgcctggagttattgcagtttcaatgcctccattagttggtttcttattaggagcaaaagctcttggtggaatgttagctggcggattacttggttgcgttcttcttgccttaatgatggctaatgccggaggcgcttgggataatgctaagaaatacattgagaaaggaaatcttggtggaaaaggctcagatactcatgctgctgcagttgtgggagatacggttggagatccatttaaagatacttcaggacct

SEQ ID NO: 267108 - DNA, 619 bp, Unknown
  Bacterial polypeptide expressing nucleotide sequence isolated from the Sargasso Sea
aaaagaagcaggatctgctctagagggaattgttgttacttttgatttatcaaatccatatgttgtcgtaggtttattaattggtggtatgcttccatatctatttggttcaatgggaatgcaagctgttggtagagcaggtggtgctgtatttattgaagtaagaagacaatttaaaaaatatccaggaattatgaagagaaaacagaaacctgattatgcaaaacttgtagatttattaacagtcgctgcaattaaagaaatgatcataccgtcattattaccagtattgtcaccaattgttctatacttttttatttttgctattggtggtcaagtagctgcattagcttctgtaggagcaatgttgttaggtgttattataactggattatttgtagctgtttcaatgaccgcaggtggtggtgcttgggataatgcaaaaaaatatattgaagatggaaatcatgggggaaaaggatctgaagctcataaggcagctgttactggtgatacagttggcgatccttataaagatactgctggaccggcagttaacccaatgattaagattacaaatatagtagctttattattgttagcagttatcgctggctaa

SEQ ID NO: 267109 - DNA, 816 bp, Unknown
  Bacterial polypeptide expressing nucleotide sequence isolated from the Sargasso Sea
tcctctatattttttccaggtgatatgtctatgatgatttacccattaactatcggtggtgcctgtatcctaacgtctatattgggaactttttttgtaaaattaggtaaaagcaaaaatgtgatgaatgctttatataaaggcttcgttgtttcagccgttacgtctttaataatactctatccagttactgactatgttttaggtttagaaaatacttacattttgaaagataattcgttttctggaatgagtttatattattgtggtgctataggtttagttattactggattgcttatatgggttacagaatattatactggaacaaattataggcctgttaaaagtgttgctagctcatcaacaacaggacatggaaccaatgttattcaaggacttgcaatttcattagaagctacagcaattccagctataattattgtagcaggtatattattaacaaattacattgcaggcttatacggaatagctatagcagtaactactatgctggctttagctggaatggttgtggctcttgatgcttatggtccagttacagataatgctggtggaattgcagaaatgtcaaaattaccaaacaaagtaagaaaaactactgatgctttagatgctgttggcaacactactaaagcagttacaaaaggttatgcgattggatctgctggattgggtgcattagttctatttgctgcgtatacagaagatataaaacatttttctaaagaagtaggttcaaatctggagggaattgtagttacttttgatttatctaatccttatattgtagtt

SEQ ID NO: 267110 - DNA, 846 bp, Unknown
  Bacterial polypeptide expressing nucleotide sequence isolated from the Sargasso Sea
tatggaagcatcagcattaaatatacttcaggtaataattttggcaggtttattatcaattgtttatgggttttttacaggcaaaaacattttaagtgccagcgccggtaattctaaaatgcaagaaattgcgtctgctattcaaattggtgcaaaagcatatttaaatagacaatataaaaccatcgctattgttggtattgttgtattagttataattagttttgcttttagtattttagttggaataggttatttaataggtgctgctttatcaggtatagcgggatatgttggtatgcttgtgtccgttcaagctaatgtaagaactgctgaagcctcaagaaaaggattatctcaaggtcttgctatcgcttttaaatctggagcagtaactggtatgctggttgcaggtttagcacttttagctattgctgtatattattatttacttttatcttttggagttgatgaaagagaaattgttaatgcattagtcgctctaggatttggagcctctttaatatcaatttttgcaagactaggcggcggaatttttacgaaaggagcggacgttggtgcagatttagtaggaaaagtcgaagccggtattccagaagatgatccgaggaatccagctgttatagcggataatgttggagataatgttggagattgcgctggtatggcagcagacttgtttgagacatatgcagtgacaatagtcgctacaatggttttgtcttcaatattttttcatggtgaccttaatatgatggtctatccattatctataggtggcgcatgtatattaacgtctataattggaacattttttgtaaaact

SEQ ID NO: 267111 - DNA, 484 bp, Unknown
  Bacterial polypeptide expressing nucleotide sequence isolated from the Sargasso Sea
caggtggagctgttggtggtagaagtaagaagacaatttaaaaaatttccaggtataatgaaaagaaaacaaaaacctgattacgcaaaacttgttgatttattaactgttgcagcaattaaagaaatgataatcccatcgttattgccagttttatcgccgatagttttgtattttgtaatatttgctatagggggacaagtagctgctctagcctctgttggagcaatgttgttaggagttatcataactggtttatttgttgctgtttcaatgactgccggtggtggtgcttgggataatgcaaaaaaatatattgaagatggaaatcatggaggtaaaggttctgaggctcataaagctgctgttactggtgatacagttggagatccttacaaagatactgctggacctgctgtaaatcctatgattaagattacaaatatagttgcattattgcttttagctgtaatagctggttagt

SEQ ID NO: 267112 - DNA, 998 bp, Unknown
  Bacterial polypeptide expressing nucleotide sequence isolated from the Sargasso Sea
tatggctgctttatataaaggttttattgttactgctttaacttcattagtaattttatatccaattacagattacgttttaggattaaaaaatgtttatacaatttctgataaatcttttacaggaatgagtttatacatatgtggtgttataggtttagttataacaggcttattaatatgggttactgaatattatactggtactaattatcgaccagttaaaagtgtagcctcatcatcaacaacaggtcatggtacaaatgtaattcaaggcttagctgtttcaatggaagctaccgctataccagctctaattattgtaggtggtatattgttaacaaattatattgctggactttttggtatagcaattgctgtaaccacaatgttggctttagcgggtatggtagttgctttagatgcatatggcccagtaacagataatgctggtggtatagcagaaatgtctaatttgcctaaaaatgttagaaaaactacagatgcactagacgctgttggtaatacaactaaagctgtaacgaaaggttatgcaattggatctgctggattaggtgcgctagttttatttgcagcttacacagaagatattaaacatttttctaaagtagctggatctaaactagaaggaattgttgtgacattcgacctttcaaatccatttgtagttgttggattattagttggtggtatgcttccatatttatttggatcaatgggaatgcaagctgtaggaagagctggtggtgccgttgttgttgaagttagaaggcagtttaaaaaaattccaggaattatgaaaagaaaatcaaaacctgattatggtagattagttgatttattaaccaaggctgctattaaagaaatgatagtaccatctttattacctgttctttcaccaattgttttatatttatttattttacctataggtggacaagtagcggcattatcttctgttggagctatgttgttag

SEQ ID NO: 267113 - DNA, 802 bp, Unknown
  Bacterial polypeptide expressing nucleotide sequence isolated from the Sargasso Sea
ggtgcagatgttggtgcagatttagttggtaaagttgaagctggtataccagaagatgatcctagaaatccagcagtaattgcagataatgttggtgataatgttggtgactgtgctggaatggctgcagatttatttgaaacttatgcagttacaattgttgcaacaatggttttatcctcaattttttttcatgatgatcttaatatgatgatttatccacttacaataggtggtgcatgtattttaacatcaattattggaacattttttgtaaaacttggaaaagataaaaacgttatgaatgctttatataaaggattcgtagtttctgctataacttcattaattattttatatcctgtcacagattatgtaattggctttacaaaagagtactctgttaacggtaaaaattttaatggaattaatctttatttttgtggtgttattggtttagttataacaggtttattaatatgggtaacagaatactatacaggtactaattatagacctgtaaaatcagttgcatcatcatcaacaactggtcatggaacaaatgttatccaaggtttggctgtttcaatggaggctacagctataccagcattaattattgttgctggtattcttattacaaattcgatagctggactttttggtatagccatagctgttacaacaatgcttgctttagcgggtatggttgttgccttagatgcttatggtccagttacagataatgctggtggaattgccgagatgtctaatttagataaaaaagttagaaaaactaccg

SEQ ID NO: 267114 - DNA, 185 bp, Unknown
  Bacterial polypeptide expressing nucleotide sequence isolated from the Sargasso Sea
taatgcaaaaaaatatattgaagatggaaactacggaggcaaaggatcagaggctcataaagccgccgttactggagatactgtaggcgatccatataaagacacagctggcccagctgttaatcctatgattaaaataactaatatagtagctttattgcttttagcagtaatagctcattaaa

SEQ ID NO: 267115 - DNA, 895 bp, Unknown
  Bacterial polypeptide expressing nucleotide sequence isolated from the Sargasso Sea
ttttcaagagtaggtggaggaattttcacaaagagtgcagatgttggagctgatcttgttggtaagatcgaggctggcattcctgaagatgacccaagaaatccaggcgttatagcagataatgttggtgataatgttggtgatgttgctggaatgggctcagatatatttgagtcatactgtggctcaatgattgcatcaatagctatagcttatactttaggcaatcaggacatgatgatgcttcctctggctttagcagcgactggcttgattgcttcaataattggaatatttatagttaagcttcagtctgcaaaagcaccggcgagtgcattgagatctggaactcttttagctccagtaatatttgtggctatggcttattttatcatcaatttttttgatggagtgggaatgaatgtatggtggtgtgtgattgccggagctgttggcggggtcttaattgggcttattaccgaatattacacaggcggtaacccagttaaaaaaattgctgaatcaggagagactggctctgcaacagtaatgatttcaggtttatcagttgggatgcaatcagttgtaatacctattgctattttagctggcataattcttacctcgactcaattatcaggtatttatggcgttgggattgccgccgttgggatgcttgctactgttggaatcacaatggcaatagatgcatacggaccggttgctgataatgctggtggcatcgctgaaatgtcgggtatgggagaggaagtaagagaaatcactgattctcttgatgaattaggaaatactactgctgcaattggaaaaggtttcgcaattggagcagcagcattagctgccctagcaataatttcagctttttcagctgtgg

SEQ ID NO: 267116 - DNA, 166 bp, Unknown
  Bacterial polypeptide expressing nucleotide sequence isolated from the Sargasso Sea
atatgttgaagatggaaactttggtggaaagggttcagaagctcataaagcagcagtaacaggtgatactgttggagatccttataaagatactgccggcccagctgtaaacccaatgattaaaatcaccaatattgttgcattactattattagcaggactataa

SEQ ID NO: 267117 - DNA, 868 bp, Unknown
  Bacterial polypeptide expressing nucleotide sequence isolated from the Sargasso Sea
ctacttaaatagacaatataagacaattgcaatagtaggtgtggtagttttagttataattagtttttcatttagtattttggttggaataggttatttaattggagcagcattatctggcatagctggatatgttggcatgttagtatcagttcaagcaaatgtaagaactgctgaagcatcaagaaaaggtttatcgcaaggtcttgcaattgcatttaaatctggagctgtaactggtatgttggttgctggtttggctcttttagcaattgccgtatattattatttattattatcttttggtgttgaagaaagagaaattgtgaatgctctagttgcgttaggattcggtgcatcattaatttcaatttttgcaagacttggtggtggaatttttaccaaaggtgcagatgttggtgcagatttagttggaaaagttgaagcaggtattccagaagatgatccaagaaatcctgctgtaattgctgataacgtaggtgataacgtaggagattgtgctggtatggcagctgatttatttgaaacctatgcagttacaatagttgcaactatggttttatcgtcaatatttttccacggtgaccttaacatgatggtttatccgttatcaattggtggggcttgtatattaacttcaattattggaacattttttgttaaattaggaaaatcaaaaaatattatggccgctttatacaaaggttttatagttacagctgtaacttcgttagtaattttatatccaattacagattatgttttaggattagaaaatatttatacaatttctgataaatcgtttactggaatgagtttatacacatgtggtgtaataggtttagtt

SEQ ID NO: 267118 - DNA, 742 bp, Unknown
  Bacterial polypeptide expressing nucleotide sequence isolated from the Sargasso Sea
atggaagcgtcagcatcaaatatacttcaaattattattttaacaggtttattatcaattgtttacggatattttacgggaaaaaatattttaagctctagtccgggtagttcaaagatgcaagaaatagcatctgctatacaaattggagctaaagcatatttaaatagacaatacaaaacaattgcaattgtaggagttgttgtattatttataattagttatgcatttagtattttagtcggaataggttatttaatcggtgccactttatcaggtatagcaggatatgttggtatgcttgtatctgtacaagcaaatgttagaacagcggaagcttctaaaaaaggactatcacaaggtttagcaattgcatttaaatctggcgcagttacaggtatgttggttgcgggtttagcgcttttagcaatagcagtttattattatttactattatcttttggtgtagatgaaagagaaattgttaatgctttagttgctttaggatttggtgcttcactaatttcaatttttgcaagacttggtggaggtatttttactaaaggcgctgacgtaggtgcagacttagtagggaaagttgaagcaggtattcctgaagacgatccaagaaatccagcagtaatagcagataacgttggtgataatgtaggtgattgtgcaggtatggctgctgacctatttgagacatatgcagtaacaatagttgctactatggttttat

SEQ ID NO: 267119 - DNA, 829 bp, Unknown
  Bacterial polypeptide expressing nucleotide sequence isolated from the Sargasso Sea
atgttagctttagctggtatggtagttgctttggatgcgtatgggccagttacagataacgctgggggaatcgctgaaatgtcagagttagatgatggtgttagaaaaacaactgatgcattggatgcagtaggtaatacaacaaaagctgttactaaaggttatgctatcggttcagctggtttaggtgcgttggtattatttgccgcttatactgaagatgtttctcattatggtcttgaagtatctttcgatttatcaaatccttacgttgttgtaggacttttactaggaggattacttccatatttgtttggagccatgagtatgactgcagtaggaagagctgctggttctgtagttgaagaagttagaagacagtttagagaaatacctggaattatggaaggtaagggtaagcctgagtatggaaaatgtgtagatatattaactaaagcagcaatcaaagaaatgattataccatctatgcttccagtactttctccaattatagtttacttcgttattttatttatagcaggtcaaacagctgcacttgcttgcttaggtgctttactattaggtgtaataattacaggtctatttgtagcaattagtatgacagctggcggcggtgcatgggataatgctaaaaaatatattgaggatggaaatcatggaggtaagggaagcgaagcacataaagctgctgttacaggtgatactgtaggagatccttacaaggatacagctggaccagctgttaatccaatgataaaaataacaaatattgtagctttacttcttctagcttcattatcactgtaat

SEQ ID NO: 267120 - DNA, 316 bp, Unknown
  Bacterial polypeptide expressing nucleotide sequence isolated from the Sargasso Sea
ttttatatctaattattttttcattggaggcttggaagccgctttatcgtctgttggagctatgctgcttggagttatagtaacaggattgttcgtagcaatttcaatgaccgccggtggaggagcatgggataacgctaaaaaatttattgaagatggaaattatggaggcaaaggatctgactctcacaaagccgctgttacaggagatacagtgggggacccttataaagatactgctggtccagcagtaaatccaatgataaaaattacaaatatcgttgcccttttacttttagctgttattgctcactaa

SEQ ID NO: 267121 - DNA, 529 bp, Unknown
  Bacterial polypeptide expressing nucleotide sequence isolated from the Sargasso Sea
aatgagctacagcaagattccggctggcaaagacctgccgaacgacatctacgtcgccatcgaaattccggccaaccacgcgccgatcaaatacgaaatcgacaaagacagcgactgcctgttcgttgaccgtttcatggccaccccgatgttctacccggccaactacggtttcatccccaacaccttggctgacgacggtgaccccctcgacgtgctggtcgtgaccccttacccggtcaccccaggctcggttatccgcgcccgtccagtcggcatcctgaacatgaccgacgacggcggcggcgatgccaaagtcatcgcagtgccacacgacaagctgtcccagctgtatgtggacgtgaaggaatacaccgacctgccgccactgctgctggaacagatcaagcacttcttcgagaactacaaagacctcgaaaaaggcaaatgggtgaagatcgacggttggggcaacgcagacgccgcccgcgccgagatcatgaagtcggttgctgcctacaaaggctga

SEQ ID NO: 267122 - DNA, 970 bp, Unknown
  Bacterial polypeptide expressing nucleotide sequence isolated from the Sargasso Sea
atggctgctgatttatttgaaacatacgcagtaacaatagtagcaactatggttttatcttcaatattttttcatggtgatcttaatatgatgatatatccactatcaataggaggtgcatgtatattaacatctattattggaaccttttttgttaaattaggaaagtctaaaaatattatgagtgctttatacaagggttttgtagttacagctattacatccttaatgattttatatccagttactgattatgttttgggattagaaagtaattattcaattgcagataaatcttttacaggaaagagtttatatatttgtggtgtaataggtttagttataactggtttattaatttgggttactgaatattacactggtacaaattataggccagtaaaaagcgttgcctcatcatccacaacaggtcatggaacaaatgtaattcaaggtcttgcagtttcaatggaagcaacagcaattccagcattaattatagttagtggtatattattaacaaattatatagcgggactttttggaatagcaattgctgtaacaacaatgttagcgttagcaggtatggttgtagctttagatgcgtatggacctgtaactgataatgctggaggaattgctgaaatgtccaatttaccaaataacgtaagaaaaactacagatgctctagacgctgttggaaatactactaaagctgttactaaaggatatgcaataggttctgctggcttaggtgcattggttcttttcgctgcttatactgaagacattaaacatttttcaaaagtagctggatcaaaactagaaggaattgttgttacatttgatctatcaaatccttttgtggtcgtaggattgttagttggtggcatgcttccatatctttttggtttcatgggaatgcaggcagttggtagagcgggggggagctgtttgtatttgagttaga

SEQ ID NO: 267123 - DNA, 856 bp, Unknown
  Bacterial polypeptide expressing nucleotide sequence isolated from the Sargasso Sea
atatctaaatgccggactgttcggcatctctattgccgctacagccatgcttgcactagcaggtatggtggtagcactagacgcttttggtccggtcaccgataatgcgggtggcatcgcagaaatggcagaattacctgatgatgtgcgcaatactactgatgctttggatgctgttggaaacacaacaaaagcagtaacaaaaggctacgcaattggctctgctggtttagcggctctggttctgttcggcgcctacattgaagatctctcatattacttcccaaacgtagaggtgacttttaatctgcaagacccgtttgtagtagtcggcttattcattggtggaatgttaccatacctttttggaggcatgggcatgatggcagttggccgagcagggggtgcagtcgttatcgaagtccgccgccagttcaaggaaattccgggaattatggagggcacagcaaagcctgagtatggtaagtgcgttgacatacttactaaagcagcgatcaaagaaatgatcatcccgtctttattacctttgttggcaccggtagtgatttactttgtcgttaacgccatagctggtcagtccgcagcgttttcagcggtgggcgctagtctccttggaaccattgtcacaggcttattcgtggctttatcgatgactgcaggcggtggagcttgggataacgcgaaaaaatatattgaggatggcaaccatggaggtaaaggctctgacgcccaccatgcggctgtcacaggtgatactgtcggtgacccttacaaagatacggcggggccggcagtaaatcctatgatcaaaatcatgaatatcgtggctatctta

SEQ ID NO: 267124 - DNA, 659 bp, Unknown
  Bacterial polypeptide expressing nucleotide sequence isolated from the Sargasso Sea
tctttttgctgcttacacagaagatattaaatttttttcaaaagttaaaggttctgccttagaaaacatcaatgtaagttttgacttatctaacccatttgtggtggtaggtttactagttggtggaatgttgccctacttatttggttctatgggtatgcaagctgttggtagagcaggtggagctgtagtaattgaagtcagaagacagtttaaaaaaattccgggtataatgaaaggcaaaaagaaacctgattacggtaaactagtagatttattgactaaagcggcaataaaggaaatgatcataccatccttgctgccagttttatctccaattgtattatatctaataattttaccaattggtgggttagaagctgctctttcatctttaggtgcaatgcttttaggcgttattgttaccgggctttttgttgctgtttctatgacagctggtggtggtgcttgggataatgcaaaaaaatatatagaagacggtaattttggaggcaaaggttctgaagcacataaagctgcagtaactggagatacagttggtgacccttataaagatacagctggaccagcagttaatccgatgataaagataactaatatagtagcacttttactacttgctgttatagctcattaaa

SEQ ID NO: 267125 - DNA, 937 bp, Unknown
  Bacterial polypeptide expressing nucleotide sequence isolated from the Sargasso Sea
ttttctatatttgcaagattaggaggtggaatttttactaaaggagcagacgtaggagctgacttagtcggaaaagtagaggcaggaattcctgaggatgatccaagaaatccagctgttatagcagataatgttggagataatgttggagattgtgctggaatggctgcagatttatttgaaacatacgcagtaacaatagttgcaactatggttttagcatctattttttcacctcaagattataatttaatgatttacccgcttgctatcggaggcgcttgtataattacttccataataggaacttggtttgttaaattaggcaaaagtaaaaatattatgggtgctttatacaaaggttttattgtaactgctgtaacttctttattaataatgtatccagttacagactccattgtggggattaacgaaacatataataacaattcaggttcaatttttaatggtttagatttatacatttgtggagtagttggtttcattataacaggtttgttaatatgggtaacagaatattatacaggcacaaactacagacctgtaaaaacagtagctaaatcttctacaactggtcatggtacgaatgttattcaaggtcttgctatttcaatggaggctacagccatacctgcattaattattgttgcaggtattttatacactaacagtttagcagggttgtatggtattgctattgctgtaacagcaatgttagctttaactggaatggttgttgctcttgacgcttacggccctgttacagataacgctgggggtattgcagaaatgtccaaacttccaaaaaatgtaagaaaaactaccgatgcgttagatgccgtaggaaatactacaaaagcagtaaaaaagggttacgcaataggttcagcaggattaggtgcacttgttttattgc

SEQ ID NO: 267126 - DNA, 718 bp, Unknown
  Bacterial polypeptide expressing nucleotide sequence isolated from the Sargasso Sea
tatgagcgaaacaatcgaaacaatactattatatacaattggagctggtttattatctatcgtttatggatttttaactggtaaaaatattcttaattcaagtgcaggaaatgcaaaaatgcaagatatcgcttcagctatccaaattggagcaaaagcatacttagcaagacaatacaaaactattgctattgttggtgctgtagttttagttattgtaagtattgcttttagtccattagtaggtcttggatatctaataggtgctgctttatctggtattgcaggatacgttggaatgttagtttctgtagaagctaatgttagaactgctgaagcttctagaaaaggtctcgctcaaggtctttctgttgcatttaaatctggtgctgtaactggtatgttggttgctggtttagctttattagcaatagcagtatattattttttattgcttaaatacgaggtagatgaaagagaaattgtaaatgctcttgttgctttagggtttggagcttctttaatatctatttttgctagattaggtggaggaatttttaccaaaggagcagatgttggagctgaccttgttggtaaagttgaggctggtatacctgaagatgatcctaggaatccagcagtaattgcagacaatgttggagataacgttggtgactgtgctggaatggcagctgatttatttgaaacatatgcagtt

SEQ ID NO: 267127 - DNA, 945 bp, Unknown
  Bacterial polypeptide expressing nucleotide sequence isolated from the Sargasso Sea
tttggtattataagttatttttttagtttattagttggccttggttattttataggagctttgctatccggtgttgctggttatattggaatgttaatttccgttcaggcaaatgttagaacagccgaagcttcaagaacaagtttacaaaaaggtttaacaatggcctttaaatccggagctataactggtcttttagttgctggtttagctttattgtcaatttcaatttattactgggtgctattaacttctgatgttgagagtagagaattaataaatgcattaatagctttaggatttggggcttctttaatatctatttttgctagattaggtggtggaatttttactaaaggtgctgatgtaggagcagatttggttggaaaagttgaagccggaataccggaagatgacccaagaaatccagcagttatagccgacaatgttggcgataatgttggcgattgtgccggtatggcagcagatctattcgaaacatatgctgtgacaatagttgcaactatggttcttgcctcaatattttttcaagacaatttaagtatgatgatttatcctttggcaattggcggaggatgtatcattgcctctataataggtactttttttgttaaacttggtaagagcaaaaatattatgggagctctttacaaaggatttattgttacagcaataatttctttaatattactttatcctattacttcaaatgttattggtttggataatacatttaatgttggagacaaaagttttactggttttgatttatactattgtggagttattggattggccgtaacaggtttaattatatgggtgactgaatattatacaggaacaaattatagaccagttagaagtgttgcaaaatcttcaaccactggacacggcacaaatgttattcaaggtttagcggtctca

SEQ ID NO: 267128 - DNA, 792 bp, Unknown
  Bacterial polypeptide expressing nucleotide sequence isolated from the Sargasso Sea
ctgggcttccagactgcattcgcattcttgtgcggcgcgctcgcatcagccgccgcaggctacatcgggatgaacaccgccacccgtgcgaacgttcgcacgacggtggcagcccataaccgcggtgtcgccgaagcactgacagtggcatttttcggcggctccatcatgggtctcgccgtcgcctccctgggattgctcggcctcggtacgctctatcttttctttggaggtgacccggaaaccgcccacaccattcacggtttcggcatgggcgcgtcaacggtggcgctgttctcgcgcgtcggcggggggatcttcacgaagagcgccgacatcggggcggacctcgtcggcaaggtggaagcgggcattccggaggacgacccccgcaaccctggggttatcgcagacaacgtcggcgacaacgtgggggatgtggccggcatgggctctgatatcttcgagtcgtactgcgggtcaataattgcctcaatcgccatcgcctcgacgatgatcatcgacatcatggacccgctgggcgaacgtccggcgctgatgttcctgcctttggggctcgcatcagcgggcttgctgtgctcgattgccggcatcttcctcgtgcgcgtctactcgaaccgctcgccggaggtggctctgcgaatcggcaccataagcgcgagcgcgctcttcatcatcttgtcgttcatcgtcatcaacgcgtcggatattcgcctcgcggtgtggggtgcagtactggtcggcgcgattggcgggatcgtcatcgggcta

SEQ ID NO: 267129 - DNA, 917 bp, Unknown
  Bacterial polypeptide expressing nucleotide sequence isolated from the Sargasso Sea
tgtttctgcgtagcttctttaataattttatggcctgttacagatcatgtaattggttttgccaatgaatatactgttaatgacaagacttttaatggaatggatttatactattgtggtgttattggactagtaattactggattattaatttggattactgaatattatacaggtacaagttataggccagttaaatctgttgcactttcttctacaactgggcatggtactaatgttattcaaggtttagctgtttctatggaagcaactgctatacctgcattaataattgtcgctggtattcttattacaaattctattgcaggactatttggcattgcgattgcagtaactactatgcttgctttagcaggtatggttgttgctttagacgcatatggtccagttactgacaatgctggaggaattgcagaaatgtccaatttagataaaaaagttagaaaaacaacagacgccttagatgcagtaggtaatacaacaaaagctgttacaaagggttatgcaataggttcagctggtttaggagcattagttttatttgcagcttatacagaggatattaaacatttttcaaaagaggcaggatctgcattagagggaattgtagttacttttgacctgtcaaatccttatgtggttgttggtttattaataggtggaatgttaccatatctttttggatctatgggtatgcaagctgtgggaagagcaggtggtgctgtagttgttgaagtaagaagacaattcaaaaaatttccaggtataatgaaaagaaaacaaaaacctgattatgctaaactagtagatttattaactgttgcagcaattaaggagatgataataccatcacttcttccagtattatccccagttgttctttatttcattatttt

SEQ ID NO: 267130 - DNA, 241 bp, Unknown
  Bacterial polypeptide expressing nucleotide sequence isolated from the Sargasso Sea
attattacaggattgtttgttgcaataagtatgactgctggaggaggagcttgggataatgcaaaaaaatatattgaggatggtaatcatggtggtaaaggtagtgaagctcataaagcagcagtaactggagacaccgttggagatccatataaagatacagccggcccagcagttaatccaatgattaaaataacaaacatagttgctcttttacttttagcagcaatatcattataaa

SEQ ID NO: 267131 - DNA, 793 bp, Unknown
  Bacterial polypeptide expressing nucleotide sequence isolated from the Sargasso Sea
gctttggtttttggcggtattgctattaagacaatcttttctgctagtgacggatctgcaaagatgcgtgaaatatctcttgcgattcaagaaggtgctagcgcttatttaaacaggcagtataaaactatagctgtcgtagggatagcgattgccatcattcttgcgattactttaaatactctttcggcgcttggattctgtatcggcgctttgctttcagggttaacaggatacataggcatgcacgtttcagtgagagctaatgttaaaactgccaatgctgcccaaagctctctgcagcaggcattaactatagcctttagatctggtgctgtgactggaatgcttgttgtgggattgggccttctgggtgttgcaggctattattttttccttttagggtatttcggcgtaagtacagaacagaacacaaggcatattttggaatcgttggtttcgttaagttttggagcatcattaatttcaatttttgcgagacttggcggaggtatatttactaagggggctgatgttggtgctgatctcgttggaaagattgaagccggtatacctgaagatgatccaagaaatccagccgtgatagcagataatgttggtgataatgttggcgattgtgctgggatggcagcagatttatttgaaacctatgccgttactgtggtggcatctatgcttcttgcatctattttcttccccggaagtgattcaatgatgatatatccacttctgatcggtgccgtttgtattctttcttccattttcggaacat

SEQ ID NO: 267132 - DNA, 856 bp, Unknown
  Bacterial polypeptide expressing nucleotide sequence isolated from the Sargasso Sea
atgtcagtagaattttttatcgtatttatttgttcaattttgtctctcatatacggggggatcacaattaaaaagattctagaagaaccacagggttccgatagaatgaaagaaattgcctctgctatccaagagggtgctcaagcttatcttaacagacaatatataacaatttccatcgttggtcttcttatagcagtaatccttttttatttaatggaaaattcatttgtttctattggatttgtgattggagcttttttatctggtttagcaggttacattggaatgtttgtctctgttagggcgaatgtcagaacaacggaagcagctactgtaagtcttgaaaaagctttagacatatcttttaaatctggtgccataacaggatttctcgtggtaggactaggccttttaggtctaataagttattacttttttttagagaattttacttctttagaaggaagaaaaatcattgagggcatggttgcattgagttttggtgcttccctgatttcaatatttgctagacttggtggaggaatttttacaaaaggagcagatgtcggagctgatttagttggtaaaattgaagctggaattccagaggatgatcccagaaatcctgctgttattgctgataatgttggtgataatgttggtgattgcgctggtatggctgctgatttgtttgaaacatacgccgttactatagttggaacaatggttttaggccttattttatttcaaggatccgatcagcaaatttttatgatgtaccccctattaattgccggtgtgtgcataatttcctcattagttggtgcttattatgtaaaattaggggaatctc

SEQ ID NO: 267133 - DNA, 637 bp, Unknown
  Bacterial polypeptide expressing nucleotide sequence isolated from the Sargasso Sea
aatgactaattatttagaacttctatatttaatttcatttactgggattctagccgtagcttatagttatctattatctggacaaattatatcatctaatccaggtaactctagaatgcaggaaatcgctgaagcgattcaaattggtgctaaggcttatttaaacagacaatataaaactattgctattgttggaattatcgtcttagcaatagtaacttacttttttaattatttagttggattaggttactttgtaggagcttttctttctggagtagctggttatgttggaatgttaatctcagtaaaagcgaatgtaagaactgcagaggcttcaagacagagtttacaatcaggattaacaatagctttcaagtccggagcaataacaggtcttttagttgctggcttagctttattggcaataacaatttattatataatattaattaatcttaatgtagatagcagagaaatcattaatgctttggtcgcccttggatttggagcatctcttatttcaatttttgcaagattaggtggtggtatatttactaaaggagctgatgtaggtgccgatttagttggaaaagttgaagcaggaattccagaagatgatccaagaaaccctgct

SEQ ID NO: 267134 - DNA, 731 bp, Unknown
  Bacterial polypeptide expressing nucleotide sequence isolated from the Sargasso Sea
tatgaattcttcaatcgaaactattttatattatacaatatttgcaggtttattatcaatcgtttatggatttttcacaggagctggaattataaaatcaagttctggaaataataaaatgcaagaaattgcatcagctattcaagttggcgccaaagcttatttaaatagacaatataagacgattgcgattgtaggttttgtagttctaataattattagttttgcatttagttttttagttggagtaggttatttagttggcgcaactttatctggaatagcaggttatgttggaatgttagtatcggttcaagctaatgttagaacagccgaagcatcaagaaaaggtcttgcacacggtttatcaattgcttttaaatcaggtgcgattacaggtatgttggttgctggattagctttattatctatagctgtttattattttattttattaaaacttggcattgatgaacgtgaaatagttaatgccttagttgcattaggttttggtgcatcgttaatttcaatatttgctagattaggtggaggaatatttacaaaaggtgcagatgttggcgctgatttagttggaaaagttgaagcaggaattccagaagatgatccaagaaatccagcagtaattgctgataatgttggtgataatgttggtgattgcgcgggtatggcagcagatttatttgaaacttatgccgtaactatcgttgcca

SEQ ID NO: 267135 - DNA, 889 bp, Unknown
  Bacterial polypeptide expressing nucleotide sequence isolated from the Sargasso Sea
atattttttccaggagacatgagtatgatgatatatcctctttctattggaggtgcttgtatattgacatcaataatcggaactttttttgtgaaattaggaaaaagcaaaaatgtaatgaatgccttatataaaggtttcgtagtttctgctttttcctcattaataattttatacccagttactgactatgttctaggattagataatgtttataatcttaaaaacaaatctttcacaggaatgagtttgtactattgtggtataattggtttagtaatcactggattattaatttgggttacagaatattatactggcactaattatagacctgttagaagtgttgcgggttcatcaacgactggtcatggaacaaatgttatacaagggttagcaatatctttggaagcaacagcgatacctgcattaattattgttgtggggatactcacaacaaataacattgctggattatatggtatagccattgctgtaactactatgttagcactcgctggaatggttgtggcactagatgcatatggaccagtgactgataatgctggtggaattgctgaaatgtcgaagctacctaataatgtaagaaagacaacagatgcactcgatgcagttggaaatactacaaaagctgtaacaaagggatatgctattggttcagctggtttaggtgcattagttttatttgcagcttatacagaggacattaaacatttttctaaagtagctggttcaaatttagagggaataattgttacttttgatttatctaatccatacgtagtagttggacttctaattggagggatgctaccttatctcttcggttcaatgggaatgcaagctgttggtagagcaggcggtgcag

SEQ ID NO: 267136 - DNA, 880 bp, Unknown
  Bacterial polypeptide expressing nucleotide sequence isolated from the Sargasso Sea
ataattataacaattttatttagtccattagtcggcttaggttacttaattggtgctactttatctggaattgcaggctatgttggaatgcttgtttctgttcaggctaatgtaagaacagctgaagcctcaagaaaaagtttagcaagtggtttatcaatagcatttaaatcaggtgcagtaacaggaatgttggttgctggtttagcattgctttcaattgctgtatattattattttttagtaaaagctggaattgaagaaagagaaattgttaatgcactagttgccttaggtttcggtgcatcacttatttctatatttgcaagactggggggtggtatttttacaaaaggtgctgatgtaggagctgatttagttggaaaagttgaagctggtattccagaggatgatccaagaaaccctgcggttattgcagacaacgttggcgacaatgttggagattgtgcaggtatggcggctgatctttttgaaacttatgctgtcactattgttgctacaatggtactttcgtctattttcttcgtaaatgatttaaatatgatgatctatcctttggctattggtggggcttgcatattaacttctattcttggaactttttttgttactctaggtagtgataaaaatattatgaaagctatgtataaaggttttgtaataacggcaattagttctttagttatattatttccaattacaaaacatgttataggttttaccacagaatatgtggcaaatggaaagtcatttaatggtttaggtctttatttttgtggaattataggtttaataattacaggtttaataatttggattacagaatattatacagggactgactacagacctgtaaaaa

SEQ ID NO: 267137 - DNA, 826 bp, Unknown
  Bacterial polypeptide expressing nucleotide sequence isolated from the Sargasso Sea
aatgggggccctttacaaaggtgtcattatctctggactgcttgctgccatcgctttctatccaataaccgggatgatgggaatgagtatgggtcttttctggtctgcaatcattggtcttgcattgactgcttttatggtaatcgtaacagaatattatacgagcacagaatataaccctgtaaagaaaatagcagaagcatcagagactggtcatgcaacgaatatcatagcgggattgggtgtttcaatgaaggccactgcacttcctgtactggctgtttgcttgagtatttggggcgcttatatgcttggcggtctctatggaatagcgattgctgcgacatcaatgctctctctaacaggaatgattgttgcattggatgcatttggtcctattacagataatgctggggggattgcagagatggcagaacttccacctgaaatcagagggattactgatcctttggatgctgtaggtaatacaacaaaagctgtcacaaaaggttatgcaattggatcagcaggactagctgcattggtcttatttgcagatttcacagcaaatctagaggctgaaggaaaaatggttcaattcatgctgaatgatcctgcggtaataatcggattattcataggtggaatggttccatatcttttcgctgccctcgcaatggaagcagtcgaacgagctgcaacctcagtagtagaagaagttgaaagacaatttgaggaacctggaatcatggaaggaacagtaaagccagattattcaaaagctgtcgatttgcttaccaagtccgcgattaaggaaatgatagtt

SEQ ID NO: 267138 - DNA, 483 bp, Unknown
  Bacterial polypeptide expressing nucleotide sequence isolated from the Sargasso Sea
ctgcctttgagatgattgaagaagtaagaaggcaattcagagaaatcgaaggattattagatggaaaagctgaagcggatttcgcaaggtgtgttgatatttcaactcaagctgcaattaaaagaatggtcgccccaggactattagctgtttcaactcctgtaatattcgccgttattttaccagctacaggtttagtaagtgataatgatggaatgcaaatgttagctggtgtcttagctggtgttactgtatgtggtgtcctcatggctatattcatgtctaatgcaggtggagcatgggataatgccaagaaacacattgaaggtggagctcacggtggtaaaggatctgatgctcacaaagctgctgttgttggagatactgtaggagatcctttcaaggatactgctggacctagcttaaacattttgattaagttaatgtctgtagttagcctagttttggcaggaatgctctgaa

SEQ ID NO: 267139 - DNA, 795 bp, Unknown
  Bacterial polypeptide expressing nucleotide sequence isolated from the Sargasso Sea
catgttagttgcaggttttgctttgttatcaattgcactttattattttgtcttagacaattcaggtttatttcctggaagagaaattgttgctccattagtatcattaggttttggagcatcactaatctcgatatttgctagattaggtggtggtatatttacaaaaggggctgatgttggcgctgatcttgttggtaaagttgaagctggtattcctgaagatgatccaagaaatccagcagtaatagcagataacgttggtgataacgttggtgattgtgcaggtatggctgcagatttatttgaaacttatgtagtaactgtagttgcaacgatggttctttcttctatttttttctctgatctatcttcgatgatgatgtatcctcttgctattgcaggtgtctgcacgttagcaagtattattggaacttattttgttaagttaggtaaaagtgaaaatataatggctgctctttataagggttttgcagtatctgcaattttatctgcaatattactttatttcattacagatcatgtaattggtttaggttctgtatttactgtagatgataaatccttttccggtatgtctcttttttactgtgggttgttaggtttaattattactggtttaattatatgggtcactgaatattacacaggaacaaattatagacctgttcaaagtatagctcaagcatctactactggtcatggtacaaatgtaattcaaggacttgctattagtttggaagctactgctttgcctgctattataattgttgc

SEQ ID NO: 267140 - DNA, 625 bp, Unknown
  Bacterial polypeptide expressing nucleotide sequence isolated from the Sargasso Sea
tttctctaaagtatcaggatcagctttagaaggtattgatgttagttttgatttatctaatccatttgtagtcataggattattaattggcggcatgttaccttatttattcggttcaatgggaatgcaagctgttggaagagcaggaggagctgtcgttatagaggtaagaagacaatttaaaaaaattcctggaataatgaaaggaaaaagaaaaccagattacggtagattagttgatttgttgacaaaggctgcgattaaagaaatgattataccatctttattacctgtgctttcaccaataattttatatttagtcatctattctattggcggtttagaagcagctttatcttcggttggagcaatgcttttaggagttattgttacaggtctttttgttgcaatatcaatgacagcgggtggtggagcttgggataatgctaaaaaatttatagaagatggaaattatggtggaaaaggatcagagtcgcacaaggcagctgtgactggagacacagttggcgatccatacaaagataccgctggcccagcagtaaacccaatgataaaaattactaatattgttgccttactattattagctgtaatttctcattaa

SEQ ID NO: 267141 - DNA, 920 bp, Unknown
  Bacterial polypeptide expressing nucleotide sequence isolated from the Sargasso Sea
ttttattttagttataattacatttgctttaggtttttgggtgggacttggcttctttatcgggtcttttttatcaggtgttgctggttatgttgggatgctagtatcagtacaagctaacgtaaggactgctgaagcttcaaaaaaaggcttagccgcaggtttaaatattggttttaaatcaggagctgtaactggaatgctagtagctggattagcattattgtctatagctgtttattacttaatattaattaaaattaatgtagatgacagagaaataataaatgctttagttggtttaggttttggagcttctttaatttctatttttgcaagattaggtggaggtatatttactaaaggtgctgatgtaggtgctgatttagttggaaaagttgaagctggtatacccgaagatgacccaagaaatcctgcagtaattgctgataatgttggagacaatgtaggagactgtgcaggaatggcggctgatctatttgaaacctatgctgttacaattgttgctacaatggttttatcatcaatattttttactaatgatttaaatatgatgatttatccattatcaattggggcttcctgtattataacatccatagctggaactttttttgtaagactgggaaaaagtaaaaatataatgggagccttatataaaggttttatagccactgctattttttcaatattaatattatatccagttacagataaaattattggtttaaataatatttattcttcttctaatgctcagttcagtggctttgatttatacttgtgtggaattgtaggtttgataattaccggattaatcatttgggttactgaatattatacaggaacgaaatttagacctgttataagtgtagcaaactcttcaacaactggtcatg

SEQ ID NO: 267142 - DNA, 940 bp, Unknown
  Bacterial polypeptide expressing nucleotide sequence isolated from the Sargasso Sea
tttatattttcatgtttagcaggaataatagctatattgtatggatttattactgcaagaaaaatcataaatatgcctgctggaacaactaaaatgcaagaaatatcaaacgctattcaagtaggtgcttctgcatatttgaaaaggcaatattttacgattgcaatagttggtgcttgtatatttattataataggttttttcctggatatatatgtagcaattggttttcttattggagccatattatcaggtgtggcaggatttataggtatgcatatttctgttagggcaaatgtaagaactacagaagcggcaaaaaaaggacttaacgaaggtttaggagtggcatttaaatcaggagctgttacaggcatgttagtagcaggtctcgccttattatcaatttgtttgacctattatttcttaattagtataggcgcagaaggaagagaactaattgatccgttagtagcattaggttttggtgcttcattaatttctatatttgctagattgggaggaggaatatttactaaaggagcggatgtaggcgctgatttagtgggtaaagttgaagcaggaattccagaggatgatccaagaaaccctgcagttattgccgataatgtgggagataatgtaggggattgtgcgggtatggcagcagatttatttgaaacgtatgctgtaacggttgtggctaccatggttctagcttcaatattttttactggaagttttgaaactatgcttatgaaccttcctttagccataggtgggatatgcataatttcttcaataattggaaccttttttgtaaagctatcaaagaatggaacagttatgggagcgctttataaaggttttattgtttcagctattttatcgataataggaatttatttaattattgattattttatgggaatgaatacat

SEQ ID NO: 267143 - DNA, 885 bp, Unknown
  Bacterial polypeptide expressing nucleotide sequence isolated from the Sargasso Sea
tcaactacaggtcatggaactaatgtcattcaaggtttagcaattagtttagaggcaacagctttacctgctattattattattgcaggtatcattataacctattctttagctggtttatttggcattgctatagctgtaacaacaatgcttgcacttgcaggaatggtagtagctttagatgcctatggacctgttactgataatgctggtggaatagctgaaatgtctaatcttgatgaaagtgtaagaaaaactacagatgcactagatgctgttggtaataccactaaagcagtaaccaagggttatgctattggctctgcaggattaggagcacttgtcttatttgctgcttatactgaagatgtatctcattatggtcttgaaatttcttttgacttatcaaacccatatgtagttgtaggtcttttactaggaggactattaccttatttattcggtgcgatgagtatgacagctgttggcagagctgcaggctctgttgttgaagaagttagacgacagtttaaagaaataccagggattatggaaggtaaaggcaaacccgaatatggaacgtgtgttgatattttaaccaaagctgcaattaaagaaatgattataccttcaatgttaccggtattgtcacctattattgtttattttgttattttactaattgcaggtcaatctgctgcattagcgtgcttaggtgctcttttgttaggagtcattataaccggtttatttgtagcaattagtatgactgccggtggtggagcctgggataatgcaaaaaaatatattgaagatggaaattttggaggtaaaggtagtgaagcacataaggcagctgttactggagatacagtaggagatcca

SEQ ID NO: 267144 - DNA, 886 bp, Unknown
  Bacterial polypeptide expressing nucleotide sequence isolated from the Sargasso Sea
gtagcaggtatcttagtaaccaattccattgcaggtcttttcggaattgctattgcagtcactacaatgttagctttagcaggaatggttgttgctttagacgcatacggtcctgtaacagataatgctggtggtatagctgaaatgtcaaatttagataaaaaagttagaaaaacaactgatgctctagacgctgttggtaatacaactaaagcagtcactaaaggatatgcaattggttcagctggcttgggtgcattagttttatttgcagcttatactgaggatattaaacatttctcaaaagaggcaggatcagctttagaaggtattgtggttacttttgatttatcaaatccctatgtcgttgtgggattactaattggtggaatgttaccctatttatttggttcaatgggaatgcaagcagttggaagagcagggggtgctgttgttgtcgaagtaagaagacaatttaaaaaatatcctggtattatgaagaggaagcaaaaaccagattacgctaagttagttgacttattaacagttgcagcgattaaagaaatgatcattccttcattattacctgtgctttcgcctgtagtattatattttataattctttctataggtggtcaagttgctgcacttgcgtctgttggagctatgttgttaggagttataataactggactttttgttgcagtttcaatgacagctggtggaggcgcatgggacaacgcaaaaaaatatatagaagacggcaatcatggtggtaaagggtctgaagctcacaaagcagccgtaacaggtgatactgtcggtgacccatataaggatacagcaggtccagcagttaaccctatgattaaattacaaatatagt

SEQ ID NO: 267145 - DNA, 745 bp, Unknown
  Bacterial polypeptide expressing nucleotide sequence isolated from the Sargasso Sea
gcaactgcagtaccagcgttaattatagttggtggtatcctattaactaattacatcgcaggattatttggtatagcaattgcagttacaacaatgttagccttggctggtatggtagttgctcttgatgcctacggtccagtcactgataacgcaggtggtattgctgaaatgtcaaatttaccgaaaaatgtaagaaaaactacagatgcattagatgctgtaggaaataccacaaaggctgtaactaaaggttatgcaattggatcagcaggtttaggtgctttggttctatttgctgcatatactgaagatataaaacatttttcaaaagttgctggatcaaaactcgagggtatcgttgttacttttgatttatctaatccatttgtagttgtcggattattagttggcggtatgcttccttatctttttggctcaatgggcatgcaagctgtaggaagagcaggtggagcagtggttgttgaagttagaagacaatttaaaaaaattccaggtataatgaaaagaaaatcaaaaccagattacggtaaattggttgatttacttactaaagcagcaattaaagagatgatagttccatctttattgccagttttatcaccaatagttttgtatttattaattttacctattggaggacaagttgctgcattatcttcagttggcgctatgttgttaggtgtgattatcacaggtttatttgttgcaatttcaatgacag

SEQ ID NO: 267146 - DNA, 888 bp, Unknown
  Bacterial polypeptide expressing nucleotide sequence isolated from the Sargasso Sea
ggccgttctctctggcgccgcagggtatatcggtatgaacgtctcggtgcgggcgaacgtccgaaccgctgaggccgctcggtctaaaggtctcgctgaaggcttaaacgtggcatttaagtccggcgcgatcacgggcatgctggtggccggtttggcacttcttggcgtcgtcgtatattggcttgtgttgcgtgacgtgctggacgtaaagacgcccgacggtctgcgacacgcactcgttgcccttgttgcgctggggtttggcgcttcattaatctcgatatttgcacgtttggggggtggcatttttactaaaggagcagacgttggctccgatctagtcggtaaaattgaagcgggcattccggaggacgatcccagaaacgctggcgtaatcgctgataacgtgggcgacaatgtaggcgactgcgccggcatggccgccgacttgtttgaaacttacgcggttacggtggtagccacaatgcttctgggtgcagcatttttctccggcacagaccgcgatgcgatgatgatgttcccgcttctaattggcgcagtttgcattgtcggatctgtgatagctacgttttttgtcaaattagggccaagccagagcatcatgggggctctctacaaaggatttttcgcgagcgccatcgtctccgccgttctgattgcgggtgtcatcgcctggcaatttggctttgagtcaacatttaaagccagcggtagggatatatccggtatggaccttttcgtgtctgctatggtgggactggtagtgacggctctaatcgtttggattaccgagtactacacgggcacgaactatcgccctgttaagagtgtagcaaaagcctctgagacggggcatgccaccaa

SEQ ID NO: 267147 - DNA, 358 bp, Unknown
  Bacterial polypeptide expressing nucleotide sequence isolated from the Sargasso Sea
tatcaaccacacccctgtctctggacggcgaccccggttgacgtactggtcccgacgccgtacccgctggagccaggctctgtgatccgctgccgtccggttggcgtactgaagatgaccgacgaatccggtgaagatgcgaaactggttgccgtaccgcacaccaagctgagcaaagagtacgatcacatcaaagatgtgaacgacctgccggaactgctgaaagcacagatcacccacttcttcgagcactacaaagacctggaaaaaggcaaatgggtgaaagttgacggttgggacaatgctgaagcggctaaagctgaaatcattgcttccttcgagcgcgctaagaagtaat

SEQ ID NO: 267148 - DNA, 787 bp, Unknown
  Bacterial polypeptide expressing nucleotide sequence isolated from the Sargasso Sea
tttcttaagtaaacagatcatgtcttctagtcccggcaataataaaatgcaagagattgctgaggcgatacaaattggagctaaagcttatttaaatagacaatataaaactatagctattgttggagtaatagtattggttattataagttatttttttagtttactggttgggcttggttattttataggtgccttattatcaggggcagctggatatattggaatgttaatttccgtggaagctaatgtaagaacagcagaggcttcaagaacaagtttacaaaatggtttaacaatggcttttaaatctggtgcaattacaggtcttttagttgccggtttagcattattagcaatttcaatttattattgggtattaataactttaaatatagaaagcagggaattaataaatgctttaatagcattaggttttggtgcttcgttaatatcaatttttgctagacttggtggaggaatttttactaaaggtgctgatgttggagcagaccttgttggaaaggtagaagcaggaattccagaagatgatccaaggaaccctgcggttatagctgataatgttggtgataacgttggagactgcgccggtatggctgcagatttgttcgaaacatatgcggtaaccattgttgcaacaatggttcttgcctcaatcttttttcaagataattcaagcatgatgatttatccactggcaataggaggtggatgtataatagcttctataataggaactttttttgtcagacttggtaaaagtaaa

SEQ ID NO: 267149 - DNA, 562 bp, Unknown
  Bacterial polypeptide expressing nucleotide sequence isolated from the Sargasso Sea
atgaataattttttagaattactttatctaatttcttttactggaattattgcagtcgcatatagttatttactctctgggcaaatactagcagcaaatccaggcaacagtcgtatgcaagaaattgctgaagcaatacaaattggagcaaaagcttacttaaatagacaatacaaaacaatagcagttgttggtgttattgttttggccatagtaacatatttttttaattaccttgttggtttaggatatttcattggtgcatttttatcaggagtagctggttatgtaggtatgttaatatcagtaaaagctaatgtaagaactgccgaggcatcaagacaaagtttacagtcaggtttgacaatagcttttaaatctggtgctattaccggactcttggtggctggcttagctcttttagctataacaatttattatattattttaataaatttaaacactgatagccgagaaattatcaatgctctagtagccttaggctttggagcatcattaatatcaatatttgctcgattaggtggtggaatttttaccaagg

SEQ ID NO: 267150 - DNA, 424 bp, Unknown
  Bacterial polypeptide expressing nucleotide sequence isolated from the Sargasso Sea
gaagcgtaaacagaaacctgactatgcaaaattagtggatttatttacagttgctgcaattaaggaaatgataattccttccttattacctgtactatcacctgttgttctttattttgtcattttatcaatcggaggacaagttgcagcgttagcatcagttggtgctatgttgctaggtgttattatcacaggcttattcgtagctgtatcaatgactgctggtggtggagcttgggataatgctaaaaaatttatcgaagatggaaatcatggtggaaaaggatcagaagcacataaagctgctgtgacaggcgatactgttggagacccctacaaagatacagctggccctgcagtaaacccgatgattaaaattacaaatatagttgcattattacttttagcagtaatagctggataa

SEQ ID NO: 267151 - DNA, 793 bp, Unknown
  Bacterial polypeptide expressing nucleotide sequence isolated from the Sargasso Sea
ggcggaggaatttttacaaaaagtgctgatgttggagctgatctcgttggtaagattgaagctggtattcctgaagatgatccaagaaatccaggcgttattgcggataatgttggtgataatgttggtgatgttgctggaatgggctcagatatatttgagtcatattgcggctctatgattgcatcaatagcaatagcttatacgcttggaaaccaggatatgatgatgcttccactggctttagctgcgactggcttaatagcttcaataatcggaatatttatagttaagcttcagtcagcaaaagcacctgcaagtgcattgagatctggaactcttttagcgccagtaatatttgtggctatggcatatttcataattaattcttttgacggagttggaatgaatgtatggtggtgtgttattgctggagctgttggcggtgtattgattggacttattacagaatattacacaggtggaggcccggtaaagaaaattgctgaatcaggagaaactggttctgcaactgtaatgatttcaggtttatcagtaggaatgcaatcagttgtgatacctattgttattctagcaggcatcatccttgcttcaactcaactatcgggcatttatggtgtaggaattgctgctgttggtatgcttgctactgttggaataactatggcaatagatgcatatggaccggttgctgacaatgctggcggcatagctgaaatgtcaggtatgggtgaggaagtaagagaaattacagactctcttgatgaattag

SEQ ID NO: 267152 - DNA, 929 bp, Unknown
  Bacterial polypeptide expressing nucleotide sequence isolated from the Sargasso Sea
tattatgggtcttggcgtagcttctctaggtttaataggactaggttctctttactacattttgagtggaaacgcccattcaattgaaggatttgctatgggagcttctatagttgctttattttcaagagttggtggtgggatctatacaaaaagtgcggatgtaggagctgacttagttggtaaagtagaagcgggcatacctgaagatgatccaagaaatcccggagttattgcagataatgtgggtgataacgtaggtgacattgctggaatgggatctgatatctttgaatcttattgcggctctatggttgcatgtatagctatagcttcaacactcacaatattagacagagaaggcatgatgtttttgccattagctcttgcatcgataggactaatttcctctgttctaggcatcatcattgtaaggttgttctctagctcttctcctgctttagccatgaggattggtacaattggggcacctattatttttgtaatagcagcttattttgtaattaatctcctggtgcaagagacaggaacaaatatttggttagcagtggtatgtggttcagcaggagggatagcaatagggctaattactgagtactacactggatccacacctatagtaaaaattgcagagtcaggtcagacaggaccagcaacagtaatgatcacaggattatcggtaggaatgcaatctgtagtggctccaatagcttgtttagctttaatcattttcatttctacacaacttactggactatatggagttgggattgcagctgtaggtatgttgtcaacagtagggataactatggctatagatgcttatgggcctgtagctgacaatgcaggtggaattgcagaaatggctggtatgccatctgaaacaagagaaatcactgagaactaga

SEQ ID NO: 267153 - DNA, 900 bp, Unknown
  Bacterial polypeptide expressing nucleotide sequence isolated from the Sargasso Sea
aatacctgaagatgatcccagaaatcctgcagtaatagctgacaacgttggtgataatgttggtgattgcgcaggtatggctgcagatctttttgaaacttatgttgtaacagtagttgcaactatggttctctcttctatatttttttctgatttatcatcaatgatgatgtatcctcttgcaattgctggagtttgcactttagctagtattattggaacttattttgttaaattgggtaaaagtaacaatattatggctgcattatacaaaggttttgctgtatcagctattttatctgcaatacttttatactttatcaccgatcatgtaattggattaagttcagtattttctgttgaagaaaaaacttttactggaatgtcacttttttattgtggactattaggattaattattactggtttaattatttgggttactgaatattatacaggcactaattatagacccgttcagagcatagcacaggcttctacaacagggcatggaacaaatgttattcaaggacttgctgtcagtttagaggccactgcattaccagcaatcataattgttgcaggaataataataacacattctttagcaggtttatttggtattgctattgctgttactacgatgcttgccttagctggtatggtagttgcacttgatgcctatggaccagttactgataatgctgggggaatagctgagatgtcagagttagatgacaatgtcagaaaaactacagacgctcttgatgctgttggcaatactacaaaagctgtcactaaaggttatgcaattggttctgctggcttaggagctttagttttatttgcagcttacactgaagatttagagcattttgctaaagatcctggaagctcatt

SEQ ID NO: 267154 - DNA, 766 bp, Unknown
  Bacterial polypeptide expressing nucleotide sequence isolated from the Sargasso Sea
gatgctttttggaccaataacagataatgctggtggcatcgcagagatgtctgaacttccctccgaagttcgaaatatcaccgatcaattagatgctgtaggcaacactacaaaagcagttacaaaaggatatgccattggatctgcaggtctagctgcacttgtgttgttcgctgattacaccaatgcgctggagacaaataacatattggtatcatttgatttatcggaccatctcgtaattattggtttattcctcggtggtttggttccttttatctttggttcaatggctatggaggcagttggaagagcggcaagttctgttgttactgaggtaaggagacaattcaaggacatgccaggtatcatggaaggcactgagaaaccagaatacgataaagctgtagatctattgactaaagcggctatcaaagaaatggttgtgccatccttattaccgattttagttccaattgctgtaggcttgattctcggtccagaggcattaggtggagtgcttcttggaagtattcttacaggtttatttgttgcaatctcaatgacaactggaggtggagcttgggataatgccaagaaatacgttgaggacggaaactgtggaggtaaaggatcagatgctcataaagccgctgtaacaggtgataccgttggtgatccatacaaagacacggcaggtcctgctattaatccactgattaaaataattaacatagtggcattattaattgttccgctgatgtaa

SEQ ID NO: 267155 - DNA, 874 bp, Unknown
  Bacterial polypeptide expressing nucleotide sequence isolated from the Sargasso Sea
attattagctacgcatttagtattttagttggcttaggatatttgattggagctacgttgtctggaattgctggatatgttggcatgcttgtatctgtccaagcaaatgtaagaacagcagaagcttcaaaaaaaggattgtcacaaggactttcaatagcatttaaatctggtgctgttacaggaatgctggtagctggtttagcacttttagctattgcagtttactattatttattgttgtcttttaacattgaagaaagagaaatagttaatgcattagtagcgcttggatttggtgcttcactaatttcaattttcgctagactaggtggaggaatttttacaaaaggtgctgatgttggtgctgacctagttggtaaagtagaggcaggtattccagaagatgatcctagaaatcctgctgtaatagcagacaatgttggtgataatgtaggtgattgtgcaggcatggctgctgacttatttgaaacttacgcagttacaatagttgctacgatggttttatcatcaatattttttcacggtgatcttaatatgatgatttatcctttatctattggtggagcttgtatattaacatcaattattggaactttctttgttaaattagggaaatctaaaaatatcatgacagcattgtataaaggttttgttgtaacagctgtaacatccgtaataattttatatccagttacagattatgttttaggtttagataatgtttatacggtttcagataaaacattttcaggattaaacttattcatgtgtggagttattggattagttattactggtttaattatttgggatacggaatattatacaggaactaattatagaccagtaa

SEQ ID NO: 267156 - DNA, 800 bp, Unknown
  Bacterial polypeptide expressing nucleotide sequence isolated from the Sargasso Sea
aattttatctttagtagtattatatcctgttacagattatgtgattggtttagatgccagttatagctttggcgatactacatttacaggaatgagcttatattattgtggtgtagtaggtttaattataactggattgctaatatggattactgaatattacacaggtacagattatcgtcccgttaaaaccgtggctgcatcttcaacaacgggtcatggtacaaatgttattcagggtttagctatttctatggaggcaacagctataccagcattaatcattgttgcgggtatattgataacaaatgcgattgctggtttatttggaattgcaattgctgttacaacaatgcttgcgctagcaggtatggtcgtagcacttgatgcatatggacctgtaacagacaacgcaggtggaattgctgaaatgtctaatcttccaaaaaatgttagaaaaacaactgatgcattagatgcagtaggaaatacaacaaaagccgtgactaaaggatatgctataggatctgctggtttaggtgctttagttttatttgctgcgtacacagaggatattaagtatttttcaaaagaagctggttcaaaactagaaggaatagttgtttcttttgatttatcaaatccatttgtagttgtgggtttattaattggtggaatgcttccatatttatttggatcaatgggaatgcaagcagttggtagagcaggtggcgctgtcgtagttgaagttagaagacaatttaaaaaaattcctggaataatgaaacgtaaggcaaaac

SEQ ID NO: 267157 - DNA, 748 bp, Unknown
  Bacterial polypeptide expressing nucleotide sequence isolated from the Sargasso Sea
tcaggtgctgtaacaggtatgcttgttgctggcttagcattattgtcaatagctgtttattactttctattattaaaattaaatgttgatgaaagagaaattgttaattctcttgttgcactaggttttggtgcttctttaatttcaatttttgcaagattaggtggtggaattttcacaaaaggtgctgacgtaggtgctgatttagttggaaaagttgaggccggaataccggaggatgatccaagaaacccagcagttattgctgataacgttggagacaatgtaggtgattgtgcgggaatggctgctgatctatttgaaacttatgcagtgactatagttgctacgatggttttatcttctatcttttttgttggagatttaaacatgatgatttatcctttaagcattggtggtgcatgcatactaacttcaattcttggcaccttttttgtaaaacttggtagagataaaaatgtgatgaatgctttatacaaaggtttcattgtatctgcagtagcatcattagtaattttatggcctgtgacagattatgtaatagggtttgcaaaagaatatacagtaaatggtaaaacttttaatggtttgaacttgtactattgtggtgttgtaggtttagttattacaggattattaatttggataactgaatattatacaggtactaattatagaccagttaaatccgttgctctatcttcaactactggacatggaacaaacg

SEQ ID NO: 267158 - DNA, 280 bp, Unknown
  Bacterial polypeptide expressing nucleotide sequence isolated from the Sargasso Sea
tgcagcattatcatcagtaggtgcaatgttattaggtgtaattataacacgcttattcgttgctgtttcaatgactgctggtggtggagcatgggataatgcaaagaaatatatagaggatggaaaatttggtggaaaaggatcagaagcacacaaagcagcggtaacaggagatactgttggagacccttataaagacaccgcgggaccagctgttaatccaatgataaaaattacaaatattgttgcattactccttttagctgtaattgctggataa

SEQ ID NO: 267159 - DNA, 820 bp, Unknown
  Bacterial polypeptide expressing nucleotide sequence isolated from the Sargasso Sea
ataggtattttggcagttgcatatagctatctactttctggtcaaattatttcttcaagcgcaggaaactctagaatgcaagaaattgctgaagcgattcaaataggcgctaaagcttatctaaatcgacagtacaaaactatcgctgttgttggagtaattgtattaggaattgtaagttatttttttagttttttagttgggttaggatattttattggagcctttctatcaggtgtagcaggttatgttggaatgttaatatctgtaaaagcaaatgtaagaacagctgaggcatcaaggcaaagtttacaagcaggccttacgattgcttttaaatctggcgcaattactggtttgttagtcgctggattagctctactggctataacaatttattatataattttaattagttttaatgttgaaaacagagaaattattaatgctttagttgcgcttggttttggtgcctctttgatttcaatttttgcaagacttggtggtggtatatttacgaaaggtgctgatgttggtgctgacttagttggaaaagttgaagctggaattcctgaggatgaccctagaaatccagcagttatagcagataatgtaggagataatgttggcgattgtgcaggtatggcagcagatttatttgagacttatgcagtaacaatagtagctactatggttttagcctcaatattttctcctcaagattataatttaatgatttatcccttagctattggaggtgcttgcatattaacttctataattggaacatggtttgttaaattgggtaaaaataaaaata

SEQ ID NO: 267160 - DNA, 861 bp, Unknown
  Bacterial polypeptide expressing nucleotide sequence isolated from the Sargasso Sea
cgacaatgctagcgttagctggtatggtagttgccttagacgcatatggtccagttactgataatgctggaggtattgcagaaatgtcaaaacttccaaataatgtgaggaaaacaaccgatgcattagacgctgtaggaaatacaactaaagcagttacaaaaggctatgcgattggttctgcaggcttaggtgcacttgttctttttgcagcctacacagaggacataaagcatttttcaaaagaagctggatcaaaacttgaaggaatagttgttacttttgatttatcaaatccttatgttgtagtaggtttgttaattggtggaatgctaccatatttattcggttctatgggaatgcaagctgtaggaagagctggaggatctgttgttatagaagttagacgccagtttaagaaatttcccggtattatgaaaagaacacaaaaaccagactatgcaaaattagtagatttacttaccgttgcagcgataaaagaaatgatcataccatcgttacttcctgttttatcacctatagtcctctattttattatttttgcaattggaggacaagtagcagccttagcatcagttggtgcaatgttacttggagttattattacaggattatttgttgcagtatccatgacagctggtggaggcgcatgggataatgcaaaaaaatatattgaggatggaaactttggtggaaaaggatctgaggcgcataaggcagctgttactggtgatacggtgggtgacccatataaagatacagctggtccagctgttaatccaatgattaaaattacgaatatagttgctttattattacttgcagtgattgcatcttaat

SEQ ID NO: 267161 - DNA, 838 bp, Unknown
  Bacterial polypeptide expressing nucleotide sequence isolated from the Sargasso Sea
ctatttggaattgctatagctgttacaacaatgcttgcgttagctggaatggtagttgctttggatgcatatggaccagttactgataatgctggtggtatagctgaaatgtctgaacttgatgataaagtaagaaagacaacagatgcgcttgatgctgttgggaatacaactaaagctgttacaaagggttatgcaattggctctgcaggattaggggcattagttttattcgctgcttatactgaagatgtatctcattatggtctagaagtttcttttgatttatcaaatccgtatgtagttgtgggacttttattaggaggtctattaccttacttatttggagctatgagtatgactgctgtaggaagagcagcaggagcagtagttgaagaagtaaggagacaatttaaggaaatccctggcatcatggaaggtaaaggaaagcccgaatatggcaaatgtgtagatatattgactaaggcagctataaaagaaatgataatcccatccatgctaccagtattatctcctataatcgtttattatattattttatttattgcaggacaaacagctgcattagcttgtttaggcgctcttctattaggagttattattacaggtttatttgttgctataagcatgactgctggtggaggagcttgggataatgcaaagaaatatatagaagatggcaatcacggaggcaaaggaagcgaggctcataaagcagcagtaacaggagatacagttggcgatccttataaagatactgccggacctgctgttaatccaatgattaaaattactaatatagttgcattattgctac

SEQ ID NO: 267162 - DNA, 257 bp, Unknown
  Bacterial polypeptide expressing nucleotide sequence isolated from the Sargasso Sea
gatcgtcaacgggctgttcgtcgcgatctcgatgacgtcgggcggcggcgcgtgggacaacgccaagaagagttttgaggacggcttcgtcgatgccgatggcgtcacccacgaaaagggctcggaagcgcacaaggcgtccgtcaccggcgataccgtcggagatccttacaaggacaccgccggccccgccgtcaacccggccatcaagatcaccaacatcatggcgctgctgctgctggcggtgttggcgtagg

SEQ ID NO: 267163 - DNA, 834 bp, Unknown
  Bacterial polypeptide expressing nucleotide sequence isolated from the Sargasso Sea
cagcgaactaactatttatccattattaatcgctggatcaagtatactagcatctattattggctcaaagtttgtatcaatttccactccaaaatcttcaattatgggagcattgtacaaagggtttttcatgacgttatttatttctgtaattttatttgcacttatcactcaatattcaattggctttgatcaatttttccaattaggaaataaatggtacaacggaatggatttatttctttgtgcggtttacggattaataattacattggcgcttgtttttataacagagtattacactagcactgagtatagacctgtgaaaagtgttgctgaagcatctcaaactgggcatgcaactaatattattcaaggactagcaatggggatggagtctacagcaatacctgttctaattatttgtgctggaataggtctaactttttcaaccgctggactttttggtattgcaatcgcagttacttcaatgttggctcttgctggaatggtagttgctttagatgcatacggaccagtaacagataacgcaggcggtattgctgaaatgtcaggtttgaacaaaagagttagagaaagaacagatgccttagatgctgttggaaatactactaaagccgttactaaaggttacgctattggatcggctggattgggtgcattagttttatttgccgcatataccgaagacctaaaattctttaatcaagaaactggaaacaatgctttcaacgtatcttttgatttatcagaaccttacgtgataatcggattacttttaggtgggttattacctttcttgtttagcgctct

SEQ ID NO: 267164 - DNA, 604 bp, Unknown
  Bacterial polypeptide expressing nucleotide sequence isolated from the Sargasso Sea
caatgtaggtgataatgttggtgattgcgctgggatggccgctgatttattcgaaacatatgcagtaacaatagttgctactatggttttatcttcaatattttttcatggagatcttaatatgatggtttatcctttatccattggaggagcttgtattttgacttctattcttggaacatattttgttaaattgggaaaatctaaaaatattatggctgctttatataaaggttttattgctacagctatcacatcactaataattctatatccaattacagattatgttttgggattagaaaataattattcagtagctaataaatcattttctggaatgagtttatacatttgcggagtcataggattagttattactggtttattaatttgggtaacagaatattacactggaactaattatagacctgttaaaagtgttgcatcttcatcaactactggtcatggaactaatgtaattcaaggtttagcagtttcaatggaagctactgcaattccagccttaattattgttggtggaatattattaacaaatcacattgcaggactttatggcatagcaattgctgtaacaacaatg

SEQ ID NO: 267165 - DNA, 685 bp, Unknown
  Bacterial polypeptide expressing nucleotide sequence isolated from the Sargasso Sea
tggttccgcagggttaggcgctctagttcttttcgcagcttatacagaagatattaaacatttttcaaaagaagctggatctaaattagagggaattgttgtaacgtttgatttatccaatccatatgtagtcgtaggtttgttaataggtggtatgttaccatatttatttggttcgatgggaatgcaagctgttggaagagcaggtggggctgttgttatagaagttagaagacaatttaaaaaatttccaggcatcatgaaaagaaaacaaaaacctgactatgctaggcttgttgatctgttaactgttgcagcaattaaagaaatgataataccttctttgttaccagtattatctccaatagttttatattttataatttttgctattggtggacaagttgctgcattagcatcagtaggtgcaatgttacttggtgtaatcatcacaggattatttgttgctgtatcaatgacagctggaggtggtgcatgggataatgctaaaaaatacattgaagatggaaattatggtggtaaaggctcagaagctcataaagctgcagtaacaggcgacactgttggagatccttacaaagatactgctggtcctgctgtaaacccgatgataaaaataactaatatagttgcattactcttacttgctgtaattgctggataa

SEQ ID NO: 267166 - DNA, 832 bp, Unknown
  Bacterial polypeptide expressing nucleotide sequence isolated from the Sargasso Sea
gcttcggctgcacttactgcgcttgccctttttgcagcatacgtcacatttacaggtatagatggaatcaatatttttaaagctgacgtacttgctgcactttttattgggggaatgattccagttatcttttctgcattagcaatggaatcagttggaaaggcagcaatgaaaatggttcaagaggtcaggagacagtttaaagaaataccaggaattttagagggaaaatccaaacctgattatgaaaagtgtgttgaaatatcaactaatgctgctcttaaagaaatgctactacctggtgtactaactattgtaacacctgtaataatcggttttttaatgggtccagagtcattgggaagttatatggcaggtgttgctgtttctggtgttttgtgggccattttccaaaacaacgctggaggtgcttgggacaatgcaaaaaaatcttttgaagcaggagttgaaataaatggtaaaatagaaaaaaagggctcagatgcacacaaagcagccgtgactggtgatactgttggcgatccgttcaaggatacatccggtccctcaatgaatattttaattaaactcacttgtttagtaggattggtcatcgctccaattttaggagatcacggaagtgacatgtcggcattcaatgattatgataatattaataaaagtgtcattcttgaactaaatgaagaaaacccagatgaaagtacattagttattacaactaaatctaatcttaatggggtaatagttgaggatactgaaaaatgttatggttcaaaggccgaacttcttttgaaagttgcccaaattagag

SEQ ID NO: 267167 - DNA, 478 bp, Unknown
  Bacterial polypeptide expressing nucleotide sequence isolated from the Sargasso Sea
cggagctgtagttatagaagtaagaagacagtttaaaaaaattccaggtataatgaaaagaaaaagaaagcctgattatggtcgattggtagatttactcactaaagcagcaataaaagaaatgatagtaccatctttactaccagttttatctccaattttactttatataataatattttttattggtggccttgaagcagccctttcagctttaggcgctatgcttctaggtgtgataattacaggtttgtttgtagcaatttcaatgacagctggtggtggagcttgggataatgcaaaaaaatatatcgaagatggaaaatttggtggcaaaggttccgaggcacacaaggctgccgtaacaggtgatacagtaggcgatccttataaagatactgccggaccagctataaatccaatgattaaaataacaaatattgtagctttactgttgttagcagtaatatcacattaa

SEQ ID NO: 267168 - DNA, 523 bp, Unknown
  Bacterial polypeptide expressing nucleotide sequence isolated from the Sargasso Sea
tatctatttgttccaatgggtatgcaagctgtaggaagagcagggggggctgtcgttatagaagtaagaagacaatttaaaaaaattcctggaataatgaagagaaaagctaaacctgattatggtaaacttgttgatttgctaactagagctgcaattaaagaaatggtcattccttctttattgccaattttatcacctatagttttatatatagtaatatattttataggtggacaagttgcagctttatcatctttaggagcaatgttgttaggggttattataacaggtttatttgtagctgtatcaatgactgctggcggtggtgcttgggataatgctaaaaaatatattgaagatggtaaatttggtggcaaaggttcagaggctcataaagcagctgtaacaggggatactgttggtgatccttataaagatacagcaggaccagctgtcaacccaatgataaagataacaaatattgtggcattgttattactagctgtaatagctgggtaaa

SEQ ID NO: 267169 - DNA, 763 bp, Unknown
  Bacterial polypeptide expressing nucleotide sequence isolated from the Sargasso Sea
aaaaatgttagaaagactacagatgcattggatgcagtcggtaatacaacgaaagcagttacaaaaggatacgctatagggtctgcaggattaggtgcactggtactatttgcagcttacactgaagatataaaatatttttcaaatgtaaaagaatcatctctagcaggtgttaatgttacgttcgacttatcgaatcctttcgttgtagcaggtttgttgattggaggaatgcttccttatttatttggttcaatgggcatgcaagctgttggtagagcaggcggatctgttgttattgaagttagaagacaatttaaaaaaatacctgggataatgaaaggtaaaagaaaacctgattacggacgtctagtagatttattaacaaaagcagcaattaaagaaatgattataccatctttattacctgttttgtcaccaattgtactttactttgttattttacaaattggaggcattgaagcagcgctatcatctttaggtgcaatgttgctaggtgttattatcacaggactttttgttgctgtatctatgactgctggtggcggtgcttgggataatgccaaaaaatatattgaagatggtaatttcggcggtaaaggatctgaagctcataaatcagcagtaacaggtgataccgtaggagatccatataaagatactgctggaccagcagttaacccaatgatcaaaataacaaacattgtagctttattactgttggcggtaatagcgcattagt

SEQ ID NO: 267170 - DNA, 823 bp, Unknown
  Bacterial polypeptide expressing nucleotide sequence isolated from the Sargasso Sea
atgaccgttttaacattaactatcgcatgtggcctatgtgcacttatttatggattttgggctagtcaacgtattatctcatctgatgcaggttcagacaaaatgcaagaaattgcaagtgcaattcaagaaggcgcagctgcttatttaaataggcagtatagcactattactgttgtagggattatagtagctgtaattttattttttacacttggcgcatatgttgccgtaggctttttgattggcgcaatactttcagggattgcaggttatataggaatgaatgtatctgttagggcaaatgttagaaccactcaagcagcaaaagaggggttagttcctgcattagacattgcatttaagtctggagcaatcactgggttattagttgttggtttgggcttgttgggagtggcaggttattattggtatttaagattttctgaaattgaattaagattaatgatagagtcattggttgctttgtcttttggtgcatcattaatttcaatctttgctagattgggagggggtatttttacaaaaggggcagatgttggcgctgacttggttggaaaagttgaagctggcatccctgaggatgatcctaggaaccctgcagtaattgctgataatgttggagacaatgttggggactgtgctggaatggcagctgacttatttgaaacttatgcagttacaattgttgcaaccatgttaattgcaacaataaccttttcaggaaaccttttattgccttctatagagttgacgttactaattgggggtgtctgtattattgcgtctattattggatctt

SEQ ID NO: 267171 - DNA, 580 bp, Unknown
  Bacterial polypeptide expressing nucleotide sequence isolated from the Sargasso Sea
tttgatttgtcgaacccttatgttgtggttggtttattaattggtggtatgttaccatacttatttggatcaatgggtatgcaggctgtgggtagagcaggtggtgctgtagttgttgaagttcgaagacagtttaaaaaatatccaggtataatgaaaaggaaacaaaaacctgattatgccaaattagtagatttattaacagtagcagcaataaaagaaatgattataccatcactattacccgttctttcacctgtggttctttactttataattcttgcaattggtggacaagttgcggctctagctgcagttggtgcaatgttacttggagtaattattactggactttttgttgctgtttctatgactgctggagggggagcatgggataatgcaaaaaaatatattgaggatggcaatcatggaggtaaaggatcagaggctcataaagctgcagtaactggtgatacagttggagatccatacaaggacacggctggaccagcagtcaacccaatgattaagataacaaatattgttgcattattattgttagctgtgattgctggttaaa

SEQ ID NO: 267172 - DNA, 676 bp, Unknown
  Bacterial polypeptide expressing nucleotide sequence isolated from the Sargasso Sea
aggctatgctattggatctgctggacttgcatctttagtgttatttggagcatacactcaagatttaaaatattacttcccaaatttggatgttaaattttcattggatgatccatatgttgttattggtttattaattggtgggatgctaccttatctatttgggtcaatgggaatgactgcggttggaaagactgcaaccaaaattgtcaatgaagttagaagacaatttaaagaaaataaagggataatgactggtagttcaaaacctgaatacggtaaagctgtagatatacttactaaagctgcgataatcgaaatgattattccgtcattgctacctgttttagcaccatttattacatattttatcatttattttatttcaggaactgaatctgcagcttttactgcattgggtgcaatgttacttggaactattgttaccggtttatttgttgccatttcaatgacttcgggtggaggagcctgggataacgctaaaaaatacatagaagatggaaacttcggaggaaaaaattctgatgcacataaagcggccatcacaggtgatacagttggtgacccttataaagatactgcagggcctgctattaaccctatgattaaaattataaatattgtttcgatacttctactatctatgctggcttaa

SEQ ID NO: 267173 - DNA, 649 bp, Unknown
  Bacterial polypeptide expressing nucleotide sequence isolated from the Sargasso Sea
tatggaagcatcagcatcaaatatattacaactcattattttgtcgggtttattatcaattgtttatggtttttttacaggcaaaaacattttaagttctagtgccggtaataataagatgcaggaaatagcttctgcaattcaagttggtgctaaagcttacttaaatcgacaatataaaacaattgccgttgtaggtgttgttgtcttggttataataagtttttcatttagtattttagtgggtttaggttatttaataggagcagctttatctggaattgctggttatgttggtatgcttgtatcagttcaagcaaatgttagaactgcagaagcatcaagaaaaggattatcacaaggtctttcaattgcattcaaatctggtgctgtaacaggcatgttagtggcaggcctagctctattatcaatttctgtctattattatctattactatcatatggtatcgatgaaagagaaattgttaatgctttagtagcattgggtttcggagcatcattaatttcaatttttgcaagacttggtggtggaatatttactaaaggtgcagatgtgggtgcagatctagttggtaaagtagaagcaggtattccagaggatgatccaagaaatccagctgtaattgct

SEQ ID NO: 267174 - DNA, 940 bp, Unknown
  Bacterial polypeptide expressing nucleotide sequence isolated from the Sargasso Sea
ggttggtatgatttcactgcccttcctataatatttatttgtgcggcaatattactctcctatgagtttgctggtctctatggaatagcaattgctgccgttggtatgcttgccaatactggaattcaactagcagttgatgcgtatggacctatttcagataatgctggaggtattgcagaaatggcagagttagatcctaaagttagagaaagaacagataaacttgatgcagttggaaatacaacagcagcaataggaaaaggttttgctattgcatcagctgctctaacagctctagctttatttgcagcatttatgcaaactgcagaaatttctgctattgatatttcaaaaccagttgttatggctggacttttacttggtgcaatgctaccatttgttttttctgccctttcaatgaatgcagtaggtaaggcagcaatgagtatgattgaagaagtgagaagacaatttagagaccttccaaaattgaaagctgctcttgaaataatgaggaagtatgactcagatctttctaaagcatcgaaagaagatctaaaaatatttaatgatgctgatggtgttgcagagtatagtaaatgtgttgaaatttcaacacaagctgcattgagggagatggttcttccaggattaatggctatatcagttccagttataattggatttactggtggtgcagaaatgctcggtggtcttttggctggtgttacatcatgtggtgttctaatggcgatttttcaatcaaatgctggtggtgcttgggataatgcaaaaaaaatgattgaagaagatggaagaaaaggtagtgaagctcataaagcagcagttgttggtgatacagtaggtgatcctttcaaagacacatctggaccatcacttaacattcttctgaaattattgctgttgttgcgttagt

SEQ ID NO: 267175 - DNA, 948 bp, Unknown
  Bacterial polypeptide expressing nucleotide sequence isolated from the Sargasso Sea
cggggagggcagggtcaaagaaatctcggatgagattcatcttggcgcgatggtcttcatggccagcgagtataagcgcttggccatcttttgtctgatctgtatcgctgccctttattggggtcttggtgctgacacagccatttccttcacgcttggtgctttttgctcgggtgttgcaggctacattggcatgtattcagcaacaaaagctaatgtcagaacagccgttgcggctaatacggaaggtgctgctgctgcgttgaatgtggctttctttggcggttcgatcatgggcctcacagttgcatcaatgggcttgctcggcatcggcattctttatcacttcatgggcggcactgcacatggtgttgaggccattgagggctttgcgatgggtggctcatccgttgctcttttcagccgtgttggtggtggtatctttaccaaatctgctgacgtcggagctgatcttgttggaaaggttgaagctggcattccagaggatgacccccgcaatcccgccgtgattgccgacaatgtgggtgataacgtgggtgacgttgctggcatgggttcagatattttcgaatcatattgtggctcgatgattgcgtcgattgccctcgctgcttctatgtcgatggaatccgtaaaccgccttggtggtgatcagaatgctttacaatttatgccgctggccctagcatccactggcattgtctgctcgctaatcggtattcttgccgtgaagatgttctcccacaaaagtgctgacgttgcgttgagatttggcactattggctcagcagttatcttcatagcagcagcgtatgcagtaatccaggcgatgggcgcaacatctggtgtctggttcgccgttctggtgggtgccattggtggcatcattgttggactggtgactgaatattacactgggggcgcccc

SEQ ID NO: 267176 - DNA, 871 bp, Unknown
  Bacterial polypeptide expressing nucleotide sequence isolated from the Sargasso Sea
acagcaggtctgtatgggttatctatagctgcaacctctatgttagctctacccggtatggttgttgctttagacgcatttggaccagtaaccgataatgctggcggtatagcggaaatggcagatttaccaaatgaggttagaaatacgaccgatgctttggatgcggttggaaatacaactaaagctataacaaaaggatatgccattggttctgcgggtttagcagcacttgttttgtttacagcttttacgcaagaccaacaattattgtttccggatataaaggtagatttttcattaagtaatccctttgtagttatagggctttttattggtggcctaattccgtttctgtttgcagcgatgggtatgatggctgtaggcagagccggaggtgcggttgttgaagaggttcgtcggcagtttaaagaaatccctggtattatggagggtaaggccaaaccagagtacggcaagtgcgttgatttgcttactaaggcagcaatcagagaaatgataattccttctcttttacctatagttgcacctgtagtcatttattatgttatttatagctttgcgggacaatcggcagcatttgctgctttaggtgcatctctaatgggtgtaattgtaaccggtctatttgtcgcactatcaatgacatcaggcggcggtgcatgggataatgcgaagaaatatatagaagatggaaatcatgggggaaaaggttcagaggcgcaccacgccgctgtgaccggggatacagtgggtgacccttataaggacacagccgggccagcagtgaacccgttaattaaaattatgaatatagttgctattttattgctagctattttggcatagt

SEQ ID NO: 267177 - DNA, 846 bp, Unknown
  Bacterial polypeptide expressing nucleotide sequence isolated from the Sargasso Sea
gttagttactttcttattggtagactaatcgaaaatcctgttgctttagctgatggataccaaaatgtacaagcgcttgatttatttcttgctactgttgtagggctagtttcaggaattttaattggagtattaacagaatattatacttctgatcatcagaaaccatcacaaaatgtcgcagcttcaagtgaaaccggatcagcaacaaatattatttctggtttggctaatggaatgttttcaacagctttgccagtattagtaattgcactttccatccttggagcataccactttgctcatttatatggtattgctttagctgcactaggtatgctatcaacaattggcattcaattagcagttgatgcttacggtccaatagcagataatgctggtggtattgctgaaatggcagaacttccgaaagaagttcgcgaaagaactgataagcttgatgcagtaggtaatactaccgcagctatcggtaagggttttgcgattggttctgctgctttaacatctttagcgttatttgcagcatttagagaaacagttggtggcctaaccttggatattaataaccctcaagtcatggcaggtttattaattggatcatcattaccatttgtattttcagctcttgcaatgcaggcggttggagatgctgcttttgaaatgattgaagaggttagaagacaatttagagaaatcaaaggcttacttgatggaaaggcaaaagcagattacgctaaatgtgttgatattgctactacagctgcaatcaataaaatggtactacctggagcattggcagttttcacaccgattatatttggctta

SEQ ID NO: 267178 - DNA, 766 bp, Unknown
  Bacterial polypeptide expressing nucleotide sequence isolated from the Sargasso Sea
gtagaagcaggaattcccgaagatgatcctcgtaatccggcagtaattgctgacaacgttggtgacaatgtaggtgattgtgctggaatggctgcagatttatttgaaacttatgcggtaacagttgttgcaacaatggttcttgctatgatattttttcctggatcgtccgcattattaatttatccaatggctatttgtggcagttgtttactggcatcaatcattggaactttttttgtaagacttggaaaatctgcaagtattatgggtgctttatataaaggtttcatagcatctgcggtgctctcacttgtatttatgtaccccgttactcaaaaagtaattggatttgaaaatattaacacaacaaattttagtggtatgtcattatatatttgtgcagttattggactggtaattacaggccttcttatttggattactgagtattatacaggaactaattatagacctgttcaaagcattgctaaagcttcgtctactggtcatggaaccaatgtcattcaaggtttagctgtttcaatggaagcaactgcactccctgctatagtgatagttataggaattgttttgacatttcaattagctggactttttggaattgctattgctgtaacttcaatgcttggattagctggaatggttgtagcacttgacgcttatggacctgttacagataatgctggtggaatagcagaaatgtcaaatcttgatgaaagtgtaagaaaaacgaccgatgctt

SEQ ID NO: 267179 - DNA, 289 bp, Unknown
  Bacterial polypeptide expressing nucleotide sequence isolated from the Sargasso Sea
caacggctttgccgcccttggcgcgctgctgctgggcgtcatcgtgtcgggcctgttcgtcgccatctccatgaccagtggcggcggcgcatgggacaatgcgaagaaatatatcgaggatggccatcatggcggcaagggcagcgaagcccataaggccgccgtcaccggcgacacggtgggtgatccctacaaggacacggccggcccggccgtcaacccgatgatcaagatcaccaacatcgtcgcactgctgctgctggccgcgctggcgcatgggggcatgtag

SEQ ID NO: 267180 - DNA, 739 bp, Unknown
  Bacterial polypeptide expressing nucleotide sequence isolated from the Sargasso Sea
ttagcttctatattctttcctaactctgctaacatgatggtttatcctttagctataggaggatcttgtataataacttcaataattggaacttggtttgttaagcttggtaaaagcaaaaacatcatgggagctttatataaaggatttatagcaacagcaattttatctttattaatattatatccattaactaatgccacattaggtttaagtgaaaattattcatattcgaatatttctttttcaggatttgatttatatatttgtgccgttataggactgatcattacaggattaattatttggattacagaatattatactggaacaaattttagaccggttaaaagtgttgctcaatcatctacaacaggacatggaactaatgttatacaaggattagctatttcaatggaagctacagctgttccagctttaattatagttataggaatcattagcacatataattttgcaggtctttttggtatcgcaattgcagttacgtcgatgctggctttaacaggtatggttgtagctttggacgcttatggcccggtgacagacaatgctggaggaatagcagaaatgtcaaaacttccaaaaaatgtaagaaaaactactgatgcattagatgcagttggaaatacaacgaaggcagttaccaaaggctatgctatagggtctgctggtttaggagcgctagttttatttgctgcatacacggaagatatta

SEQ ID NO: 267181 - DNA, 784 bp, Unknown
  Bacterial polypeptide expressing nucleotide sequence isolated from the Sargasso Sea
taatgttagaacggcagaagcatctagaaagggtttatcaaatggtttgtcaattgcatttaagtctggtgcagttacaggaatgcttgtggctggattagctttattgtcaatagcagtttactattacttacttttaaaatttaatgttgataaaagagaattaatcaatgcacttattgcattaggatttggtgcatcgcttatttccatatttgcacgattaggtggtggaatttttacaaaaggagctgatgttggagcagatttagttggaaaagtagaggcaggtattccagaagatgatccgagaaacccagcagtaatagcagacaatgttggagataacgttggtgactgtgcaggtatggcagcagatttatttgaaacttatgcagtaacgatagttgctacaatggttttatcctcaattttttttcaaaatgatttaatgatgatggtttatcctcttactattggaggtgcttgtatagttacttcaattcttggtactttttttgtaagattaggttcatcaaaaaatataatgcttgcgctttataaagggtttgttgttactgcaattacatctttactagttttatatccacttactgattatgttttaggtctagataaattatatgagattgatgacaaacaattttccggtttaagtctttattactgcagtgttattggattagtaattacaggtcttcttatatgggtaacagaatattatactgggacaaattatagaccagttaaaagcgttgcatct

SEQ ID NO: 267182 - DNA, 835 bp, Unknown
  Bacterial polypeptide expressing nucleotide sequence isolated from the Sargasso Sea
gcaggcgctgtaactggaatgcttgttgctggtttggcattattatctatatcagtttactacgctattttagattcttactctgtatctgaggaaacactcaagcatgcgcttgttgccctggggtttggcgcatcacttatttcaatatttgcaagacttggcggtggaatttttactaaaggggcagatgttggagctgatttagttggaaaagttgaagcgggtattcctgaagatgatcctagaaaccctgcagttatagctgataatgttggcgataatgttggagattgcgcgggtatggctgctgatttatttgaaacttatgctgtaacgattgtagcaactatggttttagctacaatattcttttctggcgaaatagcccatatgatgactatttatcctatggcgataggtggaagctgtttggtggcttccattataggtactttttttgtaagactagggtcctctcaaagcattatgggcgcgttatacaaaggttttatagcatcagcaattctctcattgatttttatttatccagtaactcaaatagtattaggcgacatgtcaaaagaatttacttttggtgatacgacgttttctggaacttctctctatatttgttcaataattggaattgtaattacaggacttcttatttggataactgaatattatacaggaacaaattatagacccgttcaaagtgttgcaaaagcatctacaactggtcatggaacaaatgtaattcaaggactagcggtttatatggaggcaacagcacttccagcattagttattgtaattggtatcgtaatgacat

SEQ ID NO: 267183 - DNA, 740 bp, Unknown
  Bacterial polypeptide expressing nucleotide sequence isolated from the Sargasso Sea
tatggaatctaatctaattttgccgccactttttggtatttttggtttggctgttgcctttattttgtacttattggttatgagatatgacggaggtacagacaaggttaaaaaaattggtgatcaaattcacttgggtgctatggtttttatgagacgtgaatacacttaccttgcgatgtttgtagctgttctaattgttctctcttatttatttttaggtctaaataccgcattagctgttacagccggggcattatcatcatctcttgctggatggcttggaatgttctctgcaactaaagcaaatgttagaactgcaactgctgcatctgagtctggagcgcaagctgcactttctgtggctttttatggtggatcaattatggggctatgtgttgcttctcttggattggtaggtctaggaggcctttacttctattttggaggcgatcctgatactgctagagcaatagaaggttttggaatgggagcgtcatgtgttgctttattctctcgtgtaggaggcggaatttatacaaaaagtgctgatgttggtgctgatttagttggaaaagttgaagcaggaataccagaagacgatccaagaaatcctggagttattgccgataacgtcggagataatgttggagatgttgctggtatgggttctgatatttttgaatcatattgcggagccatgattgcatcaatcgcaattgctgccacaattgataaca

SEQ ID NO: 267184 - DNA, 940 bp, Unknown
  Bacterial polypeptide expressing nucleotide sequence isolated from the Sargasso Sea
aaaatgcaagaaattgcatcagcaatccaagttggtgcaagagcttatttaaacagacaatataaaacaattgctattgttgggttagttgtactaattatcatcagttatgcatttagtattttggttggtcttggttacttgattggggcagctttatcaggtttggcaggttatgtaggaatgcttgtatctgtccaagccaatgttagaactgcagaagcatcaagaaaaggtctacctcaaggtctttcaattgcttttaaatctggtgcagtaactggcatgcttgtagcgggtttggctcttttatccatagctgtttattattatttattactctcatttggaattgatgaaagagaaattgttaatgctttagttgcacttggttttggcgcatctttaatttctatttttgcaagattgggtggtggtatatttaccaaaggtgctgatgttggcgctgatttagttggaaaagtagaagctggcattcctgaagatgacccaaggaatcctgctgtgatcgctgataacgttggtgataatgttggagactgcgctggtatggcagctgatttgtttgaaacatatgcagttacaattgttgctacgatggttttatcctcaattttttttcaaggtgatctaaatatgatggtgtatccattatctataggtggagcctgtatactgacttctataattgggacttttttcgttaaactaggaaaatctaaaaatattatggctgccttatataaaggttttattgttacagcaattacttctttaatcatattataccccattacagattatgtattaggtctagaaaattcatattcagtttctaataaatcatttacaggcatgagtttatacatttgtggtgcaattggtttagtaattactggtttaattatttgggttacag

SEQ ID NO: 267185 - DNA, 667 bp, Unknown
  Bacterial polypeptide expressing nucleotide sequence isolated from the Sargasso Sea
cgtcagagcaaatgtgagaactgctcaagctgcacaccaaggaatgaatgcagcactatcaatggcctttaggggcggtgcagttactggcttgcttgtcgttggtcttggtcttttaagtattgcaggttactacctcattcttacatcatctggtgtatctgttgatgatagcttgcatgcattaatcggattggcttttggaggctctctgatttctatttttgcaagacttggtggaggaatctttaccaagggtgctgacgtaggagctgatcttgttggtaaaattgaagctggaattccggaagatgatccaagaaatcctgctgttattgcagataatgttggtgataatgttggtgactgtgctggtatggcagcagatctttttgagacatatgcggtaacaattattgcaacgatgttgctaggcggcctagtctttagtggtgcagaagcaaccaatgctgttatgtatccacttgttttgggtgcagtatcgattgttgcctctgtaattggagcattatttgttaaagcgaaagaaggtggcagtgtcatgggagcactctacaagggtgtcattatttcaggattgcttgctgcaattgctttctatccaatcactggaatgatgggaatggacatgggcctattttggtct

SEQ ID NO: 267186 - DNA, 658 bp, Unknown
  Bacterial polypeptide expressing nucleotide sequence isolated from the Sargasso Sea
taatatccaatctattgatattgcagacccttgggttatgtctggtttatttgtgggagggatgctaccattcttgttttcttcaatggccatgggcgcagtaggtagagctgcgatggccatgatagaagaggtaagacgtcaattcagagagattccagaattaaaaaaagcacttgaattaatgaacttgaaaaatgaaaatgattgggatgagaatgagcgtaatctttatgaaggtgcattagcaaaagctgaacacggacgatgtgttgaaatttccacacaatctgcaattaaagaaatggtagcacctggagtattggctgttattactcctgtagttgtaggattcgtttttggacctcaaactcttggtggattattagcaggagttactgttagtggggttcttatggctatcttccaatcaaatgctggaggtgcatgggataatgcaaagaagatgatagaagaaggaatcaatattgatggagaggtgttaaagaaaggatcagaagcacataaagcatcagtcgttggtgatacagtaggagatccatttaaagatacctctggaccttcattgaatattttaatcaaactgatgtctgttgtgtctttggttatagcgccattgctgaagtcattcagttaa

SEQ ID NO: 267187 - DNA, 849 bp, Unknown
  Bacterial polypeptide expressing nucleotide sequence isolated from the Sargasso Sea
taaatatttgaccatgttcatggctgtaattgttctattggcatggtatgccttaggaccttatacagcaatagcagtggtagtaggtgccttatgttcatcaatcgctggattcattggaatgtatgctgcaactaaagcaaatgtaagaactgcaacagctgctcaaaaagatggctcagcagcagctttaacagtttccttttatggaggctcaattatgggcttgtgtgtagcttcattaggcttaattggattaggaggcttatatttcttctatataccagctgaagtagatcctcataagcttgaaggttttgcaatgggagcatctgtagtagctcttttttcaagagtaggtggaggaattttcacaaaaagcgcagatgtgggagctgatcttgttggtaagattgaagctggaattcctgaagatgatccaagaaatcctggtgtaatagcagataatgttggtgataatgttggtgatgttgcaggaatgggctcagatatctttgaatcatattgtggctcaatgattgcatctatagccatagcttatacgttaggaaataaagacatgatgttgttgcctttggctttagcatcgactggtttaatagcttcaataattggaatatttatagttaagcttcagtctgcaaaagcacctgcaagcgcattaagatctggaactcttttagcaccagtaatatttgtggctatggcctatttcattattgactcttttgaaggagttggaatgaatgtatggtggtgtgtgatagctggagccgttggaggagtattgattggcttaatcacagaatattatacaggtggaaatcc

SEQ ID NO: 267188 - DNA, 718 bp, Unknown
  Bacterial polypeptide expressing nucleotide sequence isolated from the Sargasso Sea
atgagctcaacagtcgaaacgattttattgtatacaatagcagcaggtcttttatccattgtctatggatttttcactggaaaaaatattcttaattctagcgcaggtaataaaaaaatgcaggagattgcatctgctattcaaattggtgctaaagcatatttggcaagacaatataaaacaatagcaattgttggtgttgttgttttagtaattgttagtatagcttttagtcctttagttggtttgggttatttaattggtgctgctttatcaggtattgctggttatgttggaatgctagtctccgttgaggcaaatgtaagaacggctgaggcttcaagaaaaggtttagctcaaggcctttccgttgcttttaaatcgggagccgtaactggtatgctagttgctggtttagcattattgtcaatagctgtttattactatctcttattaaaattaaatgttgatgaaagagaaattgttaatgcccttgttgcattaggttttggtgcatctttaatttcaatttttgctagactaggtggaggaatttttactaaaggtgcagatgtaggtgcagatttagttggaaaagtagaagcaggtattccagaagatgacccaagaaatccagctgtaatagctgacaacgtgggtgataacgtgggtgattgtgcaggtatggcagcagacttattgaaacatatgcagtaac

SEQ ID NO: 267189 - DNA, 894 bp, Unknown
  Bacterial polypeptide expressing nucleotide sequence isolated from the Sargasso Sea
aggtggtgcctgtatattaacctccatcattggaactttttttgttaaattaggcaaatctaaaaatattatggctgccttatataaaggatttattgttacggccataacatcactaataattttatatccaattacagactatgtgttgggattagaaaatacatattcaacttctaataaatcattcactggaatgagtttgtatatttgcggtgtaataggcctggttataacaggtttattaatatgggtaactgaatattatacaggaactaattatagacctgtaaaaagcgttgcttcatcctcaacaacaggccatggtacaaatgtaattcaaggcttagctgtatcaatggaagctactgctattccggctttaattattgttggtggaatattattaacaaattatattgctggactttttggtatagcaattgccgtaacaacaatgctagcattggcaggaatggtagttgctttagatgcatatggacctgtaacagacaatgcaggtggaattgctgaaatgtccaatttaccgaaaaatgttagaaaaactactgacgcattagatgcagtcggaaacacaactaaagctgttacaaaaggttatgcaattggatcagcaggattaggagctctagttttatttgccgcatatacagaagatattaaacatttctcaaaagttgctggatcaaaattggaaggtattgttgtaacttttgatttatcaaacccttttgttgtagtcggtttgttagtaggtggtatgcttccatatttatttggttcaatgggtatgcaggccgtaggtagagcaggcggagcagtagttgtagaagtaagaagacaatttaaaaaaattccaggaattatgaaaag

SEQ ID NO: 267190 - DNA, 724 bp, Unknown
  Bacterial polypeptide expressing nucleotide sequence isolated from the Sargasso Sea
tggtaatactacaaaggctgttacaaaaggatatgctatcggctcagctggattaggcgcactcgttttatttgctgcttatacagaagacattaaacatttttcaaaagtagcaggatcaaaactagaaggtatagttgtaacttttgatttatcaaacccatttatagtagttggattattggtaggtggtatgcttccttatttatttggctcaatgggaatgcaagcagttggaagagcaggtggtgctgtagttgttgaagttagaagacagtttaaaaaaattccaggaataatgaaaagaaaagcaaaaccagattatggaaaattagttgatttactaactaaagcagcaattaaagaaatgattgtaccatctttactaccagttttatctccaatcgttttatatttatttattttaccaataggtggtcaagttgctgcactttcttcagtaggagcaatgttactgggtgttataattacaggattatttgtagctatatcaatgactgctggtggaggtgcatgggataatgctaaaaaatatattgaggatggaaattttggtggaaaaggttcagaagcacataaagcagcagttacaggtgatacagtaggtgatccatacaaggatacagcgggaccagcggtaaatccaatgattaaaattacaaatatagttgcattattacttttagctgtaatagcagggtag

SEQ ID NO: 267191 - DNA, 793 bp, Unknown
  Bacterial polypeptide expressing nucleotide sequence isolated from the Sargasso Sea
atggttttatcttcgatattttttccaggagatatgtcaatgatgatttatcctctaactataggtggagcttgcattttgacatcaatactgggaactttttttgttaaacttggtagaagtaaaaatgtgatgaatgctttatataaaggatttgttgtttctgccgtagcttctctagcaatattatatccagtcacagattatgtattaggattagagaatacttacaatttaaataataaatcattttcaggtatgagcttatattactgcggtatcattggcttagtaataacaggtttattaatttgggttactgaatattatacaggaacaaattatagacctgtaagaagtgttgcaagttcgtctactactggacatggtacaaatgtaattcaaggattggcaatttcgttggaggcaactgctatacctgctttaataatagttgctggaattttatttactaatcatatagctggtctttttgggatagcaatagcggtaactactatgttagctttagctggaatggttgttgctcttgatgcttatggtccagttactgacaatgctggtggaattgctgaaatgtctaagctaccaaataatgttagaaaaactactgacgcactagacgctgttggaaatactactaaagctgtaacaaaaggttatgctataggttcagctggactaggagccttagttctttttgcagcttacacagaagatattaaacatttttcaaaagaagctggttctaaattagagggtattgtagtaa

SEQ ID NO: 267192 - DNA, 427 bp, Unknown
  Bacterial polypeptide expressing nucleotide sequence isolated from the Sargasso Sea
aatgaaaaggaaagcaaaacctgattatggtagacttgctgatttacttacaaaagcagcgattaaagaaatgataattccatccttattaccaattttatctcctatagttttatacatagtgatttattttattggaggacaagtcgctgctttatcatcacttggcgcaatgttattgggtgtaattattactggactatttgttgctgtttcaatgactgcaggaggtggtgcatgggataatgcaaaaaaatatattgaagacggtaaatttggcggcaaaggatctgaggctcataaagcagctgtaacaggtgataccgttggtgatccctataaagatactgcaggtccagctgtaaatccaatgattaaaatcacaaatatagttgccttgttgttgcttgctgttattgctggataa

SEQ ID NO: 267193 - DNA, 699 bp, Unknown
  Bacterial polypeptide expressing nucleotide sequence isolated from the Sargasso Sea
cttgtatccaattacaaagtatgtaattggtttcactaccgagtatattgtaaacgaaaaatcatttactggattaagcttgtatttttgtggaataataggacttgttataacaggattaattatatggattacagaatactatacaggcacagactatagaccagttaaaagtgtagctcaatcctcaactacaggtcatggaactaatgtcattcaaggactggcagtttcgatggaagcaactgctattcctgcattaattattgttggtggaatattattaactaatcatattgctggtttatatggtattgcaattgcagttacaacaatgcttgcacttgctggtatggttgtggctttagatgcatatggtccggttactgacaatgctggaggaattgcagaaatgtcaaatcttccaaaaaacgttagaaaaactaccgatgcattagatgcagttggtaatacaacaaaggcagtaacaaaaggatatgcaatcgggtcagctggacttggagccttagttttatttgcagcctacacagaggatattaaacatttttctaaagttgctggttctaatttagagggaattgtagttacatttgatttatcaaatccattcgttgttgttggattattgattggtggaatgcttccatatttatttggatcaatgggcatgcaagctgt

SEQ ID NO: 267194 - DNA, 861 bp, Unknown
  Bacterial polypeptide expressing nucleotide sequence isolated from the Sargasso Sea
attgggtttagataattcatacacgatttcaaataaatcatttacgggaatgagtttatatatttgtggtgttattggtttagttataacgggtttgttaatatgggtcacagagtattatactggaactaattatagacctgttaaaagtgttgcagcctcatctacaacaggacatggtacaaatgttattcagggtctagccgtatcaatggaagcaactgctatacctgcaatgataattgtaggtggaataattttaacaaatttcattgctggtctttttggtatagctatagcggtaactactatgctagctttagcaggaatggttgttgctttagacgcatacggccctgttactgataacgcaggcggtatagctgaaatgtctaatcttcctaaaaatgttaggaaaacaacagatgctttagatgccgttggaaacacaacaaaagctgtcacaaaaggttatgcaattggttcagcaggactaggagctttagttctttttgctgcttatactgaagatataaaacacttttctcaaacagcaggatctaaattagaaggaatagttgtgacttttgatttgtcaaatccatttgtagttgttggtttattagtcggaggtatgttaccttatttatttggttcaatgggaatgcaagctgttggaagagcaggtggtgcagtagttgttgaagtaagacgtcaattcaaaaaaattccaggtatcatgaaaagaaaatcaaagcctgattatggtagattagttgatttgcttacaagagccgcaataaaagaaatgatagttccttccttactacccgtactttcacctatagttttatatttatt

SEQ ID NO: 267195 - DNA, 770 bp, Unknown
  Bacterial polypeptide expressing nucleotide sequence isolated from the Sargasso Sea
catgaacacttcaattgaaactattttatactacactatatttgcaggtttattatcaatcgtttacggatttgtaacaggagttggaattatcaaatcgagctcaggtaataataagatgcaagaaattgcatccgctatacaagttggagctaaagcatatttaaatagacagtataaaacgatagcaattgtaggatttgtagttttaataattattagttttgctttcagttttttagttggaatagggtatttagttggcgcaacattatctggtatagcaggttatgtcggcatgttggtatcagttcaagccaatgttagaacagccgaagcttcaagaaaaggtttagcacaaggtttatcaattgcatttaaatctggtgctattacaggaatgttagttgctggactagctttactagcaatagctgtatattatttcattttattaaaactcggtgttgatgaacgtgaaatagttaatgctttagttgccttaggttttggtgcatcattgatttcaatatttgctagattaggtggtggaatttttactaaaggtgctgatgttggagcagacttagttggaaaagtagaagctggaattcctgaagatgatccgagaaatccagctgtaattgctgacaatgtaggtgataatgttggtgattgtgctggaatggctgcagatttattcgaaacatatgccgtaactattgttgccacaatggttttatcttcaatatttttttcaggtgatatga

SEQ ID NO: 267196 - DNA, 574 bp, Unknown
  Bacterial polypeptide expressing nucleotide sequence isolated from the Sargasso Sea
atgacaaattatttagaattactttatctaattgctttcataggagttttggctgttgcttacagctacctattatctggccaaataatttcatccagcgctggaaacacaagaatgcaagaaattgctgaagcaattcaaattggtgctaaagcatatcttaacaggcagtacaaaactattgcagttgttggaattatagttcttgcaatcgtaacatatttttttagctacttagttggaattgggtattttataggtgcttttttatctggtgtagcagggtatgtaggaatgttaatatcagtaaaagctaatgttcgaactgctgaggctgctagacacagtttacaatctggcttaacaatagctttcaaatctggagctataactggtttgttagttgctggtctagctttgttagcaataacattttattatattgttttaataaatttaaatgtagataacagagaaattataaatgcgttagtcgcattaggatttggtgcatctttaatctcaatttttgcaagacttggtggaggtatttttaccaaaggagccgatgtgg

SEQ ID NO: 267197 - DNA, 157 bp, Unknown
  Bacterial polypeptide expressing nucleotide sequence isolated from the Sargasso Sea
taatcatggtggtaaaggaagtgaagctcataaagctgccgtaacaggtgatactgttggagatccatataaagatactgcaggaccagcagtcaatccaatgattaaaattacaaatatagttgctttattacttttagcttcaatagctctataa

SEQ ID NO: 267198 - DNA, 865 bp, Unknown
  Bacterial polypeptide expressing nucleotide sequence isolated from the Sargasso Sea
gtcgccatacctgttatcacaatttgtgcaatcatcttcatagcaagccattttacaggactatatggtgtcggtgttgccgcagtcggtatgttaagtacggttggcataaccatggcaatcgatgcatatggaccggttgcagataacgctggcggtatagctgaaatggcagaactgggtaaggatactcgcgagattaccgactcgcttgatgaggttggaaatactactgcggcaattggaaaaggttttgcaattggtgcagccgcccttgcggcattggcattgatcagcgcatacatagaaaaagtatctcttggaaatgaggatttcatattaagaataaatgatcctctagttttaagcgggatgtttcttggcgctatctttccctatttggtcagttcaatcaccatgaccgcagtaggagatgctgcgtttgatatgattaaagaaatacgacgtcaattcaaagaaattcctgggttaatggaaggcacgggtaaaccagacacagcgagatgtgttgatattgcaactcgtgcagcattaaggcgcatgattttacctggctctctagccgtacttgcaccagttgtagttggctttggcctgggtcctcaagcgttaggtggaatgcttggtggcgcacttatttgctgtgtaatgatggcgctaatgatggcaaatgcaggcggtgcatgggataacgcaaagaagtatgttgaaaaaggaaatctaggcgggaagggatcagatgtccataaagctgccgttgtgggagataccgttggagatcctctaaaagatacatcggggccatcaatgaatattcttattaatgttatggcaattggttagt

SEQ ID NO: 267199 - DNA, 895 bp, Unknown
  Bacterial polypeptide expressing nucleotide sequence isolated from the Sargasso Sea
ggaattgtagtatccatattagggacctttatggtttcagtgaaagaaggcggggatccacaaaaaggattaaatcaaggagagtttggtagcggactcattatggttgttgtaatatatgtattaattgtcaaaattttacctgaaagctattttcaaggcggtgtgtcctacaatagtactggggtattttatgctaccataattggtttgtttggaggtttaggtattgggaaaataacggagcactacaccggaacaggcacaaaaccagttaaatctatcgctgaacagtcaatgactggtccagctaccaatattatagccgggctaggtgttgggatggagtcaacagcaataccaatgattataatatctgccagtataatgggcgcatactattttgctggtttgtatggaattgcaatggctgcattggggatgctagcaaatacagggattcaattagcggtagatgcatatggtcctatttcagataatgctggcggaatcgcagagatggctgagctcccaagcgaagttcgtgaaagaacagataagcttgatgctgttggtaatactacagctgccattgggaaagggtttgcaataggttctgcggctttaacggctttagctctttttgctgcatatatggtaaaaacggggatttcaactattgacatatcaaatccaatggttatggccgggttatttattggtggtatgttaccattccttttttcatcaatggcaatgggtgcagttggtcgagcggctatggctatgattgaggaagtaagaagacaatttagagaaattcctgagctaaaaaaggcactggaaattatgaatctaaaagataaagaagcttggacgaagaagatcacagagt

SEQ ID NO: 267200 - DNA, 886 bp, Unknown
  Bacterial polypeptide expressing nucleotide sequence isolated from the Sargasso Sea
ataacaggtttattaatatgggtaactgaatattatacaggaactaattatagacctgtaaaaagtgttgcttcatcatcaacaacaggccacggtacaaatgtaattcaaggcttagctgtttcaatggaagccactgctattccagctttaattattgttggtggtatattactaacaaattatattgctggactttttggcatagctatagctgttacaacaatgttagcattagcaggaatggtagttgctttggacgcatatggaccagtaacagataatgcaggtggaattgctgaaatgtcgaatttgcctaaaaatgttagaaaaactaccgacgcgttagatgcagtaggaaatacaactaaagctgttacaaaaggttatgcaattggatctgctggcttaggagcgctagttttatttgctgcatacacagaagatattaaacatttttcaaaagttactggatcaaaattagaaggaattgttgtaacgtttgatttatcaaatccatttgttgtagttggtttgttagtaggtggtatgcttccatatttatttggttcaatgggtatgcaggcagttggaagagcaggtggtgcagtcgtagttgaagtaagaagacaatttaaaaaaattccaggtattatgaagagaaaagctaaacctgattatggaagattggttgatttattgactaaagcagcaataaaagaaatgatagttccatctttgcttcctgtattatcaccgattgttttatatttgtttattctgccaataggaggacaagttgctgccctatcttctgtaggagcaatgttgttaggtgtaattataacaggactatttgttgccatatcaatgaccgcaggggagg

SEQ ID NO: 267201 - DNA, 363 bp, Unknown
  Bacterial polypeptide expressing nucleotide sequence isolated from the Sargasso Sea
aagaaatgattattccttctatgcttcctgttttatcaccaatagcagtttattttattattttaattattgctggtcagtcagcagcattatcatgtttaggagcactacttttaggagtaattataaccggtttgtttgttgcaataagcatgacagctggaggaggtgcttgggataatgcaaaaaaatatattgaagatggaaatcatggcggtaagggtagtgaggcgcacaaagcagctgttaccggagatactgttggagacccatataaagatacggcgggacctgctgtaaatccaatgatcaaaataacaaatattgttgcgttattattattagccgcaatatcaatttaat

SEQ ID NO: 267202 - DNA, 851 bp, Unknown
  Bacterial polypeptide expressing nucleotide sequence isolated from the Sargasso Sea
tatgtctgttgataccattttaatttacacaatttttgctggaatattatccatcgtatatggatttgtaacaggatcatcaattttgaatgcaagcgcgggtaatgcaaagatgcaagaaattgcttctgctattcaaataggtgcaaaagcttatttaaacagacaatataaaacaattgctattgtaggggttgtcgttttagttatcattagttttgctttttcattattagttggaattggatatttaattggcgcagctttatcaggtatagctggttatgtcggcatgttagtatctgttcaagcaaatgtccgtacagctgaagcctcaagaaaaggtttatctcaaggtctttcaatagcatttaaatctggagcaattacaggaatgctagttgctggtttagctttattagctatagctgtttattattatattttattattagcaggtgttgatgaaagagaaattgtaaatgctttagtggccttaggttttggtgcttctttaatatctatttttgcaagactaggtggtggaatttttacaaagggcgcagatgttggtgcagatttagttggaaaagtagaagcaggtattccagaagatgatcctagaaatccagctgttattgcagacaacgtaggtgataatgttggagattgcgcaggtatggcggcagatttgtttgaaacatatgctgtaactattgttgcaactatggttctatcatcaatattctttgtgtcagatttgaatatgatggtttacccattaagtattggtgcagcttgtattttaacatctattgtaggtaccttttttgtaaaacttggacaatcaa

SEQ ID NO: 267203 - DNA, 853 bp, Unknown
  Bacterial polypeptide expressing nucleotide sequence isolated from the Sargasso Sea
ggtttctctctaggagcagaatctattgcattgtttgcacgtgttggtggtggtatttatacaaaagctgccgatgttggtgccgatttagtaggtaaagtggaagcaggtattccagaagatgatcctcgtaatcctgctaccattgcagataacgtaggtgacaatgttggtgacgttgctggtatgggtgccgatttatttggttcgtatgtggcaaccgttcttgcggctatggttcttggtaactatgtgattaaagatatgggcggaatgattaacgatgcttttggcggaattggtcctatcttattaccaatggcaattgctggtttcggaattttattctctattataggtacaatgctagtaagtatttctagcgatgatgcgaaagaagcacaagtacaaggtgctttaaacaaaggaaactgggtttctattgtgttaaccgccatctcttgttatttccttgtaaaattcatgttgccagaactaatgaccatgaatttctatggcgaaggtttaaaagaaatctcttcaatgcgagtattctatgcaacaatcgtaggtttagtagttggtggagttatttcatcggttacagaatattatacaggtttaggtacaaaaccagttttggctatcgtacaaaaatcttcaactggagcaggaactaacgtaattgctggtttagcaacaggaatgatttctacgttcccaaccgttttattatttgcaggtgcaatttgggcttcgtatgcctttgctggtttctacggtgtggctttagcagcttcggctaagatggctacaacggctatgcaattagcaatcgacgctttcggaccaa

SEQ ID NO: 267204 - DNA, 848 bp, Unknown
  Bacterial polypeptide expressing nucleotide sequence isolated from the Sargasso Sea
taacgagggtctagatgttgcttttaaatctggtgctgtaacaggtatgttagttgcaggattagcattattatctatagctgtttattattatttattgttatcttttaatgttgatgaaagagaaattgtgaatgctttagttgctcttggttttggcgcatcattaatatcgatttttgcgagattaggcgggggtatttttactaaaggagcagacgtgggagctgatctagttggtaaagttgaagccggtatccctgaggatgatccaagaaatccagctgtaattgctgacaatgttggagataacgttggcgattgtgcgggtatggctgctgatttatttgaaacttacgcagttacaattgttgctacaatggttctatcctcaatattttttgttggtgatttaaatatgatgatttatccactaacaataggtggagcatgtatattaacctcaatactaggtacttattttgtaaaattaggaaattctaaaaatataatgactgctttatataaaggtttcgtagttacagcattgacttctttaattgttttatacccattaacagattatgttttaggattagatactagttataatattggttctaaagaatttacaggacttagcttatattattgcggtgtaattggattaattataactggactaattatttgggttactgagtattatactggaacgggatatagaccggttaagagcgtagctttatcttctactacagggcatggtaccaatgtcattcaaggtttagcagtatctctagaggcaacagctgtaccagcattgataattgtttcaggtattttaa

SEQ ID NO: 267205 - DNA, 811 bp, Unknown
  Bacterial polypeptide expressing nucleotide sequence isolated from the Sargasso Sea
aacgaaagtttaggaaaaggtttaaatgttgcttttaaggcaggagcagttactggtatgttagtagcaggcttagctcttttatctatttctgtttattatgtaatattggagtcttattcagtttctgacgaaacattaaagcatgcgttagtgtcactcggttttggagcttcactgatatctatttttgcgagactaggtggaggtatatttactaaaggtgctgatgttggtgcggatttagttggaaaggttgaggcaggtattcctgaagatgatccaagaaacccagccgtaatcgcagataatgttggcgataatgtaggtgattgtgctggcatggcagcagatttatttgaaacttacgctgtcactattgtggcaactatggttttagcaacgatattttttacaggtccagcagcggagatgatgacgatctatcctatggcaattggaggaagttgtttagtagcttcaataattgggacattttttgtaaggctgggccgttcgcaaagtattatgggcgctctttacaaaggttttattgcttcagcaatattgtctctaattttcatataccccgtaacacaagtcatattaggtgatatgtctaaagaatttagttttggaacaacatcctttacgggtatgtcactttatacatgtgcatttgtaggtattattattactggtttattaatatggatcacagagtattacaccggaacaaattatagacctgttcaaagtgttgctaaagcatcaaatactgggcatggtacgaacgtaattcaaggacttg

SEQ ID NO: 267206 - DNA, 955 bp, Unknown
  Bacterial polypeptide expressing nucleotide sequence isolated from the Sargasso Sea
atttcaggattttcactaggagcatcttctattgctttgttgcccagagttggaggtggtatttatactaaagcagctgatgttggtgcagatttagttggtaaagtgaaagccggtattccagaggatcaccctttaaatcctgcaactatcgcagataatgttggtgataatgttggagatgtagctggtatgggagcagatttatttgaatcatttgtaggctcaataattggagctatggtcttaggtgctgcttttgttggtttatctgagttttcaggaattgaaataaatgctgttttattacctctttatatagctgcttctggtattataatgtcaattattgggacattttttgtaaaggttaaagaaggtggtgatccacataaagcattaaatactggagagtttttatctgcaggttttatgattgctgttacttttttcttaattaaaaatttattaccagagacatgggtttttaatggagtagagtttacctctattggtgtattttatgctactattagtggattaattgctggactacttgtaggaaaggttactgaatactatacagctaccggtaaaaagcctgtgctttcaattgttgagcagtcagaaactggtcctgcaactacaattatatcaggacttggtgttggaatgatttctactgcactaccaattatttttatttgtgctgctattttagtttcatataattatgctggtctttatggtattgctattgcagcagttggtatgcttgccaatactggtattcaactagcagttgatgcttacggtccaatttctgataatgctggaggtattgctgagatggcagaattagacccaaaagttagagaaagaactgataaattagatgccgttggaaacactacagctgcaattggaaaaggatttgcaatagcatctgctgctc

SEQ ID NO: 267207 - DNA, 714 bp, Unknown
  Bacterial polypeptide expressing nucleotide sequence isolated from the Sargasso Sea
gctgaacaggcattgtctatttcattttttcggtggatcaataatgggattatgtgttgcttcaatggggttagttggattaggtggattatatttttatttctcaggagcaatggatgacccagacaaaatagcaaaagctcttgaaggttttggagttggcgcatctgcagtcgctttattttcaagggttggtggtggaatttttactaaaagtgctgacgttggagcggaccttgttggaaagattgaggctggtattcctgaagacgatccaagaaacccaggtgtaattgcagataatgttggagataatgtaggagatattgctggaatgggttcagatatctttgagtcatattgtggtgcaatgatagcttcaatagcaatagctgcctcagttggcaatactgatttaatgttcttgcctctttggcttgcttccttaggtttattttgctctcttattggaattggaattgttagaactcaagtatcaagatctccatccgttgcattaagattaggaacttttttttcaccaatagtatttcttattatcgctggaatgagtatatccatgtcaccaaatatagaaatgagtgtattttattctgttttaactggagctgttggaggaatactaattggcttaattactgaatattatactggaggatcaacagagaattctcctgtaggaaagattgcaaa

SEQ ID NO: 267208 - DNA, 754 bp, Unknown
  Bacterial polypeptide expressing nucleotide sequence isolated from the Sargasso Sea
gaccttgttggaaaagtcgaagcaggaataccagaggatgatccacgaaatccaggagtaattgctgataatgttggagataacgttggtgatgttgctggaatgggctcagatatttttgaatcatattgcggctcaatgatcgcaactatagcaattgcttacactatgacagaagcaaataatgggcctttgatgagcttacctctagcattagcatctattggtttaatatcatcaattttaggtatcttaattgttagagctcaatctgcgaaagcacctgctgcagcactgaggactggaacaataggctccccagttatttttatagctttagcatttgggttaattacatacttagatatttcactaaatgtttggttttgtgtacttacaggagctgtaggcggtgtattaataggacttataacagaatactatactgggagcacgcctgtagaaaagattgcaaaatctggtgaaacaggatctgcaactgtaatgatttctggtctttctgttgggatgcagtcggttgtaattcctatcttaattctggcaacaattatttttatttctacaacattatttgatttatatggagtaggtattgctgcagtagggatgcttgctacagttggtataacaatggcaattgatgcatatggtcctgtcgctgataatgctggtggaattgcagagatgtcaggaatgggagaggatgttagggaaattactgattctttaaatg

SEQ ID NO: 267209 - DNA, 913 bp, Unknown
  Bacterial polypeptide expressing nucleotide sequence isolated from the Sargasso Sea
gtatgtgactcgtcaggatcagggcagcgaggtcatgattgatctcggtcagcagattcatgatggagccatggcattccttcgccgtgagtatactgtgcttgccgtttttgtagtcattgtggcggggctcctaggctggacaatcggatggaactcagccgtggcctatgtctttggttcgctgagttctgtcgcagctggcttcgcggggatgaaggctgcaacccgctcaaacactcgcacttcggctgcagctaatagcgaggggcagggtaaggcgcttcgaatcgccttctttggcggggcggtcatggggttggctgtcgctgcacttggcatggtcggtctgggtgtcctgtactttatttttggagccagcgcagcaagcgcggtggactacgagtcctacgcccagctagtttcgggctttgcgatgggtgcatcgacgattgcgcttttcgcccgcgtaggtggcgggatttatacgaaggccgctgatgtcggcgcagatctcgtgggtaaggttgaggcgggaattcctgaggatgatccgcgaaatccagcgacaatagctgacaatgtcggtgacaatgtaggtgatgtcgccggtatgggagctgatattttcgagtcctacgttggctctatggttgccacgatcgcgataggggcttcggctccgatgttagccgggtcaagggcggaggcaattgcattacccctgacgacggctatggtgggtttgatctcatcgttggtcggtatctccttcatgaaggtacttgagaagcaaaatccttcacacgccctgcatggaaccacttggattgccggtggtctctttttagtgctcatgcacccagtcgttaccagtatggggatcaacttctccggtgagagctatcctgtt

SEQ ID NO: 267210 - DNA, 886 bp, Unknown
  Bacterial polypeptide expressing nucleotide sequence isolated from the Sargasso Sea
gggagctttatataaaggatttatagctactgcaattttttctgtaataatattgtatcctgttacagataaaattattggtttaaataatatttattcttcttctaatgcagaatttactggatttgctttatatcaatgtggtgttgttggtttaatcattacgggattaattatttgggttactgaatattatacaggaacaaagtttcgtccagttataagtgtggctaaatcatctattaccggacatggaacaaatgtaattcaaggtttagctgtttctttagaggctacagctttgcccgcattaattattgtaggcggtatactattaactaatcatatagccggattatttggaattgcgatagctgttactacaatgctagctttagctggaatggtagttgcgctagatgcttatggtccagttacagataatgctggtggaatagctgaaatgtctaatcttcctaaaaatgtacgaaaaactactgatgcactagatgctgtaggtaatactactaaagcagttacgaaaggatatgctataggttcggctggattaggagctcttgttttgtttgctgcttacactgaagatattaaatttttttcaaacgtaagcggttcttcgctagaaaatatagtagtcaattttgatctttcaaatccttttgtagttgtaggattactaattggaggaatgttaccttatctttttggatctatgtctatgcaagctgtaggcagagctggtggcgctgttgtaatagaggttagaagacagtttaaaaaaattcctggtattatgaaaagaaaaagaaaaccagattatggtaaattggtagatttacttacgaaagcagcaataaaagaaatg

SEQ ID NO: 267211 - DNA, 694 bp, Unknown
  Bacterial polypeptide expressing nucleotide sequence isolated from the Sargasso Sea
tatgcaattggttcagctggtttaggtgcgttggttttatttgctgcctatacagaggatattaaacacttttctaaagaaacaggatctgctctagaaggaattgtagttacttttgacttatccaatccttatgtagttgtaggattgttaattggtggaatgttaccttatctattcggctcaatgggtatgcaagctgtaggtagagcaggaggtgctgttgtagttgaagtaagaagacaatttaaaaaattcccaggtataatgaagagaaaacaaaaacctgattatgcaaagttagtagacttgcttactgtagctgctattaaggaaatgattataccttctttgctaccagttttgtcgcccgtggttctctattttattattttatctatcggtggccaagtggctgctttagcagcagttggtgcaatgttgcttggtgtaattatcacaggactttttgtagctgtttcaatgacagctggaggtggagcgtgggataatgcaaaaaaatatattgaagatggaaatcatggaggtaaaggttctgaagcccataaagctgctgttacaggtgatactgttggtgacccttataaagatactgcaggtccagctgtcaaccccatgattaaaataactaatatagttgcgttgttattattagctgttatcgctgcttaat

SEQ ID NO: 267212 - DNA, 700 bp, Unknown
  Bacterial polypeptide expressing nucleotide sequence isolated from the Sargasso Sea
aaaaggttatgcgattggttctgcaggattaggtgctttggtactttttgctgcttatacagaggatataaaatttttttccacagtttcaggttctgctctcgaaggcataaatgtaagttttgatttatcaaacccatttgttgtaatcggtttgttggttggtggaatgctaccatatttatttggatctatgggtatgcaggctgtaggaagagccggtggagcagttgttattgaagtaagaagacaatttaaaaaaataccaggtattatgaaaggtaaaagaaagcctgattatggaagattagtggatctacttacaaaagcagcaataaaagaaatgatcattccatcattgttaccagttttatctccaatagttctctatttaattatttattatatcggtggtttagaagccgcattatcatctgttggtgcaatgcttcttggagtgatagtaacaggattatttgttgctatctctatgactgccggtggtggagcttgggataatgctaaaaaatttatagaagatggaaattatggaggaaaaggatcagagtcacataaagccgctgtaactggagacactgtaggggatccttataaagatacagcaggtccagcagtaaacccaatgatcaagataacaaacattgttgcattgttattattagctgtaatttcacactaa

SEQ ID NO: 267213 - DNA, 820 bp, Unknown
  Bacterial polypeptide expressing nucleotide sequence isolated from the Sargasso Sea
aatgactgttttaactattacaattgcttgcggtgtttgtgcattaatatatggactatgggctagtcaaagtattctaacatcaagtgcaggttcagaaaaaatgcaagaaattgctggtgcaattcaagaaggtgcggctgcatatttaaatagacaatatacaacaataacagttgttggtgttattgtagctattattttgtttttaaccttaggtttatatgtatctattggttttcttattggagctgtattatcaggtatagctggatatattggtatgaatgtttctgtgagagcgaacgttcgtacaactcaagcagcaaccgaggggcttcagcctgcattggatattgctttcaaatctggtgcaattactgggttattagttgttggtttaggtttattaggtgttgcaggttattatgcttttttattatcagttaatgtggaaactagattattaatagaatctttagtcgctctctcatttggtgcatcactaatttcaatttttgcacgtcttgggggtggtatttttacaaaaggtgctgacgttggagcggatttagttggtaaagttgaggctggtattccagaagatgatcctaggaatcctgcagttattgcagataatgttggtgataatgttggtgattgtgcagggatggctgctgatttatttgaaacatatgctgtgacaattgttgctacaatgcttattggaacaattatgttctctgggcaaactaactatgtagaattgcctttgtttattggtggtgtgtgtataatagcatcaatagttggtgctttt

SEQ ID NO: 267214 - DNA, 880 bp, Unknown
  Bacterial polypeptide expressing nucleotide sequence isolated from the Sargasso Sea
gaggatgacccaagaaatccagcagtaattgctgacaacgttggagacaacgttggtgactgtgctggaatggcagcagatttatttgagacatatgcagttactattgtagctacaatggttctttcatcaattttctttgttggtgatctaaatatgatgatttatcctctaacaattggtggtgcttgtttattaacatctattttggggacattcttcgttaaacttggaaaaggtaagaatgtgatgaatgcattatataaaggatttattgtatctgcagttgcatcactagttattctttggcctgtaactgatcatgtaattggttttacaaatttatacactgttaatggaaatacatttaatggaatggatttatactattgtggagtaattggtttagttataacaggtttattaatctggattacagaatattatacaggaacaagttatagacctgttaaatcagtagccttatcatcaacaactggtcatggaactaatgttattcaaggtttagctgtttcaatggaagcaacagctatacctgcgttaatcattgttgctggtatcttaattactaattctattgccggcctatttggtattgcaatcgcggttacaacaatgttggcgttagctggaatggttgttgctttagatgcttatggccctgtaactgacaatgctggaggtatagctgaaatgtctaacttggataaaaaagttagaaaaactactgatgctctagatgctgttggtaatactactaaagctgttacaaaaggatacgcgattggttctgctggtttaggtgcactagttttatttgctgcatacaccgaagatattaaacatttttctaaagaag

SEQ ID NO: 267215 - DNA, 874 bp, Unknown
  Bacterial polypeptide expressing nucleotide sequence isolated from the Sargasso Sea
gctaaagcgtatttaaatagacaatataaaacaatagctattgttggtgtagttgttttgattattattagttttgcttttagttttttagttggactaggttatttagttggagctacattatctggaattgcaggatatgttggaatgcttgtatcagttcaagcaaatgttagaactgctgaagcttcaagaaaaggcttggcaaacggattatcagttgcatttagatctggagcaataaccggaatgttggttgcaggattggcgttgctatctattgctgtttattattttattttaataaaaatgaatgttgatgagcgcgaaatagtcaatgctcttgttgcattaggttttggcgcgtcgttaatatctatttttgctagattaggcggaggtatatttactaaaggtgctgatgtaggagctgacttggttggaaaagttgaagcaggaattcctgaagatgatcctagaaatccggcagtgattgctgataacgttggtgacaatgttggtgattgtgcgggtatggcagcagatttatttgaaacttatgcagttaccattgttgctacaatggttctttcttctatattctttcatggtgatatgaatatgatggtttatccactaacaataggtggagcatgtataatcacttcaattattggaactttttttgttaaattaagtaaatcaaaaaatgtaatgaatgctctttataaaggttttatagctacagcaattatatcattgataattttatatccagttacagattatgttattggatttgatagttcctataatgttggtgataaatcttttaatggaatgagtttatattattgtggaattattggtttaa

SEQ ID NO: 267216 - DNA, 562 bp, Unknown
  Bacterial polypeptide expressing nucleotide sequence isolated from the Sargasso Sea
tatgttgtagtcggattgtggataggtggaatgttaccatatttatttgggtcgatgggtatgcaagctgttggaagggcaggaggagctgttgttgtagaagttagaagacagtttaaaaaatatccaggtataatgaagagaaaacaaaaaccagattatgctaaattagttgatttgctaactgtagcagctattaaagaaatgattataccttcattgttgccagttctttcaccagtagtactttatttcgttatcttctctattggaggtcaagtagcagcattagcttcagttggagctatgttactaggagtaatcattacaggactttttgtagctgtttcaatgactgcaggtggcggagcttgggataatgcaaaaaaatatattgaagatggtaatcatggtggtaaaggttctgaggcccacaaagctgctgtaaccggagacactgtaggagatccttataaagatacagcaggtccagctgttaacccaatgattaaaattacaaatattgtagctttacttttattagcagttatcgctggctaat

SEQ ID NO: 267217 - DNA, 928 bp, Unknown
  Bacterial polypeptide expressing nucleotide sequence isolated from the Sargasso Sea
cttatttgaaacatatgctgtgacgattgttgcaacaatggttttagctacaatatttttcaccggtccaatagccgaaatgatgacaatatatccaatggcaataggtggaagttgtttagttgcttcaataatcggaacattctttgtaagacttggccgttcacaaagtataatgggagctctctataaaggttttattgcttcagcaatattatctctaatctttatttatcctgtcacacaaattattttgggggatatgtctacagagtttactttcggtacaactacttttaatgggatgtctctctatgtatgtgcttttgtaggcataatcataacgggtttgttaatatggattacagagtactatactggcactaattatagacctgtgcaaagtgtggcgaaagcatctactacgggtcatgggacaaatgttattcaaggactagcggtttcaatggaagcaaccgccttaccagctattgtaattgtagtgggcattgtatttacatatcagctagcaggcctttttgggattgcaattgctgtgacagcaatgttggctttagctggcatggttgtcgcattagatgcttatgggcctgtcactgataatgctggcggtatagcagaaatggcaaatctagatgaaagcgtaagaaaaacaaccgacgcattggatgctgttggtaataccacaaaagcagttactaaaggctacgcaattggctcagcaggcttaggagctttagtattgtttgccgcttatgttgaagatctgaagcttataccagaaataactcctgatttcagtctagaaaatccgtatgttgttgtaggactattaataggcggatttatgccctatttattcgcatctatggggatgatggcagtaggaagagcaggcggcgccgta

SEQ ID NO: 267218 - DNA, 676 bp, Unknown
  Bacterial polypeptide expressing nucleotide sequence isolated from the Sargasso Sea
atgagcgaaacagtcgaaacaatactattatatacaattggagctggtttattatctatcgtttatggatttttaactggaaaaaacattcttaattcaagtgcaggaaatgcaaaaatgcaagatattgcatctgcaattcaaattggtgcaaaggcatatttagcgagacaatataaaactattgctattgttggtgctgtagttttagtgatcgtaagtattgcatttagtccactagtaggtcttggttatttaataggtgctgcattatcaggtattgcaggttacgttggaatgttagtttcagttgaagctaacgtaagaacagcagaagcatctagaaaaggtttggctcaaggtctttcagttgcctttaaatctggtgctgtaactggaatgttggttgcaggtttagctttattagctatagctgtttattattatatattattgaaatctaatgttgaagaaagagaaatagttaatgcattagttgcattaggttttggtgcttctctaatttctatttttgcaagattaggtggtggaatatttacgaaaggtgcagacgtaggtgctgacttagttggaaaagttgaagctggaattccagaggatgatcctagaaaccccgcagtgatagcagacaacgttggtgacaacgtaggagatt

SEQ ID NO: 267219 - DNA, 733 bp, Unknown
  Bacterial polypeptide expressing nucleotide sequence isolated from the Sargasso Sea
gccactaacattatttctggtttagctaatggaatgttttctactgctttaccggtgttagtaattgcaatgtctatattaggagcatatcattttgcccatctatatggaattgcgttagctgcacttggtatgttgtcaacaattgggattcaattagccgttgacgcttatggaccaattgctgataatgcaggtggtattgcagaaatggcggaactaccaaaagaagtccgtgaaagaactgataaacttgatgcagttggaaatacaacagccgcaattgggaaaggctttgctattggttccgcagcattgacttctctagcactttttgcagcatttagagaaacagttggtgggcttactttagatatcaacaacccatatgttatggtagggttattaattggctcagctttaccatttgtattttctgcactagctatgcaggctgttggagatgctgcttttgaaatgattgaagaggtaagaaggcagtttagagaaattaaaggcttattagatggaaaagctaaagctgattatgctaaatgtgttgatattgctacatcagcagctattaataaaatggttcttcctggcgcattagcagtctttacacctattgtttttggattggttctaggtcagaaagaaatgcttggaggtatcttggctggagttacagtaacaggagtattattagctatatttatgtccaatgctggtg

SEQ ID NO: 267220 - DNA, 865 bp, Unknown
  Bacterial polypeptide expressing nucleotide sequence isolated from the Sargasso Sea
agtaaccactatgcttgcattagcaggtatggttgttgctttagatgcatatgggccagttactgataatgctggaggtattgctgaaatgtctaatcttgataagaaagttagaaaaacaacggacgcattagatgccgtaggaaacacaactaaagctgttacaaaaggttatgcaataggttctgccggtttaggtgctttagttttattcgctgcttatactgaggacattaagcatttttcaaaagaagcaggatctgcattagaaggtatagtagtaacttttgatttatctaacccttatgtagtagtaggtttattaattggtggaatgttaccttatctttttggttcaatgggaatgcaagctgttggaagagcaggtggcgcagttgtagttgaagtaagaagacaatttaaaaaatttcctggcattatgaaaagaaaacaaaaacctgattatgctaaattagtagatttacttactgttgctgctattaaggaaatgattataccatcactgttaccagttttatctcctgtagttttatattttgtaattctatcaattggtgggcaagttgctgccctagctgcagttggagcaatgctacttggtgtaattatcactggtttatttgttgcagtatcaatgacagcaggaggtggtgcttgggataatgcaaaaaaatatattgaagatggaaatcatggcggcaaaggttctgaagctcataaagctgctgtaacaggtgacactgtgggtgacccatataaagatactgctggaccagctgttaatccgatgattaaaattactaatatagttgcactactcctactagcagttatcgctggttaa

SEQ ID NO: 267221 - DNA, 748 bp, Unknown
  Bacterial polypeptide expressing nucleotide sequence isolated from the Sargasso Sea
atgaataattttttagaattactatatttagtgtctttcacaggaattcttgctgttgcttacagttatttattatctggacagattcttgcagcaagccctggtaatgctcgaatgcaagaaatagcagaagcaatacaaataggagctaaagcttatttaaaccgtcaatacaaaacaattgctgttgtaggtattattgtattggcaatcgtaacttatttttttaattatcttgtaggactaggttattttattggagcatttctttcaggtgtagctggttacgttggtatgttaatatcagtaaaagcaaacgtaagaaccgctgaagcttcaagaaaaagtttacaagcaggcttaacaatagcttttaaatcaggagcaataactggattgcttgttgctggtttagctttattagctattacaatttattatataattttgattaaacttgaggtagacagtagagaaatcattaatgctttagtagccttgggttttggtgcttcattaatttcaatttttgctagattaggtggcggtatttttaccaaaggcgctgatgttggagctgatttagttggtaaagttgaggctggtattccagaagatgatccaagaaatccagctgtgatcgcagataacgtaggtgataatgttggtgattgcgctggaatggctgcagatttatttgaaacttatgcagtaacaattgttgctacaatggttctttcttcaatat

SEQ ID NO: 267222 - DNA, 484 bp, Unknown
  Bacterial polypeptide expressing nucleotide sequence isolated from the Sargasso Sea
gacaggtggtgcagttgtagttgaagttagaagacagtttaaaaaatttccaggcataatgaaaagaaaacaaaaacctgattatgctaaacttgtagatttattgactgtagctgccattaaagaaatgattataccatcgttgttaccagttctttcaccagtagtattatatttcataattttatctattggaggacaagttgctgctctagcagcagtgggtgctatgttgcttggtgttataataacaggattatttgttgcagtatcaatgacagctggtggtggagcatgggataatgcaaaaaaatatattgaggatggtaatcatggaggaaaaggctcagaggcacataaagcagctgtcactggtgatacagtaggagacccctataaagatacagctggtcctgcagttaacccaatgattaaaataacaaatatagtagcattacttttattagctgttatcgctggctaa

SEQ ID NO: 267223 - DNA, 337 bp, Unknown
  Bacterial polypeptide expressing nucleotide sequence isolated from the Sargasso Sea
atgagcttaagtcaggttgccgcaggtaaaaatctgccagatgaaattaatgtcatcattgaaattccggcgaatgccgatccaatcaaatacgaagtagacaaagacacaggtacagtctgggttgaccgttttatgtcaacaccaatgttttacccatgcaactatggttttgtgaaccacacactgtcattagacggtgacccggttgacgtattagtaccaacaccatacccactggtaccaggtgcagtgatcaaatgccgtccagttgctgtattaaaaatggcagacgaagccggtgaagacgctaaagttttagctgtgcctatcagca

SEQ ID NO: 267224 - DNA, 412 bp, Unknown
  Bacterial polypeptide expressing nucleotide sequence isolated from the Sargasso Sea
aaacctggactatgctaaattagttgatttattaacggttgcggcaatcaaagagatgatcattccgtctttattaccagtactctcacctgtagttctttactttattattttatcaataggtggacaagttgcagctcttgcggctgttggtgctatgttattaggtgtaattataactggtcttttcgttgcagtttcaatgactgcaggcggtggagcatgggataatgctaaaaaatatattgaagatggtaaccatggtggaaaaggttcagaggctcataaagcagctgtcacaggagatactgttggtgatccatacaaagatacagctggtcctgcagtaaatccaatgatcaaaattactaacatagtagctttacttttattggctgttatcgctggttaa

SEQ ID NO: 267225 - DNA, 630 bp, Unknown
  Bacterial polypeptide expressing nucleotide sequence isolated from the Sargasso Sea
gtttagccgcgctcgttcttttcgctgatttcacgaataatttggatgcggatatcgtcttcagcttaagtgatcccgcggtgattatcggcttatttattggaggcatggttccatatttgtttgcagctctcgccatggaagctgtcggtagagctgctggttctgtggtaacagaagtgcgtaggcagtttaaagagataccaggaataatggatggatctagtaaacctgattattcgaaagccgtagatcttttaacccagtctgcgatcaaagagatggttattccatcgatattgcctatcgctgttccgatagtgttggcggtcgttatgagcttcttgttcgaaaacggcggagtccttgcactgggaggcctcttgatcggaacaatagtgacaggattattcgtcgctatctcaatgaccgttggcggaggtgcttgggataatgccaagaagtatgtcgaggatggcaactgtggaggtaaaggttctgaagcccacaatgcatctattacaggcgatacggtgggagacccctacaaggatacagcaggtcccgcgatcaacccgttaataaagattattaacttggtcgctttattattaataccttttctataac

SEQ ID NO: 267226 - DNA, 924 bp, Unknown
  Bacterial polypeptide expressing nucleotide sequence isolated from the Sargasso Sea
gtgcagcattatctggtatagcaggttatgtaggtatgcttgtttctgttcagctaatgtgagaacagcagaggcatcaaggaaaagtttatcgagtggtttgtcaatagcatttaaatcaggagctgtaacaggtatgcttgttgctggattagctttgcttgccattgcagtatactattattatctagttaaaacaggtgttgaagaaagagaaatagttaatgctttagtagcattaggatttggcgcgtctttaatttcaatttttgcaagactcgggggtggtatctttactaaaggcgctgatgtaggtgcagatttagttggaaaagtggaagcaggtattccagaagatgaccctagaaatcctgctgttatagctgataacgttggtgataatgttggtgattgtgccggtatggctgcagatcttttcgaaacgtatgcagttactatagttgctacaatggttctttcgtctatcttttttattaatgatttaaatatgatgatttatccgttagcaataggtggtgcttgcattttaacttcaattcttggtactttttttgttactcttggtagtgataaaaatattatgaaagccatgtataagggttttgtgattacagcagtaagttcactaattatcttatttcctataactaagcatgttattggttttacaactgaatatgttgctaatggaaaatcatttaatggactaagtttatatttctgtggaattataggactaattattactggattaataatatggattacagaatattatactggtactgattatagacctgttaaaagcgtggccaaatcatctacaaccggtcacggtacaaatgttattcaaggtttagcagtttctatggaagcaactgccgtacccgcattaattatagt

SEQ ID NO: 267227 - DNA, 733 bp, Unknown
  Bacterial polypeptide expressing nucleotide sequence isolated from the Sargasso Sea
actaacattatttctggtttagctaatggaatgttttctactgctttaccggttttagtaattgcaatgtctatattaggagcatatcattttgcccatctatatggaattgcgttagctgcgcttggtatgttgtcaacaattgggattcaattagccgttgacgcatatggaccaattgctgataatgcaggtggtattgcagaaatggcggaactaccaaaagaagtccgtgaaagaactgataaacttgatgcagttggaaatacaacagccgcaattggaaaaggttttgctattggttctgcagcattgacttctctagcactttttgcagcatttagagaaacagttggagggcttactttagatatcaacaacccatatgttatggcaggattattaattggctcagctttaccatttgtattttctgcacttgctatgcaggctgttggagatgctgcttttgaaatgattgaagaggtaagaaggcagtttcgagaaattaaaggcttattagatggaaaagctaaagctgattatgctaaatgtgttgatattgctacatcagcagctatcaataaaatggttcttcctggcgcattagcagtctttacacctatagtttttggattggttctaggccagaaagaaatgcttggaggtatcttggctggagttacagtaacaggagtattgttagctatatttatgtccaatgctggtggat

SEQ ID NO: 267228 - DNA, 846 bp, Unknown
  Bacterial polypeptide expressing nucleotide sequence isolated from the Sargasso Sea
atttttttctgatctttcttctatgatgatgtatccacttgccattgctggtgtttgtactcttgcaagtattgttggaacttattttgtgagattgggtaaaagtaaaaatattatggctgcattgtacaaaggttttgcagtttctgcaattttatcagctcttcttttatattttataactgatcatgttataggtttaagttcaatttttagtattgatgataaatcatttactggactatctcttttttattgtggtttattaggtttaattattactggcttaattatttgggttactgaatattatacaggaactaattataggccagttcaaagtattgcacaagcttctacaactggtcatggaacaaatgttatacaaggtcttgcaattagtttggaagcaactgcacttcctgcaattataattgtagcaggcataataattacgcattcacttgctggattatttggaatagcaattgctgtaacaacaatgctagcattagcaggaatggttgtagcgcttgatgcatatggtcctgttacagataatgctggaggaattgctgaaatggcagaattagacgataatgttagaaaaactactgacgctttagatgcggttggaaatacaactaaagctgtcacaaaaggatatgctattggttctgcaggcttaggtgcgcttgtcttgtttgcagcttacacagaagatcttgagcattttgcaaatgatcctaatagttcattgtcttatgaaaaaattggacacgttacttttgatttatcaaatccatatgttgtagtgggtttattaataggtggattgttaccttt

SEQ ID NO: 267229 - DNA, 865 bp, Unknown
  Bacterial polypeptide expressing nucleotide sequence isolated from the Sargasso Sea
aggaatgttagttgccggattggctttgctggcaatagctctatattattttattttattaaaacttggtatcgatgaaagagaaatagttaacgctttagtagctttaggttttggagcatcattgatttcaatatttgcaagattaggtggaggaatttttactaaaggtgccgatgttggggcagacttagttggaaaagtagaagcaggaattcctgaagatgatccaagaaatccagctgtaattgctgataatgtgggcgataacgttggtgactgtgctggcatggctgcagatttatttgaaacatatgctgtaactatcgtagcaacaatggttctatcttcaatattttttcaaggtgatatgaacatgatgatttatcctcttacgattggaggagcttgtattcttacatcaattattggcactttctttgtcaaattaggcaattcaaaaaatgtaatgaatgcattgtataaaggttttatagcaacagctgttttatcattaattattttataccctgttacagattatgttataggatttaattcaaattattcagtaggaagttcatcatttacaggaaagagtttgtatttttgtggaataattggcttaataattactggattattaatatgggttacggaatattatacaggaactaattacagacctgtaaaaagtgttgcatcatcgtcaactacaggtcatggaaccaatgtaatacaaggtttagcagtatctatggaagcaacagcaataccagctttaattattgtatctggtattttgcttacaaatcatattggtggtttgtatggtatagcaatagctgtaacaactatgttagca

SEQ ID NO: 267230 - DNA, 954 bp, Unknown
  Bacterial polypeptide expressing nucleotide sequence isolated from the Sargasso Sea
cgctgtattctcaggcttggcaggatatatcggtatgagtatttccgtcagagcaaatgtgagaactgctcaagctgcacaccaaggaatgaatgcagcactatcaatggcctttagaggcggtgcagttactggcttgcttgtcgttggtcttggtcttttaagtattgcaggttactacctcattcttacatcatctggtgtatctgttgatgacagcttgcatgcattaatcggattggcttttggaggctctctgatttctatttttgcaagacttggcggaggaatcttcactaaaggtgctgacgtaggagctgatcttgttggtaaaattgaagctggaattccagaagatgatcctagaaatcctgccgttattgcagataatgttggtgataatgttggtgactgtgctggtatggcagcagatctttttgagacatatgcggtaacaattattgcaacgatgttgcttggcggcctagtctttagtggtgcagaagcaaccaatgccgttatgtatccacttgttttgggtgcagtatcgattgttgcctctgtaattggagcaatatttgttaaagcgaaagaaggtggcagtgtcatgggagcactctacaagggtgtcattatttcaggattgcttgctgcaattgctttctatccaatcactggaatgatgggaatggacatgggcctattttggtctgcaatcattggattagtcctgaccgctttcatggtattggttaccgaattctacaccagtacagaatatagtcctgtgcaaaaaattgctgaggcttcaactactggtcatgcaaccaatatcattgctggacttggggtttcaatgaagtcaacagctcttcctgtactggcagtttgtttgagcatctggggagcttatgctttaggtggtctatatgggatcgcaattgcagcaacatc

SEQ ID NO: 267231 - DNA, 817 bp, Unknown
  Bacterial polypeptide expressing nucleotide sequence isolated from the Sargasso Sea
aaaatgcaggaaatagcatcagcaatacaaatcggtgcaaaagcttatttaaatagacagtacaaaaccatagcaatagttggttttgtagtactagtaattattagttatgcatttagtattttagttggtttaggatatttaattggagctacattatctggaattgctggatatgttggtatgcttgtatcagtacaagcaaacgtaagaactgcagaagcttcaagaaaaggattatctcaaggactttcgatagcttttaagtctggagctgtgactggtatgttggttgctggattagcacttttagcaattgcagtttattattatttattaataacttatgaagtggaagaaagagagattgtaaatgctctagttgctctaggttttggtgcttcactaatttcaatttttgctagacttggtggtggaatttttactaaaggtgcagatgtgggagctgatttagtaggaaaagtagaagccggcattccagaagatgatcctagaaatcctgctgtaatagcagacaatgtaggtgataatgttggtgactgcgcaggcatggctgctgatttatttgaaacatatgcagtaacaatagttgctactatggttttatcttcaatattttttcatggagatcttaatatgatgatttatcctttatctattggtggagcttgtattttgacttctattcttggaacattttttgtcaaattaggaaaatctaaaaacattatggcagccttatataaaggttttattgctactgcagtcacatcgctaataattttatatccaaatt

SEQ ID NO: 267232 - DNA, 568 bp, Unknown
  Bacterial polypeptide expressing nucleotide sequence isolated from the Sargasso Sea
atggacgcttcaattgagacaattttatattacacaatatttgcaggatttttatcaataatctatggattttttactggttctaatattatcaaatcaagtccagggaatagcaaaatgcaagaaattgcatctgcaattcaaattggagcaaaagcatatttaaacagacaatacaaaacaatagctatagtcggtgtttttgtattaattataattacatttgcatttaattacttagtaggactaggttatttaattggtgcaacattatctggaatagctggatacgtaggaatgctagtttcagttcaagccaatgttagaacagctgaagcttcaagaaaagggcttgctagcggattatctgttgcttttaaatctggagctataacaggcatgttagttgctggtttagctctattgtctatagcggtttattactttgttttacttaaatttggtattgatgaacgtgaaattgtaaatgctttagttgcattaggttttggagcttctctaatttctatatatgcgagactaggtggtggtatttttacaaaaaggt

SEQ ID NO: 267233 - DNA, 894 bp, Unknown
  Bacterial polypeptide expressing nucleotide sequence isolated from the Sargasso Sea
tcaatatttttccaacagattataatatgatggtttatcctctagctataggagcttcgtgtattcttacatctattatcggcacttggtttgtaaaacttggaaaaagtaaaaatatcatgggagcattgtataaaggttttgtagttacagctatttcatcgttaataattctttaccctgtaacagatgcaattttaggtcttgataaattttatagcaataatgagaaaaacttttctggtttagatctttatttgtgtggagttgttggatttattataacaggattattaatttggattactgaatactatacaggtacaaattttagaccagttcaatcagtcgcaaaatcatctactactggtcatggaacaaatgtcattcaaggtttggctgtttccatggaagcaactgctatacctgcattaataattgttgcgggaattttatacacaaataatttggcgggtctatatggtattgctattgcagttacagcaatgttagcactaacaggaatggtagttgctcttgatgcatatggccctgttacagataatgcaggaggaattgcagagatgtccaagttaccaaaaaatgttagaaaaactacagatgctttggatgctgttggtaatactactaaagctgttacaaaaggttatgcaattggatcagctggacttggtgctttagttctatttgctgcttatactgaagatataaaatatttttcatcagtaaaaggttctgcattagaaaatgttgtggttacatttgatctttcaaatccttttgttgttgctggattattgataggtggaatgttaccttatttatttgggtcaatgggaatgcaggctgtggaagagcaggcggagctgtagt

SEQ ID NO: 267234 - DNA, 643 bp, Unknown
  Bacterial polypeptide expressing nucleotide sequence isolated from the Sargasso Sea
aatgctagaaattgcatctgcaattcaagaaggagctagagcatatttaaatagacaatataaaactattgcattggtgggtatagtggttctaataattattacaatattgtttagtcctttggttggtttaggttatttaattggtgctacattgtctggtattgctggctacgttggtatgcttgtttctgttcaagctaatgttagaactgccgaagcatcaagaaaaaatttagcaagtggattatcaatagcatttaaatctggtgcagtaactggaatgcttgttgctggtttagctttactttcaattgcagtttattattattttttggttaaagctggagttgatgaaagagaaattgttaatgcgcttgttgcattaggattcggtgcatcattaatatcaatttttgcaagacttggtggaggtatttttacgaaaggtgcggatgttggtgcggatttagttggtaaagttgaagctggaattccagaagatgatcctagaaatcctgcagttattgcggataacgttggtgataatgtaggtgattgtgctggtatggcggctgacctttttgaaacttatgctgtcactattgttgctaccatggttctttcatctattttttttgta

SEQ ID NO: 267235 - DNA, 1066 bp, Unknown
  Bacterial polypeptide expressing nucleotide sequence isolated from the Sargasso Sea
tttgcagattggtggtggtattttactaaagggcgctgatgttggggctgatcttgttggaaaagttgaagctggaatacctgaggatgaccctcgaaatcctgccgtcattgctgataatgttggagacaatgttggtgattgtgccggaatggccgcagatttatttgagacatacgcagttacaatcgttgcgacaatggttcttgccacaattttttttactggcgaaattgctcaaatgatgacaatttatccaatggcaattggcggaagttgtttagttgcatctataattggaactttttttgttagattaggatcttcacaaagcattatgggagcattgtataaaggattcattgcttcagcaatactctctctaatttttatttatccagtaacacaggttgtcttgggagatatgtctaaagaattcacattcggcgacacaactttttctggaacttctctctatatttgttcaattataggagttgttataacaggactactaatttggattactgagtattatacaggaacaaattataggccagttcaaagtgtagccaaggcatcaacaactggtcatggcacaaatgtaattcagggattggctgtttctatggaagctactgcacttcctgctctggttattgtaattggtattataatgacatttcagttagcgggattattcggaattgcaattgctgtaacagctatgcttgcccttgcgggcatggttgtagcattagatgcatatggtcctgtaacagataatgcaggtggaatagctgaaatgtctaatcttgatgaaaatgtaagaaaaacaaccgacgcccttgatgcagttggaaatactaccaaagcagttactaaaggctatgccattggttcagctggtttgggagctttagtactatttgctgcatatgtagaggacttaaaattaatttctgatttaacccctaatttcagtcttgaaaatccatacgtagttgtgggattgctaatcggtggattattgccctacctttttgcttcaatgggaatgatggct

SEQ ID NO: 267236 - DNA, 694 bp, Unknown
  Bacterial polypeptide expressing nucleotide sequence isolated from the Sargasso Sea
tatgctattggttcagctggattaggtgcattagttttatttgctgcctacactgaagacataaaatatttttcaacagtaaaaggctcagctctggaaggtgtgatagtgacatttgacttatctaatccttttgttgttgctggtttattaattggtggaatgttaccttacttatttggatctatgggtatgcaagctgttggaagagctggaggcgctgtcgtagtcgaagtaagaagacaatttaaaaaaataccaggaataatgaaaggtaaaagaaaacccgattatggtaaattagtagatttattaacaaaagcagcaattaaagaaatgattgtaccttcacttttaccagtattatctcctgttattttatattttgtaatcttacaaattggcggaatggaagcagctctgtcttctctgggagcgatgttattaggagtcattattacaggtttgttcgttgcagtgtctatgacagctggcggtggtgcttgggataatgcaaaaaaatatattgaagacggaaattttggaggaaaaggatctgaagcacacaaatcagccgtaacaggcgatacagttggagatccatataaagatactgcagggccagcagtaaatccaatgattaagataacaaatattgtagctttattactccttgcggtaatagctcattaac

SEQ ID NO: 267237 - DNA, 810 bp, Unknown
  Bacterial polypeptide expressing nucleotide sequence isolated from the Sargasso Sea
attgttacaggtattcttatcacaaattcttattgctggactatttggtatagcaattgcagtaactacaatgcttgcattagcaggaatggttgttgcgttagatgcatatggaccagttacagacaatgcaggaggaattgctgaaatgtctaatcttgataaaaaagttagaaaaacaacagatgctttagacgctgtgggtaacacaacaaaagcagtcacaaaaggttatgcaattggctcagctggtttaggtgcgttagttttatttgctgcgtatacagaagacatcaaacacttttcaaaagaagctggttctgcattagaaggaattgtagttacttttgatctatcaaatccttatgtagttgttggattattaattggtggaatgttaccatatctttttggttcaatgggaatgcaagctgttggaagagcaggtggtgcagttgtagttgaagtaagaagacaatttaaaaaatttccaggtataatgaaaagaaagcaaaaacctgattacgcaaaattagtagatttacttaccgtagcagctatcaaggaaatgataataccatcattgttaccagttttgtcacctgtagttttatattttataattctatcaattggtggacaagttgcagcactagctgcagttggggcaatgttacttggtgttattatcactggtttgtttgttgcagtatcaatgactgcaggaggtggtgcttgggataatgcaaaaaaatatattgaagacggaaatcatggcggaaagggttctgaggctcataaagctgctgt

SEQ ID NO: 267238 - DNA, 848 bp, Unknown
  Bacterial polypeptide expressing nucleotide sequence isolated from the Sargasso Sea
tatggaggctactgcaattccagcaataataattgttgcaggaattttattaactaattcaatagctggtctatttggtattgcgattgccgttacaactatgcttgctcttgcaggtatggttgtagctttagacgcttatggtccggtcacagataatgcgggtggaattgctgaaatgtcaaatcttccaaaaaatgtaagaaaaaccacagatgctcttgacgctgttggtaatactacaaaagcagttaccaaaggttatgctattgggtcagctggtttaggtgcattagttttattcgcggcctatacagaagatattaaacatttttcgaaagaagctggatcaaaattagagggaatagttgttacatttgatttatcaaatccttttgttgtagtaggattactaatcggaggaatgcttccgtatttatttggatcaatgggtatgcaagctgtaggtagagcgggtggagcagtagtaattgaagtaagaagacaatttaaaaaaattccaggtattatgaaacgtaaagctaaacctgactatggaaaattggtagatttactcactaaagctgcaataaaagaaatggtaataccatcattgttaccagttctttcacctattgtattatatttaataattttacctattggcggacaagttgcggcattatcatctgtaggagctatgttattaggagtaattataactggtctctttgtagctgtttctatgactgctggtggtggagcatgggataatgcaaaaaaatatatagaagatggtaaatttggtgggaaaggttctgaagctcataaagctgctgtaactggtg

SEQ ID NO: 267239 - DNA, 661 bp, Unknown
  Bacterial polypeptide expressing nucleotide sequence isolated from the Sargasso Sea
cactattgatatatcaaacccaatggttatggcaggtttatttattggtggtatgttaccatttttattttcatcaatggcgatgggtgcagttgggcgagctgctatggctatgattgaggaggttagaagacaatttaaagagatccctgagttaaaaaaagcactagaaattatgaaccttaaggataaaaatgattggaacgaaaaagatcacaaagtgtataatgaagcattaggaaaagcagaacatggcaggtgtgttgaaatttctactgaatcagcaattaaagaaatgatcacccctggtcttttagcagttattactccagttttagttgggtttgcaccacgggtttttggaagtaatcaggggcccgaaatattgggaggccttcttgctggtgtgacggtaacaggagtactaatggcgatttttcaatcaaactctggtggagcatgggacaatgctaaaaaaatgattgaagagggtattcttatcaatggtcaagaaataaacaaagggtcagaagcacataaagctgcggttgtcggtgatacagtaggtgatccattcaaagatacctcaggcccatcattgaatattttaattaagttaatgtcagtggtgtccttagttattgcaccattaattaaatag

SEQ ID NO: 267240 - DNA, 814 bp, Unknown
  Bacterial polypeptide expressing nucleotide sequence isolated from the Sargasso Sea
ttcctttgggcagagtataggttgctaacaggattcatcttaattgtagcgatagccatactactcggaggtgaagaaaatggccttggaatggagaccatggttgcattcatcattggagcgctatgcagtgtcgctgcaggtttctctggaatgcgttcagcaactagtgcaaacggtcgaacggcgcaagcagcggcagatggagggcagtcggctgctcttactacatcgtacaacggtggagccgtgatgggcctagcagtgggaggtcttggattagctggtatttctctgatgtactatcttactaaaaccgagagtttgggattggccctggacgtagataatattgctgggttcggaatgggagcatcttcgatagcccttttcgcgcgagtaggtggtggaatttacactaaggcagctgatgttggggcagacttggttggcaaggttgaggcaggcatccccgaggacgatccaaggaaccctggtgtgattgctgacaacgtcggggataacgtcggagacgttgcaggtatgggggccgatatcttcgagtcattcgtgggcagcattattgcagcaatggtgattgcagcagcaagcgatagtttggggtcagattacgtaatgattccaatcgtactagcagtagttggctacattgcatctattattggcgtattctcgataacagctatgcagaacatggatccgggagcagccctaagaaatacaacattcatcggtgcgggacttttcattgctggtggcttcttggccctagactacttagatctagatacca

SEQ ID NO: 267241 - DNA, 807 bp, Unknown
  Bacterial polypeptide expressing nucleotide sequence isolated from the Sargasso Sea
tataacggctcttgtttcaatagtattaatctatttcgtcacagatttctttataggtactgataaacttataattaatagtgatttgtttattgaatcttttctaggaatcgatttattttactgctcaataattggattagctgtaactggcttaatcgtttggataactgaatattataccagcaccgaatttaaccctgtaaaatctgtagcaaaatcgtctcaatctggtcatgcaacaaatataatccaaggtcttgctgtttcaatgcaatcaaccgcattgcctacaatcgttataattttgggaatacttttatcctataaatttgccggattatacggtatttcagtggctgctactactatgttagctttggcgggaatgatagtagcgttggacgcgtatggtcctgtgactgacaatgctggaggtattgctgaaatgtcaaatttgtcagaaaatgtaagaaaaactactgacgcacttgatgctgtgggaaatacaaccaaggcagtaactaaaggttatgcaattggttccgctggacttgcttctttagttctatttggtgcttatactcaagatttaaaatattacttccctaaccttgatgttaaattttctttggatgacccctatgttgtggttgggcttctgataggaggcatgttgccttttttgtttggttccatgggtatgacagctgttggtaagacagcagaaaaaattgtgaacgaggtaagaaggcaatttgcagagaacaaggggataatgacgggaaagtcaaaacctgaatacgg

SEQ ID NO: 267242 - DNA, 646 bp, Unknown
  Bacterial polypeptide expressing nucleotide sequence isolated from the Sargasso Sea
tatacagaggatataaaatatttttctggcgtgtctggctctgcacttgaaggtgtagatgtaacttttgatttatcaaacccgtttgtagttgctggtttattaattggtggtatgttgccatatttatttggatcaatgggtatgcaagctgttggaagagctggcggagcagtcgttattgaagttagaagacaatttaaaaaaataccgggaatcatgaagggtaaaagaaaacccgactacggaaaattggttgatttactaactaaagctgccattaaagaaatgatactaccatctcttttaccagtcttatcacctataattctttattttgtaatttttcaaataggtggtttagaagcagcgttatcttctttgggagcaatgttgttaggcgtaataattacaggtttatttgttgctctatccatgaccgctgggggaggagcctgggataatgctaaaaaatatattgaggatgggaactttggtggcaaaggatctgaagcacataaatccgctgttactggtgatacagttggtgatccgtataaagatacagctggtcctgctgtaaatccaatgataaaaataaccaatatcgtagctcttttattactagcagtaattgctcactaac

SEQ ID NO: 267243 - DNA, 699 bp, Unknown
  Bacterial polypeptide expressing nucleotide sequence isolated from the Sargasso Sea
tatgtcagcattcattccaccacttttaggtctcataggtcttcttatagccctaggattatttagagttgttcttagctatccagaaggaaatcctgaagtaaagaaaatcggtgacatgattcattcgggtgcaatgagttttatgaaaactgagtatacctatttggttgttttcgttcttgttttagctgttttagttttctttgccttgggttgggaaacagcaactgcagtcttagttggcgcttcaagttcggctctagctggatttattggaatgtatgccgcaactaaagctaataccagaacagctgcagcagctcaagaagatggagcagcgtcagctttatctatttcgttctacggtggatcaataatgggtctatgtgttgcttctttgggtcttcttggcttgggaggattattttattttcttggagaaggtcattatcttgaaggatttggaatgggagcttcagttgtagcactattctcaagggttggcggaggaatctttaccaaaagtgctgatgtaggagctgaccttgttggaaaagtcgaagcaggaatacctgaagatgatccacgaaatccaggagtaattgcagataatgttggagataatgttggcgatgttgcaggaatgggctcagatatttttgaatcatattgcggctcaatgatcgcaactatagc

SEQ ID NO: 267244 - DNA, 921 bp, Unknown
  Bacterial polypeptide expressing nucleotide sequence isolated from the Sargasso Sea
ttattatatccactaactgattatgtgataggtttttcaacccaatataatgttaacaatgtatcattcaatggtaaaagtttgtattactgtggagtaataggtttagtaataacaggtctaattatttgggttactgaatattatacaggtacaagttacagaccagtaaaaagtgttgcaaattcatctactacaggacatggaacaaatgttattcaaggtttggctgtttctttagaagcaacagctatacctgcgcttataattgttacaggtattttgttaactaattatatagcaggactttacggtatagctattgcggtaactacaatgttagctttagctggtatggtggttgctctagatgcatatggcccagtgacagataacgctggaggaattgctgaaatgtcaaaattacctaataatgtaagaaaaacaacagatgctttagatgctgttggtaacacaactaaagctgtaactaagggttacgctataggatctgctggtctaggtgccttggttctttttgctgcttatacagaggatattaaacatttttcaaaagtagcaggatctaagttagaaggaatcgttgtgacatttgatttatcaaatccttatgttgttgttggtttattaattggaggtatgcttccttatttatttggttcaatgggaatgcaagcagttggaagagcagggggcgctgtagttatagaagtaagaagacaatttaaaaaatttccaggaataatgaaaaaaaaacaaaaaccagactatgctaaactagttgatttattaacagtggcagcaattaaagaaatgatagtaccatcattgcttccagtattatctccaattattttgtactttgttatatttgcaattggaggacaaatagctgcttta

SEQ ID NO: 267245 - DNA, 846 bp, Unknown
  Bacterial polypeptide expressing nucleotide sequence isolated from the Sargasso Sea
tgaaactggacatggtacaaatgttatacaaggattagctatctctttagaggccaccgctataccggcaataataattgctgttgggatattggtatcatttcaacttaatggcatttatggtattgcaatatctgcaacaacaatgcttgcattagctgggatggtagttgccttagatgcttatggtccagttactgataatgctggaggaattgctgaaatgtgtgacttggatcaagaagtcaggaaaaccactgatgcattggatgcggtgggaaacaccaccaaagcagttactaaaggttatgctattggatcagctggattagctgctttagtattgttttctgcatatacatatgatttaaagtattattttcctaatctagatattaatttttctctttctgacccttatgtggttgttggactattgattggggggatgttaccgtatttgtttggagctttaggcatgactgcagtaggcagggctggaggtgatgttgtaaaggaggttcgaagacaatttaaagagattcctggtataatgactggtaaaggaaaacctgattatagtaaagctgtagatttgctaacaaagtcagcaataaaagaaatgatccttccctctttgttacctgttcttgcccctattatattatattttttaatatctttatttgatcaaaaatctgctttaattgctgttggtgcaatgttacttggtacaatagttacaggtttgtatgtagccatatcaatgactgccggtggaggtgcttgggataatgccaagaaatatatagaagatggcaatcatggaggcaagggatctgaagc

SEQ ID NO: 267246 - DNA, 860 bp, Unknown
  Bacterial polypeptide expressing nucleotide sequence isolated from the Sargasso Sea
tatggaaacttcagcactaaacatacttcaacttattattttagcaggtttattatcaattgtttatggtttttttacaggtaaagatattttaaactctagtgctggaaacaataaaatgcaagaaatagcttctgctattcaagttggagcaaaagcttatttaaatagacagtataaaactatcgctatcgttggattagttgtccttgttattattagttatgcatttagtattttagttggattaggatatttaattggagcatcattatcaggaattgctggatatgttggaatgcttgtatcagttcaagccaatgtaagaacagcagaagcttcaagaaaaggattatccaaaggtctttcaattgcatttaaatctggagcggtaacaggaatgttagttgctggcctagctcttttagcaatagcagtttattattacttattactgtcttttgatgttgaagaaagagaaatagtaaatgctttagttgcattaggtttcggtgcatcattgatatcgatatttgctaggcttggtggtggaatttttaccaaaggtgctgatgtaggtgcagatttagttggaaaggttgaagcaggtataccagaagatgatcctagaaatcccgcagtaattgctgataatgtaggagataacgttggtgattgtgcaggcatggctgctgacttatttgaaacgtatgcagtcactatagttgctactatggttttatcttcaatattttttcatggaaatctcaatatgatgatttaccccttatcaataggaggtgcttgcatattgacctctataataggaactttttttgttaggttgggaaaatctaaaa

SEQ ID NO: 267247 - DNA, 738 bp, Unknown
  Bacterial polypeptide expressing nucleotide sequence isolated from the Sargasso Sea
catggatatcacattggtagcagctggagcagcagtggtcggactggtcgttgctttgttcctatacaaaaagaatgacagcatggagattgaagacaaacgtgtcgcagagattactcaagaaatccaagatggcgcaatggccttcctttttgcagagtatcgcattttggcaggatttgtcgtagtggttgcaggtctactatactgggacagtggtgatatttacaccccgggtgcattccttgctggagctgctgcaagcgtccttgctggattttcgggcatgcgtgctgcaacaagcgcaaatggccgaaccgccatggctgcgaagtcaggtggtcaaccagccgcattagaggtatcttacaacggtggtgctgtgatggggctatccgttggaggattgggcctcttaggcatctctctcgtagcttattggttgggaactggtgagtcgaatcacattgagagcgcagcaggatttggtatgggtgcctcttccattgcactcttcgcacgtgtaggtggtggaatttacaccaaggccgctgatgtaggcgctgatcttgttggaaaggttgaggcaggtattccagaagatgacccacggaaccctggtgtaattgcagacaacgttggtgacaacgtcggtgacgtcgctggaatgggtgcagacatcttcgagtcattcgttggttcaattattgctgccatggtcattgccaatggcactga

SEQ ID NO: 267248 - DNA, 709 bp, Unknown
  Bacterial polypeptide expressing nucleotide sequence isolated from the Sargasso Sea
ggatgccgttggaaatacaaccaaggccgtgacaaagggctatgccatcggatccgcaggtttggctgctctcgtcttatttgcagcctatacagaggatcttggccattacttccctcaactggaaatcagtttcgaattgcaaagtccgtatgtggtgatcggcttgttcttaggcggattgttgccatacctttttggcgctcttggtatgatggcggtaggacgtgctggcggtcaagttgttgtagaagtccgtcgtcaatttaaagagatccctgggattatggagggtactgctaggccagaatacgggaaagcagtggatcttctaacaaaggcagccataaaggagatgatcattccttccttgttgccggtccttgcgccaatagtcgtatatcttgttatttgggctgttgctgggcaaggagaagcctttacaactcttggagccatgctattgggaacgatagtgacaggaatttttgtggctatttctatgacttcaggtggtggtgcttgggataacgcaaaaaagtatatagaggatgggaatcatggtggaaaagcctcggaggcccataaagcgtcagttactggtgataccgtgggagatccatacaaggatacagcaggtcctgcagtgaacccaatgataaaaatcatcaatatcgtagctctattgcttttggcagttcttggttaa

SEQ ID NO: 267249 - DNA, 784 bp, Unknown
  Bacterial polypeptide expressing nucleotide sequence isolated from the Sargasso Sea
tgttgctggtatccttattacaaattcgattgctggactttttggtattgcaattgctgtaactactatgcttgcattagcaggtatggttgttgctttagatgcatacggaccagttactgataatgctggtggcatagcagaaatgtctaatcttgaaaaaaaggtaagaaaaacaacagacgctctagatgcagtaggaaacacaactaaagctgttacaaaaggctatgcaattggctcagctggtttaggtgcattagttttatttgcggcttacacagaggatatcaaacatttttcaaaagaagcagggtctgcactagaaggtatcgtagtaacttttgatttatcaaatccttatgtggttgttggtttattaattggtggaatgttaccttatctttttggctcaatgggaatgcaagctgttggaagagcaggtggtgctgttgtagttgaggtaagaagacaatttaaaaaattccctggtattatgaaaagaaaacaaaaacctgattatgctaaattagtagatttgcttactgttgctgctattaaggaaatgattataccgtcattgttaccagttttatctcctgtcgttttatattttataattctatcgattggtggacaagttgcagctcttgctgcggttggtgcaatgttacttggtgttattatcactggtttatttgttgcggtatcaatgactgctggtggtggtgcttgggataatgcaaaaaaatatattgaggatggaaatcatggtggaaaaggt

SEQ ID NO: 267250 - DNA, 753 bp, Unknown
  Bacterial polypeptide expressing nucleotide sequence isolated from the Sargasso Sea
cgctgatttatttgaaacatatgcggtaactatatttgcaaccatggttttgtcttcaatattttttcatggagatcttaatatgatgatataccctttatcgattggtggagcttgcatattaacatctattattggaactttttttgtcaaattaggaaaatcaaaaaatatcatggctgcattatataaaggctttgtggttacagctgtaacttctttaataattttgtaccctgttactgattatgttttagggttggaaagtaattatacaatttccgataaatcatttactggaatgagtttatatctttgtggtgcgataggattgattataacaggtttgttaatttgggttaccgaatattatactggaacaaattatagaccagtaaaaagtgttgcttcgtcctctacaacaggccacggaacaaatgttattcaaggcttagcagtctcaatggaggccactgcaattccagcaataattattgttgcaggaattctagtcacaaatcatattgctggattatttggtatagcaatcgctgttacaacaatgcttgctttggcaggtatggtagttgctttagatgcatatggccctgttacagataacgctggtggaattgcagaaatgtctaatttaccaaaaaatgttagaaaaactacagacgcgctagatgctgttggaaataccacaaaagctgttaccaaaggatacgctattggatctgctggtttgggtgc

SEQ ID NO: 267251 - DNA, 916 bp, Unknown
  Bacterial polypeptide expressing nucleotide sequence isolated from the Sargasso Sea
gatgtatactgcaacaaaagctaatgttagaactgctgttgcagctaatgtcaaaggtgcctctgaggctctaaatgttgcattttttggtggctctatcatgggattgactgtagcttctatgggtctttttggagtaggaattttattttattatttcggaggagatataaaaactattcactcaattgaaggttttgcaatgggagcttcttcagttgctttattttctcgtgtaggtggtggaatttttactaaaagtgcagatgttggtgctgatcttgttggtaaagtagaagcagggatacctgaggatgatccaaggaatccaggtgtgattgcggataatgttggggataatgtaggagatgttgctggaatgggttcagatatctttgaatcatattgtggatcaatgattgcttctattgctttagcagcatcaatgacatctgctactatcacaaaactgggaggggaccaatacatgctgcagttaatgcctttagctctagcatccctaggtcttatctgttcaattattggtattttaatggttcgattattttctgataaaagtccagaaattgcactaagatttggaactattggttcagcagtcgtatttattctggcatcattttttctagttaaatatttaggtgtttcatctggtgtttgggcagctgttctaattggatctattggtggaattatagtaggacttgttacagagtattatactggtggggcaccagtaaagaaaattgctaaaggcggtgaaacaggacctgctactattatgattacagggttggctactggtatgcaatcagtagctataccagtttttacaattgtatgtatcatatttacagctaattattttgcaggactatacggtgttggtatcgct

SEQ ID NO: 267252 - DNA, 940 bp, Unknown
  Bacterial polypeptide expressing nucleotide sequence isolated from the Sargasso Sea
gtggcgggaggcatttttacaaagagtgcagatgttggagctgacttggttggcaagatgaggctgggcattcccgaggatgatccaaggaatcctggagttattgcagataatgttggagataatgttggtgatgttgcaggaatgggctcagatatttttgagtcctattgcggttcaatgattgcttctattgccatagcttacactttaggctccaaagaaatgatgatgtatccattggcgctaacttcaattggcctcatagcttcaattattgggataataattgttaaattgcaatcagcaaaagctccagcaagcgctttaagatcgggaacccttttagctccagtcatttttatcatcatggcttattttttaacaaatagtatggttggtgtttcaatgaatgtttggtgggcagtcgtttgtggagctgttggtggggtccttattggattaattactgaatactataccggcggagcccctgtgaaaaaaattgctgagtctggagaaactggttcagcaacggttatgatttcaggcctgtctgttggaatgcagtctgttgtaattccgattttagtattggcaactattattcttatatctacaagtttatcaggcgtttatggagttggtgttgctgcagtcggcatgctttcaactgttggtattactatggctattgatgcatatggtccggtggcagataatgctggtggaatagcagagatggctggcatgggtgaagatgtaagagagattaccgattcattggatgagcttggcaatacaacagcagccataggaaaaggctttgcaattggagctgcagctcttgctgcattagcaattatttctgcattctcagcagttgtgagtcttaacttcggcgaagcttttacattgtctcttggtcaaccaattgtat

SEQ ID NO: 267253 - DNA, 838 bp, Unknown
  Bacterial polypeptide expressing nucleotide sequence isolated from the Sargasso Sea
aattggtgctaaggcatatctaaatagacaatataaaactatcgctatagttggtataattgtacttgcaatagtaacttatttttttagttatttggtaggtattggatattttattggagcttttttatcaggtgttgcaggctacgttggtatgcttatatcagttaaagcaaatgtgcgtacagctgaagcagctcgtaagagtttacaatcaggtttaacaatagcatttaagtctggggcaataacagggctattagttgcaggattagctttattagcaattactttttactatatcattttaattaatttaaacgtggataacagagaaataattaatgcattagttgccttaggatttggcgcttcgcttatctcaatttttgctagacttggtggtgggatattcacaaaaggtgcagatgttggagcagacttagttggtaaagtagaggcgggcattccagaagatgatccaagaaatcctgcagtaattgcggataatgtcggagataatgttggagactgtgctggcatggctgcagacttatttgaaacctatgctgttactattgttgcaacaatggttttggcctcaattttttctccacaagattttaatttaatgatttaccctttggctataggtggagcctgcataattacttctataatcggaacgtggtttgtaaaactaggaaaaagtaagaatattatggtagctttgtataaaggttttatcgtaacggcagttacatctttattaattttgtacccagttacagactctgtagtaggaattaaaagtacgtataataataacgcaggagca

SEQ ID NO: 267254 - DNA, 558 bp, Unknown
  Bacterial polypeptide expressing nucleotide sequence isolated from the Sargasso Sea
tagttgttggtttattaattggaggaatgttaccatatttatttggttcgatgggtatgcaggctgttggcagagcaggtggagctgtagttattgaagttagaagacaatttaaaaaaatacctggtataatgaaacgtaaatctaaaccagattatggtaagcttgtggatttattaacgcaagctgcaattaaagaaatgattgtaccttcgttattaccggttctttctccgattttactttatataattattttttcaattggtggtcaagttgccgctttagcatctgtaggagcaatgttattaggagttataataacaggattgtttgttgcagtttcaatgacagcaggtggtggagcttgggataatgcaaaaaaatatattgaggatggtaaatttggtggaaaaggctcagaggcacataaagctgcagtaaccggagatactgtaggtgatccttataaagatactgcaggacctgccgttaatccaatgattaagattactaatattgtagctttattactattagcagttatcgcaggttaat

SEQ ID NO: 267255 - DNA, 714 bp, Unknown
  Bacterial polypeptide expressing nucleotide sequence isolated from the Sargasso Sea
aacgtaggtgataatgtaggtgattgtgctggtatggccgctgacttgtttgagacatatgcagtaacaatagtagcgacaatggtgttagcatcgattttttctcctcaagattataatttaatgatttatccactagctattggtggtgcttgtattattacatcaataattggaacttggtttgtaaaactaggtaaaaccaaaagtataatgggtgctttgtataaaggattcatagttacggcgattacatctttgataatcatgtatccaattacagaatcaattattggattaaaatcaaattataataataatgcaggagcgatatttacaggcttagatctttatatttgtggtgttgtaggatttataattacgggattattaatttgggttacagaatattatacaggaactaattataggccagttagaaccgttgccaaatcttcaacaacgggacatggtacaaatgttattcaagggttagcaatatctatggaagctacagctataccagctttaataattgtagcaggaattttatatactaatagtttagctggtttgtatggtattgcgattgctgtaacagcgatgttagctttaactgggatggttgtcgctttagatgcgtatggacctgtaactgataatgcaggtggaatcgcagaaatgtctaagttgccaaaaaatgttagaaagact

SEQ ID NO: 267256 - DNA, 940 bp, Unknown
  Bacterial polypeptide expressing nucleotide sequence isolated from the Sargasso Sea
atgaaagcaatgtataaaggttttgtgataacagctattagctcattggtaattctttttccaataaccaagcatgttattggctttactacggaatatgtagctaatggaaagtcattcaatggtttaagtctttatttttgtggtatcattggtttagttataacaggattaataatttggattacagaatattatacgggaactgattacagacctgttaaaagtgttgctcaatcatcaacaacaggacatggtacaaatgttattcaaggtttagcggtttccatggaagctactgctgttccggcattaataattgttggtggtattttatggactaaccatatcgcaggactttatggtatagctatcgcagtaactacaatgctggcattagctggtatggttgttgctttagatgcttatggacctgttactgataatgctggaggtattgcagaaatgtcaaatcttcctaaaaatgttcgtaaaactactgatgctttagatgctgttgggaataccactaaggctgtaacaaaaggctacgctatcggttctgcaggtcttggagcattagttctttttgcagcatatactgaagatattaaacatttctcaaaagttgcaggttcaaatttggaaggtataactgtcacttttgatttatctaatccttatgtagttgttggattacttataggtggaatgcttccttatctttttgggtctatgggtatgcaagctgtaggaagagcagggggtgctgtagtaatagaagtaagaaggcaatttaaaaaaattcctggtataatgaaaagaaaagctaaaccagattacggtaagttagttgacttacttacaagagctgcgataaaagaaatggttataccatcattattaccaatattatcgccaatcgtattatacatagtaa

SEQ ID NO: 267257 - DNA, 421 bp, Unknown
  Bacterial polypeptide expressing nucleotide sequence isolated from the Sargasso Sea
ggaacaggcaagccagaatatggtagatgtgtagacatactcactaaatctgcaattagagaaatgataattccttctatgctaccagtgctatctccaatagtggtttactttgttatattattgattgctggtcaatcagcagcattatcatgcttaggtgcacttctacttggggtaattataacaggattatttgttgctatcagtatgacagctggaggaggagcttgggataacgcaaaaaaatatattgaagatggaaatcatgggggaaaaggtagtgaagcacacaaagctgctgtaactggagacactgtaggtgatccatataaagatactgctggaccagcagtaaacccaatgattaaaataacaaatattgttgctctattactgcttgcttcaatagcgatataaa

SEQ ID NO: 267258 - DNA, 739 bp, Unknown
  Bacterial polypeptide expressing nucleotide sequence isolated from the Sargasso Sea
atggaagattcagtttcaaatatactacaacttattattttatcaggtttattgtcaatcgtttatggattttttacaggaaaaaatattttaaatgctagcgcgggtagcaccaagatgcaagaaattgcttctgcgatacaaattggagcaaaagcttatctaaacagacaatacaaaacgattgctatagtaggagtagttgtattaattattattagttttgcttttagtattttagttggaataggatatttgataggagctacattatctggaattgcaggttacgtaggaatgctcgtctctgtacaagctaatgttagaacggctgaagcatctagaaaaggattggctcatggactttcaatagcttttaaatcaggtgctgtaactggaatgttggtagctggtttagcacttttatcaattgctgtttattattatttattattatctaatggtattgatgagagagaaattgttaatgcattggtagcattaggtttcggtgcatctttaatttcaatttttgctagacttggaggtggaatttttacaaaaggtgctgatgtaggagcagacttagtaggaaaagttgaggctggtattccagaagatgatcctagaaatccagctgtaattgctgataacgtaggtgataacgttggtgattgtgctggtatggctgctgatttgtttgaaacttatgcagtaacaattgttgctactatggttt

SEQ ID NO: 267259 - DNA, 861 bp, Unknown
  Bacterial polypeptide expressing nucleotide sequence isolated from the Sargasso Sea
tatgggagcatctgttgtagcacttttttctagagtaggtggaggaatttttacaaagagtgctgatgtaggagctgatctcgttggtaagattgaagctggtattcctgaagatgatccaagaaacccaggcgttattgctgataatgttggtgataatgttggtgatgttgctggaatgggttcagatatatttgagtcatattgcggctctatgattgcatcaatagcaatagcttatacgcttggcaaccaagatatgatgatgcttccactggctttagctgcgactggcttaatagcgtcaataattggaatttttattgtcaagcttcagtcagcgaaagcccctgcaagcgcattaagatctggaactcttttagccccagtaatatttgtggctatggcttatttcataattgactcctttgatgatgtcggaatgaatgtatggtggtgtgttattgctggagctgttggcggagtattaattggacttattacagaattttatacaggcggaagtcctgttagaaaaatagctgaatcaggagaaactggttctgcaacagtaatgatttcaggattatcagttggaatgcaatcggttgtaatacctattgttattttggcattgatcattcttgtatccacttacttatcagatatctatggcgttggaattgctgctgttggtatgcttgcaaccgttggaataacaatggcaatagatgcatacgggcctgtcgcagataatgcaggtggtatagctgaaatgtcaggtatgggcgaagaagtaagagaaataacagactctcttgatgaattaggaaatactactgctgcaattggaaagggttt

SEQ ID NO: 267260 - DNA, 910 bp, Unknown
  Bacterial polypeptide expressing nucleotide sequence isolated from the Sargasso Sea
attggcggagcttgtattttaacttctattattggtactttttttgtacgtctaggaaaatcaaaaaatattatgactgctttgtataaaggttttattgttactgctatttcatctctaatagttttatatcctattactgattgggtaataggtttcgatactgtttataatgttaatgataaaagttttaatggaatgagtttatattattgcggaataattggtctaataattacaggattaattatatgggtaacagaatattacactggaacaaattttagaccagtcaaaagcgttgcctcttcatctacaacaggccatggtacaaatgtaattcaaggtttagcagtatcaatggaagcaacagcaattcctgccttaataattgttgcaggtatacttttcacaaattcaatagccggactttatggtatagcaatagctgtaactactatgttagcattagcaggcatggttgtagcattggacgcttatggaccagttaccgacaatgcaggaggtattgccgaaatgtcaaatttaccaaaaaatgtaagaaaaactacagatgcgcttgatgcagttggtaatacaactaaagctgttacaaaaggatatgccataggttcagcaggattaggagcgttagttttgtttgctgcttataccgaagatattaaatttttttctcaggtaaaaggatcaaatttagaaaatgtaatagtaacttttgatctttcaaatccatttgttgttgtaggtctgcttgtaggtggtatgcttccttacttatttggatcaatgggaatgcaggcagttggtagagcgggtggtgcagtagttgtggaagttcgtaggcagtttaaaaaaattccaggtataagaaaagaaaagcaaaacctga

SEQ ID NO: 267261 - DNA, 942 bp, Unknown
  Bacterial polypeptide expressing nucleotide sequence isolated from the Sargasso Sea
tctaatactagaactgcagctgcggctcaagataaaggccctgcaacagctctttcaatctcattttatggtggctctattatgggtttatgtgttgcttcattgggtcttctgggattaggaggtttattcttctttctaggagaaggtcattatcttgaaggttttggtatgggtgcctcagtggttgctcttttttcgcgtgttggtggaggaatctttacaaaaagtgctgacgtaggtgccgacctagttggtaaagttgaagctgggattcccgaagatgatcctcgaaatccaggagtaattgcagataatgttggtgataatgttggtgatgttgcgggaatgggttctgatatttttgaatcatactgtgggtcgatgattgcgactattgctattgcttacacgattcaatctgcagattctgaaagtttaatgatgttgccgttacttcttgcctctattggattggttgcatctttagttggaattttcattgtacgaacacaatcttctcagtcaccggcagctgctttacgatttggcacaatgggttctcccgtgatctttattgtaatggcatattttctggtacaaagcatgtctataaccgatggtgtttgggtctggggttgtgtcttgaccggtgctgtgggtggagttttgattggactcatcaccgagtattacactggcagtactccagtaagaaaaattgctaaatctggtgagactggttcagccaccgtgatgattactggtttatcggttggtatgcagtcagtagtgatccctatatttgtgctggcaagtattatttttgtttctacatccttttatggtttgtatggtgttggcattgccgcagtaggtatgttggccactgttgggataactatggcaatagatgcttatggaccggttgcagataatgct

SEQ ID NO: 267262 - DNA, 832 bp, Unknown
  Bacterial polypeptide expressing nucleotide sequence isolated from the Sargasso Sea
aaagcatcaactactggtcatggaaccaatgtcattcagggtttagctgtatcaatggaagcaacagctctaccagctatagtgatcgtaattggcattgtattaacttaccaattagcaggtttatttggaatcgcgatcgcagtcacagccatgctagccctagcaggcatggttgtagctcttgatgcctacggacctgtcacagataacgctgggggcattgcagaaatgtctaatcttgatgaaaatgtgagaaaaacaactgatgctctagatgctgtggggaatacaactaaagcagttactaagggatatgcaattggttcagctggtcttggtgctttagttttatttgctgcttatgtggaggacttaaaattaattccaaaacttacacctaactttagtcttgaaaatccatatgttgtagtaggcttattgataggaggtttgcttccatatctttttgcatcaatgggtatgatggctgtaggcagagctggaggtgccgtagtagaggaagtcagaaaacaatttgctgataaccctggaattatgacgggtgactcaaaacctgactattctaaatcagtagacatgttaaccagatcagcgattaaagaaatgatagttccttcgatgttacctgtcttatctcctatagtattattttttattgtatcttttgttgcagatcaaaacgcagctgtttcctcagttggagcaatgctattaggtgtaattgtaacgggaatatttgttgcaatctcaatgactgcaggtggaggagcatgggataatgcgaaaaaatttgttgaagatggtaatt

SEQ ID NO: 267263 - DNA, 970 bp, Unknown
  Bacterial polypeptide expressing nucleotide sequence isolated from the Sargasso Sea
gttgctggtttagctttattgtctatatcagtatactatttgatattagacttatattctgtatctgaggagacactcaagcatgcgcttgtcgctctaggatttggcgcttcattaatttcaatatttgcaagacttggaggtggaatttttaccaagggagcagatgttggagctgatttagttggcaaagttgaagcaggtatccctgaagatgatccgagaaatcctgcagttatagctgacaatgttggggataatgtgggagactgtgcaggcatggcggctgatttatttgagacttatgctgtaacaattgtagcgacaatggtcctagctacaatattcttttctggcgaaattgctcacatgatgactatttatccgatggcaataggagggagctgtttagtagcttcaataataggtactttttttgtaagactaggttcttctcaaagtattatgggtgctttatataaaggttttatagcatcagcaatactttcattgatttttatttacccagtaactcaaatagtattaggagacatgtcaaaagaattcacttttggtgacacgacgttttctggtacatccttatatatttgttcaataattggaattgtaattacaggacttcttatttggataactgaatattacacaggaacaaattatagacctgttcaaagtgttgcaaaggcatcaacaactggtcacggaacaaatgtaatacagggacttgcagtttctatggaagcaacagcgcttccagcgttggttattgtaataggaatagtaatgacatttcaattggctggcttgtttggaatagcaatcgcagtgactgcaatgcttgcactagctggaatggttgttgcgcttgatgcttatggtcctgtcacagataatgctggcggtatagcagaaatgtcaaatcttgatgaaaatgttagaaaaacgacgg

SEQ ID NO: 267264 - DNA, 529 bp, Unknown
  Bacterial polypeptide expressing nucleotide sequence isolated from the Sargasso Sea
aatgagctacagcaagattccggcgggcaaagacctgccgaacgacatctacgtcgccatcgagatcccggccaaccacgcgccgatcaaatacgaaatcgacaaggacagcgacacactgttcgtcgaccgtttcatggctaccccaatgttctacccagccaactatggcttcatcccgaacaccctggctgacgacggtgatccgctggacgtgctggtggttaccccttacccggtggccccaggctcggttatccgcgcccgtccggtcggtgtgctgaacatgaccgacgacggtggcggcgacgccaaggtcgtcgctgttcctcacgacaagctgtcgcagctgtacgtcgacgtcaaggaatacaccgacctgccagccctgctgatccagcagatcgagcacttctttgccaactacaaagatctcgagaagggcaagtgggtcaagatcgaaggctgggaaggcgccgacgccgcccgtgccgcgatcaccaaatcggtcgctgcctacaagggctga

SEQ ID NO: 267265 - DNA, 952 bp, Unknown
  Bacterial polypeptide expressing nucleotide sequence isolated from the Sargasso Sea
gatgctagttgcaggatttgcacttctctctattgcaattttttattttgttttgcacaactctggttcatttcctggtagagagattgtcgctcctttagtatcgcttggatttggagcatcattaatttcaatttttgcaaggctaggtggaggtatatttaccaagggcgctgatgttggggcagatttggttggaaaagttgaagctggcattccagaagatgatccacgaaatcccgctgttatcgcagacaacgttggagataatgttggtgattgcgcaggcatggccgcagatctttttgagacttatgttgtaacagttgtagccacaatggttttggcatcaatatttttcatggaaaattcttatacaatgatgatatttcctctagctattgcaggagtttgtgcattaacaagtataattggcacttattttgttagacttggtaaaagtaacaatattatggcagcactttatagaggatttgcagtatcagctattttatctgcagtattactatattttgttactgattatatagttggtttaaataatgttttagttgttgaaggaacatctactaaattcacaggaatgtcactttttatttgtggtttacttggattgataatcacaggattaataatttgggtaactgaatattatacagggactaattatagacctgttcaaagtatcgctcaatcatcaacaacaggtcatggaactaacgtaattcaaggtcttgcaataagcttagaagcaacagcactaccagctttaattattgttgcaggaattatttcaacttattcacttgctggtttatttggtatcgcgattgctgttacaactatgttggctttagctggtatggtggttgcgctagatgcttatgggcctgtcacggataatgcaggtggtatagcagaaatgtcaaat

SEQ ID NO: 267266 - DNA, 530 bp, Unknown
  Bacterial polypeptide expressing nucleotide sequence isolated from the Sargasso Sea
gctaccttattggtttggttcaatgggaatgcaagccgtcggtagagcaggtggagctgtagttgttgaagtaagaagacaatttaaaaaatacccaggaataatgaaaagaaaacaaaaacccgattatgcaaaattagtggatttattgacagtagcagcaattaaagagatgattgttccatctttattacctgtactttcgccagttgtattatatttcataattttagctattggtggtcaagtagcagctcttgcagctgtaggagcaatgttgttaggtgttatcataactggtttatttgttgctgtttcaatgactgcaggaggtggagcctgggacaatgcaaaaaaatacatagaagatggtaatcatggtggtaaaggttctgaggctcacaaagctgccgtaaccggagacacagtaggtgatccttacaaagatacagctggaccggcagttaacccaatgattaagattacaaatatagtagcgttgttattgttagctgttatcgctggctaat

SEQ ID NO: 267267 - DNA, 700 bp, Unknown
  Bacterial polypeptide expressing nucleotide sequence isolated from the Sargasso Sea
tcacttggttttggagcttctttaatttccatatttgcaagattaggtggtggtatttttactaaaggtgctgatgtaggtgctgatctagttggaaaagtcgaagcaggtattccagaagatgatccaagaaaccctgcagtaattgctgataatgttggagataatgttggagactgtgctggaatggctgcagatctttttgaaacatacgttgtaactgttgttgctacaatggttttagcatcaatattttttgtagataattcttatacaatgatgttttatccattagcaattgcaggtgtttgtgcactgactagtattataggcacttattttgtaagattaggtaagaataacaatattatggcagctctttatagagggtttgcagtttcagcaattctttctgcagtacttttatattttgttacagattatgttgtaggtcttgatactaacttatttgtagatgggactaatattaattttacaggtttgtctctgttcttttgtggtttattgggtttaataattacgggacttattatttgggttacagagtactatactggtactaattatagacctgttcaaagtattgcacaatcatcaacaactggacatggaacaaatgtaatccaaggtttggccattagtttagaggcaacagctttacctgctttaataatagtag

SEQ ID NO: 267268 - DNA, 802 bp, Unknown
  Bacterial polypeptide expressing nucleotide sequence isolated from the Sargasso Sea
tatgtgggaatgaacatctcagtaagatctaatgtcagaacaacacaggctgcaagttcaagtttagcagagggtttatctgtatcttttaaagctggtgctgttactggtatgttagttgctggttttgctttgttatcgattgcactgtattattttgtcttagacaattcaggtttattccctggaagagaaattgttgcaccattagtatcattaggttttggagcttcacttatctcgatatttgctagattaggtggcggtatatttacaaaaggggccgatgttggtgccgatcttgttggtaaagttgaagctggtattcctgaagatgatccaagaaatcctgcagtaatagcagataacgttggtgataacgttggtgattgtgcaggtatggctgcagatttatttgaaacttatgtagtgactgtagttgcaacgatggttctttcttctatttttttctctgatctatcttcgatgatgatgtatcctcttgctattgcaggtgtctgcacgttagcaagcattattggaacttattttgttaagttaggtaaaagtgaaaatataatggttgctctttataagggttttgcagtatctgcagttttatctgcaatattactttatttcattacagatcatgtaattggtttaggttctgtatttactgtagaagataaatccttttctggtatgtctcttttttactgtgggttgttaggtttaattattactggtttaattatatgggttactgaatattacacaggaacaaattatagacctgtca

SEQ ID NO: 267269 - DNA, 751 bp, Unknown
  Bacterial polypeptide expressing nucleotide sequence isolated from the Sargasso Sea
atgggagcatctgttgtagcacttttttccagagtaggtggaggaatttttacaaagagtgctgatgttggagctgatctcgttggtaagattgaagctggtattcctgaagatgatccaagaaatccaggcgttattgcggataatgttggagataatgttggtgatgttgctggaatgggttcagatatatttgagtcatattgcggctctatgattgcatcaatagcaatagcttatacgcttggaaaccaagatatgatgatgcttccactggctttagctgcgactggcttaatagcttcaataatcggaatatttatagttaagcttcagtcagcaaaagcacctgcaagtgcattgagatctggaactcttttagcgccagtaatatttgtggctatggcctatttcataattaattcttttgacggagttggaatgaatgtatggtggtgtgttattgctggagctgttggcggtgtattgattggacttattacagaatattacacaggcggcggcccggttaagaaaattgctgaatcaggagaaactggttctgcaactgtaatgatttcaggtttatcagtaggaatgcaatcagttgtcatacctattgttattctagccggcatcatccttacttcaactcaactatcaggcatttatggtgtaggaattgccgctgttggtatgcttgctactgttggaataactatggcaatagatgcatatggaccggttgctg

SEQ ID NO: 267270 - DNA, 567 bp, Unknown
  Bacterial polypeptide expressing nucleotide sequence isolated from the Sargasso Sea
atccatttgtagtagctggattattaattggaggtatgttgccatatttatttgggtctatgggaatgcaagcagtaggacgagcaggaggtgcggtggtgattgaagttagaaggcaatttaaaaaaatccctggaattatgaaaggcaaaagaaaaccagactacggaagattagttgatttactcacaagagctgcaattaaggaaatgattataccgtctttattgccagttttatcgccaattattttatattttataattttacaaataggtggtcttgaagctgctctctcttctttaggtgctatgttattaggagttataataactggattgttcgtggctgtttcaatgactgcaggaggtggggcttgggataatgctaaaaaatacattgaagatggaaattatggtggcaaaggttctgaggctcataaatctgctgttacaggcgacactgttggcgatccttacaaagatacagctgggccagcagttaatccaatgataaaaattactaatattgtagcattattactattggctgtaattgctcactaat

SEQ ID NO: 267271 - DNA, 931 bp, Unknown
  Bacterial polypeptide expressing nucleotide sequence isolated from the Sargasso Sea
tacaaaaggagctgatgttggagcagatttagttgggaaagttgaagcaggaatccctgaagatgatccaagaaaccctgcagttatagctgataatgttggtgacaatgttggtgattgtgcgggtatggcggctgacctttttgaaacttatgcagttacaatagttgctactatgttaattgcaacaataaccttttcgggtaatcttttattaccttctatagaattacctttgttaattgggggtgtttgtatcattgcttcaataatcggttctttttttgttaggttagggtcaaataataatattatgggcgctttatataagggttttatagctagtgcggctttttcagcattatttatatatttctctgttgactacttatttggtgatacagaacacgctacgcccttcttcttatgctgtatagttggattgcttgttacagcattaattatatgggttacagaatattatacttcaactgaatatagacctgttaaatcaattgctaaatcttctgaaaccggtcatggaacgaatgttatacaaggtttagcaatttctatggaagcaacagctattccagcaattattattgcaataggtatagtggtctcttttaatatagctggaatatatggaatttcattagcagctacgactatgttagctttggcgggcatggtcgttgctctagatgcatatggtccagtaactgacaatgccggtggaatcgcagaaatgagtgaattggatgaaaatgtaagaaaaacaacagatgctcttgatgcagtcggtaatacaactaaggctgttacaaaggggtatgccataggttcagcaggtttagcagctttggttttgtttgcagcttatacatatgatctaaaccattatttttctgacttgcagatttcattg

SEQ ID NO: 267272 - DNA, 517 bp, Unknown
  Bacterial polypeptide expressing nucleotide sequence isolated from the Sargasso Sea
tttttggttcatgggaatgcaagctgttggtagagcaggtggagctgtagttgttgaagtaagaagacagtttaaaaaatttcctggtataatgaaaagaaaacaaaaacctgattatgctaaattagttgatcttctaactgttgcagcaattaaagagatgattataccatcactcttaccagttttatcaccggtagttttatatttcataatattatctattggtggacaagttgcagcattagctgcagtcggtgcaatgttacttggtgtaattataacaggactttttgtagctgtttcaatgaccgctggcggtggtgcatgggataatgcaaaaaaatatattgaagatggtaaccatggtggaaagggctccgaggctcataaagcggcagttacaggtgatactgttggtgatccgtataaagatactgcaggacctgcagttaatccgatgattaaaattacaaatattgtagctctattgctattagctgttatcgctggttaa

SEQ ID NO: 267273 - DNA, 818 bp, Unknown
  Bacterial polypeptide expressing nucleotide sequence isolated from the Sargasso Sea
tcttattttagctgttttagttttctttgccctaggttgggaaactgcaaccgcagttttagttggcgcttcaagttcagctttagctggatttattggaatgtatgctgcaactaaagctaacacaagaacagcagcagcagcccaagatagtggagcagcttcagctttatcaatttctttttatggtggatcaataatgggtctatgcgttgcttctttgggtcttcttggtttgggaggattattttattttctaggagagggtcattatcttgaaggatttggaatgggggcttcagtggtagcactattctcaagggttggtggaggaatcttcaccaaaagcgctgatgttggagctgaccttgttggaaaagttgaagcaggaataccagaagatgatccacgaaatccaggcgtaattgctgacaatgttggagataatgttggtgatgttgcaggaatgggctcagatatttttgaatcatattgcggctcaatgattgctactatagcaattgcttacactatgacagaagcaaataatggtcctttgatgagcttaccgctagcactagcgtctattggtttagtatcatcaattttaggtatcttaattgttagggctcaatctgcgaaagcacctgctgcagctctgaggactggaacaataggctccccagttatttttatagctttagcatttgggttaatttcttatttagatatttcacttaatgtttggttttgtgtactcaccaggtgctgtaggcggtgtattaataggactaataacagaatactatactggtagc

SEQ ID NO: 267274 - DNA, 931 bp, Unknown
  Bacterial polypeptide expressing nucleotide sequence isolated from the Sargasso Sea
aaatgtgagaacagcggaagcatccagaaaaggcttagctcaaggtctttcagttgcatttaaatcaggtgctgtgactgggatgttggttgctggtttagcattgttatctatagctgtttattattatatattgttaaaatctaacgtagatgaaagagaaattgtaaatgctttagtcgcattaggttttggcgcatcattaatttcaatttttgcaagactgggtggtggaatttttacaaaaggtgcagatgttggagctgatttagttggaaaagttgaagctgggattcctgaagatgatccaagaaatcctgctgtaatcgcagataacgttggtgataacgtaggagattgtgcaggaatggctgctgatttattcgaaacttatgcagtcacaattgttgcaacaatggttttatcttcaattttctttgttggagatttaaatatgatgatttatcctttaacaattggtgctgcatgcttgttaacatctataattggaacattttttgttaaacttggaaaaaataataatgtgatgaatgcattatataagggatttattgtatctgcattaacatctttagtaattttgtggccagttacagatcatgtaattggctttacaaatgaatacacagtaaatgacaaaaattttaatggtatggatttatattactgtggtgtaataggacttgttattactggattgttaatttggattacagagtattatacaggtactagctatagaccagttaaatctgttgctttatcttctacaactggtcatggaacaaatgttattcaaggattggcagtttctatggaagcaaccgctatacccgcgataataattgttgctggtattctcattacaaattctatagctggcctatttggcatagctatgcagtaccac

SEQ ID NO: 267275 - DNA, 814 bp, Unknown
  Bacterial polypeptide expressing nucleotide sequence isolated from the Sargasso Sea
aatgcttgttgctggcttagcgctactttcatttcagttttattatctacttttagtaagttattcagttgatgaaaatatcctgaaaaattctctagtaggattaggattcggagcttctttaatttctatctttgcaagacttggtggaggaatttttaccaaaggtgcggatgttggagctgatcttgtaggtaaagttgaagcaggaattcctgaagatgatcctcgtaaccctgctgtaattgctgataatgttggagataatgttggggattgtgcaggaatggcagcagatttatttgaaacatatgctgttacagttgtggcaacgatggtacttgcaatgattttctttccagggtcatcatcgctacttatttatccaatggctatatgtggttgttgcttggtagcatctataattggaaccttctttgtaagactgggtaaatcagagagtatcatgggagcactttataaaggatttattggatcttctatcttatctcttttatttatgtatccaattacgcagagtgttattggatttggagacatcagcaatgctagctttactggtatgtcactgtatatttgtgctattattggtttagtaattactggattgctaatctggataacagaatattatactggcactaattatagaccagttcaaagtatcgctaaggcatctacaacaggtcacggaacaaatgttatacagggacttgctgtttcaatggaagctaccgcacttccagctttagttattgttataggaattgttttaacatttcagcttgcaggt

SEQ ID NO: 267276 - DNA, 883 bp, Unknown
  Bacterial polypeptide expressing nucleotide sequence isolated from the Sargasso Sea
tttgtatttagcaatcagttctggaatcattgcaatgctttttgcattttggaaaacaagttggatcaataaacaagatcaaggtaccgaaaaaatggaacgcattggcaaagatatctctgatggcgcgatggcatttcttaaggcagaatatagaatattggctatatttgttttagttgttgcgcttcttttaggttttgcaaattataataaagacggatcaagttcgctagttgcattatcttttattattggtgcattaacttctggcttagcgggttttttaggaatgcgtgtagctaccaaggcaaataatagaaccactcatgcagccagaacaggccttgcccctgctttgaatgtggcatttaccggtggatcagttatggggctatccgttgttggtcttggagttattggtctaagtatattatttatgttttacctatcatattttagtagcgattatgataagattttaaatgtgatttctggtttttcattgggtgcctcatcaattgctctctttgcaagagtaggtggtggtatttatacaaaggccgcggatgttggcgcagacttagttggaaaagttgaagccggtatccctgaagatcacccactaaaccctgcaacaattgcagataatgtaggagataatgtcggtgatgttgctggaatgggagccgatctatttgaatcttatgttggatccatcattggatcgatggtacttggagctactattttatcttttggatcatttgatacttcttttgttatactaccattagtaattgcatcttcaggcattattgtttcaattattggtacatttcttgtgtctgttaaagagggaggtaatccacaaaaagcataa

SEQ ID NO: 267277 - DNA, 295 bp, Unknown
  Bacterial polypeptide expressing nucleotide sequence isolated from the Sargasso Sea
ttcagttgttgccgatcagaatgcagcagtttccgcagttggagcaatgttacttggtgttattgtaacaggtatttttgtggcgatatcaatgacagctggaggaggagcttgggataatgcaaaaaaatacgttgaagatggtaatttcggcggcaaaggttcagaagctcataaagccgctgttacaggtgatacagtaggcgatccctataaggatactgcaggaccagcagttaatcccatgatcaagataacaaacattgttgctttattgttgctagcagcgctatag

SEQ ID NO: 267278 - DNA, 412 bp, Unknown
  Bacterial polypeptide expressing nucleotide sequence isolated from the Sargasso Sea
gagtcaaagcctgattactctagatcagtcgatatgcttactcgttcagcaattaaagaaatgataattccgtctatgttgcctgtattatctccaataatacttttttttatcgtttcaattgttactgatcagaatgcagccgtttctgcagtaggtgcgatgttgctcggtgtaattgttacaggtatatttgttgcaatctcaatgactgctggcggtggcgcatgggacaatgcaaagaaatatgttgaagacggaaactttggcggtaagggatcagaagctcataaagccgcggttacaggagatactgttggagacccatataaagacactgcgggtcctgcagttaatccaatgatcaaaattactaatattgtagctttattattattagctgcactataac

SEQ ID NO: 267279 - DNA, 649 bp, Unknown
  Bacterial polypeptide expressing nucleotide sequence isolated from the Sargasso Sea
tctggaggtcttgatatacgccttcaaatctggagcgataactggcatgcttgttgtgggtctggcacttttgggcttagctggatattacactatcttgcgtgagtttgttgacccaaattcctcggacggaatgcggcacattttagaggcgcttgttgcactcggtttcggagcttctcttatttctatatttgcccgtttaggcggcggcatttttacaaaaggtgctgacgtaggatccgatttagttggtaaaattgaagctggcatccctgaagatgatccacgtaatgctggcgttattgctgataatgtgggcgataacgtaggagattgtgctggcatggcagcggatttgtttgagacctatgcagtgacactggtggggacaatgttattgggagccatctatttttcgggttctgcccaagaaaccatgatgttattgccattgattatcggagccgcttgtattttagcttcagtaattgcgacatcgtttgtaaaactcggtgccaataactctatcatgggggctttgtacaagggttttattgccagcgctgcaatatctgctgcactgattgccggcattatctcgcagattattggctgggatacagcttatcagacggatggtggggaa

SEQ ID NO: 267280 - DNA, 851 bp, Unknown
  Bacterial polypeptide expressing nucleotide sequence isolated from the Sargasso Sea
gatggtttatccattatctattggtggagcttgtataatcacatcaattattggaactttttttgttaaattaggaaactcaaagaacataatggcagctttatataaaggttttatagttactgcggtaacttcagttgctatattgtatccaattacagactatgttttaggtttagaaaattcatatattatatctgaaaaatcattcactggtatgagtttatacatttgtgggataattggtctagctattacaggtttgattatatgggttacagaatattatacaggtacaaattatagacctgtaaaaagtgttgcgtcgtcatctacaactggccatggtacaaacgtaatccaaggattggcagtatctatggaagctacggcagttccagctttaattattgtaagtgggatattattaacaaactatattgctggtctttttggtattgcaatagccgttactaccatgcttgcattagctggtatggttgtagcattagacgcttatggtcctgttactgataatgcaggtggtattgctgaaatgtctaatctaccaaaaaacgtaagaaaaaccacagatgcattagatgcagtaggtaacactactaaagcagttacaaaaggttatgcaattggttcagcaggtttaggtgccttagttttatttgcagcttatacagaggatataaaacatttttcaaaagtagctggatctcaattagagggtatagtcgtaacatttgatttatcaaatccatttgttgtagttggattattagttggaggaatgttgccttatttgtttggctcaaatgggtatgcaggcagttggtaga

SEQ ID NO: 267281 - DNA, 841 bp, Unknown
  Bacterial polypeptide expressing nucleotide sequence isolated from the Sargasso Sea
atgagcggaacagtcgaaacaatactattatacacaattggagctggtttattatctatcgtttatggatttttaactggtaaaaatattcttaattcaagtgcaggaaatgcaaaaatgcaagatattgcatctgcaattcaaattggtgcaaaagcatatttagcaagacaatacaaaactattgctattgttggtgcagtagttctggttattgtaagtattgcatttagtcctctagtaggtttaggttatttaataggtgctgcattatctggtattgcgggatatgtaggaatgttagtttctgtagaagcaaatgtaagaacagcagaagcatcaagaaaagggttagctcaaggtctttcagttgcttttaaatctggtgctgtaactgggatgttggttgctggtttagctttattagctattgctgtttattattatatattattgaaatctaatgttgaagaaagagaaatagttaatgcattagttgcattaggttttggtgcttctctaatctctatctttgcaagattaggtggtggtatttttacaaaaggtgcagacgtaggagctgacttagttggaaaggttgaagctggaattcctgaagatgatcctagaaacccagctgtaattgcagataacgttggtgacaacgtaggagactgcgctggtatggctgctgatttatttgaaacttatgctgttacaattgttgcaacaatggttttgtcttcaattttctttgttggtgatctaaatatgatgatttaccctttatctaatggtgctgcatgcttgttaacatctatgttggaacattttttgttaa

SEQ ID NO: 267282 - DNA, 933 bp, Unknown
  Bacterial polypeptide expressing nucleotide sequence isolated from the Sargasso Sea
gatggctgctgatttatttgagacttatgctgtaacaatagttgcaaccatggttttatcgtcaatattttttccgaatgatatgaccatgatgatttatcccttaactatcggtggagcttgtatattaacatctataattggaactttttttgttaaattaggcaaaagtaaaaatgttatgaatgctttgtataaaggatttgttgtttctgctatttcatctcttataattctttatcctgttacagattatgttcttggtttagaaaattcctacaatttaaataacaaatcattctcaggtatgagcttatattattgcggggtaataggtttagttatcacaggattattaatttgggttacagaatactatactggaactggttatagacctgttagaagtgttgcaaactcctcaacaactggacatgggacaaatgtaatacaaggattagcaatttcattagaagcaacagcaattcctgctcttataatcgtagctggtattttacttactaatcatattgcaggactatacggtattgctatagcagtaacaactatgcttgccttagccggtatggtagttgctttagatgcctacggacctgttactgataatgcaggtggtatagctgaaatgtcaaaattgccaaacaatgttagaaaaacaactgatgctttagatgcagtaggcaatactacaaaagcagtaactaaaggatatgccattgggtcagcgggattaggtgcacttgttcttttcgctgcttacacagaagatattaaacatttttcaaaagtagctggttctaaacttgagggtatagtagttactttcgatttatcatatccatatgtagtagttggtttattaataggtggtatgttaccatatttatttggatcaatgggaatgcaggctgt

SEQ ID NO: 267283 - DNA, 838 bp, Unknown
  Bacterial polypeptide expressing nucleotide sequence isolated from the Sargasso Sea
atggttgttgctttagatgcttatgaccccgtaacagataatgccggaggtattgcagaaatgtcaaaattaccaaagaatgttagaaaaactacagatgcacttgatgctgtaggtaacactactaaagcagttacaaaaggttatgcaattggttctgctgggttaggtgctttggtgctttttgctgcctacactgaagatattaaatttttttctacagtttctggttcgagattagaaggaataaatgtaagttttgatctttcaaatccatttgtggttatcggtttattagtgggtggtatgttaccttatcttttcggatcaatggggatgcaggcggttggaagggcaggcggtgctgttgttgttgaagttagaagacaatttaaaaaaataccaggtattatgaaaggaaaaagaaaaccagattatggaaaattagttgatcttttgactaaggctgccattaaagaaatgataataccatcccttcttccagttctatcaccaatcattttatatttaattatttactctatcggcggtctagaagcagccttatcttctgttggggcaatgttgttaggtgttattgttacaggtttatttgttgcaatatcaatgactgcaggtggaggtgcatgggataatgcaaaaaaatttatcgaagatggtaattatggaggaaagggatcagaatctcacaaggcagctgttactggtgatacagttggcgatccatacaaagatactgctggtccggcggttaatccaatgattaagataactaatattgtagcgctacttctcttagctgtaatagctcattaaa

SEQ ID NO: 267284 - DNA, 911 bp, Unknown
  Bacterial polypeptide expressing nucleotide sequence isolated from the Sargasso Sea
gtacccgctaattatagcaggtgtgtgcatagtttcatcactagtaggtactttttatgtaaaattaggtgaatcacaaaatataatgggtgctctttataaaggtttgattataacagcaattgcttcagtaattttaatttattttgctactgaattcctgataaatatggataaagttattgttaataaagatctttttattgagtctttttctgggattgatcttttttattgttcattagttggtttaacagttacaggattaattgtttggattacagaatattacactagtactgaatttaaacctgttaaatccgttgctaattcctctcaatcaggacatgcaactaatattatacaaggcttagctgtttcaatgcaatcaacagcgcttccaacctttgttattattttaggaattatattttcatataaatttgcaggtctttatggaatttcaatagcagcaaccaccatgttagcattagcgggcatgattgtggcattagatgcttatgggccagtaacagacaatgcaggaggtattgcagagatgtcaaatttatcggaagaagtaagaaaaaccactgatgcacttgatgcagttggtaataccacaaaagcagttacaaagggctatgcaatcggttcagctggattagcttctcttgttctatttggagcatacacccaagatttaaaatattattttccagacttagatgttaaattttcactagacgatccttatgttgttgttggtttattaattgggggcatgcttccttacctatttggttctatgggtatgacagctgtcggcaagacggcaacgaaaatagttaatgaagttagaagacagttctctgaaaataaaggaataatgactgggagttcaaaacgga

SEQ ID NO: 267285 - DNA, 910 bp, Unknown
  Bacterial polypeptide expressing nucleotide sequence isolated from the Sargasso Sea
gatgtcggtgccgatttagttggaaaagttgaagctggtatacctgaggatgatcctagaaatccagcagttattgcagataatgtcggtgataatgttggtgattgtgcaggtatggctgcagacttatttgaaacatatgctgtaaccattgttgccacaatggttctatcatcaattttttttattggtgatttaaacatgatgatttatccacttaccataggtgcagcatgtttaatcacatctataattggaacattttttgtaaagcttggaaataataataatgttatgaacgcattatacaaaggttttatcgtttcagctttagcttcattagcaatattatggctggttacagattatgttatcggttttaataatgaatatacggttaatgaaaaaacttttaatggaatggatttatattattgtggtgtaataggtcttgtaattacaggtttattaatttggattacagaatattatactggaacaggttatagacctgtaaaatctgtagctttatcgtcgacgacaggtcatgggactaatgttattcaaggcttagcagtatcaatggaggcaacagctattcctgcacttattattgtagcaggtattttaactacaaatacaattgcaggtctctttggtatagcaatagctgtaacaactatgcttgctttagctggtatggttgttgctttggatgcatatggcccagttacagacaatgctggcggtatagcagaaatgtcaaatttagacaaaaaagttaggaaaactacagatgctttagatgctgtaggtaatacaacaaaagcagttacgaaaggttatgcgattggatcagccaggtttgggagctttagttttatttgcagcatatacagaagatataaaa

SEQ ID NO: 267286 - DNA, 837 bp, Unknown
  Bacterial polypeptide expressing nucleotide sequence isolated from the Sargasso Sea
ggagctgcgggttatgtaggaatgctaatatcagtccaagcaaacgttagaactgctgaagcttcgcgtaaaggtcttgcttcaggattaaatattggttttaaatcaggcgctgtcacaggaatgttagtggcaggattagctttattatctatatcaatttattatttaattttattaaaactaagcatagatagcagagaaattattaatgctcttgtaggtttgggttttggagcttctttaatatctatttttgctaggcttggtggaggaatatttacaaaaggtgcagacgtaggtgcagatttggtaggaaaagttgaagcagggattccagaagatgacccaagaaatcctgcagtaattgctgataatgttggtgataatgttggtgattgtgctggtatggcagctgatttatttgagacgtatgctgtcacgatagtcgctactatggttttgtcttcgattttttttgaaaataatttagcaatgatgatttatccattagctattggtggagcttgtgttcttacttctatagctggtactttttttgttaaattaggttctagtaaaaatattatgggagctttgtataaagggtttattgctactgctattttttcagtaataattttatatccagtcactgataaaataataggtttagactctatttacacatctacaaatgctgaatttactggttttggactttatacttgtggaattataggtttaataatcactggtctaataatttgggtcactgaatattatacaggaacaaaatttcgtccagttcttagtgtagcaagatcttctaccacc

SEQ ID NO: 267287 - DNA, 739 bp, Unknown
  Bacterial polypeptide expressing nucleotide sequence isolated from the Sargasso Sea
tttagctggtatggttgttgcgttagatgcttatggcccagtaactgacaatgctggcggaatagctgaaatgtctaacttggataaaaaagttagaaaaactactgatgcactagatgctgttggtaacactactaaagctgttacaaaaggatatgccattggttctgctggtttaggtgcgctagttttatttgcagcttacactgaagatattaaacatttctctaaagaagctggttcttctcttgaaggcatagttgtaacttttgatttgtctaatccatatgttgtagttggtttgttaatcggaggaatgttgccttacttgtttggatctatgggaatgcaagctgtaggtagagcaggtggtgctgttgttgtagaagttagaagacagtttaaaaaatttccaggtattatgaaaagaaaacaaaaacctgattatgcaaaattagtagatttattaactgttgcagcaataaaagaaatgataatcccatcattattaccagtgttatcacctgtagttttatatttcataattctatctataggtggtcaggttgcagctttagcagctgttggtgctatgcttttaggtgtaattattacaggattatttgtagctgtttctatgactgctggaggtggtgcatgggacaatgcaaagaaatatattgaagatggaaatcacggtggaaaaggttctgaggctcataaagctgctgttactgga

SEQ ID NO: 267288 - DNA, 259 bp, Unknown
  Bacterial polypeptide expressing nucleotide sequence isolated from the Sargasso Sea
gctatgcttttaggtgttattataacaggactattcgtagctgtatcaatgactgctggtggtggagcttgggataatgctaaaaaatatattgaagatggtaaatttggtggaaaagggtctgaagcacataaagcagcggtaactggtgacacagttggtgatccttacaaggacacagctggtccagcagtaaacccaatgattaagattacaaatattgttgcgttgcttttgctagctgttattgcaggttagc

SEQ ID NO: 267289 - DNA, 799 bp, Unknown
  Bacterial polypeptide expressing nucleotide sequence isolated from the Sargasso Sea
aatggctggtggtattgcagaaatgtcaaacttagatgagaatgtaagaaagacaactgatgcacttgatgcagttggtaacacaactaaagctgttaccaagggttacgcaataggatcagctggattaggtgcgttagttttatttgcagcttatacagaggaccttgatcattttgctaaagatccagcaagtcctctttatggaatagaagtttcttttgatttatccaatccttacgtagtggttggtttattattaggaggactgttacctttcttatttggtgccttaagtatgactgcagttggaagagcagctggctcagtagttttagaggtaagaagacagtttaaagaaattcctggtattatggaaggtaagggtaagccagaatatggtacgtgcgttgatatacttactaagtctgcaattaaagagatgattgtaccatcaatgttacctgtattatcacctattgtcgtctatttcgttatattatttatagctggtcaggcagcagctttatcatgtttaggagcattattacttggtgtgattataacaggtttatttgttgctataagtatgactgcaggtggtggcgcatgggataatgcaaaaaaatatattgaagatggtaatcatggaggtaaaggtagtgaagctcataaggcagccgtaacaggtgatactgttggtgatccttataaagatacagctggaccagcagttaatccaatgattaaaattacaaatattgttgcattattacttttagccgcaatatcaatataa

SEQ ID NO: 267290 - DNA, 851 bp, Unknown
  Bacterial polypeptide expressing nucleotide sequence isolated from the Sargasso Sea
tggtttatttgttttggtaattgtaacttattttttgggtatctgggtggggcttggatattttattggagcatttttatcagccgttgctggatatgtcgggatgttagtttctgttcaggctaacgttagaacagcagaagcatcaagaaaaggattgtctgaaggacttgctattagttttaaatcaggagctgtcacaggaatgttagttgcggggttggctcttttatcaatatctatttactatttattacttgtaacgctaaatattgacgaaagagaaataataaatgctcttgttggacttggttttggagcttctcttatatctatttttgcaagattaggtggaggaatttttacaaaaggtgctgacgtaggagcggatctggttggtaaagttgaggcaggaatacctgaagatgatcctcgtaatccagccgtaatagcagacaacgttggagataacgttggagattgcgcaggaatggcggctgacttatttgaaacctatgcggtaacaatcgtagctacaatggttttagcttcaattttttttatgaatgattttagtatgataatttaccctttggcaattggaggtagttgtataattacttctataattggaactttttttgtgaaattgggaaaaagcaaaaatataatgggagctttgtataaaggatttatagctacagcaattctttcgcttataatactttatcccgtcactgataaaattataggaatagacaatatttataaatcttctaacgcaagttttactgggttgggtttatacttctgtggagcaataggattagcaatcacaggattaataattt

SEQ ID NO: 267291 - DNA, 571 bp, Unknown
  Bacterial polypeptide expressing nucleotide sequence isolated from the Sargasso Sea
ttcaaatccttttgttgttgttggtttgtttttgggtggtatgcttccatatttatttggatctatggggatgcaagcagtaggaagagcaggtggggcagtagtcctagaggtcagaagacaatttaaaaaaatccctggaattatgaaaagaaaatcaaaaccagattatggtaaattagttgatctattaacaaaggcagcaattaaagaaatgattgttccatcgttgctacctgtactttcacctattgttttatatatatttattttaccaattggtggaaaggaagctgcattatcagctgtaggtgcaatgttgcttggagttattataacaggtttatttgttgctatatcaatgaccgcaggtggtggtgcatgggataatgcaaaaaaatatattgaggatggtaactatggcggtaaaggctcggaagcacataaagctgctgttactggagatactgttggtgatccatacaaagatacagcgggaccagcagtcaatccaatgataaaaattactaatattgtagcactattattgttagcagttattgctggatag

SEQ ID NO: 267292 - DNA, 694 bp, Unknown
  Bacterial polypeptide expressing nucleotide sequence isolated from the Sargasso Sea
agggagaaaaaaagtgatatttaactttcaagggtcaataattgcatcaatatgcggtttgttgttggctttttattttgctaggaatgttttagctattccagtaaagaatgaagaggttaacaatctctctttagcgataagagaaggttcaatggcttttctcagaaggcaatatacatgggtaagcatttttgttgttgtattagccatactgatatctactttaacggaatggggtatgccttggggttcagttgcatttttgataggggcaattttttcaggcctagcaggttttattgggatgagaattgctactgcagctaatggtagaacagcagaagcagcaaaaaatggaggaacgttagaggctttaccagttgcttttcgagggggagctgtgatggggtttacagttgcaggactagggttgcttggagttagtgctggttactggatatttgtcgaagttttacaagtacctaatagctatgacgtcttagctgcaattgggttaggaggttcttctattgcactttttgctcgtgttgggggaggtatatatacgaaggcagcagatgttggtgcggatttagttggaaaagtagaagctggtattccagaagacgatccacgaaaccctgcaacaattgctgataacgttggagataacgtcggagatgtagctgga

SEQ ID NO: 267293 - DNA, 799 bp, Unknown
  Bacterial polypeptide expressing nucleotide sequence isolated from the Sargasso Sea
aatggactacataaatcttatccccttagctggtattatagcattaatatttgtttttataaaaaatgcatcagtttcaaaaaaagaagttggaaatgcaaaaatggcaaaaattgcaaaaaatattgcggatggtgcaatggcatttttaaaagctgaatataaaatattatcagtttttgtaataattactgctgttcttctagcatttaaaggtattaatgagggaagcagctggttggttgcagtatcttttgttgttggagcattgtgttctggtctggctggttttattggtatgcaagttgcaaccaaagccaatgttaggacaactaatgctgctcaacattctcttggaaaagcacttgaaattgcattttctggtggttctgtgatgggaatgggtgtagttggtttaggagttttaggagttggttcactatttataatttacaggccaatgtttgatgacataaatactgtaatacaagttttatccggattttctcttggtgcttcttctatcgcattgtttgccagagttggtggtggaatatatactaaagctgcagatgttggtgctgatttagtagggaaagttgaagctggtattcctgaagatcatcctctaaatcctgcaactattgcagataatgttggagataatgttggagatgttgctggaatgggagcagatttatttgagtcttttgtcgggtcaattattggggcaatggtattaggtgctgcttttattagtttaagtgaattctctggaattgaaattaatgctgtactg

SEQ ID NO: 267294 - DNA, 941 bp, Unknown
  Bacterial polypeptide expressing nucleotide sequence isolated from the Sargasso Sea
tatggctgcagatttattcgaaacatatgctgtaacaattgttgcaactatggttctttcatcgattttctttgttggtgatataaagatgatgatttatccgttaactattggtggagcatgtatattgacgtcaattattggaacattttttgttaaattaggaagcactaataatgtgatgaatgctctatataaaggatttgttgtttcagcaattacatcacttgcaattctttatcctgttacagattatgtaataggttttacaaatgaatatactgtcaatgataaaacttttaatggtatgagtttatattattgtggtgttattggattattaattactggattattaatatggattacagaatattatactggaacaaattatcgtccagtaagatctgttgctgcatcatccactacaggtcatggaacaaatgtaattcaaggtttagcaatttctatggaggcaactgcaataccagcacttgtaattgttagtggaattttgttaacaaattatatagctggactttttggtattgctattgcagtaacgacaatgcttgctctagctggtatggtagtggctttagatgcgtacggccctgtaactgataatgctggtgggattgctgaaatgtctaacttagataagaaagtaagaaaaacaactgatgcattagatgctgttggaaacacaacaaaagctgtaactaaaggttatgcaataggatctgcaggtttaggtgctttagttttatttgctgcttatacagaagatattaaacatttttcaaaagaggcaggttcagctctagagggtatagtagtaacttttgatctttctaacccttatgttgtagttggtttattaattggtggaatgttgccttatcttttttggttcatgggaatgcaagctgtcggaagag

SEQ ID NO: 267295 - DNA, 907 bp, Unknown
  Bacterial polypeptide expressing nucleotide sequence isolated from the Sargasso Sea
gtgggtatgcaatctgtggtcttacctatagcttgcattattctcattatttatatttcaactgaattaacaggcctttatggtgttggtattgctgcagtcggtatgttgtcaactgtaggtataactatggctatagatgcttatggacctgttgcagataatgctggagggatagcagaaatggcaggtatgccttctgagactagagtaattacagacgaattagatgagcaaggtaacactaccgctgccattggtaagggtttcgctatcggagctgctgctttagcagcattagcaataatttcggcttttgttgaaacagtttctgccaatagggccgagccacttcaacttgttttatctaatcctacagtattaataggtatatttattggaggtgctatacctttcttaatagcttcaattactatgacagctgttggagacgcagcctttgagatgattaacgaaattagaaggcaatttaaagaaatcccaggacttttagaaggtaatgcagagcctgatactgcgaaatgtgtagatattgcaacagcagccgcacttaagaaaatgctcctacccggtgttattgctgtttcggcaccacctttagttggattaggaattggagctgaggctttgggtggcttgcttgcaggaggtcttctagtttgtgtgcttatggcattattcatggcaaatgctgggggtgcttgggacaatgctaagaagtatattgagaaaggaaaccttggtggtaaaggaactgatactcattcagcagctgttgttggtgatactgttggagacccttttaaggatacatcaggtccatcaatgaatattctgattaatgtaatggcaattgtaagtttagtaattgctcctttgctttaaa

SEQ ID NO: 267296 - DNA, 949 bp, Unknown
  Bacterial polypeptide expressing nucleotide sequence isolated from the Sargasso Sea
cggcaatggtcgaacagcaatggctgcgcagaaagatggccaagcaggagctctagcaatttcctataacggtggagctgtaatgggtctttcagttggaggtcttgggcttctaggtatctcactggtggcttacttcctcggagcgggtgagagtggttcaaccaatatttctcacgctgcaggatttggaatgggtgcatcttcaatagcactattcgctcgtgtcggtggcggtatttacaccaaggcagcagacgtaggagcagatcttgttggtaaagtcgaagcaggaattcctgaagacgatcctcgcaaccccggtgtaatcgctgacaatgttggagacaatgttggagatgtcgctggaatgggagcggatattttcgagtcctttgtaggaagtataatcgcagcaatggtaattgcagacaattatgatactatgaatgctgattatgtaatcctccctattttccttggtctaataggatatctcgcttctttgataggtgtcttttcaatggaattcctaaagaacagcgaacctggtgcggctcttcgtaatactacatttatcgccgcaggcctattctggattgcaggttggttaggaatagaaatattgggcttagacactggaactgaacctatgatcgcagtaatcatcggttctattgtaggaattctaatcggactggtaaccgaatattataccggtattgaagatgtaatgggattgaaaacaaaagcaattcctcatattgggcagatgtctaagacaggacctgcaacaaatgcaatcgcaggtctttcagtaggtatgatgtcaacctttattccaatcattttgatttgtttcggtatctttggtgctaaccacttcatgatggatggacacttccaagatgaccctggcggatatatgcccgaatttggactgtatggg

SEQ ID NO: 267297 - DNA, 871 bp, Unknown
  Bacterial polypeptide expressing nucleotide sequence isolated from the Sargasso Sea
attgctgttacatctatgcttgctttgacaggtatggttgtagctttagatgcatacggaccagttacagataatgctggaggtattgcagaaatgtcaaaactaccaaaaaatgtaagaaaaactactgatgcattggatgctgtaggtaacactacaaaagcagtgacaaaaggttatgctattggttcagcagggctaggagctttggttttatttgcagcttatactgaagatattaaattttatgcactagataaaacttcatcactttataatatggaggtcagcttcgatttatctaatccatacgtagtaatcggtttattaattggaggtttgcttccttatctttttggctctatgggtatgcaagcagtaggaagagctggaggagctgtggttatagaggtaagaagacagttcaaaaaaattcccggcataatgaaaggtaagagaaaaccagattacggaagattagtagatctcttaacaaaagctgctattaaagaaatgattgtaccttccttattacctgtcttgtctcccatttttttatatatagttatattattaatagcagggaaagaagctgcactagcagctttaggcgccatgttgttaggagttattgtaacaggactattccttgcaatctctatgaccgctggtggaggtgcttgggataatgcaaaaaaatatattgaggatggcaattttggaggaaaaggttcagacgcacataaggcagcagttacaggtgacacagttggtgacccatacaaagataccgcaggtcctgctgttaacccaatgattaagataactaatattgttgctttactattgctttcaattatagctcattaaa

SEQ ID NO: 267298 - DNA, 739 bp, Unknown
  Bacterial polypeptide expressing nucleotide sequence isolated from the Sargasso Sea
atggccgctgatttatttgaaacatatgcagtaactattgttgccacaatgttactcgctacaataagtttttcaggttctgaggttgtaaaagggatggaatatccgttacttattggaggtgtgtgtattctagcatctataattggtactttttttgttaaattaggatctagtaacaatatcatggcggctctatacaagggtttcttggctacagcaataatttccgcaattctgatttttttcgtctcaaaatatacttttactactggttttatgtcatatttttattgtgcattggttggtttaattgttacaggtcttcttgtttggattacagaatattatacatcgacagaatatagaccagttaagtcaatagcacaatcttctgaaacaggtcatggaacgaatgttattcaagggttagcagtttcacttgaggcaactgcgataccagccataattatagctgttgggatattagtttcatttcaacttaatggtatatatggcattgctgtatccgctacgacaatgcttgcattagctggaatggttgttgctttggatgcttatggtccagttactgataatgctggtggaattgctgaaatgtgtgaattggatgaagaggtaagaaaaacaactgatgcattagatgctgttggaaatactacaaaagcagttaccaaaggttatgcaattggatcagcaggtttagccgccattagtt

SEQ ID NO: 267299 - DNA, 244 bp, Unknown
  Bacterial polypeptide expressing nucleotide sequence isolated from the Sargasso Sea
tatgggagcatctgttgtagcacttttttccagagtaggtggaggaatttttacaaaaagtgctgatgttggagctgatctcgttggtaagattgaagctggtattcctgaggatgatccaagaaatccaggcgttattgccgataatgttggtgataatgttggtgatgttgctggaatgggttcggatatatttgagtcatattgtggctctatgattgcatcaatagcaatagcttatacg

SEQ ID NO: 267300 - DNA, 667 bp, Unknown
  Bacterial polypeptide expressing nucleotide sequence isolated from the Sargasso Sea
atgagcatattaaacctagttattttctcgggaattttatcaattatttatggattttgggctggaaactcagttttaaaatcaaatgctggaagcgaaaaaatgcaagaaatttcatcagcaattcaagttggtgctcaggcatatctaaacagacaatatacgaccattgcaatagtgggcgctgttatttgtgttcttttatatttattttttagagatttttgggttgttgggggattcttaattggagcaatactgtcaggtgctgctggctatataggaatgataatttctgtcagagctaatgttagaactgcgcaagcagccagtgaaagtttaggaaaaggattaaatgttgcatttaaagcaggcgcagtgactggaatgcttgttgctggattagcattactatcaatttcagtttattatgcaattttagactcttatttagtttctgatgaaactcttaaacatgctctcgttgcattaggttttggagcttcactcatatcaatttttgccagacttggaggtggaatttttactaaaggagcagatgttggagctgatctggtcggtaaagtcgaagctggtattcccgaagatgatccaagaaacccagcagttattgctgataatgtcggagacaacgtaggtgattgtg

SEQ ID NO: 267301 - DNA, 842 bp, Unknown
  Bacterial polypeptide expressing nucleotide sequence isolated from the Sargasso Sea
acatattttgttaaactttggaaactcaaaaaatataatgttagcattatacaaagggtttgtggttaccgcaattacatcattaattgtgttatatccaattacagattatgttttaggtttagacaaaatatataatataggtacaaaacaatttactggattaaacttatatcattgtggggttattggtcttgtaataacaggactaattatatgggttactgaatattatacaggaacaagttatagacccgtcaaaagtgttgcacattcttcaaccacaggccatggaacaaacgttattcaaggtttagctgtatcattggaagctacagctataccggcattgattatagttgccggtatattagtaacaaattatattgctggcttatttggtattgccattgctgttacatcaatgttagcactagcaggaatggttgttgctttagatgcttatggacctgtcacagataatgcaggcggtattgccgaaatgtcaaagttaccaaaaaatgttagaaaaactacggatgctttagatgcagtaggaaacacaacaaaagcagtaacaaaaggttacgctataggttctgcaggattaggagctttggtgctttttgcagcatacactgaagatattaaacatttttcaaaaattgctggttcaaatctggagggaattgttgttacatttgatttatccaatccttttgttgtagttggattgttagtaggtggaatgctcccttacttgttcggttctatgggaatgcaagctgttggaagagcgggtggtgcagtggtaattgaagttagaagacaatttaaaaaat

SEQ ID NO: 267302 - DNA, 856 bp, Unknown
  Bacterial polypeptide expressing nucleotide sequence isolated from the Sargasso Sea
gttctgagcttgagcaggagaaaaacttattcaggattaactttgttttattgtggtattattggtttactaataacaggagcacttatttgggttactgagtattatacaggtactcagtataaacccgttcagagcgttgcaaaagcctcaactactggacatggaacaaatgtaatccagggattggctgtctcaatggaggcaactgctatacctgctattattattgttgcaggcattatttctacttatctcctagcaggtatatttggtattgcaattgcagtaactacaatgcttgctcttgctggtgtagttgtagcacttgatgcatacgggcctgtaactgataatgcaggcggaattgcagaaatggcagagctagacagtgatgttagagatacaactgatgctttagatgcagtaggaaacactactaaagctgtaactaaaggttatgcaataggttctgcagggcttgcggcattagttttatttgctgcatatacagaagatttacatttatattttccagatataactgttgatttttcattaagtaacccctttgtagtagtaggtttatttattggtggattgttaccatatctttttggggctctaagtatgactgcagttggtcgtgctgcagggtcagtggtaaatgaggtaaggagacaattcaaagaaatagatggaataatggaaggtactggaaaaccagactatagtaaagcagttgatcttctaactaggtctgcaattaaagagatgataataccttctttgctgccggtattagcgcctattctactttatgttattattttgctaattgctgatcaaggctctg

SEQ ID NO: 267303 - DNA, 331 bp, Unknown
  Bacterial polypeptide expressing nucleotide sequence isolated from the Sargasso Sea
atggttttaccaggcttgttagcagttttagttccaattttagttggttttgttggtggaaaagaaatgttaggaggccttctagctggcgtaacagcatgtggagttttaatggctatttttcaatctaattctggtggtgcttgggataatgcaaaaaaaactattgaagaagagggccgaaaaggaactgatgctcataaagcagcagttgtaggcgatactgttggagatccatttaaagatacttcagggccttcactaaatattttaattaagttaatgtctgttgttgcgctagttatagcgtcttcaatatcaggcatataaa

SEQ ID NO: 267304 - DNA, 157 bp, Unknown
  Bacterial polypeptide expressing nucleotide sequence isolated from the Sargasso Sea
atggcaaactttggaggtaagggttcagaggctcataaagcagctgtaaccggagatacagttggagacccatataaagatactgctgggcctgctgttaaccccatgattaagattacaaatatcgttgccttattacttcttgctgctttatagt

SEQ ID NO: 267305 - DNA, 802 bp, Unknown
  Bacterial polypeptide expressing nucleotide sequence isolated from the Sargasso Sea
gtggattttcaccaaaggtgctgatgttggcgcagatttagttggaaaagtcgaagcaggaataccagaggacgatccaagaaatcctgcagttattgctgacaatgttggtgacaatgtgggagactgtgccggtatggctgcagatttatttgaaacatatgccgtaactattgttgcaacaatggtgcttgcctcaatattttttcaagataacgctagtttaatgatttatccgttagcaattggtggaggatgtataattgcctcaataatcggaactttctttgtcaaacttggaaaaagtaaaaatataatgggtgctctttataaaggatttattgttacagcaataatctccttaatattactttatcctataacttcaaatattattggtttggatagtacttttaaagttaatgatcaaaacttcacaggtttagatttatattattgtggtgttattggtctggttgttacgggcttaattatttgggtaacagaatattatacaggaacaaattatagaccagttagaagcgtagccaaatcatcaactaccggtcatggtactaatgtaattcaaggattagcagtttcaatggaagctaccgctttacctgccttaattattgttgcaggtataattattacaaatcaacttgctggattgtttggaattgctatcgcagtaacagcgatgttggctttgacaggaatggttgttgcgttggatgcgtatggtcctgttactgataatgccggaggtatagctgaaatgtcaaagttacctaaaaat

SEQ ID NO: 267306 - DNA, 451 bp, Unknown
  Bacterial polypeptide expressing nucleotide sequence isolated from the Sargasso Sea
aatgatagaggaagtgagaagacaattccgtgaaattccagggcttcgagaaggcgctgaaggcgttattccggattctgcaagatgcgtagcaatctcaacttcagcctctctgaaagaaatgctcgctccaggaattctcgcagttgttatcccgttgatattgggctttgtaagcatcgactctttaggcggatttttagcaggcgctttagtagcaggtttttgccttgccatatttatggctaatgcaggaggagcttgggataatgctaagaaatacattgaaagcggtgaactgggaggaaagggatctgaaccacataaagctgctgtagttggtgacactgttggtgatccgttcaaggacacatcaggaccttctatgaacattctaataaaagtaatgaccatagtctcacttgtatttgcttcagcttttgttggctaa

SEQ ID NO: 267307 - DNA, 808 bp, Unknown
  Bacterial polypeptide expressing nucleotide sequence isolated from the Sargasso Sea
atacaaaacaattggtgttgttggtattatcgtattaggaattgtaacatatttttttagttacttagttggtttaggttattttataggagcatttttatctggagtagctggatatgtaggaatgttaatttctgtaaaagcaaatgttagaaccgctgaagcatctagaaagagcttgcaagctggcttaacaattgcttttaaatctggagctattacgggtttactagttgctggtctagctttgttagctattacaatttattatataatcttaattagattagacatagacaacagagaaatcattaacgctttagtggctttaggatttggagcttcattaatttcaatttttgctagattaggtggaggtattttcactaaaggagcagatgtaggagctgatttagttggtaaagtcgaagctggaatcccggaagatgatccaaggaatccagcagttattgctgacaacgtaggagataacgttggagactgtgcaggtatggcagcagatttatttgaaacttatgcagttactattgttgctacaatggtcctttcttcaatattctttccaacagattttaatttaatgatttatcctttggctataggaggatcttgtattattacatctataattggaacttggtttgtaaaattaggaaaaagtaaaaatatcatgggggctctttacaaaggttttgttgtaactgcaataacttctttattaattttatatcctgtaactgactctattgtaggacttagtgaaatttacaataataatgaaaaagtt

SEQ ID NO: 267308 - DNA, 835 bp, Unknown
  Bacterial polypeptide expressing nucleotide sequence isolated from the Sargasso Sea
aagggacttgccgcagttttatacggcataattacttcaagacaaatcttatcattaaatgctgggaatgaaaaaatgcaagaaattgctaaagctattcaagaaggtgcaaaagcttatttaaataggcaatatttaacaatagcaattgttggcattgttatttttattttaatatggattatttttgatttattttcagcaattggttttttaataggagcttttttttctggagcagcaggttatgttggcatgaacatatctgtgagatcaaatgttagaactacgcaagcagcaagttcatctttagctgaaggtttatctgtatcatttaaagctggagctgtaacaggtatgttagttgctggatttgctcttttgtctgttgctgcttattattttgtattagataattctggaaattttgaaggaagattaatagttgctcctctagtctctcttggatttggagcttctttgatttcaatttttgctagattaggcggtggaatttttactaaaggtgctgatgttggagcagaccttgttggaaaagtagaggctggaataccagaggatgatccaagaaacccagcagttattgcagataatgttggagataatgtcggtgactgtgcaggaatggctgcagatttatttgaaacttatgttgttactgttgtagctacaatggtacttgcttcaattttctttactggagaattaactagtaaaatgatgatgtacccattgtctattgcaggagtttgcacaattgcaagcataattggaaacttattttgtaaagattgggtaatagtgaaaatataat

SEQ ID NO: 267309 - DNA, 853 bp, Unknown
  Bacterial polypeptide expressing nucleotide sequence isolated from the Sargasso Sea
gcttgcattagcaggtatggttgtggctttagatgcttatggaccggttactgataatgctggtggtatagctgaaatgtctaatcttgataaaaaagttagaaaaacaactgatgctttagatgctgtaggtaacaccacaaaagctgttacaaaaggttatgcaattggttcagcaggtttaggagctttagttttgtttgcagcttatactgaggacatcaaacatttttcaaaagaagcaggttctgcattagaaggaattgttgtaacatttgacctttcaaatccatatgtggttgttggtcttttaataggcggaatgttaccatatttgtttggttctatgggaatgcaagctgttggtagagctggaggcgcagttgtagttgaagttagaagacaatttaaaaaatatccaggtattatgaaaaaaaagcaaaaacctgattatgccaagctagtagatttattgactgttgctgcgataaaagaaatgattattccatcattattacctgtgttatcacctgtagtactatatttcattattttatctattggtggtcaagttgctgctttagcctcagttggtgcaatgctacttggtgtaattataacaggtctttttgttgctgtttctatgaccgctggtggcggagcatgggataatgcaaaaaaatatattgaggatggtaatcatggtggaaaaggctcagaagcccacaaagcagctgtaactggagatacagttggagacccttataaagatacagctggtcctgcagtaaatcccatgattaaaattaccaatatagttgctttacttttattagcagttattgctggttaa

SEQ ID NO: 267310 - DNA, 742 bp, Unknown
  Bacterial polypeptide expressing nucleotide sequence isolated from the Sargasso Sea
atgagtacatcaatagagacgattttattatacacaattggagcaggttttttatcaatagtttacggattttttacaggaaaaaatattcttaattcaagcgctggaaatacaaaaatgcaagatatagcttcagccattcaaattggtgcaaaagcatatttggcaagacaatataaaactatcgcgttggttggtgtagttgttttaattattgtaagtgttgcgtttagcccaatggtaggacttggctatcttattggagctgctttatctggcatagctggatatgttggcatgttagtgtctgttgaagcaaatgtaagaacagctgaagcttctagaaaaggtttagcgcaaggcctctcagtggcttttaaatcaggtgctgtcactggaatgttagttgctggattagcgttattatcgattgctgtttattattttatgttattaaaatttaatgttgatgaacgtgaaattgttaacgcacttgtagcgttgggttttggtgcttctctaatttctatttttgcaagattaggtggaggtatatttacaaaaggtgcagatgtaggggctgatttagttggtaaagttgaagctggtataccagaagacgatcctagaaatcctgctgtaatagctgataatgttggtgacaatgtgggtgattgcgcaggaatggcagcagatttatttgaaacatatgctgttacaatagttgcaaccatggttttat

SEQ ID NO: 267311 - DNA, 925 bp, Unknown
  Bacterial polypeptide expressing nucleotide sequence isolated from the Sargasso Sea
gaacaattatagaccagttaaaagtgttgcctcgtcatcaacgacaggtcatggtacaaatgtaattcaaggtttggcagtttcgatggaagctactgctattccagctttaattattgtcggtggcatattattgacaaattatattgctggactttttggtatagcaattgccgtgacaacaatgttagcattagcgggaatggtagttgctttagatgcatacggacctgtaacagacaatgctggtggaattgctgaaatgtccaatttacctaaaaatgttagaaaaactaccgacgcattagatgcggtaggaaatacaactaaggctgtaacaaaaggttatgcaataggatcagctggcctaggagcactagttttatttgctgcatacacagaagatattaaacatttttcaaaagttgctggatcaaaattagaaggaattgttgtaacttttgatttatcaaatccatttgtcgtagttggtttgttagtaggtggtatgcttccatatttatttggttcaatgggtatgcaggcagttggtagagctggtggagcagtcgttgtagaagtaagaaggcaatttaaaaaaattccaggaatcatgaaaagaaaagctaaacctgattatggtaaattggttgatttattaaccaaagcagcaataaaggaaatgattgtcccatctttattacctgtattatctccaattgttttgtatttatttattttaccaataggtggacaagttgcagctctatcttctgttggagcaatgttgctaggtgtaattattactggattgtttgttgctatttcaatgactgcaggcggcggtgcatgggataatgcaaaaaagtatatagaagatggaaactttggaggaaaaggatcagaagcacacaaagctgctgta

SEQ ID NO: 267312 - DNA, 679 bp, Unknown
  Bacterial polypeptide expressing nucleotide sequence isolated from the Sargasso Sea
atgtatttagaatattcaattgtttttatttgttccattctttcactggcatatggagccattacaataaaaaaaatactagaagctcctgagggctccgacagaatgaaagaaatagcaggtgctattcaagagggagctcaagcttacttaactaggcaatatcttactatctcaatagttggtgtagtaattacactagttttattttatttgatagacaatccattcgtagcagttggttttattattggtgcttttttatctggtctagcaggtttcattggcatgtttgtatctgttagggctaatgttagaacaactgaagcagcaactcaaagtctttcgggtgctttagatatttcttttaaatcaggagcaattactggtttcttagttgtaggtttagggttgtttggattggtcagttactactgttttttaaataatcactttggtttgagtcaaggaagagaaactgtagaagcaatggttgcgctaagttttggagcttctctcatatccatttttgcaagattgggtggtggtatttttaccaaaggagctgatgtaggtgctgatttggtaggaaaaattgaggcaggaattcctgaagatgaccccagaaacccagctgttattgccgataatgttggagataatgtaggtgactgtgctg

SEQ ID NO: 267313 - DNA, 877 bp, Unknown
  Bacterial polypeptide expressing nucleotide sequence isolated from the Sargasso Sea
agtttctatggaagctacagcaataccagctttaattattgttggtggaatattattaacaaattacattgctggtctctttggcatagctattgctgtaactacaatgctagctttggcaggaatggttgtagctcttgacgcgtacggaccagtaactgacaatgctggtggtattgcagaaatgtcaaatttgccaaaaaatgtaagaaaaactactgacgcattagatgccgttggtaatactactaaagctgttacaaaaggttatgctattggttctgctggattgggagccttagttttatttgctgcctatactgaggatattaaacatttttcaaaagttgctggctcacaattagagggtatcattgtaacatttgatttatctaatccatttgtggtagttggattgttagttggtggaatgcttccttatttgtttggttctatgggtatgcaagctgttggtcgagcaggaggtgcagttgttgttgaagttagaagacaatttaaaaaaattcccggtataatgaaaagaaaagcaaaacctgattatggtagattagttgacttgttaacaaaagctgcaattaaagaaatgattgttccatcattattaccagttctatccccaatagttttatatttgtttattttacctatcggtgggcaagttgctgcattatctgcagttggtgcaatgttactaggagtaatcataactggattatttgttgcagtatcaatgactgctggtggtggagcgtgggacaatgctaaaaaatatattgaagatggaaattttggcggcaaaggttcggaagcacataaagcagcagtaacaggagataccgtaggggacccatataaa

SEQ ID NO: 267314 - DNA, 849 bp, Unknown
  Bacterial polypeptide expressing nucleotide sequence isolated from the Sargasso Sea
ggtggtgcatgtatattaacatctataattggaacattttttgtaaaattaggaaattctaaaaatataatgttagctttatacaaaggttttatagttacagcagttacttcattaattttgttatatccattaactgattatgtcttaggacttgaaaaaacttataatatttcagaaaaaacttttacaggaatgagtttgtattattgtggtgttataggtttggtaataacaggccttttaatatgggtcactgaatactatacgggaactaactatagacctgttaaaagtgtggcgtcatcctcaacaacgggacatggaacaaatgtaattcagggattagctgtttctatggaagcaactgctataccagcgttaataattgttggtggaatacttttaacaaattatatcgccgggctttttggtatagcgattgcagttacaacaatgttagctctggcagggatggttgttgcattagatgcgtacggccctgttactgataatgctggtggtattgcagaaatgtcaaatttgcctaaaaatgtgagaaaaactacagatgcattagacgctgtaggtaatacaacaaaagctgtaacaaaaggttatgctattggatcggcgggattaggtgcattagtattatttgctgcttatacagaagatataaaacatttttctaaagtatcaggctcaaaactagaaaatatagttgtaacttttgatctttcaaatccttttgttgttgttggtttgttagtgggtggtatgcttccatatttatttggatccatgggtatgcaagcagttggaagggcaggtggagcagtagtccta

SEQ ID NO: 267315 - DNA, 826 bp, Unknown
  Bacterial polypeptide expressing nucleotide sequence isolated from the Sargasso Sea
gattgtgctggtatggctgcggatttatttgaaacttacgcagttaccattgttgcaacaatggttctttcatctatttttttcattggagatctaaatatgatggtttatcctttaacgattggtgccgcatgtttaattacatcaattattggaactttctttgtaaaacttggaaaaaataataatgtaatgaatgctttatataaaggttttattgtatcagctatagcttcattactaattctttggccagttaccgattatgtaattggtttttcaaatgaatatacagtaaacgataaaacttttaatggtaaagatttatattattgcggagtaattgggcttgtaattacgggtttattaatatggatcacagaatattatactggaactggttatagaccagttaaatcggtggcattatcatctacgacaggacatggaactaatgtaattcaaggattggctgtatctatggaagctaccgcaattcctgccattattatagttgcaggtattttaattactaattcgatcgcaggactttttggaattgctattgctgtcacaacaatgttggcattagctggaatggttgtagcattagatgcttatggaccagtaacagataatgcaggtggtattgctgaaatgtctaatcttgacaaaaaagtaagaaaaactactgatgcattagatgctgttggaaatactacaaaagctgtaactaaaggttacgctatcggttccgcaggtttaggtgctcttgttttgtttgcagcgtacacagaggatataaaacatttctcaaaagaggcag

SEQ ID NO: 267316 - DNA, 648 bp, Unknown
  Bacterial polypeptide expressing nucleotide sequence isolated from the Sargasso Sea
catacacagaagatataaaacatttttcaaaagttgcaggttcaaatttagaaggaattattgttacatttgatttatcaaatccttttgttgtagttggtttattggtcggtggtatgttgccttatttatttggatctatgggtatgcaagccgtaggaagagctggtggggctgttgtagttgaggttagaagacaatttagaaaaattccaggtattatgaaaagaaaagcaaaacctgattatggaaaattagttgatttgctaacaaaagctgcgattaaagaaatgatattaccatccttgcttccagttttatcgccaattgttttgtatttatttattttacctattggtggacaggtagctgcattatcatcagtgggagcaatgctgttaggtgtaataataactggtttatttgtagctatatcaatgacagctggtggtggtgcgtgggataatgcaaaaaaatatattgaagatggaaattttggaggaaaaggatcagaagcacataaagctgcagtaacaggtgatactgtaggtgatccttataaagatacagcaggtccagcagtaaaccctatgataaaaattactaacatagtagctttattgttattagctgtaattgcaggttaat

SEQ ID NO: 267317 - DNA, 901 bp, Unknown
  Bacterial polypeptide expressing nucleotide sequence isolated from the Sargasso Sea
tgtaagacttggtaaaagtaaaaatattatgggagcattgtacaaaggatttatagcaacttcagttttgtcgctaattattttttacccagtgacagattctgtaattggtttagataaggtttttactactgaaaaaaattcatttactggatacagtctttatatttgcggagttgctggtctagttattacaggattaattatctgggtaacagagtactacacaggaacaaattatagaccagtaaaaagtgttgctaattcatcaagaactggtcatggaactaatgttattcaaggtttagcagtatctatggaagcaacagctatacccgctttaattattgttgtaggaatattgtttacaaatcatttagctggtttgtttggaattgcaatagcagtaacttctatgttagcgctaaccggtatggttgtcgctttggatgcttacggcccagtcactgataatgctggtggaatagctgaaatgtctaaattaccaaaaaatgttagaaaaactacagatgctttagatgcagtaggaaacacaacaaaagcagtaaccaaaggttacgctattggttctgcagggttaggtgctttagtgttatttgcagcatatactgaagatattaaatttttttcaaccgttaaaggatcaaagttggaaaacataagtgttagttttgatttatcaaatccatttgtagtaattgggttacttgtgggtggaatgcttccctatctctttggttccatgggtatgcaagcagttggtagagcaggtggcgcagttgtaattgaagttagaaggcaatttaaaaaaatacctggaataatgaaaggtaaaagaaagcctgattatggaaaattagttgacttattaactaaagct

SEQ ID NO: 267318 - DNA, 736 bp, Unknown
  Bacterial polypeptide expressing nucleotide sequence isolated from the Sargasso Sea
taatgttggtgattgtgctggaatggcagcagacttatttgaaacttatgttgttactgtagttgcgacaatggttttgtcttctatattttttgcagatatttcagcaatgatgatgtatccactagctattgcaggagtgtgcacattagcaagtatagttggaacttattttgttaagcttggtaaaagtgagaatataatggctgctctatacaaagggttcgctgtttcagcaattttatcagccattctattatattttattactgatcatgtaataagtttagatgcaatttttacagttgatgataaatctttttcaggtatgtcactattttactgtgggatacttggcttaattattactggtttaattatttgggtaactgaatactatactggtactaattatagacctgttcaaagtattgcccaatcttcaacaaccggtcatggaacaaatgtcatacagggacttgctatcagtttagaagcaactgctttacctgcaatcataatcgttgcaggaatcatcattactcattcattagcaggattatttggtattgctattgctgtaacaacaatgttagctttagctggcatggtagttgctcttgatgcttatggtccagttacagataatgcaggtggaattgctgaaatgtctgagttagatgataaagttagaaaaactactgatgctctagactcagttggaaatacaactaaa

SEQ ID NO: 267319 - DNA, 775 bp, Unknown
  Bacterial polypeptide expressing nucleotide sequence isolated from the Sargasso Sea
gtaactacaatgcttgcattagctggtatggttgttgccttagatgcctatggtccagttacagataatgctgggggaatagctgaaatgtcaaatttaccaaaaaatgttcgtaagacaacagatgctctagatgcagttggaaatacgacaaaagctgtaactaaaggatatgcaattggatcagctggtcttggtgctttagttctttttgcagcatatacagaggatataaaacatttttcaaaagttgctggttcaaatttagagggaatagctgtaacttttgatttatcaaatccttatgtagttgttggtttacttataggtggaatgcttccttatttatttggatcaatgggtatgcaagctgttggtagagcaggtggtgaagttgtgatcgaagtaagaagacagtttaaaaaaatacctggaataatgaaaagaaaagcaaagcctgattatggtaaacttgttgatctacttacaaaagcagcaattaaagaaatgataattccatctttattgccaattttatcgcctattgttttatacatagtaatttatttcataggtgggcaagtcgcagcattatcatcccttggagcaatgttattgggagttataataacaggtctctttgttgcagtttcaatgactgctggaggaggagcttgggataatgcaaagaaatatattgaagatggtaagtttggtggcaaaggttcggaagctcacaaagcggctgtaactggtgatactgttggcgatcctt

SEQ ID NO: 267320 - DNA, 895 bp, Unknown
  Bacterial polypeptide expressing nucleotide sequence isolated from the Sargasso Sea
gtcttttacgttacttttgtggtttattttggtgtaatttatggagtttgggcaaccactcaaatattgaaagctccctcaggctcaaaaaaaatgttagaaattgcatcttctattcaaattggcgcaaaagcatatttaaatagacaatactcaactatttctattgttggtattgtagtaacggtcttgctttttcttacccttggcattttcgttgcatttgggtttgtaattggagctgtactatcaggtgttgctggatatataggtatgaatatatccgttagagccaatgttagaacaacagaagcagctaaaacaggcttagttccagcattagatatagcatttaaatctggagcaataactggaatgttagttgttggattaggattgcttggtgttgcaggttattatttttttctcaaagaaagtggtactgacacaagaactttgattgaagctttggtagcattatcttttggagcatcactaatctcaatttttgcgagattaggtggtggtatttttactaaaggtgctgatgtcggtgcagatctagtaggtaaagtagaagcagggattcctgaagatgatcccagaaacccagctgtaatagctgataatgttggtgacaatgttggagattgcgcaggtatggctgctgatctcttcgaaacttatgcagtaactatagtggctactatgttacttgctacaataactttttccggaactaacaatattattcaaggtatggaataccccttgttaataggtggtgtatgcataattgcgtcaataattggaactttttttgttaaacttggttctaataataatataatgagagctttgtataaaggtttcattgccacggctgtaatttcag

SEQ ID NO: 267321 - DNA, 376 bp, Unknown
  Bacterial polypeptide expressing nucleotide sequence isolated from the Sargasso Sea
aaaagcagcaattaaggaaatgataataccatctctattaccagttttgtcacctatagttctttatataattattttaccgattggaggacaagttgctgctttatcatcagtaggagcaatgttgcttggagtaattataacgggtttatttgttgctgtttcaatgacagcaggtggtggagcttgggataatgctaaaaaatatattgaagatggtaaatttggtggaaaaggttctgaagcacataaagctgcagtaacaggtgatactgtaggagatccttataaagatacagcgggaccagctgttaatccaatgataaagataactaatattgtagctttattattattagcagtaatagcaggttaa

SEQ ID NO: 267322 - DNA, 863 bp, Unknown
  Bacterial polypeptide expressing nucleotide sequence isolated from the Sargasso Sea
aatggataacaatattatttatgtattagttgctggttttttagcgctcattttttcattctggaaaacaagctggattgaaaagcaggatcagggcacgaagaaaatggtagtaattggctccagtatagctgatggtgcgatggcgtttctaagggcagaatatcgagtcctttcagtttttgttatcgctgttgctattattttaggagttgcaaataaagacaacccagaatcaagtatgttcattgcattttctttcctaattggtgcagtggcgtctggtttagctggatttcttggtatgagggttgcaaccaaatcaaataacaggaccactaatgctgcacgagataacctagaaagagctcttaatgttgcatttagtggcggttctgtaatgggtttgagcgttgttgggttaggcgtattaggattaggaggactgtttctactttacactaatatgtatggttctgattttgaaagtataggtacggtgttgaatgttttatctggtttttcactcggagcttcctccatagctttatttgcccgtgttggtggtggtatttatacaaaagcagcagatgtgggtgcagaccttgttggtaaggttgaagcagggattccagaagatcatccattgaatccggccactattgctgataatgttggagacaatgttggagatgttgcaggaatgggggcagatctttttgaatcttacgttggttcaatcatcggctcaatggtattgggtgctagcattcttgtatcaggtagctttgatttaaattttgttttattgcttatgatgatagcagcttctggaatattagtatcaatcattggggactttt

SEQ ID NO: 267323 - DNA, 778 bp, Unknown
  Bacterial polypeptide expressing nucleotide sequence isolated from the Sargasso Sea
tgctgacgttggtgcagacttagttggtaaagttgaaaaagatattccagaagatgacccaagaaatcctgctgttattgcaaacaatgtaggagataacgtaagagactgtgctggtatggctgcagatttatttgagacttatgtcgtttctattgttgcaaccatggtattggcaataatctttcaaggagcagtaactgatttaacaatttatccattactattagctggatcaagcattatagcctctattataggttcgcagtttgtatcaatatcaacaccgaaatcctctattatgggagctctgtataaaggtttcttcatgacactgataatttcagttgtactatttgctgtaattactcattactcaattggctttgatcaatatttccaaataggatcaaagtggtataacggaatggatttatttctctgtgctgtttatggattattaattactttaacccttgttttcataacagaatactacacaagtacagagtatcgacctgtgaagagcgttgctgaagcttcccaaactggtcatgcaacgaatattattcaaggattagccatgggtatggagtctacagctattcctgtacttattatagttgcaggtattggattaacatttgcaacagcaggtctatttggcattgctattgcagtaacttcaatgttagctctagcgggaatggtagttgcgctagacgcctatggtcctgtaacagataatgcatgcggtattgctgagatgtctggattg

SEQ ID NO: 267324 - DNA, 929 bp, Unknown
  Bacterial polypeptide expressing nucleotide sequence isolated from the Sargasso Sea
tttgcaagacttgggtggaggtatctttaccaagggtgctgatgttggagcagatttagttggtaaagtagaagctggtattcctgaagatgatcctagaaacccagctgttattgcagataatgttggagataatgtcggtgattgtgcaggaatggctgcagatctttttgagacttatgtggtaacagttgtagcaacaatggttttagcttctatattttttattgagagttcttatacaatgatgatatttcctttagctattgcaggagtttgtgctcttactagtataattggaacatactttgtaaggcttggtaaaaataataatattatgtcagctctttatagggggtttgcagtttcggctattttatcagcaatattattatactttgttactgattacatagtggggctgaatagtgtcttagttgttgagggaacatccacacaatttactgggatgtcactttttatttgtgggatactaggattgattattacaggcttaattatatgggtgactgaatattatacaggaactaattacagaccagttcaaagtatcgcgcaatcttcaaccactggtcatggcactaatgtaatacaaggtctcgcaattagtttggaagcaactgctcttccagctctgattattgttgcgggaattatttctacatattcactagctggtttattcggtatagcaattgctgttacaaccatgttagccttagctggtatggtagttgcacttgatgcatacgggcctgtaacagataacgcaggcggtattgcagaaatgtcgaatttagatgaaaatgtaagaaagacaactgatgcacttgatgctgtaggcaatactactaaagccgtaacaaaaggttatgcaattggatcagcaggattaggagctcttgttt

SEQ ID NO: 267325 - DNA, 637 bp, Unknown
  Bacterial polypeptide expressing nucleotide sequence isolated from the Sargasso Sea
ttgtggtgcttacacagaagatttgagatactactttcctgatgttgagacaaactttcaactcaatgatccatacattgtcgtagggctatttattggagggctccttccttacttatttggttccatgggaatgatggcagttggaagagctggaagtgcagtagtggttgaggtgcgccgccagttcaaagaaatccctggaattatggaaggaacttcaaaaccagagtatggaaaatgtgtggacttgctcacaaaagcagccataaaagagatgattttaccctcgatgttgcctctttttgctcccatagttatctattttattattaatgctatatctgggcaagctgctgctttttctgctcttggagcaatgttaatgggaactattgttactgggttattcgtcgctctctctatgactgccggtgggggcgcatgggataatgcaaaaaaatatatagaagatggcaaccatggaggtaaaaactctgatgcccatcacgctgcagttactggagatactgttggcgatccatataaagatactgcaggccccgcagtgaaccctatgattaaaatcattaacattgtagctattcttcttttagctattttaagcaagttctaa

SEQ ID NO: 267326 - DNA, 647 bp, Unknown
  Bacterial polypeptide expressing nucleotide sequence isolated from the Sargasso Sea
ttacacagaagatattaaacatttttcaaaagttgctggatcagaattagaaggaattgttgtaacatttgatttatcgaatccttttgtagtagttggattattagtaggtggtatgctcccatacctatttggttcaatgggtatgcaagctgtaggaagagcaggtggagctgtagtagttgaagtgagaagacaatttaaaaaaattccaggaattatgaaaagaaagtctaaaccagattatggtaaattagttgatttgttgactaaagcagccattaaagaaatgatagtaccatcattattaccagtattatcacccattgttttatacttatttattttaccgataggaggtcaagtagcagctctatcttcagtaggagcaatgttattaggcgtaataataactggtttatttgttgcaatatcaatgactgcaggaggtggcgcttgggacaatgcaaaaaaatatattgaagatggaaattatggtggcaaaggctccgatgcacataaagctgctgtgactggtgacactgttggtgatccttataaggatactgctggaccagctgttaatccgatgattaaaattactaatattgtggctttattattattagctgctatagctggttaat

SEQ ID NO: 267327 - DNA, 199 bp, Unknown
  Bacterial polypeptide expressing nucleotide sequence isolated from the Sargasso Sea
ggtggagcttgggataatgccaaaaagtacattgaagatggaaattttggtggaaaaggctctgaagcacataaagcagcagttacaggagatactgttggagacccatataaagatacagcaggaccagctgttaatcctatgattaaaattacaaatattgttgcactattacttttagcggtaattgcaggatagt

SEQ ID NO: 267328 - DNA, 838 bp, Unknown
  Bacterial polypeptide expressing nucleotide sequence isolated from the Sargasso Sea
aacaattgttgcaacaatggtattatcttcaatcttctttccaggtgatatgtctatgatgatttatccattaactattggaggtgcttgtatcttaacatcaattattggaactttttttgttaaactaggtaagagcaaaaatgtaatgggagccttatataaaggatttattgtttcagctttagcttcgttagctgtgctttatcctgttacagattttgtattaggtttagaaaacacatataacttaaatgataaatcattttcagggatgagtttgtattattgtggaattataggcttaataatcacaggtttgttaatttgggttactgaatattatactggaacaaattatagaccagttagaagtgtagctggatcttcaacaacaggacatggaacaaatgttattcaagggttagcaatttctttagaagctactgctattcctgctttaattatagtagctggaattttgttaacaaatcatattgcaggtttatatggaatagctattgcggttactacaatgttagcattagctggtatggtagttgctttagatgcctatggtcctgttacagacaatgcaggtggaattgcagaaatgtcaaaattacctaacagtgttagaaaaacaacagatgcattggatgcagtaggaaatactactaaagcagtaacaaaaggttatgcgattggatctgcaggtttaggtgcgcttgttcttttcgctgcttatactgaagatattaaacatttttcaaaagtggctggttcaaaattagaaggcatagttgtaacttttgatttatcaaatccatatgtagtt

SEQ ID NO: 267329 - DNA, 832 bp, Unknown
  Bacterial polypeptide expressing nucleotide sequence isolated from the Sargasso Sea
tgtagcactagatgcatatggcccagtaactgataatgcaggtggaattgctgaaatgtctaatctacctaaaaatgtaagaaaaactactgacgcattagatgctgttggaaatactacaaaagctgtaactaaaggttatgcaataggttcggctggattaggagcgctcgttctgtttgcagcttatactgaagatataaaacacttttcaaaagttactggttcaaagctagaaggaatagttgtaacatttgatttatcaaatccttttgttgttgttggtctattaataggtggaatgctgccttacttatttggttctatgggtatgcaagctgttggtagagctggaggtgctgtagttttagaagtaagaagacaatttaaaaaaattccaggcattatgaaacgtaaagctaaacctgattatggtaaacttgtggatttacttacaaaggctgcaattaaagaaatgattattccctctttgttaccggttctgtctccaatagttttatatataattattttacctataggcggtcaagttgctgctttatcatcagtaggcgctatgttgctaggagttataataacaggtttgtttgttgctgtatccatgaccgctggaggcggagcttgggacaatgctaaaaaatatatagaagatggaaaatttggaggaaaaggatccgaggcacataaagctgctgttactggagatactgttggtgatccctataaagacactgctggacctgctgtaaatccaatgattaaaattacaaatatagtagctctacttttacttgctgttatagctggttaa

SEQ ID NO: 267330 - DNA, 811 bp, Unknown
  Bacterial polypeptide expressing nucleotide sequence isolated from the Sargasso Sea
gttaaatcggttgctttatcctcaacaacaggacatggaacaaatgtaattcaaggattagctgtatctatggaggcaactgcaattcctgcattaataattgttgcaggtattttaattaccaattcaatagctggactatttggtattgcgatagcagttacaacaatgctcgctttagcaggtatggttgttgcattagatgcatacggtccagtaactgacaatgctggtggtattgcagagatgtctaatctgaataaaaaagtaagaaagacaactgatgctttagatgctgtaggaaataccacaaaagctgtgaccaaaggatatgctattggttctgctggtttgggtgctttagttttatttgcagcatacacagaagatattaaacatttttcaaaagaagccggatcagctcttgaaggaattgttgttacattcgatttatccaatccttatgttgttgttggtttattaattggcggaatgttaccttatttatttggatcaatgggaatgcaggctgttggaagagcaggaggagctgttgttgttgaggttagaagacaatttaaaaaatttcctggaataatgaaaagaaaacagaaacctgattatgctaaactagtagatttactcacagtcgcagccattaaggagatgataataccttctctattaccagttctatctccagtcgttttatattttgttatattttcaattggtggacaggttgctgcactagcatctgtaggtgatatgttattaggtgtaattataaccggcctatttgttgctgttt

SEQ ID NO: 267331 - DNA, 832 bp, Unknown
  Bacterial polypeptide expressing nucleotide sequence isolated from the Sargasso Sea
atttcggttcaggcaaacgtaagaaccgcagaggcatcaagaaaaagtttacaatcaggtttaagtattgcatttaaatctggagcgataacaggtttactggtagcgggattagctcttttatcaattgccatttactatctcgtattaataaatctcaacactgaaagtagagacattatcaacgctttagtggctttaggttttggtgcttctttaatttcaatttttgcaagattaggtggtggaatttttactaaaggagctgacgttggagcagatttagttggtaaagttgaagctggtattccagaagatgatccacgtaatcctgctgtaattgcagacaatgtcggggataatgttggagattgtgctggtatggcagctgatttatttgaaacctatgcagtaactatagttgcgactatggttttagcatcaatattttttcctgatacatctaacatgatgatttatccattagcgataggtggatcatgtattattacatctataataggaacttggtttgttagattaggtaatagtaaaaatataatgggagccttatacaaggggtttattgctactgctgtactttccttattaattttgtaccctttgacaaatgcgactttaggtttaaataataattattcatattcaaatatcaattttactggttttgatttatacgtgtgcgccgtaattggattgataataacaggtttaatcatttggataacagaatattatacaggtactaattttagacccgttaaaagtgtggcacaatcttcaacgactggtcacggaactaatgtaattc

SEQ ID NO: 267332 - DNA, 880 bp, Unknown
  Bacterial polypeptide expressing nucleotide sequence isolated from the Sargasso Sea
agagatctatattactgtggggtaataggactagttattacaggattattaatttgggtgacagaatattatacaggcactaattacagaccggttagaagtgtcgctaattcatcaacaactggtcatggtacaaatgtaatccaaggtttggctatttctctagaggcaactgctataccagcattaataatcgttgctggtatacttttaacaaataatattgctggtttatatggaattgcaatagctgttactactatgttagctttagctggtatggttgtggctttggatgcatatggtccagtcacagataatgctggtggaattgctgaaatgtcaaaattacctaataatgttagaaaaacaactgacgcattagatgcagtaggcaatactactaaagctgtaacaaaaggttatgcaattggttcagcaggtttaggagcattagtattatttgcagcatatactgaagatataaaacatttttctaaagttgctggctcgaaattagagggaataatagttacatttgatttatccaatccttatgtagtagttggattacttataggtggtatgctgccttatttattcggatcaatgggaatgcaagcagtaggcagagcaggtggggctgttgtaatagaagttagaagacaatttaaaaaatatcctggaatcatgaaaagaaagcaaaaaccagactacgcaaagcttgttgacttgttaactgtggcggcaattaaagaaatgattttgccatcgttgttaccagttttgtcccccaataattttatattttataattctgtcaattgggggtcaagttgctgctttagcctctgttggagctatgttgttaggagttatt

SEQ ID NO: 267333 - DNA, 889 bp, Unknown
  Bacterial polypeptide expressing nucleotide sequence isolated from the Sargasso Sea
atgaaaacagctacaaatgcatcagcacgaactgcttctgcatgccaaacatctctaaataatggactaaaagtatcctttagagcaggatccataatggggttaatggtagtaggatttggattacttgatctttcaatttggttcgtaatattaaatatattttacgatttgaatttatttggagttagcaattcaatagcaaatacaatatccatgacttggacaccagaactattaaataatgcacaatttgaagctctaaagttaagagaaatatgtaatgctctactaacatatgcaatgggagcatctgtaatggcactattcgccagagttggaggaggaatatttacgaaagcagcagatgtaggagctgatttagtaggtaaagttgaagcaggaatcccagaagatgacccaagaaatccagctacaatagctgataacgttggcgataatgtaggtgacgtagcaggcatgggagcagatttatatgagtcatactgcggaagtattttagctgctacagcaataggttcatctctagcgcttacatttacaaatattggtataaacgcaattatcgctccaatgttaattgcaggtggtggaattattttctcattaattggaatttttctagttaaaacaaaagaaaatgcaacacaaaagaacttactaacatccttattaattggaacgggtataacatcagttctaattataatttatatagcaattctagcaaatcttaatataatttcatggggtaactttggaagtattattattggactaatagctggattcatcattgggcaagcaactgaatactatacttcagatacatacaaaccaacacaattaatatcagaagcagcaaaag

SEQ ID NO: 267334 - DNA, 997 bp, Unknown
  Bacterial polypeptide expressing nucleotide sequence isolated from the Sargasso Sea
catattctctcttataattctgtatcctgtaacagactcaatagtgggccttgatcaatcttatagtgttggaaatagttcttttacgggctttagtctttatatttgcggtgtgtcaggtttaattattactggattattaatttggataactgaatattacactggcacaaattacagacctgtaaaaacagttgccaagtcttcgattacaggacatggcacaaacgttattcaaggtttagcagtttcgatggaagctacggccattccagcattaataattattgtaggaattttatttactaatcatttagccggactttttggtatagcaattgctgttacttcaatgctagctctcacaggtatggtagttgcgttggatgcctatggacctgtaactgataatgcaggcggtatagcagaaatgtcgaaattgccaaaaagtgtaagaaaaactaccgatgctttagatgccgttggaaacactacaaaagctgttacaaaaggttatgcaataggctcagctggattaggagcccttgttttgttcgctgcttacacggaggacatcaaatttttttcaaacgttgctggttcaagattggaaaatgtaaatgtaagttttgatttgtctaacccatttgttgtagttggattactcgttggcgggatgttaccttatttgtttggatcaatgggaatgcaagctgttggtagagctggtggagctgttgttatagaagttagaaggcaatttaaaaaaatacccggaataatgaaagggaagagaaaacctgattacggtagattagtagacttgttaactaaagccgcaattaaagaaatgataataccttctcttttacctgttttatctccaatagttttatacttcgttatcttacctatcggtggcttggaggcagcattgtcttcacttggtgcaatgttattaggagttattataacaggtctttttgtagctatttct

SEQ ID NO: 267335 - DNA, 888 bp, Unknown
  Bacterial polypeptide expressing nucleotide sequence isolated from the Sargasso Sea
tttactaaaggtgctgatgtaggagcagatttggttggaaaagttgaagctggtatacctgaagatgatccaagaaatcctgctgtcattgctgacaatgttggtgacaacgttggtgattgtgcaggaatggctgcagacttatttgaaacatatgcagtaacaatagttgctacaatggttttatcttcaatattttttccaggcgatctatcaatgatgatctaccctttgactataggtggggcttgtattttaacatcaattataggaacattttttgtgaaacttggtaaaagcaaaaatgtgatgggtgctttatataaaggttttatagtttcagctttatcttcattagtcatactttaccctgttacagattttgtattagggttagaaaataactatgatttaaataataaaagtttttcaggaataagtttatattattgtggcgttattggattaattataactgggttattaatttgggtaactgaatattacacaggtacaaattatagacctgtacgaagtgttgcaaattcctctacgacaggacacggaacaaatgttattcagggattagcaatttcattagaggctacagccattccagcattaataattgtagctggtattttattaactaaccatattgctggtttatatggaatcgcaattgcagtcacaactatgttagctttagcagggatggttgttgctcttgatgcttatggtccagttactgataacgctggtggtattgcagaaatgtcaaaattacctaatagtgttagaaaaacgacagatgcactcgatgcagttggaaatacaacaaaagcagtaactaaaggttatgctatcggctcagctggtttaggagcg

SEQ ID NO: 267336 - DNA, 898 bp, Unknown
  Bacterial polypeptide expressing nucleotide sequence isolated from the Sargasso Sea
atgtcaatttatcctcttgttctaggggctatttccatcgttgcatcaattataggtacattctttgtcaaaacatcagatggcggaaaagttatgggtgctttatacaagggaatgattgtagctggagttttggcagcaattgcattttacccaatcacaaacatgatgatgagtgtgacaggaaatgtctcgggtatttatgggtctgctcttattgggctggcattgactgctgcaatggttatcataacagagtattacaccagtactgattacaaaccagtacaagaaattgcagaagcatcactatcaggtgatgcaacaaatattattgctggtcttggtatctcaatgaaatcaactgctatgccagtaattgctgtttgtgcaagcatctggggagcatttgaattggcacctgatggagatgctatggcagggctatacaatatcgcgatagcggcaacatcaatgctatcaatgactggtgtggtcgtagctttagatgcttttggcccaataacggataatgcaggtggtattgcagagatgtctgaacttccttccgaagttcggaatattactgatcaattagatgctgttggtaacactacaaaagcagttacaaaaggatatgccattggatcggcaggtctagctgcgcttgttttgttcgctgattacaccaatgcgctggagaaaaataacatattggtatcatttgatttatcagaccatctcgtaattattggtttattcctcggcggtttggttccttttatctttggttcaatggctatggaagcagttggtagagcagcaagttcagttgttactgaggtacggagacaattcaaagacatgccgggtatcatggaaggtactcaaaaaccag

SEQ ID NO: 267337 - DNA, 703 bp, Unknown
  Bacterial polypeptide expressing nucleotide sequence isolated from the Sargasso Sea
gatgaaaattgatgcagtcggaaatacgacaaaggctgtaaccaaaggctttgcaattgcaagtgcagcactagccgcattggcaatgattcaggcattccaatttgaagcatcacactatttccaagacatggttattgactatggattatcaaacccatcagttatcattggattgttagttggtggattaattccatttatcatcacaggacagttaatcagtggcgtagaacgtgcagcaaagaaaatggtctatgaagtcagaagacagttcaaagaagatcctgaaattttaaccggtaaatcaaaacctgattatgcaaaatgtgtagatgtagcaacacttgcatcaattggtgaattatggaaatcagcatcagtagcagtagcagcaccaatcattgttggtgtattgttaggtccttctgcagtggcaggtctcttaatgggagcagttgtctctggaatcttcttggcatatcacttggcaaacactggtggtgcatgggataacgcaaagaaactcatcgaaatgaaaggtgaaaagggtactgaagaacacaaagtcgctgtagtaggtgatattattggtgatccttacaaagatacagcaggtcctgcactaaacacagtaatcaaactcttaaacacaattgcaattgtatttgttcctgtattctttgcaattattgtattatag

SEQ ID NO: 267338 - DNA, 784 bp, Unknown
  Bacterial polypeptide expressing nucleotide sequence isolated from the Sargasso Sea
atggaatttataccaatatatgctggaatattaggcatttttatagctgtaggcctatttattttagttctaacaaaagactccggttctggaaaaattgaggatatttctaataaaattcatctaggtgccatgacatttattaagcgagaatactcaatactttttatgtttgtggccattgttgcgatattaatatttttttcaaatttaggcccaaatacaatgtacgcttttcttcttggcgctttttgttctgctttagctggtttctttggaatgtacaccgcaacaaaagcaaattctagaactactcaagcagcacatataaatggtctctcagacgctcttaatatttcattttttggtggtgcgattatgggaatgagtgttgcagctctaggggttttaggtttaggaattttatatattttctttggaaaagacccttcaactgctcatatcattcatggatttgggatgggtgcgtcatcagttgctttattttcaagagttggcggcggaatttttacaaaaagtgctgacgttggagcagatcttgttggaaaagttgaagcaggtattcctgaagacgatccaagaaatccaggtgttattgctgataacgtcggtgataacgttggtgatgtaactgggatgggttcagatatatttgaatcatattgtggcgcaatcattgcgacaattgcaattgcttcctcattaggttcagattatccaactgaagagatgatgttcataccattaatgtggcgtcagtagg

SEQ ID NO: 267339 - DNA, 910 bp, Unknown
  Bacterial polypeptide expressing nucleotide sequence isolated from the Sargasso Sea
gttggagattgcgcaggaatggcagccgatctgtttgaaacttatgctgtaaccattgtaggaactatggtgcttggactaattttatttgatagtggcgatcaacaaacttttatgatgtttccccttctaatagcaggcgtttgcataatttcatccttggtaggtgcctactatgtaaaacttggcgaaggatctaaaaacataatgggtgctttatataaagggctaataattacagcattagtttctgtattactaatttatatggtgactgacttcttcattggagcagataagcttataattaatagtgatcttttcatagagtcattcttaggaatagatttattttattgtgccatcatagggttatcagttacaggccttatagtatggataactgaatattataccagtacagaatttaaccctgtaaaatcagttgcacgttcatcacaatcaggtcatgctacaaatattattcaaggtttagccgtttcgatgcagtctaccgcattaccaaccttagtgattatattagggattctgttctcatataaatttgcaggattgtatggaatttctattgctgcaactaccatgcttgctcttgcgggaatgattgtggccctcgacgcctacggaccagtcacagataatgccggtggtattgcagaaatgtcgaatttgtccgaggatgttagaaagactactgacgcacttgatgcagtaggcaatactacaaaagcggtaactaagggatatgcaattggctcagcaggcctagcatctctagtcctatttggcgcatatactcaagatcttaaatattattttcctaatttagatattaaatttgctttagatgacccttatgttgttgttggtcttttaattggtggtatgc

SEQ ID NO: 267340 - DNA, 967 bp, Unknown
  Bacterial polypeptide expressing nucleotide sequence isolated from the Sargasso Sea
caatattatagccgggttaggtgttggaatggagtcaacagcagtgccaatgattataatatctaccagtataatgggcgcatactattttgctgttttgtatggaatgcatttagctgcattggggatgctagcaaatacagggattcaattagcagtagatgcatatggccctatttcagataatgctggcggaatcgcagagatggctgagctcccaagtgaggttcgtgaaagaacagataagcttgatgctgttggtaatactacagctgccattgggaaagggtttgcaataggctctgcagctttaacagcgttagctctttttgctgcatatatggtaaaaacagggatctcaactattgatatatcaaatccaatggttatggccgggttatttattggtggtatgttaccatttctattttcatcaatggcaatgggtgcagttggtcgagcggctatggctatgattgaggaagtaagaagacaatttagagaaattcctgagctaaaaaatgcgctggaaattatgaacctaaaagataaagaagattggaatgaagaagataacatagtttacaatgatgcattggggaaagctgaacatggacgttgtgttgaaatttctactgaatcagcaattaaagaaatgatatttcctggccttttagcagttatcactccagttttagtggggtttgtaccgcgactttttggaagtgaccaaggggctgaaatattaggaggtcttcttgctggtgtaacagtaacaggggtattaatggctatcttccaatcaaactccggaggggcatgggacaatgcaaaaaaaatgatagaagaaggcattgttgtcaatggtcaagaaatcaaaaaaggatcagaagctcataaggctgctgttgttggagatacagtaggggatccctttaaggatacctcgggaccatcgttaaatatc

SEQ ID NO: 267341 - DNA, 871 bp, Unknown
  Bacterial polypeptide expressing nucleotide sequence isolated from the Sargasso Sea
aattgctgttacatcaatgcttgctttagctggaatggttgttgctctagatgcttacggacccgttacagataatgctggaggtatagctgaaatggcaaatttgccaaaaaatgttagaaaaactactgacgcacttgatgctgttggtaatactactaaagctgtaacaaaaggttatgctattggatcagcaggtctaggagccctagttttgtttgctgcttatactgaagatataaaatttttttctaaactaagtggatctaatttagaaaatataacagttacttttgacttatcgaatccttttgttgttgtaggtttgcttgtaggtggcatgctgccatatttatttggttcaatgggtatgcaggcagttggaagggcaggtggagctgtagtagtagaggtaagaagacaatttaaaaaaataccaggaataatgaaaagaaaagcaaaacctgattacggtaaattggttgaccttcttacaaaagctgcaattaaagagatgattattccttctttattgccagttttatctccaattgttttatattttgctatattacctatcggaggtcaggtagcagcattatcctctgttggtgcaatgttattaggagttattataacaggattgtttgttgctatatcaatgactgctggaggtggagcctgggataatgcaaaaaaatatattgaagatggtaattttggtggaaaaggatctgatgcgcataaagcagcagtcactggtgacacagtaggcgatccatataaagatactgcaggacctgcagtaaatccgatgataaaaataactaatattgttgctcttctattattagcagttttagctggttag

SEQ ID NO: 267342 - DNA, 532 bp, Unknown
  Bacterial polypeptide expressing nucleotide sequence isolated from the Sargasso Sea
catgttaccttatttatttggatctatgtcaatgcaagcagtgggtagagctggtggtgctgttgttgttgaagttagaaggcaatttaaaaaaattcccggaataatgaaacgtaaaagaaaacctgattatggtagattagtagatttacttactaaagcggcaattaaagaaatgatcgttccttcattacttccagttttatcacctataattttgtattttattattttagcaataggaggtatcgaggctgcgttatcatctgtaggagcaatgctacttggcgttattatcacaggtctttttgttgcaatttctatgactgctggtggaggagcatgggataatgctaaaaaatatattgaagatggaaaatttggcggaaaaggatccgaagctcataaagcggcggttacaggagacactgttggtgatccctataaagatactgctggtcctgctgtaaatcctatgattaaaataacaaatatagtcgctttattattactagctgtaattgcgcattag

SEQ ID NO: 267343 - DNA, 353 bp, Unknown
  Bacterial polypeptide expressing nucleotide sequence isolated from the Sargasso Sea
aatgattgtaccctcaatgctgccagtgctatcaccaattatactttttttgattgtatcagtagtggctgatcaaaatgccgctgtttctgctgtaggtgcaatgttattaggcgttattgtaactggtatttttgttgcaatttcaatgacagcaggaggtggagcttgggacaatgcaaaaaaatatgttgaagatggtaattttggaggaaaaggctcagaagctcataaagcagctgtaacaggagatactgtcggtgacccgtacaaagatacagctggacccgctgttaatccaatgattaaaattactaacattgttgcacttcttttattggctgcgttataaa

SEQ ID NO: 267344 - DNA, 865 bp, Unknown
  Bacterial polypeptide expressing nucleotide sequence isolated from the Sargasso Sea
ctggccgcaggggcaggcaatgaacggatgcaggagatcgccgcagcgatccaggaaggcgcgcaggcctatctcaagcgtcagtacacgaccatcgccatcgtcggcgtggtcgtcgcagtgctggtgtttctctttctcggtataattcccgcaatcggtttcgtcatcggggcgatcctgtcgggcgttgccggcttcatcggaatgaacatctccgtacggtccaacgtccgcaccgcggcagccgcgcaaagcggattgcagcagggactcaccctcgccttccgcgcaggcgccattaccggcctgctggtggccgggctcgcgctcctcgcgatcgctgtcttcttctggtatctcgtcggccctgccggacatgccgccaacagccgcgaggtgatcgacggtctcgtaggcttggccttcggtgcttcgctgatctccatcttcgcgcgtctgggcggcggtatctttaccaaggctgccgacgtcggcgccgatctcgtcggcaaggtggaagcgggcattcccgaagacgatccgcgcaatcctgcggtcatcgccgacaatgtgggcgataacgtcggcgactgcgccggcatggcagcggacctgttcgaaacctacgtcgtcaccgtgggtgcgaccatggttctcaccgcgctgttgctgaagggtctgggcgatttgttgctgccgatgatggcgctcccgctgctgatcggcggggcgtgcatcctgaccagcatcatcggtacctatttcgtcaagctgtcgaaaggcggcacgaatgtcatgggcgcgatgtacaagggcttcgtcatcaccgccatcctgtcgattccgctgatcggcgtggcga

SEQ ID NO: 267345 - DNA, 553 bp, Unknown
  Bacterial polypeptide expressing nucleotide sequence isolated from the Sargasso Sea
caagaaattgctgaagcaattcaaataggcgctaaggcttacttaaacagacaatataaaactattgccatcgtaggtgttattgtatttgctattgtaacttatttttttaattacttagtgggtttaggttattttattggagcttttttatcaggagtagctggatatgtagggatgttaatttctgttaaggctaacgtacgaactgcagaggcttcaagaaaaagtttacaggctggtttaacaattgcttttaaatcaggtgccataacaggattacttgttgctggtttagctttattagctattacaatttactatatagttttaataaaattacaaatagataatagagaaatcataaatgctttagtagctctagggtttggagcttcactaatttctatttttgccagactaggtggtggtatatttactaaaggcgcagatgttggggctgacttggttggtaaagtagaagctggtattccagaagatgatccaagaaatccagcagtaattgctgataatgtaggagataatgtaggag

SEQ ID NO: 267346 - DNA, 927 bp, Unknown
  Bacterial polypeptide expressing nucleotide sequence isolated from the Sargasso Sea
ttggtgtatagttctggccttgtcacatatttttttagttatttagttggatttggatattttattggagcgtttttatcaggtgttgctggatatgttggaatgttaatttctgttaaagcaaatgtaagaacagcagaggcatctagaaatagtttacaatctggtttgacaatagcctttaaatcaggggctataactgggttattagtcgctgggttagcgttattagctatcacaatttattatattattttaataacactaaatgttgaaaatagagaaataattaatgctttagttgcattaggattcggcgcttcattaatttctatttttgctagattaggaggagggatctttacgaagggagccgacgtaggtgcagatttagtaggtaaggtagaagctggaataccagaagatgaccctaggaatcctgctgtaattgctgataatgttggtgacaacgtcggtgactgcgctggaatggctgcagatttatttgaaacatatgctgtaacaattgttgctacaatggtacttgcttcgatattttcacctcaagattataatttaatgatttaccctctagcaataggtggagcatgtataataacttccatagttggaacatggtttgtaaaacttggaaaaagtaaaagtattatgggagctctctataaaggatttattgttacggcagttacctcattaatcatcatgtatccagtaacagagtcaattattggaatgaaaagtacatacaataataacgctggagcaattttctctggtcttgatttatatatatgtggagtagttggttttgccataactggactattaatttgggtaacagaatattacacaggaactgattatagaccagtaagaacagtagctaaatcctcaacgacaggtcat

SEQ ID NO: 267347 - DNA, 916 bp, Unknown
  Bacterial polypeptide expressing nucleotide sequence isolated from the Sargasso Sea
ggcttagctggattccttggtatgagggttgcaaccaaatcaaataatagacccactaatgctgcgcgagataatctagaaaaagctcttaatgttgcttttagcggtggttctgtaatggggttaagtgttgtcggattaggcgtattgggattaggaggtttgtttctactctatactaatatgtatggttctgattttgataacataggtacggtattaaatgttttatctggtttctctcttggcgcttcctccatagctttattcgctcgtgttggtggtggtatttacacaaaagcagcagatgtaggagcagatcttgttggtaaagttgaagcaggaatccctgaagatcatccattgaaccctgccactattgctgacaatgtgggagataatgttggagatgttgccggaatgggggcagacctttttgaatcttatgttggttcgattataggctctatggtactcggagctagtattattgtttcaggtagctttgatttaaattttgttctattgcctttgatgatagctgcttctggaatattggtttcaatcattggaacctttatggtagttgtcaaagaaggcggagatcctcaaaaagcccttaatagaggagagtttggtagtgcggctattatggttgttgtagttttttatttaattaatatgtttctaccagatacttttagtcaaggcgggtcagatttctcaagtattggtgtattttatgcaacggttattggccttgctgctggccttgggattggtatgattacagagcattacacaggaacgggaactggtcctgtaaattctattgtaaagcaatcaattactggccctgcaacaaatattattgctgggttgggtgttggaatgcagtctacagctgttcctatac

SEQ ID NO: 267348 - DNA, 901 bp, Unknown
  Bacterial polypeptide expressing nucleotide sequence isolated from the Sargasso Sea
acaattgctgcaggaatattaatttctttcactcttgcaggtggtacagtagacgatcctataatgggactttatggtattgcattagcttcagtaggaatgcttagcacacttgctattacattgagtactgatagttttggacctgtaagtgataatgctggtggaattgcagaacaagctggtttagaccctgaagtaagagaaagaactgatgctttagatagtttaggaaacactactgctgctactggaaaaggaatctcagttaccagtgctgtactaacatcccttgctcttctagcaacgtacgcaactgttgctggtattgattcattgaatttactaaatccaaaaattttagttggagctattataggtggtttattaccatttatttttgctggattaactatggctgcagtaggtagagcagctggagcaatgatagaagaagttagacgtcaatttagagaaattaaaggacttaaagaaggtaaaaaaggtgtaaaacctgatgtagcaaaagctgttgaaatttcaactaatggtgcattgaaagaaatgatagtccctggaacattagcaatacttgctccaatcgctgtaggaattattccattcctagggcctgaagctttaggaagtatgcttgcaggatctattatttctggatttttactagctatttttctaaataactttggtggtgctgctgacaatgctaaaaaatatatcgagttaggtaatcatggtggtaaaggatctgatgctcatgaagcaggtgtcataggagacactgttggagatccaactaaagacactagtggtccagctcttaacattttgttaaagcttatggcaatggtatcaatagtttttggtcctttatttttaggac

SEQ ID NO: 267349 - DNA, 568 bp, Unknown
  Bacterial polypeptide expressing nucleotide sequence isolated from the Sargasso Sea
cctggaaaatccatacgttgtcgtcggattattaattggtggtttactaccatatttgtttgcatcaatgggaatgatggctgtcggtcgagcgggtggtgcagtagttgaagaagttagaaaacaatttgctgataatcctggcatcatgacgggtgactcaaagcctgattattctcgatcagttgatatgcttactcgctcagcgattaaagagatgataattccgtctatgttacctgtattgtcaccaataatattattttttattgtttcaattgttgctaatcagaatgcagctgtttcagcagtaggcgcaatgcttctcggtgtaattgttacaggtatttttgtcgcaatttctatgactgctggcggcggcgcttgggacaatgctaagaaatatgttgaggatggaaattttggcggtaaaggatcagaagcccataaagctgcggtcacaggagacactgttggagatccatataaagacactgcgggcccagctgttaatccaatgatcaaaataactaatattgtagctttattattattagccgcattatga

SEQ ID NO: 267350 - DNA, 859 bp, Unknown
  Bacterial polypeptide expressing nucleotide sequence isolated from the Sargasso Sea
tgcagatgtaggtgcagatttagttggaaaggtagaagcaggtattccagaagatgacccaagaaatcctgctgttattgcagataatgttggtgacaatgtgggagattgtgcggggatggcagctgatctatttgaaacttatgctgtcaccattgttgctaccatggtcctctcatctattttctttgtaaatgatttaaatatgatgatctatccattggctattggtggagcttgtattttaacatctatacttggaactttttttgttactcttggtagtgataaaaatattatgaaagctatgtacaaagggtttgtaataactgcaattagttctttgataatactatttccaattacaaaacatgtaataggttttaccactgaatatgtagcaaatggaaaaacatttaatggtttaagtctatatttttgtggaataattggtttagtaataacaggattaataatttggattacagaatattacacaggaactgactacagacctgttaaaagtgttgccgaatcttcaacaacaggtcatggaacaaatgttattcaagggttagcagtatctatggaagcaactgccgttccagcattaataattgttggtggaattttatttactaaccatatagcaggactttatggaattgctattgctgtaactacaatgcttgcattagcaggcatggttgttgctttagatgcttatggacctgttacagataatgctggtggtatagctgaaatgtcaaatcttccaaaaaatgtacgtaaaacgactgatgctcttgatgcagttggtaatacaacaaaagctgtaacaaaaggttatgcaataggt

SEQ ID NO: 267351 - DNA, 910 bp, Unknown
  Bacterial polypeptide expressing nucleotide sequence isolated from the Sargasso Sea
gggattcagtgttgcgggccttgcactgctgggcatctctttcaactacctcctatgggttacctggctcggagtcgacagcgcattccaagtagtcgccgcatttggattaggtgcaagttctattgctctgttcgctcgtatcggtggcggcatttacaccaaggccgcagacgtcggcggtgaccttgttggcaaagtggaagcaggaatacccgaagatgatccccgtaacccagcgactatcgctgacgcagtcggtgacaacgtaggtgacgttgcgggcatgggcgcagacctctttgagtcatatgccggctcggtggtagctcctatagtcctagtctcccttttactctcaggtgtgttcatccagggagacgaactgcaagtatttggtgactacgaatccttgttgatgtacccgattctcatcggcgccttaggcatgatcgcgtcgatcgttggagcgctactcacaagaggtaaagaaggccaaagtctctcaacacagctacataccggccagtacatagctatgggactaaccatcattttcacgattgtgggaactcaatggctctttggtggaaccgacattgtcacaacccccatctacctgtcattaacaatcatcatcggattgctaggcggttgggcaatcggattcgtatctgagtacttcacctccgaacactacaaaccggtaaaaggtatcgctgcccagtcagaaacaggagcggcgacagtaacgattgaaggaatcgctcaagggaagctctcaacgctcccatcagtagcgcttgtcgtagcaatgatcggcctgtcttactggttaggcggtgctgcttttggcaacgcaggagacgtcatagggctttacggcgtatctctagccgctatcggcatg

SEQ ID NO: 267352 - DNA, 937 bp, Unknown
  Bacterial polypeptide expressing nucleotide sequence isolated from the Sargasso Sea
tatttaattggtgcagccttatctggaattgctggctatgttggtatgctagtttcagtagaagcaaatgtcagaactgcagaggcatcaagaaaaggtttagcagaaggactttctgttgctttcaaatctggtgctgttacaggtatgttagttgcaggtttagccctattagcaatagcagtttattattttttattactaaaatttgaagttgatgagagagaaatagttaatgcgcttgttgcattaggatttggtgcatcattaatttcaatttttgcaagattaggtggtggaatatttaccaaaggtgctgatgttggtgctgatctagttggtaaagtagaagctggaataccagaagatgatccaagaaaccctgctgttattgcagataatgttggagataatgttggagattgcgctggtatggctgcggatttatttgaaacatatgcagttactattgttgcaacaatggttctttcatccatttttttcattggtgatctaaatatgatggtttatcctttaacaattggtgccgcatgtttaatcacatcaattattggaactttttttgtaaaacttggaaaaaataacaatgtaatgaatgctttatataaaggttttatagtgtctgcggtagcatcattattaattctttggccggttactgatcatgtgattggattttcaaatgaatatacagtaaacaataaaacttttaatggtaaggatttatattattgtggagtgattggtcttgtaatcacaggtttattaatatggatcactgaatattatactggtacaggttatagacctgtaaaatcagtggccttatcatctacaacagggcatggaactaatgtaattcaaggggttagcagtatctatggaagcgactgccattccccgcataaattattgt

SEQ ID NO: 267353 - DNA, 840 bp, Unknown
  Bacterial polypeptide expressing nucleotide sequence isolated from the Sargasso Sea
gttgcaggttttattggtatgtatgcagctactaaagcaaatgttagaactgcaactgcagctcaaaaagacggtccagcagcagctttatcggtctctttttatggtggctctataatgggtctatgtgttgcatcattgggcctcattggtttaggtggattatattatttctacatcccatctgaaattgaccctcataagcttgaaggttttgctatgggagcatctgttgtagctcttttttccagagtaggtggaggaatttttacaaagagtgctgatgttggagctgatctcgttggtaagattgaagctggtattcctgaagatgatccaagaaacccaggtgttattgccgacaatgttggtgataatgttggtgatgttgcaggaatgggttcagatatatttgagtcatattgcggctctatgatcgcatcaatagcaatagcttatacgcttggaaaccaagatatgatgatgcttccactggctttagctgcgactggcttaatagcttcaataattggaatatttatagttaagcttcagtctgcaaaagcacctgcaagtgcattgagatctggaactcttttagcgccagtaatatttgtggctatggcctatttcattataaatacttttgacggagttggaatgaatgtatggtggtgtgtaattgctggagctgtaggaggtgtattgattggacttattacagaatattatacaggtggagacccagtaaagaaaattgctgaatcaggagaaactggttctgcaacagtaatgatttcaggtttatcggtaggaatgcaatcagttgtgataccaatg

SEQ ID NO: 267354 - DNA, 1005 bp, Unknown
  Bacterial polypeptide expressing nucleotide sequence isolated from the Sargasso Sea
gatcctagaaacccggctgtaatagcagataatgtaggtgacaatgtaggagattgtgctggcatggctgctgatttatttgaaacttatgctgtaacaatagttgcaactatggttttatcatcaatattttttcatggagatcttaatatgatgatttatcctttatcaataggtggtgcttgtatattgacatctattattggaacattttttgttaaattgggtaaatccaaaaatattatggctgctttatataaaggctttattgtgactgctttaacatcgttaataattttgtacccagttacagattatgttttaggcttagaaaacacatatacaattgcaaataaatcattttcaggaatgagtttatatatttgtggcgcaataggtttagttattaccggtttattaatttgggtaacagaatattacacgggaactaattatagacctgttaaaagtgtagcttcgtcatcaacaactggtcacggtacaaatgttattcaaggtttagcagtatcaatggaagcaactgcaataccagctttaattattgtgggtggtatattattaacaaattatattgctggactctttggtatagctatagcagtaactacaatgttagcattagcagggatggtagttgctttagatgcatatggacctgtaacagataatgccggtggaattgctgaaatgtctaatttaccaaaaaatgttagaaaaaccactgatgccttagatgcagttggtaatacaacaaaagcagttaccaaaggttatgcaattggatcagctggtttaggagcgttagtgttgtttgctgcttatactgaagatattaagcatttttcaaaagtcgctggatcaaatttagaaggaattgttgtaacttttgatttatcaaatccttttgtagttgttggtttattggttggaggcatgcttccatatttgtttggttcccatgggaatgcaagctgtaggaagagc

SEQ ID NO: 267355 - DNA, 258 bp, Unknown
  Bacterial polypeptide expressing nucleotide sequence isolated from the Sargasso Sea
gagtgactgtctgtggtgtgttaatggcaatttttcaatctaatgcaggcggagcttgggataatgcgaaaaaaatggttgaggaaggtcttaatattgatggggaatcatacggaaaaggttctgaagcgcataaagctgctgtagttggagatacagtaggtgatccatttaaagacacctcaggcccatctctaaatatattaattaaacttatgtccgtagtgtcattagttatagcgccactgatcgcataga

SEQ ID NO: 267356 - DNA, 512 bp, Unknown
  Bacterial polypeptide expressing nucleotide sequence isolated from the Sargasso Sea
tcctgcaattataatagtagcaggtataataattacacattcacttgccggactatttggaatagcgattgctgtaactacaatgcttgctttagcaggtatggttgtagcacttgatgcttatggtccagttacagataatgctggcggtattgcagaaatgtctgagttagatgataatgttagaaaaactactgacgctctagacgctgttggaaatacaacaaaagctgtaacaaaaggatatgctattggttctgccggattgggagcgcttgttttatttgctgcttatacagaagaccttgaacattttgcaaaagatcctaacagtcctctgtcttatgaaaaaattggaaatgttacttttgatttatcaaatccctatgttgtagttggtctattgataggtgggctattgcctttcctatttggggcaatgagtatgacagctgtaggaagagctgcaggatcagtagtagttgaagttagaaggcaatttaaagaaatac

SEQ ID NO: 267357 - DNA, 652 bp, Unknown
  Bacterial polypeptide expressing nucleotide sequence isolated from the Sargasso Sea
tatgagcgcagaaacaattctaggttacacaatattagcaggtttattatctatagtttatggttttataacaggtaaaaacattttaaagtcaagtgcaggaaattcaaaaatgcaagaaattgcatcagcaattcaaataggagctaaagcgtatttaaatagacaatataaaacgattgcgattgttgggatcgtagttttagtaattattagttatgcttttagtatattggttggacttgggtatttgattggcgcagctttatcaggtattgctggctatgttggaatgttagtttcagtacaagccaatgttaggacggctgaggcttctagaaaaggtttaaatgaaggtctaaatgttgcatttaaatctggcgcagttaccggaatgttagttgctggtttagctttattatctatagctgtttactactatttattattatcattcaatattgatgaaagagaaattgttaacgcacttgtagccttaggttttggtgcatcattaatttctatatttgcaagattaggtggtggaatttttacaaaaggagcagatgttggtgcagatcttgttggtaaagtagaagctggtattccagaagatgacccaagaaatccagctgtaatagccgacaatgtt

SEQ ID NO: 267358 - DNA, 821 bp, Unknown
  Bacterial polypeptide expressing nucleotide sequence isolated from the Sargasso Sea
aaagctggtgcggtaacaggaatgcttgttgctggcttagcgctactttcaatttcagtttattatctacttttagtaagttattcagttgatgaaaatattctaaaaaattctctagtgggattaggatttggagcctctttaatttctatctttgcaagacttggaggaggaattttcaccaaaggtgcagacgttggagctgatcttgtaggtaaagttgaagcaggaattcctgaggatgatcctcgtaacccagcagtaattgctgacaatgttggagataatgttggtgattgtgcaggaatggcagcagatttatttgaaacatatgctgtaacagttgtggcaacgatggtacttgcaatgattttctttccaggttcatcatcgctccttatttatccaatggctatatgtggttgttgcttggtagcatctataattggaaccttctttgtgagactaggtaaatcagaaagtatcatgggagcactttataaaggatttattgcatcttctatcttatctcttgtatttatgtacccaattacgcagagtgttattggatttggagatatcagtgatgctagctttaccgggatgtcattatatgtttgtgctattattggtttagtaattactggattgctaatctggataacagaatattatactggcactaattatagaccagttcaaagtattgcaaaggcatctacaacagggcatggaacaaatgttatacagggactcgctgtttcaatggaagccactgcacttccagctttagtaattgtaataggaattgttctaacatt

SEQ ID NO: 267359 - DNA, 754 bp, Unknown
  Bacterial polypeptide expressing nucleotide sequence isolated from the Sargasso Sea
atgagcggaacagtcgaaacaatactattatatacaattggagctggtttattatctatcgtttatggatttttaactggtaaaaacattcttaattcaagtgcaggaaatgcaaaaatgcaagatattgcatctgcaattcaaattggtgcaaaagcatatttagcaagacaatacaaaactattgctattgttggtgctgtagttttagtaattgtgagtattgcatttagtccactagtaggtcttggttatttaattggtgctgctctatcaggtattgcagggtacgttggtatgttagtttccgtagaagctaacgtaagaacagcagaggcatctagaaaaggcttagctcaaggtctatccgttgcatttaaatctggtgctgtaactggaatgttggttgctggtttggctctattatctatagctgtttattattatatattgttaaaatctaatgtagatgaaagagaaattgtaaatgctttagttgcattgggttttggagcatcattaatttcaatttttgcaagattaggtggtggaattttcacaaaaggtgctgatgttggtgctgatttggttggaaaagttgaggcaggaattcctgaagacgatcccagaaaccctgccgtaatcgcagataacgttggtgataacgttggagactgtgcaggtatggctgctgatttatttgaaacttatgcagttacaattgttgctacatatggttttatcttcaattttc

SEQ ID NO: 267360 - DNA, 864 bp, Unknown
  Bacterial polypeptide expressing nucleotide sequence isolated from the Sargasso Sea
gctgaagcgatacaaattggcgcaaaggcttatctcaacagacaatacaaaactattgctgtagttggattaatcgttttagttataataagttatttttttagtttacttgttggactaggttactttattggcgctttattatctgcggtcgctggttatgttggaatgttaatttcagtagaggcaaacgtaagaactgccgaagcttcgcgatctagtttacaaaaaggccttacaatggcttttaaatcaggcgctataactgggttgctagtcgctggattagcactcttatcaatatctgtttactactggattttattatcttttaatgttgaaagtagagagttaattaacgctttaatcgctttaggatttggagcatcattgatttctatttttgccagacttggtggaggaatatttactaaaggtgcagacgttggtgcagatttagttggcaaggtagaagcaggaatacctgaagatgaccctagaaatccagcagttattgcagacaatgttggtgataatgttggagattgcgcagggatggctgctgatttattcgagacatatgctgtaacaatcgttgcaactatggttttagcttcaatattttttcaaaacaatatggatttaatgatttatcctttagctataggaggcggatgtataattgcctcaattataggaactttttttgtaaaattaggaaaaagcaaaaatataatgggtgctttatataaagggtttatagtcactgcaatcatatcattagttttactttatcccattacttcaaaaattattggattagatgaactatttaaagtagggagcaaaacatttagtggatta

SEQ ID NO: 267361 - DNA, 913 bp, Unknown
  Bacterial polypeptide expressing nucleotide sequence isolated from the Sargasso Sea
gcattatataaagggttcatagttactgcgataacctcattagtgataatgtatccagttacagaaaaaataattggtatgaataatacgtatgaaaataacgctggtgctattttcaatggtttcgatatttacgtttgtggtgttgttggttttgttatcactggtttactaatttgggttacagagtactatacaggcactgactacagacctgtaaagactgtagctaaatcatccacaacaggacacgggacaaatgtcattcaaggattagcgatttctatggaagctacagcaataccagctttaattattgttgcagggatactttatacaaatagtttagccggcttatatggtatcgctattgctgtaactgcaatgttggctttaacaggtatggtagttgctttggacgcttatggtcctgtaacagataatgccggaggtatagcagaaatgtccaaattaccaaaaaatgttagaaaaacaactgatgctcttgatgcagttggtaatactacgaaagcagtcactaaaggttatgccattgggtctgcaggtttaggagcattagttttatttgcagcatacacagaggatattaattatttttcaaaagtaaaaggttcagccttagaaggaataaatgtaacatttgatttatcaaatcctttcgtagtggcaggtcttttaataggtggtatgttaccttatttatttggttcaatggggatgcaggctgttggtagagctggtggatctgtagtagtagaagttcggagacaatttaaaaaaatacctggtataatgaaaggaaaaagaaaacctgattatggtcgactagtcgacttattaacaaaagctgccattaaagaaatgatcattccgtctcttttgccggtgttat

SEQ ID NO: 267362 - DNA, 848 bp, Unknown
  Bacterial polypeptide expressing nucleotide sequence isolated from the Sargasso Sea
agctgtttctatggaagcaactgcaataccagcattaataattgttgctggaattcttataacaaactctattgctggtctgtttggtattgctattgcagtaactactatgcttgcattagcggggatggttgttgctttagatgcgtacggaccagttactgacaatgctggtggtattgctgaaatgtctaatcttgataagaaagttagaaaaacaacagatgctctagatgcagtaggaaatacaactaaagctgttacaaaaggttatgctattggttctgctggtttaggagctttagttttattcgctgcttacaccgaagacatcaaacatttttcaaaagaagcaggatccgcattagaaggtatcgtagtaacctttgatttatctaatccttatgtagtagttggtttattaattggtggaatgttgccttatctttttggttcaatgggaatgcaagctgttggaagagcaggtggagcagttgtggttgaagttagacgacaatttaaaaaatttcctggcatcatgaaaagaaaacaaaaacctgattatgcaaaactagttgatttattaactgttgcggcaattaaagaaatgataattccttcattattaccagtactttcacctgtggtactttattttattattctatcaataggcggacaagttgctgctctagctgcagttggtgcaatgttacttggagttataatcactggtttgtttgttgcggtatcaatgaccgcaggtggcggtgcttgggacaatgcaaaaaaatatattgaagatggtaatcatggtggaaaaggttcagaagctcacaaagccgctg

SEQ ID NO: 267363 - DNA, 427 bp, Unknown
  Bacterial polypeptide expressing nucleotide sequence isolated from the Sargasso Sea
aatgaaaagaaaagctaaaccagactatggtaaactagttgatttactcactaaagctgcaataaaagaaatggtaattccatctctgttaccaatattgtcgcctatagttttgtacataataatctattttattggaggtcaagtcgcagctttatcctcacttggtgcgatgcttcttggagttataattacgggattatttgttgctgtttcaatgacagcaggtggcggagcttgggataatgctaaaaaatatatcgaagatgggaaatttggcggtaaagggtcagaagcacataaagcagcagtgacaggtgacacagttggagatccttacaaagatacagccggaccagcagtaaatccaatgattaaaattacaaatattgtagctttacttttattagcagtaatagctggataa

SEQ ID NO: 267364 - DNA, 685 bp, Unknown
  Bacterial polypeptide expressing nucleotide sequence isolated from the Sargasso Sea
tttgctatgggagcatcagtagtagctctcttttccagagtaggcggaggaatttttacaaaaagtgcagatgttggagctgatcttgttggtaagattgaagcaggcattcctgaagatgatccaagaaatcctggtgttatagccgataatgttggtgataatgttggtgatgttgctgggatgggttcagacatatttgaatcatattgtggctctatgattgcatctatagctattgcttataccctgaaaaatacagatatgatgattttgccacttgtcttagcatcagctggattaatagcatctattctaggtatttttattgtaaaaatgcaggctgctaaatcgccagctagcgctctcagatccggaactttacttgcaccagtcatatttgttgttatggcttattttatagttgattcgcttgagggtgttgatataaatgtttggtggtgtgttatttctggggcagttggaggagttctaataggcctaattacagaatattataccggcggcaaaccagttaagaagattgctgaatcaggagaaacaggatcagcaacagttatgatttcaggactatcagttggcatgcaatcggttgtaatacctattgttattctggctggaataattcttgtatcaactaaattagcagatatttatggtgttg

SEQ ID NO: 267365 - DNA, 864 bp, Unknown
  Bacterial polypeptide expressing nucleotide sequence isolated from the Sargasso Sea
tttattgcatcagcaatattatctttaatttttatttatcctgtaactcaattcattcttggagatatgtctacagaatttagctttggaacaactgcatttactggattctcactatatatatgtgcttttgttggaatagttataactggtcttttaatatggataacagagtattatacagggactaattatagaccagtacaaagcgtagctaaggcatctacaacaggacatggcaccaatgtaattcaaggccttgcagtatcaatggaagcaacggcactaccagctatcgtaattgttataggtattgtctttacatatcagctggctggcctttttggtatcgccattgctgtaacagcgatgttagctttagccggaatggtagtcgcattagatgcttacgggccggtaaccgataatgctggaggtattgctgaaatggcaaatcttgatgaaagtgtaaggaaaacaactgactcactcgatgcggttggaaacacaaccaaggcagttactaaaggttacgctattgggtcagctggtttaggtgctttggttttatttgcagcatacgttgaagatttaaaactaataccagaaataaccccagattttagtttagaaaacccgtatgtagttgttggccttttaattggtggcttattaccatacctgttcgcatctatgggtatgatggctgtgggaagagcaggtggtgctgttgttgaagaagtaagaaaacagttttctgaaaatccaggtattatgacaggagaaacaaaacctgattattcaaagtcagttgatatgttaactagatcagctatcaaggaaatgataataccatctatgttg

SEQ ID NO: 267366 - DNA, 887 bp, Unknown
  Bacterial polypeptide expressing nucleotide sequence isolated from the Sargasso Sea
aggagatttatcaatgatgatttatccactaacaattggtggagcatgtattttaacctcaattattggaacttttttcgttaaacttggtagaagcaaaaatgttatgggagccttgtacaaagggtttgttgtatcagctttagcttccttagttattttatatccagtcactgattacgttttaggtttagaaaattcttatgatttaaataacaaatcattttcaggaatgagcttatattattgtggagtgataggattggttattacaggattgctaatttgggtaactgaatattatacaggaactaattatagacctgtaaaaagtgttgcaagttcttctacaacgggacatgggactaacgtaatccaaggcttagcaatatcattagaggctacagctataccagctttaataattgttgctggtattttgctgactaatcatatcgctggtttatatggtatagcaatcgccgtaacaactatgttagcattagcaggaatggttgtagcactagatgcttatggacctgtaacagataatgcaggtggtattgctgaaatgtctaaattgccaaataatgtaagaaaaacaactgatgcattagatgctgttggtaatacaacaaaagcagtaacaaaaggatacgctattggttctgcgggattaggtgctctagttctatttgcggcatacacagaagatatcaaacatttttcaaaagaagttggatcaaaattagagggaatagttgtaacttttgatttatcaaacccatatgttgttgttggtttattaattggtggaatgttaccttatttatttggatctatgggtatgcaagcctgttggaagagccaggtggtgctgttgtaat

SEQ ID NO: 267367 - DNA, 905 bp, Unknown
  Bacterial polypeptide expressing nucleotide sequence isolated from the Sargasso Sea
ggctgtgatcgcagacaacgtaggggataatgttggtgattgtgcaggaatggcggcagatttattcgaaacttatgccgtaacaatcgttgctacaatggttctttctaccatattttttccgactgattataatctaatggtttatcctttagctataggtggctcatgtattattacatcaataattggaacatggtttgtaaaattaggaaatagtaaaaatataatgggtgctctttacaaaggttttgttgttacagctataacatcattgttaatcttgtacccagtcacagactcaattctaggattagataaaatttataataataacgaaaaaagtttttcaggattaaacctatatatttgtggagtggttggatttgtaattacaggtttattgatttgggttactgaatattacactggcacaaactacagaccagttcaatctgttgctaaatcttctactactggccatggaactaatgttatacaagggcttgctgtttctatggaagctactgcaattcccgctttaattatagttataggaatattatatactaataatttagctggattatatggaattgctatagctgtcacagctatgttagctttaactggtatggttgtggctttagatgcgtacggaccagtaacagataatgctggaggaatagcagagatgtctaaacttcctaaaaatgttagaaaaacaactgatgctcttgatgcagtaggaaatactacaaaagctgtcactaaaggttatgcgattggttctgctggactaggtgctttagttttatttgctgcatatacagaggacatcaaatatttttctacggtgaaaaattccgctcttgagggtgtaaatgttacttttgatttatcta

SEQ ID NO: 267368 - DNA, 616 bp, Unknown
  Bacterial polypeptide expressing nucleotide sequence isolated from the Sargasso Sea
agcagctcttgcgttaatcagcgcgtacattgttaaggtaagtaatggaaatcctgattttgtactcgctattaatgacccaatcgtccttgtaggtatgtttattggcggtatttttcctttccttgtaagttccataacaatgaccgcggttggcgatgctgcctttgaaatgataattgaagtaagacgtcagtttaaggaaatacctgggttaatggaaggtaaggcgaagcctgacacagctcgctgcgtagacattgcgacgcgtgctgctttacgcaagatgattctacctgggtcgctagcagtgcttgcacctgttgttatcggctttggtcttgggccgaaagctttaggcggcatgcttggcggggcgctaatatgttgcgtaatgatggctcttatgatggcaaatgcaggtggtgcttgggataatgcaaagaaatatgttgaaaagggaaactatggtggcaaaggatctgatgtacataaagcagctgttgttggggatacggttggcgatccacttaaagatacatctggtccggctatgaacattcttatcaacgtaatggcaatagtaagcttggttatcgctcctttacttatttaa

SEQ ID NO: 267369 - DNA, 895 bp, Unknown
  Bacterial polypeptide expressing nucleotide sequence isolated from the Sargasso Sea
ggcggtatcgccgaaatgtccccggatgttccggaggaagtccgcgaccgcaccgacagactcgatgcgctcggtaacaccaccgccgccaccggtaagggtttcgccatcggctccgccgtcttgaccgccctctccttgatgaacgccttcgtcaaggatgttccgtacgaactcggcgccagctctcgtggcttggctcaagccatgttgctcaccgacgcctacgtgctctccggtgtcatcatcggcgccatgttgccgttcctcttcgccgccctcaccatgctttccgtgcgtaaggctgccggtgccatcatcgttgaagtccaacgccaattccgcgacatcccgggtctcctcgaaggcaaggaaggtgtcgtctgcgatcacatggcgtgcgtcaccatgtgcacgaaggcgtccatcgacgaaatgttgctcccgggtatcctcgccgtcatgaccccgatctccgtcggtttgctcatcggcgccaagtgcctcggtggtctcctcgccggttccatcgcgtctggtttcatgctcgccgtcatgatgtccaacgccggtggtgcttgggacaactccaagaagtacatcgaaaacgaaaaggtttacggtggcaagaagtctgaaacgcacaaagcgtgcgtcgtcggcgacactgtcggtgatcctttcaaggacacctctggcccggccttgaacattctcatcaagctcatgaccatcttctccttgaccatggccccggtcttccgctccgattggaagacgtactggtacggtctcattgtcctcggcgtcgaaatcatcatggtcggcgtcgcgtactggcacgtgtgggtcgtcaacggcgagaagtgcgtcccgccggaagaggaaaagtaaa

SEQ ID NO: 267370 - DNA, 567 bp, Unknown
  Bacterial polypeptide expressing nucleotide sequence isolated from the Sargasso Sea
catttgtattttctgcactttcaatgaatgcagtgggtaaggctgctatgagtatgatcgaagaagttagaagacaattcagagagttgcctaaacttaaagctgcattagaaattatgagaaagcataactcagatttatcaaaagcatctaaggcagatatgaaaatatttaatgatgcagacggtgttgctgaatatagtaaatgtgttgagatttctacaaaggctgcacttagagaaatggttcttcctggactaatggcaatatctgttccagtaataattggactatcaggtggagcagaaatgcttggaggacttcttgctggagtgacttcatctggagttcttatggctatatttcagtctaatgccggaggtgcgtgggataatgcaaaaaaaatgattgaagaagctggacaaaaaggaactgatgctcataaagcagctgtagttggagatactgttggtgatccatttaaagatacatctgggccttcactaaatattttattaaaattaatttctgtagtagctttagtaatagcaccacttttaatttgat

SEQ ID NO: 267371 - DNA, 302 bp, Unknown
  Bacterial polypeptide expressing nucleotide sequence isolated from the Sargasso Sea
tttatctattggtggacaagtagctgctctggctgcagttggagcaatgttgttaggagtaattatcactggtctttttgttgctgtatcaatgacagcaggtggtggcgcttgggataatgcaaaaaaatatattgaagatggtaatcacggtggaaaaggctctgaagctcataaagctgctgtcactggtgataccgttggtgatccctataaagacactgccggacccgcagttaatccaatgattaaaattacaaatattgttgctttgttgttgcttgctgtaattgctggataaa

SEQ ID NO: 267372 - DNA, 745 bp, Unknown
  Bacterial polypeptide expressing nucleotide sequence isolated from the Sargasso Sea
aggtgggatcgccgaaatggcagaaatggaagaatcggtccgtgctgttactgatcctctcgatgccgtcggaaacacgaccaaagccgtcaccaagggctacgccatcggttcagccggacttgcggcgctggtgctctttgcttgttatgtttatgaattcaagatcaaaggcgcgggagaaaccatcagcttcgaactgagtgatgtcaacgtcatcattggtctcttcatcggcggtttgctgccttacctcttcgcctcagtggcgatgaatgccgtgggtcgagcagggggtgcagtggtcgaagaagtgcgcaggcagttcaaagaaatccctgggatcatggaatacaaagcaacgcctgattaccggagcattgtcgatattgtcaccaagtttgccctcaaggaaatgatccttccggcgttgctcccggtggtggctccgatcgtggtcggattgcttcttggcaaagtcgccctgggcggcatgttgattggaagcatcgtcaccggactttttgttgcactttccatgacgaccggaggtgcagcctgggataatgcgaaaaaatacattgaagacggaaacctcggcggcaagggcagcgaagcccataaagccgcagtgaccggggatacggtgggtgatccctacaaggatacagccggaccggccgtcaacccgatgatcaagatcctcaacgtagttgccttgctgctggttcccttcctcatctga

SEQ ID NO: 267373 - DNA, 461 bp, Unknown
  Bacterial polypeptide expressing nucleotide sequence isolated from the Sargasso Sea
ggagccggtgaagtacgaagtggacaaggaaaccggcgcgatcttcgtcgaccgcatcctgtccaccccgatgcgctacccctgcaactacggctacgtgccgagcaccctgtgcggcgacggcgacccggccgacgtgctggtggtgctgccgctgccgctggtgccgggctcggtcgtgcgctgccgtccggtcggcgtgctgaagatgagcgatgaggcaggcagcgacgagaagatcctggccgtgccggtgtcgaagatcttcagtggctacgcccacgttgaagacatcgcgcaggtctcgagccactggctggagcgcatcggccacttcttcgagcactacaaggacctggagaagggcaagtgggtcaagctcgatggctggggcggcgccgccgaggccaagcagatcctgatcgaggcgcaccagcgccatctcgacagcaaggcctgag

SEQ ID NO: 267374 - DNA, 781 bp, Unknown
  Bacterial polypeptide expressing nucleotide sequence isolated from the Sargasso Sea
aatggccttattttattgtggtctactaggtctaattataacaggtttgattatttgggtaacagaatattatacggggactaattatagacctgtgcaaagtattgcccagtcttcaactactggtcatggaacaaatgttattcaaggattagctataagtttagaggcgactgcattaccagcaataatcattgttgctggaattataattactcattctttagccggtctttttggtattgctatagctgtaactacaatgttagctttagctgggatggttgttgctcttgatgcttacggtcctgttacagataatgcaggaggaattgctgaaatgtctgagttagatgataatgttagaaaaactactgacgctctagactctgttggaaatacaactaaagcagttacaaaaggttatgcaattggttcagcaggtttaggggctttggtactttttgctgcctatactgaagatttagagcattttgcaaaagattcttctagttctttatatgggattgatgtttcatttgatttatcaaacccttatgtagttgttggtctattacttggaggtttactccctttcttatttggcgcaatgagtatgactgctgttggaagagcggcgggatcagttgttattgaagttagaagacaatttaaagaaattcctggaataatggaaggtactggcaaacctgaatacggcaaatgtgtagatattctaacaaagtctgcaattagagaaatgatattccatcgttactgc

SEQ ID NO: 267375 - DNA, 890 bp, Unknown
  Bacterial polypeptide expressing nucleotide sequence isolated from the Sargasso Sea
aggtgctgatgttggtgctgatttagttggaaaagtagaggcaggtattccagaggatgatcctagaaatccagctgttattgcagacaatgtaggtgataatgtaggagattgcgcaggtatggcggcagatttatttgaaacatatgctgtaactattgttgcaactatggttctttcatcaatattctttgtgtcagatttaaatatgatggtttacccattaagtattggtgcagcttgtattttaacatctatagtggggactttttttgtaaaacttggacaatcaaaaaatataatgaatgcattatataaaggttttgttgctacagcgattttgtctttaattattttatatcccataacagactacgttattggattaaacaccaactattctgtaaatggagtttcttttaatggtatgagcttatattattgtggtgttataggtttaattataactggattgttaatttggataactgaatattacactgggacagattataggcctgttaaaagtgttgcagagtcgtcaaccacagggcatggtactaatgtaattcaaggtttagcaatatctatggaagcgacagcaattccagcgataataattgttgcaggtatattattgactaattctatcgcaggtttatttggtatagcaattgctgttacaactatgcttgccctagctggtatggtagttgctttagatgcttacggtcctgtaacagataatgcaggtggtattgcagaaatgtcaaatcttcctaaaaatgttagaaaaactacggatgctttagatgcggttggaaatacaactaaagctgtcacaaaaggatatgcaataggatcagcgggattaggcgcattagtccttt

SEQ ID NO: 267376 - DNA, 427 bp, Unknown
  Bacterial polypeptide expressing nucleotide sequence isolated from the Sargasso Sea
aatgaaaagaaaacaaaagcctgattatgctaaattagttgatctactaactgtagcagcaataaaagaaatgattataccttcattgttaccagtcttgtcaccaattattttatatttgataatatttgctattggaggacaagtggctgccctagcatctgttggtgcaatgttattaggtgttatcattacaggtctatttgttgcagtttcgatgacagcaggtggaggagcctgggacaatgccaaaaaatatatcgaagatggaaatcatggaggaaagggatctgaagctcataaagctgcggtcacaggggatacggttggagatccatataaagatactgctggaccagcagtaaacccaatgattaaaataactaatattgttgctttgcttttattagcagttatcgctggctaa

SEQ ID NO: 267377 - DNA, 652 bp, Unknown
  Bacterial polypeptide expressing nucleotide sequence isolated from the Sargasso Sea
atggaagcttcagcatcaaatatacttcaacttattattttatcaggtttattatcaatcgtttatggtttttttacagggaaaaatattttaagttctagcgcaggcaatagtaagatgcaggaaatagcttctgcaatacaagtaggggcaaaagcttatttgaataggcaatataaaacaattgcaatagtaggtgttgttgtactagtaataattagtttttcatttagtattttagtagggctgggttacttaattggtgcaacattatctggaattgccggatatgttgggatgcttgtatcggttcaagcaaatgttagaactgcagaggcatctagaaaaggtttatctcagggactttcaattgcatttaaatctggcgctgtaacgggcatgttagtagctggcttagcacttttatcaatagcagtttattattacttattattatcttacggtgttgatgaaagagaaattgtaaatgccttggtcgcattaggatttggtgcatcactaatctcaatttttgcaagacttgggggtggcatttttacaaaaggtgcagatgttggtgcagatttagttggaaaagtagaggccggtattccagaagatgacccaagaaatccagcagttatagcagata

SEQ ID NO: 267378 - DNA, 832 bp, Unknown
  Bacterial polypeptide expressing nucleotide sequence isolated from the Sargasso Sea
ttgttaaaacttggtaagagtaagaacgtgatgggagcattatacaaaggattcattgtatctgctattacttctttagtaatattatatccagttacagattttgttttaggattagacaatgaatatgatttaagtggtaaatcattttctggaatgaatttatactattgtggtgtaataggtttaattataactgggttattgatttgggttacagaatattatactggaactaattatagacctgttagaagtgttgcaagttcttcaactactggtcatggtactaatgtaattcaaggtttagctatttctttagaggctactgcaataccagctttaattattgttgcaggtatattgttaacgaatcatatagcaggactttatggtattgctatagctgtaactacaatgttagctcttgctggtatggttgttgctttagatgcatatggaccagtgacagataatgccggtggtattgctgaaatgtccaaacttcctaacaatgtaagaaaaaccactgatgcactagatgccgtaggaaatacaacaaaagctgtaacaaaaggttatgctattggttctgctggattaggagccttagttcttttcgcggcttacaccgaagatataaaacatttttcaaaagaagcaggttctaaattagaaggtattgttgttacatttgatttatccaatccatatgttgttgtgggactattaataggtgggatgcttccttacttgtttgggtctatgggaatgcaagcagttggtagagacaggtggtgctgttgttatagaagtaagaagacaatttaaa

SEQ ID NO: 267379 - DNA, 520 bp, Unknown
  Bacterial polypeptide expressing nucleotide sequence isolated from the Sargasso Sea
gaagtaagaaggcagtttagagatattccggaattaaaaaaagcattagaattaatgaatttaaaaaatgaaagtgaatggagcgatactgataaagcaacatacgaagaagctttatcaaaagcagaacatggacgttgtgtagaaatttcaacacaatctgcaattaaagagatgattctaccaggcttacttgctgtttcctctcctgtcttagttggttttgtcttcggtcctgaaactttaggcggcttattagcaggtgtaacagtttccggtgttttgatggcaatttttcagtctaattctggtggtgcttgggataatgcaaaaaaaatgattgaagagggagtgacctttgatggagtgcagataggaaaaggatcagaagctcataaagcatcagtggtcggagatacagttggtgatccatttaaagatacctcagggccttcattaaatattttaattaaattgatgtcagtggtctcattggtcattgcacctcttattgcataaa

SEQ ID NO: 267380 - DNA, 919 bp, Unknown
  Bacterial polypeptide expressing nucleotide sequence isolated from the Sargasso Sea
aataaaaaaatgcaagagattgcatctgctattcaaattggtgctaaagcatatttggcaagacaatataaaacaatagcaattgttggcgttgttgttttggtaattgttagtatagcttttagtcccttagttggtgtaggatatttaattggtgctgctttatcaggtatagcaggttatgttggaatgttagtatctgttgaagctaatgtaagaacagcagaggcttccagaaaaggtttagctcaaggcctttccgttgcttttaaatcaggagccgtgactggtatgttagttgctggtttagcattattgtcaatagctgtttattactatctcttattaaaattaaatgttgatgaaagagaaatcgttaatgctcttgttgcattaggttttggtgcttcattaatttcaatttttgctaggttaggtggcggaatttttacaaagggagctgatgtaggtgctgatttagtaggaaaagtagaagcaggtatcccagaagatgacccaagaaatccagccgtcatagctgacaacgtgggtgataacgtaggtgattgtgcaggtatggcagcagatttatttgaaacatatgcagtaactattgttgctacaatggttttatcatcaatcttctttgtgggtgatttaaatatgatgatttatccattaagtattggtgctgcatgtttgctaacttcaatacttggtactttttttgttaaattaggtaacactaaaaatgttatgaatgcattgtataaaggttttgtagtatctgcggtagcgtcattggtaattttatggcctgtgacagaccatgtaataggttttgcaaatgaatatacagttaatggcaaaagttttaatggtatgaacctttactattgcggtgtaattggtttattaa

SEQ ID NO: 267381 - DNA, 313 bp, Unknown
  Bacterial polypeptide expressing nucleotide sequence isolated from the Sargasso Sea
atatttcattatatttgctatcggtggtcaagttgctgctttagcatctgtaggtgcgatgcttttaggagtaatcattaccgggttatttgttgctatttcaatgacagctggtggtggagcatgggataatgcaaaaaaatatattgaagatggaaattttggaggcaaaggatcagaggcacataaagcggccgtaaccggtgatacagttggagatccctataaagataccgctggtccagcagtaaatcctatgatcaaaattaccaatatagttgcattacttttgcttgcagtattagcgggttaa

SEQ ID NO: 267382 - DNA, 219 bp, Unknown
  Bacterial polypeptide expressing nucleotide sequence isolated from the Sargasso Sea
caatctcaatgacagcaggtgggggggcatgggataatgctaaaaaatttattgaagatggtaattatggtggaaaaggttcagagtcacataaagcagctgtaactggagacaccgtaggagatccttataaagatacggctggtccagcagtgaatccaatgattaaaattacaaatattgttgctttacttttgttagcagttattgcgcactaga

SEQ ID NO: 267383 - DNA, 574 bp, Unknown
  Bacterial polypeptide expressing nucleotide sequence isolated from the Sargasso Sea
ttatcaaatccatttgtggtagttggtttactggttggcggcatgttaccttacttatttggttctatgggcatgcaagctgtaggaagagcgggaggcgccgtagttattgaagtaagaagacagttcaaaaaaattccaggaattatgaaaagaaaatccaaacctgactatggcaagcttgtagatttgttaactaaagctgctataaaagaaatggtaataccatctttattaccagtattgtctccaatagttctttatttgtttatacttccaataggaggacaagttgctgcactatcatcagtgggagcgatgttattaggcgttattataacaggtttattcgttgctatttctatgacagcaggtggtggagcatgggataatgcaaaaaaatatattgaggatggtaactttggtggcaaaggctccgatgcacataaagctgcggtaaccggagatacagttggtgatccttataaagatactgcaggacctgctgtaaatccaatgataaagattaccaatattgttgcattactactgttagccgtaatagcaggatagt

SEQ ID NO: 267384 - DNA, 667 bp, Unknown
  Bacterial polypeptide expressing nucleotide sequence isolated from the Sargasso Sea
gctttagttttgtttgctgcctatactgaagatattaaacatttttcaaaagaagcaggatctgctttagaaggtatagttgttacttttgatttatcaaatccttatgtagttgttggtcttttaattggtggaatgctaccatatctttttggatctatgggtatgcaagcggttgggcgagctggtggtgcagttgttgttgaggttagaagacagtttaaaaaatatcctggtataatgaaaagaaaacaaaaacctgattatgcaaagctagtagatttacttactgttgctgcaattaaagagatgattgtaccttcgttattaccagttctttcacccgttgttctttattttgtaattttatcaattggaggacaagtggctgctttagctgcagtaggagctatgttacttggtgtaattataacaggtttgtttgtagcagtgtcaatgactgctggtggcggagcttgggataatgcgaaaaaatttattgaagatggaaatcatggcggaaaaggatcagaagctcataaagcagctgtaacaggagatacagttggtgatccttataaagatacagcaggacctgcagtaaacccaatgattaaaataactaacatagtggctctattactattagcagttatcgctgcttaat

SEQ ID NO: 267385 - DNA, 745 bp, Unknown
  Bacterial polypeptide expressing nucleotide sequence isolated from the Sargasso Sea
aatgacaatcatgcaaatatttatattattatgtggcattgcagcagttttatatggtgtaatcacttcaagacaaattttggctttaagtcctggcaatgaaaaaatgcaagaaatagctttggcaattcaagaaggggctaaagcttatttaaatcgtcaatatttaactatttcaatcgtgggtatatttatattttttttaatttggataatttttgatttatattctgctattggatttttaattggggcttttttttctggtgcagctggatatgtaggtatgaatatttcagttagatcaaatgttagaacaactcaggcagcaaattcatctttagctgatggtttgtcagtatcttttaaagcaggggcagttacaggaatgttagtagcaggttttgctttactatcggtagctgcctattattttattttagataattcaggaaacttccaaggaagattaattgttgcaccgctagtatctctaggtttcggagcttctttaatatctatctttgcaagacttggaggagggatttttacaaaaggggcagacgttggagctgatttagttggtaaagttgaagcaggaatcccagaagacgatccaagaaacccagctgttattgctgataatgttggagataatgttggtgattgtgcaggaatggcagctgatttgtttgaaacatatgttgtaacagttgtagctacaatggttcttgcatcaattttt

SEQ ID NO: 267386 - DNA, 875 bp, Unknown
  Bacterial polypeptide expressing nucleotide sequence isolated from the Sargasso Sea
tgctttccgtggtggcgctgtaatgggtttctctgtagctggtcttgctctcggcggtttagcactcgtatacattctttttgttttagtagcagaagttgatgatgcttttgaagtagtcactgcctatgggcttggcgcttcatcgatcgctctcttttcacgtgtaggcggaggcatttacacaaaagctgcggatgtcggagctgacttggtcggaaaagtcgaagcaggaattcccgaagatgacccaagaaatcctgcaactattgcggataatgttggagacaacgtcggagacgtagctggaatgggagccgacctattcgaaagttacgcaggttcgattattgcccctatatcgttagtcgcttttgctctcggactgaccgcaggggacgcatcagtgtcaacaaatatttctcttctattattccccctagcgatagcttttgcgggaatgcttacatccatactcggttcttttctagttcgaggtggcgaatccacggatagtcgagctttaagccgtgctctgcatcttggaacaaacgttgcgatgggcttaacagtattagcgaccgttggtatcgcttactggatgttcggtgataatgcggatttcgataacccaattggccttgccatttcagtagtcggtggtttgctcgtcggctgggctttaggtaagacagcagaattttatacttctgatcactattcaccggttaaaaaaattgccgatcagtcaaaaactggccctgcaacaacgattctcggagggatttccgctggaatgatttcagtggcagcttccgtagctttgctaggcgtgggtatcgctgttgcttactggggtggtgaaatggctttcg

SEQ ID NO: 267387 - DNA, 742 bp, Unknown
  Bacterial polypeptide expressing nucleotide sequence isolated from the Sargasso Sea
gatgaaagagaaatagtcaatgctcttgtagctttaggttttggagcttctttaatttcaatttttgctagattaggagggggaatatttaccaaaggtgctgacgtaggagcagatttagttggaaaagttgaagctggaattccagaagatgatcctagaaatcctgcagtgattgcagataatgtaggcgataacgttggtgattgcgcaggcatggccgcagacctatttgaaacttatgcggttactattgttgctacaatggttctttcttctatattttttcatggtgatatgaatatgatggtttacccattaacaattggaggagcgtgtataattacatctattattggtacattttttgtgaaactgggaaaatcaaaaaatgtaatgaatgcactttataaaggctttatagcaactgcagttatttcattagtaattttatatccagtaacagattatgttattggttttgataaatcttatagcgttggggaaaagtcatttaacggtatgagtttatattattgtggaatcataggtttaattattactggattattaatttgggtcactgaatattatactggaacaggttataggcctgttaaaagtgttgcggcttcatctacaactggacatggaactaatgtaatacacaggtttggctgtatctatggaggcaacggcaataccagctttaataatagtggcagggatattattaactaat

SEQ ID NO: 267388 - DNA, 751 bp, Unknown
  Bacterial polypeptide expressing nucleotide sequence isolated from the Sargasso Sea
gcagaatatcgaatgctcgcgattttcatcgttgtagtcgctgcgctattattcgttggcggtgaggataatggccttggtatggaaaccatggtcgctttcatcatcggtgctctttgtagcgtagcagctggatttagtggaatgcaatccgctactagtgctaatggtcgcacagcgcaagcagcggcaaacggtggccaagctgcggctctcacaacatcgtataatggtggagcggtaatgggacttgcagtaggcggactcggtctattcggaatctccctgatgtattacatgacagaccccgttggcggagacggattcctttctgttgagaacgtcgctggattcggaatgggtgcttcttccatcgcactattcgctcgtgttggtggaggaatttacacaaaggctgcggatgtaggagctgatcttgttggtaaggtagaagccggtatccctgaggatgacccacgcaaccctggtgtaatcgctgacaacgttggagacaatgttggtgacgttgctggaatgggtgctgatatttttgagtcgttcgtaggttcaatcattgctgctatggtcatcgctcaagccagtgaagaattaggagcagattacctcatgattccaatcgctctggctgttgtaggatatatttcatccattattggggttttctcaattgctggaatgaaaaacatgcatcctggtgctgcactacgtaacaccacattcatggggctgc

SEQ ID NO: 267389 - DNA, 906 bp, Unknown
  Bacterial polypeptide expressing nucleotide sequence isolated from the Sargasso Sea
gatgttggagctgatcttgttggtaaagttgaggcaggtattcctagaggatcaccctctaaaccctgcaacaattgctgataatgttggagacaacgttggagatgtagcaggaatgggagctgatctttttgagtcatttgttgggtcaataattggtgcaatggttcttggagctgcttttctaaacctttcagaatttcaaggcaatgaaataaatgctgtaatcttgcctcttttcatcgctggagctggaataattatgtcaataattggaaccttttttgttagggttaaagaaggaggagatcctcatactgcattaaatattggtgaatttagctcagcaattttaatgataataataacttatttactaatccattttttattacctgaaacatgggagtataatgattttatctactcggcaaatggtgttttttatgcaacaatttcaggattaattgttggattgggagttgggaaaataacagaatactatactgctactggaaagaatccagttatgtcaattgtcagacaatctgaaacaggaccagctacaacaattatttcaggtctaggagttgggatgatttctactgcagttccaataattcttatttgcattgcgattataacttcatattcttttgcaggtttatatggaatagcaattgctgcagttggaatgcttgccaatactgggattcagcttgcagttgatgcatatggcccaatttcagataatgctgggggtattgctgaaatggctgaactccccgcagaagttagagaaagaactgataaattagatgctgtgggaaataccactgcagcaattggtaaaggatttgcaattgcttcagctgctcttactgccttagcactatttgctgcgtt

SEQ ID NO: 267390 - DNA, 874 bp, Unknown
  Bacterial polypeptide expressing nucleotide sequence isolated from the Sargasso Sea
attgctttaggaatatttagagtcgttcttagttattcagaaggaagtcctgaagtaaagaaaatcggtgacatgattcattcaggcgcaatgagttttatgaaaactgagtatacgtatttggttgttttcgtccttgttttagctgttttagttttctttgccttaggctgggaaacagcaactgcagttttagttggcgcttcaagctcagcattagctggatttattgggatgtatgctgctactaaagctaataccagaacagctgcggcagcccaagaaaatggagcagcttcagctttatcaatttctttttatggtggatcaataatgggtctttgtgttgcttctctgggacttctcggcttaggaggattgttttattttctaggagaaggtcactacctcgaaggatttggaatgggggcttcagttgtagcactattctcaagggtcggcggaggtatttttactaaaagtgctgacgttggagcagaccttgttggaaaagttgaagcaggaataccagaagatgatccgcgaaatccgggtgtaattgctgataatgttggggataatgttggcgatgttgcaggaatgggctcagacatttttgagtcatattgtggttcaatgattgcaaccatagcaattgcttatactatgacagaagcaaataatggaccattaatgagtctacccctcgcattagcatctattggtttaatatcatcaattttaggtatcttaattgttagagctcaatctgcaaaagcacctgctgcggcattgagaactggaacaataggctccccagttatttttatagccttagcttttgggttaatttcatactggatatctcactaaa

SEQ ID NO: 267391 - DNA, 778 bp, Unknown
  Bacterial polypeptide expressing nucleotide sequence isolated from the Sargasso Sea
aatgtcaaatctaccaaagagtgttagaaaaactactgatgcattggatgctgtaggaaatactactaaagcagttaccaaaggttatgcaattggttctgctggacttggtgctttagttttatttgcggcttatactgaagatataaaattcttttctaatattagtggatctgctttagaaaatgttacagttaactttgatctttctaatccttttgtcgtggtaggtttattaattggaggaatgttaccttatctttttggttcaatgtcaatgcaagctgttggtagggcaggtggggcagtggtgattgaagttagaagacaatttaaaaaaatacccggaataatgaaacgtaaaagaaaacctgattacggaaagcttgttgatctattaactaaagcggcaattagagagatgataataccatcacttttaccagtattatcacccataatattatattttataatttcattgataggaggaactgaggctgctctttcatcagttggtgctatgcttttaggagttattataactggattgtttgttgctatatcaatgacagccggcgggggcgcttgggataatgcaaaaaaatatatcgaagatggtaaatttggaggtaaaggctcagaagcacataaagcagctgttacaggtgatactgtaggtgatccatacaaggatacagctggaccagcagtaaatccaatgattaaaattactaatatagtagctttattactattagctgttatagctcactaa

SEQ ID NO: 267392 - DNA, 877 bp, Unknown
  Bacterial polypeptide expressing nucleotide sequence isolated from the Sargasso Sea
agaggatgaccctagaaaccctgctgttatagcagataatgttggtgataatgtaggtgattgtgcaggaatggcagctgatttattcgaaacatatgcagtaacaatagttgctacaatggttttatcttcaatattttttcacggagatcttaatatgatgatttatcccttatcaattggtggtgcttgtatattaacttcaattattggaacctttttcgtcaaattaggaaaatctaaaaatattatgactgcattgtataaaggttttgttgttactgctgttacatcgttagttattttatatccaattacagattatgttttagggttagaaaatacatatacaatttcagacaaaacattcaccggaatgagtttgtacatatgtggagtaataggattaataataactggtttattaatatgggtcactgaatattatactggaactaattatagacctgttaaaagtgttgcttcttcatcaacaacaggtcatggtactaatgtaattcaaggattagcagtttcaatggaagctacagctattccagctttaattattgttggtggaatactaatgactaattatattgctggcctttttggtatagcaatagcagtaacgacaatgttagcattagctggcatggtagttgctttagatgcttatggacctgtaacagataatgctggtggaattgcagaaatgtctaatttacctaaaaatgttagaaaaaccactgatgctttagatgctgtaggaaatacaaccaaagctgttacaaaaggatacgcaataggatcggctggtttgggagccttagtattgttcgctgcttatactgaggatatcaaacatttttcaaaa

SEQ ID NO: 267393 - DNA, 628 bp, Unknown
  Bacterial polypeptide expressing nucleotide sequence isolated from the Sargasso Sea
agcagtaacaaaaggttatgcaataggatctgctggtcttggtgcattagttctttttgcagcatacacagaagatattaaacatttttcaaaagttgcaggatcaaatttagaaggtatagctgttacatttgatttgtctaatccttatgtagttgttggtttgcttataggcggaatgcttccttatttatttggatcaatgggtatgcaagctgttggtagagcaggtggtgaagtggttattgaggtacgaagacagtttaaaaaaatacctggaataatgaaaagaaaagcaaagcctgattatggtaaacttgttgatttacttacaaaagcagcgattaaagaaatgataattccttctttattgccaattttatcacctatagttttatacatagtaatatatttcattggtggacaagttgcagcattatcatcccttggagcaatgttattaggggttataattacaggtttgtttgttgctgtttcaatgactgctgggggaggagcttgggataatgcaaagaaatatattgaagatggtaaatttggtggcaaaggttcagaagctcacaaagcagctgtaactggagatactgttggtgatccttataaggat

SEQ ID NO: 267394 - DNA, 829 bp, Unknown
  Bacterial polypeptide expressing nucleotide sequence isolated from the Sargasso Sea
gctcttgatgcatatggacccgtaacagataatgctggtggtattgcagaaatgtctaatttaccaaaaaatgttagaaaaactactgatgcattagatgctgtaggtaatacaactaaagcagttacaaaaggatatgcgataggttcagctggtttaggtgcgctagttttatttgccgcatatacagaagacattaaacatttttccaaagttgctggatcaaaattagaaggaattgtggttacgtttgatttgtcaaatcctttcgttgtagttgggttgttagtaggtggtatgcttccatatttatttggttcaatgggtatgcaagcagttggtagggcaggaggtgctgtggtagttgaagtgagaagacaatttaaaaaaattccaggaattatgaaaagaaagtccaaacctgattatggaagattagtagatttacttactaaagctgctattaaagaaatgattattccatcattattacctgttttatcaccaattgttttatatttatttattttaccaatcggcggacaagtggctgcattgtcttcagttggagcaatgttgttaggtgttataataactggtttgtttgttgccatatctatgactgcaggtggaggtgcatgggataatgcaaaaaaatatattgaagatggaaactatggtggaaaaggttctgaagcccataaagctgcagtaactggtgatactgtaggtgatccatataaagatacagctggtccagcagtaaatccaatgatcaaaattactaatatcgttgctttattactgttagcagtaatagctagttaat

SEQ ID NO: 267395 - DNA, 763 bp, Unknown
  Bacterial polypeptide expressing nucleotide sequence isolated from the Sargasso Sea
attggaaaatttacatttaatagtatttgttggagttctggcagttgtttacagttattttttaagcaagcaaattatttcatctagtcccggcaataataagatgcaagaaattgcagaagccattcaaataggtgcaaaagcatatttaaatagacagtataaaactatagcaattgttggagtaatagttttggtaattataagttatttttttagtttattagttggtcttggttattttataggagctttactatcaggtgtagctggttatgtcggaatgttaatttctgttcaggcaaatgtcagaacggctgaagcttcaagaacaagtttacaaaatggtttaacaatggcttttaaatctggcgctataacaggactcttggttgctggtttagctctattagcaatttcaatttattattgggtattgttagcttttaatattgagagtagagaactgataaatgcgctaatagctctaggttttggagcctctttaatatctatttttgctagattaggcggtggaatttttactaaaggtgctgatgtgggagcagatttagttggcaaagttgaagctggaataccagaagatgatccaagaaatccagcggttatagctgataatgttggcgataatgttggtgattgcgctggtatggcagcagatctatttgaaacatatgccgtaacaatagttgcaaccatggttctagcctcaatattttttcaagataatgcaagcatgatg

SEQ ID NO: 267396 - DNA, 859 bp, Unknown
  Bacterial polypeptide expressing nucleotide sequence isolated from the Sargasso Sea
gcatctgcaattcagattgggagctaaagcttatttaaatagacaatataaaacaatagcaatagttggggtagttgttttagttattattagtttttcttttagcatcttggttggtttaggatatttaattggagcagcattatcaggtatagcaggatatgttggaatgttagtttctgtccaagcaaatgtacgtacagcagaagcttctagaaaaggtttatctgaaggtctttcaatagctttcaaatctggagctgttacaggtatgctagttgctggtttagcgcttttatcaattgctgtatattattatttattattatcttttgaagttaatgaaagagaaattgtaaatgctttagttgccttaggttttggggcttcattgatttctatttttgcaaggcttggtggaggaatttttaccaaaggagctgatgttggagcagatttagtaggaaaagttgaggctggtattcccgaagacgatcctaggaatccagctgtaatagctgacaacgtaggtgacaacgtaggagattgcgcaggaatggctgctgatttatttgaaacttacgcagtaacaattgttgctactatggttttatcatcaatattttttcatggagatcttaatatgatgatttatcctttatctataggtggagcatgtattttaacttcaattattggaactttctttgtcaaactaggaagatctaaaaatattatggctgctttgtacaaaggttttattgttacagcggtttcatctttggtaattctgtatcctattactgattatgttttaggtttagaaaataactattcaatttacaataaaactttttca

SEQ ID NO: 267397 - DNA, 859 bp, Unknown
  Bacterial polypeptide expressing nucleotide sequence isolated from the Sargasso Sea
aggatatgtcggtatgctcgtatcagttcaagcaaatgttagaactgcagaagcttcaagaaaaggattatcacaaggactttcaattgcatttaaatctggtgcggtcacaggaatgttggttgctggcttagccctattagcaattgctgtttattattattttttattatcttatggcgttgaagaaagagagattgtaaatgctttagtagcattgggttttggtgcttcgttaatttcgatctttgcaaggctaggaggtggaatcttcactaaaggtgctgatgttggagcagatttagttggcaaagttgaagccggaatacctgaggatgatcctagaaatcctgctgttattgcagataatgtaggtgataacgtaggagattgtgccggtatggcagcagatttatttgaaacttatgcggtaacaatagttgctacaatggtcttatcttcaatattttttcatggagatcttaacatgatggtttatcctttatcaataggaggtgcttgtattttaacatctattattggaacttactttgtcaaattgggtaaatctaaaaacattatggcagctttatataaaggatttattgtaacagctttaacatcattaattattttatatccaattacaaactatgttttaggtttggaaaatacgtattcaatttataataaatcgtttacaggaatgagtttatatatttgtggtgtaataggtttagttataactggtttattaatatgggtaactgaatattatactggaactaattatagaccagtaaagagtgttgcctcatcatctacaacaggtcatggtacaaatgtaattcagggctta

SEQ ID NO: 267398 - DNA, 859 bp, Unknown
  Bacterial polypeptide expressing nucleotide sequence isolated from the Sargasso Sea
aatgtattatattatagcggctggggttttatccatcgtttatggttttataacaggcagaaatattttaaattcaagctcgggtaatgcaaaaatgctagagattgcttctgcaatacaagagggtgcaagagcatatttaaatagacaatataaaactattgcaatggttggtatagtagtcttagtaattattacttttttatttagtcctttagttggtttaggttatctaattggtgctactttatccggaattgcaggttatgttggaatgcttgtttctgttcaagccaatgtaagaacagctgaggcatcaagaaaaagtttatcaagtggtttatctatagcatttaaatctggagctgtaacaggcatgttagttgctggattagcgttgttatcaattgctgtgtattattactttttggtaaaagctggtgtcgatgaaagagaaatagttaatgcgcttgttgcattaggatttggtgcatcattaatttctatatttgcaagacttggtggtggtatttttacaaaaggagctgatgtaggtgctgatttagtaggtaaagttgaagctggcataccagaagatgatccaagaaatcctgcagttattgcagataacgttggtgacaatgttggagattgtgctggaatggcagctgatctttttgaaacttatgctgtaacaattgttgctacaatggttctttcatctattttctttgtaaatgacttaaatatgatgatttatcctttagcgataggtggagcttgcattctaacttctattcttggaacattttttgtaactcttggaagtgataaaaatataatgaaagctatggtataa

SEQ ID NO: 267399 - DNA, 745 bp, Unknown
  Bacterial polypeptide expressing nucleotide sequence isolated from the Sargasso Sea
aatgacaatcatgcaaacatttataatattatgtggtcttgctgcagttttatatggctttatcacatcaagacaaattttatcattaaattcaggaaatgaaaaaatgcaagaaattgcaaaagctatacaggaaggtgcaaaagcatatttaaatagacaatatttaactatagctattgttggtatagttattttcttcttaatttggattatatttgacttattctcagctattggatttttaattggtgcatttttttctggagctgcaggctatgttggcatgaacatttctgtgagatcaaatgttagaactactcaagccgcaagttcttctttagctgaaggattatctgtttcttttaaagctggagctgtaacaggaatgttagtagctggttttgcccttatatcagttgctgcttattattttattttagacaattcaggaaattttgaaggaagagatatagttgctcctcttgtatctttaggatttggagcctcattaatatctatttttgcaagacttggtggtggaatatttacaaaaggagcagatgtaggcgcagatttagtaggaaaagttgaagctggtattcctgaagacgatccaagaaatcctgcagttattgcagacaatgttggagacaatgttggtgattgtgctggtatggccgcagacttatttgaaacatatgttgtaactgttgtagcaactatggttcttgcttcaatattt

SEQ ID NO: 267400 - DNA, 742 bp, Unknown
  Bacterial polypeptide expressing nucleotide sequence isolated from the Sargasso Sea
gtgatttgtatccttttgtatttattttttcgagatttgtgggttgtaggtggatttttgattggcgcaatcctatcaggcgccgcaggttatataggcatgataatttcagttcgcgccaatgtgagaacagctcaagcagcaagtgaaagtttaggcaaagggctcaatattgcttttaaagctggagccgtaaccggaatgttagtagctggactagctttgttatcaatttcagtttattttttaactttagaaaatttttcagtatcagaagaaacgttgaagcatgcgctagttgctcttggatttggggcttcattaatatcaatttttgcaagacttggcggtggtatttttacaaaaggcgcagatgttggagcagatttagtgggaaaagttgaggccggtattccagaagatgatcctcgtaaccccgctgttattgcggacaatgtgggagacaatgttggagactgtgcaggaatggcagctgatctttttgaaacctatgcagttacaattgttgcaacaatggtactcgccacaatattttttgatggagaaattgctaataaaatgactctgtatccaatggcgataggaggaagttgtctagttgcctcaattattggaacattttttgttagactaggaagctctcagagtataatgggagctttgtataaaggatttatagcttctgcaataatatcactaatatttatttatcccgtcacgc

SEQ ID NO: 267401 - DNA, 931 bp, Unknown
  Bacterial polypeptide expressing nucleotide sequence isolated from the Sargasso Sea
ggttgaagctggaattccagaagatgacccaagaaatccagcagttatagcagacaacgtaggtgataatgttggggattgtgctggaatggctgcagacctatttgaaacttatgctgtgactatcgtagctactatgttgttagcaacaattagttttactggttcagacattgttaaaggtatggaatatcctctaataatcggaggcgtctgtattttagcttctatcattggtacgttttttgtaaaactagggtctaataataacattatgagcgccctgtatagaggattaattatcaccgctatagtgtctgctgtcttgatattttttgtttctaaatcaatttttgtagatgattatctttcttattttttatgtgctgttgtaggcttaattgttactgccttaatagtatggattacagagtattatacttcgactgaatatagacctgtaaggtcaattgctcaatcatcagaaacaggtcatggtacaaatgttatccaaggtcttgcaatttctttagaagctacagcaataccagcaattattatagctataggaattttagtatcatttcatctaaatggaatttatggaatagctgtttctgcaacaaccatgcttgctttggctggtatgatagtggcattagacgcttatggacctgtaacagataatgccggcggaattgcggagatgtgtgatttagacgatgatgtaagaaaaacaactgatgcacttgatgcagttggtaacacaaccaaagcagtaactaaaggttatgctattggttcggcagggttggcggcattagtcttattttctgcgtatacttacgacttgaagtattactttcctaatctcgacataagtttttctttatctgacccaaaacgtagttgtgggtctcttaatcggagg

SEQ ID NO: 267402 - DNA, 155 bp, Unknown
  Bacterial polypeptide expressing nucleotide sequence isolated from the Sargasso Sea
tcatggaggaaaaggtagtgaggcacataaagctgcagtgaccggagatactgtaggtgacccctataaagatacagctggtccagctgtaaacccgatgattaagattacaaatattgtagccttacttcttttagccgcaatagctcattaaa

SEQ ID NO: 267403 - DNA, 922 bp, Unknown
  Bacterial polypeptide expressing nucleotide sequence isolated from the Sargasso Sea
gatagctgacaatgtaggagataatgtaggtgactgcgctggaatggcagcagatcttttcgaaacttatgctgtaacaatagttgcaacaatggttttagcttcaattttttttattaacgaaataaaaatgatgatatatcctttagcaattggtggttcatgtatactcacatcaatagttggaactttttttgttagacttggaaaaagtaaaaatataatgggagctttgtataaaggatttattgcaactgctattctttcggttgttgttttatatccagttactgacaaaattatcggactagaaaatgtttattcttcaaccaatgcagtttttaatggttttggtttatacttatgtggagtaattggtctagtaataacaggtttaataatttgggtaactgaatattatacaggaacaaaatttagaccagtcattagtgtagcaaaatcatcagtaacaggacatggcacaaatgtaatacaaggcttagctgtttcattagaggctactgctctaccagcattaattattgttgcaggtattttatttacaaatcatatagctggtttgtttggtatagcaatcgctgtaacaacaatgcttgccttggctggaatggtagttgctttagatgcgtatggacctgtaactgataatgcaggtggtattgctgaaatgtctaatctacctaaaaatgttagaaaaactacagatgccttagatgcagtcggcaacacaacaaaagctgttacgaaaggttatgcaataggttcagcggggttaggtgctctggtactttttgcggcatatacagaagatatcaaatttttttcaaaagtacctggatcttcattagaaaatattacagttagttttgatttatcaaatccttttgtagttgttggttta

SEQ ID NO: 267404 - DNA, 909 bp, Unknown
  Bacterial polypeptide expressing nucleotide sequence isolated from the Sargasso Sea
gtaggtgataacgtaggtgattgtgcaggtatggcagcagacttatttgaaacatatgcagtaactattgttgctacaatggttttatcatcaatcttctttgtgggtgatttaaatatgatgatttatccattaagtattggtgctgcatgtttgctaacttcaatactcggtactttttttgttaaattaggtaacactaaaaatgtcatgaatgccctgtataaaggttttgtagtatctgctgtagcgtcattagtaattttatggcctgtaacagaccatgtaataggttttgcaaatgaatatacagttaatggcaaaacttttaatggtatgaacctgtactattgtggagtaattggtttggtaattacaggattattaatctggataacagaatattacacaggaactaattacaggcctgttaagtctgttgctttatcatcaacaactggacatggaacaaatgttattcaaggattagctgtatcaatggaggctacagcaattccagctctgataattgttgcaggtattcttataactaattccatagctggtctttttggtatagccatcgctgtgactacgatgcttgcattagctggtatggttgttgcattagatgcttatggtcctgttactgataacgcaggtggtatcgcggaaatgtcaaatttagataaaaaagtaagaaaaacaactgatgctttagatgcagttggaaacacaacaaaagctgtaacaaaaggttatgcaattggatcagctggtttaggtgctttggttttatttgctgcttatacagaagatattaaacatttctctaaagaagctggctcagctcttgagggtattgttgtaacttttgatttatcaaatccttatgttgtagttggttta

SEQ ID NO: 267405 - DNA, 850 bp, Unknown
  Bacterial polypeptide expressing nucleotide sequence isolated from the Sargasso Sea
gctcttttagcaattgcggtttattattatctactattatcttatggagttgatgaaagagaaatagtaaatgctttagttgcactaggttttggtgcttcattaatttcaatttttgcaagacttggaggtggaatatttaccaaaggcgcagacgtaggtgctgatttagttggtaaagttgaagcaggaattccagaagatgatcctagaaatcctgcagttattgctgataatgtaggtgataatgttggtgattgtgctggtatggcagctgatttatttgaaacttacgcagtaacaatagttgccactatggttttgtcctcaattttttttcatggagatcttaatatgatggtttatcctttatctattggtggtgcttgcatattaacatctattattggaactttttttgttaaattgggtaaatctaaaaatattatggctgctttatataagggatttattgttacagctgtaacatcactgataattttatatccaatcacagattatgttttgggtttagaaaatatttattcaatttctaataaatcatttacaggaatgagtttatatatatgcggtgttataggattgattataacaggcttattaatatgggttacagaatattatactggaacaaattatagaccagttaaaagtgttgcttcatcatcaacaacaggtcatggcaccaatgtaattcaaggactggcagtttcaatggaagctacagcaattccagcactgataattgtaggtggaatattattaacaaattatattgctgggctttttggcatagcaatagcggtaacaacaatgttggcacttgcag

SEQ ID NO: 267406 - DNA, 847 bp, Unknown
  Bacterial polypeptide expressing nucleotide sequence isolated from the Sargasso Sea
ctttacccggtcacagactatgttttgggtcttgataatttttactctttaaataacatttctttttctggaatgagtttatattactgtggtgttatagggctaattataacaggattattaatttgggtaacagaatattatactggaacaaattatagacctgtaagaagtgtagcaaattcatcaacaactggtcatggaacgaatgtaattcaaggtcttgcaatctcattagaagctactgctataccagctttaatcatagtagctggaattctacttactaataatattgcaggtttgtatggtatagcaattgcagtgacgacaatgttagctttagcaggtatggttgttgctttagatgcttatggtcctgtaacagataatgctggtggaatagcagaaatgtcaaaactaccaaataatgtcagaaaaactacagatgcattagacgctgttggaaatactactaaggctgtaactaaaggttacgctattggatctgctggattaggggccttagttctttttgcagcttatactgaagatataaaacatttttcaaaagaggttggttcaaaattagagggtattgttgtaacttttgatttgtcaaacccttatgtagtagttggtttattaattggaggaatgttaccttatctgtttggttccatgggaatgcaggctgtcggtagagcaggaggtgcagtagtaattgaagtaagaagacagttcaaaaaatatccaggtattatgaaaagaaaacaaaaacctgattatgcgaagttggttgatttacttacagttgctgcaattaaagaaatgattataccatcac

SEQ ID NO: 267407 - DNA, 986 bp, Unknown
  Bacterial polypeptide expressing nucleotide sequence isolated from the Sargasso Sea
gtttctttcaggtgttgcaggatacgttggaatgcttatttctgtcaaagctaatgtgagaaccgcagaagcatctaggcaaaatttacaagcaggtttaactattgcattcaaatcaggtgcaataacaggattattggttgctggattagctttattagcaataacaacatattatataattttaattaaccttaatgtagataacagggagataattaatgctctagtagctcttggctttggagcatctcttatttcaatttttgcaagactaggcggtggaatattcactaaaggtgcagatgtaggagcagacttagttggtaaggtggaagcagggataccagaagatgatcctagaaatcctgctgtaattgctgacaacgttggagataatgttggtgattgtgcaggtatggctgctgatttatttgagacttacgcagtaacaatcgtagcaacaatggttttggcctccattttttcacctcaagattataatttaatggtttacccactagcaattggtggtgcttgtattttaacttctattataggaacttggtttgtaaaacttggaaaaagtaaaaatataatgggagctctttataaagggtttatagtaactgcagtttcctctttattgattatgtatcctatcacagactctttaattggaattaataacagttataacaataatgcaggtgcaaatttttctggattagatctttatatatgtggaattgttggatttgcaattacagggttactcatttgggttacagaatattacactggaacagattatagaccagttaagactgtagctaaatcatctacaacaggtcatggaactaacgtaatccaaggattagcaatttcaatggaagctacagcaatacctgcattaattattgtcgctggtattttgtacacaaacagtttagctggtttgtatggaatagctattgctgtgaccg

SEQ ID NO: 267408 - DNA, 712 bp, Unknown
  Bacterial polypeptide expressing nucleotide sequence isolated from the Sargasso Sea
aatgaattcaaccgttgaaactatccttttatatacaatattagctggatttttatcaatcgtttatggatattttactggaaaaaatattttaaatttaagcgcaggtaactctaaaatgcaagacattgcctctgctattcaaataggtgctaaagcttatttggccagacaatataaaactatatcgattgttggagtggtggttttagttattgtaagtatcgcatttagtccattagttggcttaggttatttaattggtgcagctttatcaggtatcgctggatatgttggaatgttggtctcagtagaggctaacgtaagaactgctgaagcgtctaaaaagggtttagctaatggtttatcagttgctttcaagtcaggagcggtaactggtatgttagtagctggtttagcattattagctatagcagtttattattatttattattaaagtttaatgttgatgaaagagaaattgtaaatgctcttgttgctttaggcttcggtgcatcattgatttcaatatttgctagattaggtggtggtatttttacaaaaggcgcagatgtaggtgcggatttagttggtaaagttgaggcgggtatacctgaggatgatcctagaaacccagcagtaatagctgataacgttggtgataatgttggagattgtgctggaatggctgctgatttatttgaaacttat

SEQ ID NO: 267409 - DNA, 769 bp, Unknown
  Bacterial polypeptide expressing nucleotide sequence isolated from the Sargasso Sea
catttgtgtcttaccccttatatttggaatggataaattagaagtagcagaaatgttaggtggttatatggctggtgttacagtcagtggtgtactctgggctattttccaaaataatgcaggaggagcatgggacaatgcaaaaaaatcttttgaagcaggcgttgaaattaatggagagatgacatttaaggggtctgaagcgcataaagcttcagtaactggtgatactgtaggagatccttttaaggatacgtcagggccatcaatgaatattttaattaaacttacttgtttaatcggactggttgttgcacctattttaggagagagtcatgataataaacatgaagatttagatgctccaaaagctattgaatctactatttcaaccgaaggaacaaatattaattcaatatctgcagtaacaggagcttttaaatttaacaaagaaattaaaacaattactgaatttattgttaaagaaatcgattgtaaaaataaatcatcattatgtgaagaatttgatattatattaactaaaaatccgataacctttaaaaccaatcaaaaatccatagaaaaattcgaagaaaaatcaaaattcaataacaaagtttttggtgaactaactattggtaaacaagcatacaattctattctttactttgatgctaaagcaaatgaaaaaggggcaatgtttgttggtgttttgaaatttgaaagaaataaaactaatgttgagattctagttaaaggtaaaaaataa

SEQ ID NO: 267410 - DNA, 617 bp, Unknown
  Bacterial polypeptide expressing nucleotide sequence isolated from the Sargasso Sea
attggaaaatttatacttaattgttttcgtaggaattttagcagtagtttatagttattttttaagcaaacaaattatttcttcaagtccaggaagtagtaaaatgcaagaaattgctgaagctatacaaattggtgctaaagcttatttgaatagacaatataaaaccatagctattgttggtgtaatagttttaataattattagttatttttttagtttactagtcggtcttggttacttcataggtgcactactttccggtgtagccggatatgttggaatgttaatttctgttgaagcaaatgttagaacagctgaagcctcaaggacaagtctgcaaaaaggtttaacaatggcttttaaatctggtgccatcacaggacttcttgttgctggtctagctttgttagcaatttcaatttactattgggttctattatctttcaatgtggagagcagggaattaataaacgctttaatagcattgggttttggagcctctttaatatctatttttgcaagattaggtggaggaatctttactaaaggcgctgatgtaggtgcagatttagttggtaaggttgaggctggaattccagaagacgacccccgaa

SEQ ID NO: 267411 - DNA, 504 bp, Unknown
  Bacterial polypeptide expressing nucleotide sequence isolated from the Sargasso Sea
gttttggagcttcactaatttccatttttgcaagattaggtggtggtattttcactaaaggggcagatgttggagctgatttagttggtaaagttgaagctggtatacctgaagacgatccacgaaaccctgcagtaatagcagataatgtaggtgacaacgtaggtgactgcgctggaatggccgcagatttatttgaaacttatgcagtgactgtcgtggctacgatggtcctttcgatgattttctttccaggatctgcatcaatgcttatctatccaatggcaatttgtggaagttgtctgatagcatcaatagttggaactttttttgtgagactaggttcatctgagagtattatgggagctctttataaaggctttattgcatcagcagtaatttcattaatcgttatgtatcctgtgactgatagagtaattggttttgaagatattgacggagctgacttcacaggtatgtcgctatatattgtgctgtattagg

SEQ ID NO: 267412 - DNA, 832 bp, Unknown
  Bacterial polypeptide expressing nucleotide sequence isolated from the Sargasso Sea
aacaactatgctcgcattagctggtatggttgttgccttagacgcgtatggacctgtcactgataatgcaggaggaattgcagaaatgtcaaatcttccaaaaaatgtaagaaaaacaaccgatgctttagatgctgttggaaatactactaaagcagtaactaaaggatatgcaataggatctgctggattgggagccttggtattatttgctgcatacactgaagatattaaacatttttctaaagtcgcaggttcaaatctagagggtattatagtcacttttgatttatcaaatccttatgttgttgttggtctattaataggcggaatgttaccttatttgtttggatctatgggaatgcaagctgtgggtagagcaggtggtgctgtagttattgaagtaagacgtcagtttaaaaagatacctggtatcatgaaacgtaaagcaaagcctgattatggaaagcttgtagatctcttgactaaggctgctattaaagaaatgataataccatcattattgcctgttttatcaccaatagttttatacttaattatttattttataggtggtcaagttgcagcattatcggctgtaggcgctatgcttcttggtgtaattataacaggtttatttgttgccgtgtctatgacagcaggaggtggtgcatgggacaatgcaaaaaaatatattgaggatggaaattatggtggaaagggttctgaagctcataaggccgctgtaacaggggataccgttggtgatccttataaagacacagctggacctgcagttaatcctatgatcaaaataacaaatatcgtagct

SEQ ID NO: 267413 - DNA, 841 bp, Unknown
  Bacterial polypeptide expressing nucleotide sequence isolated from the Sargasso Sea
ggctgttttgtctggtatagctggttacataggtatgaatgtctccgttagagctaatgtaagaacaacacaagctgcaacggaaggacttcaacccgctcttgacattgcttttaaatctggcgctattactggtttattagttgttggtttaggtttgctaggtgttgctgggtattatgcttttttattatctgccaatgttgatacaagattgctaatagaatctttggttgcattatcttttggagcttcattaatttctatttttgcacgtcttggtggtggtatttttactaagggtgcagatgttggcgcagatttagttggcaaggttgaagcaggtattcctgaagatgatccaagaaatcctgctgttattgctgataacgttggtgataatgttggagattgtgctggtatggctgctgatttatttgaaacttacgctgtaacaatagtagcaacaatgctaataggaactattatgttttctggtcaaataaattatgttgaacttcctttattcataggcggagtatgtataattgcatctattattggtgctttttttgtaaggttggggtcatcagaaaatattatgggtgctctttataaaggttttatagtaactgctattctatcagcaatatttatttattttgcagtagattatatgtttgacgatagtactgaaagcatgcctttattttggagctctattgttggtttagttgtaactgcagcaattatttggataactgaatattatacatctactgaatataggcctgtaaaatctattgctcaatcatctgaaactgggcatggtacaaatgtt

SEQ ID NO: 267414 - DNA, 892 bp, Unknown
  Bacterial polypeptide expressing nucleotide sequence isolated from the Sargasso Sea
ttggttgcagtatcttttgttgttggagcattatgttctggtctagcaggttttattggtatgcaagttgcaaccaaggccaatgttaggacaactaatgctgctcaacattctcttgggaaagcattagaaattgcattttctggtggttctgtgatggggatgggcgtagttggtttaggagttttaggagttggttcattatttataatttacaggccaatgtttgatgacataaatactgtaatacaagttttatccggattttctcttggtgcttcttctattgcattgtttgccagagttggtggtggaatatacactaaagctgcagatgttggcgctgacttagtagggaaagttgaagctggtattccagaagatcaccctttaaatccagcaactattgcagataatgttggagataatgttggagatgttgctggaatgggagctgatttatttgaatcttttgtcggatcaattattggggcaatggtattaggtgctgcttttattagtttaagtgaattctctggaattgaaattaatgctgtactgcttccattgtttattgctgcatccggaataattatgtctattgtaggaaccttcttcgttaaagtaaaagaaggtggagatcctcataaggctttaaatatgggtgagtttatatctgctggattaatgattgccgttacttatttcttgatacggtatttacttccagagtcatggattttcaatgatattgaatatacatcaaatggtgtcttcattgcaacgattagtggattaatagcaggacttcttgtaggtaaagtaactgaatattacactgcaactggtaaaaatccagttctatcaatagttaagcagtcagaaactggtc

SEQ ID NO: 267415 - DNA, 798 bp, Unknown
  Bacterial polypeptide expressing nucleotide sequence isolated from the Sargasso Sea
gatgatcgcaattcaccagcgcatccaagatggcgccaagaccttcctcttttgggaatatgcatacctgtccgttttcgtcatcatcgtggccctcgctctgggagtgacactcgagatgatccagggagagcacgtcgtggagggcgccggcgtcaagagcgccatctctttcatagtgggcgccgtgttctccgcctccgcgggctacatgggtatgatggtcgccaccaccgccaacgtcaagactaccgaagccgccaaagatggtgccaacggtctgaacaaagccttgaaggtagcgttcaagggcggtggtgtgatggggtttgttgtggtgggcctgggtctgatgggcctgacagtactcttcggaatctggggcgccatctccgaggcacgcgtcggagacgtctacactggccgtgatttctacaagatgcgagaagccgcgagatacttggcgggcttcggcttcggtgcctccagcattgctttgtttgcccgcgtggcggggggtatcttcacgaaagcggcggacgtgggtgctgatctggtgggcaaggtcatggaaagtatccctgaggatgaccctcgcaaccccggcgtgatcgccgacaacgtgggcgacaacgtgggcgacgtggctggtatgggtgccgacctgtttgagtcgtacgtgggctccatcgtggcggccatggccctgtcgcactgcacatcgcagatggcgctgccattgtggatcgcttcctccggtgtgctagcatcctgcttgggcttctggtgcgtcagtac

SEQ ID NO: 267416 - DNA, 193 bp, Unknown
  Bacterial polypeptide expressing nucleotide sequence isolated from the Sargasso Sea
gcttgggataatgctaagaaatatatagaagatggaaattacggtggaaagggctctgaagctcataaagctgctgtaactggagatactgtaggcgacccttataaagacacagcaggaccggcagttaatccaatgataaaaatcaccaatattgttgcactcttacttttagctgttattgctggttaat

SEQ ID NO: 267417 - DNA, 499 bp, Unknown
  Bacterial polypeptide expressing nucleotide sequence isolated from the Sargasso Sea
atttttcgtcgcggcactcacgatgacggcagtcgggcgtgcggctcagggaatggtggacgaagttcgcaggcagttccgggagaatccaggaatcatggaagggaccgtcaagccagattcagcccggtgtgtcgacatatctacacaggcggcgctccgtgagatggtgttgccgggtgtaactgcagttctggctcctgtgttcgtcggaaaagtactgggtgtcgaagcactcggtggattgttggctggtgccacggtaacgggtgttctcatggctctgttcatggccaatgcgggtggcgcttgggacaacgccaagaagtatattgagggtggcgcttatggaggaaagggatcggaccctcacaaggccgctgtcgtcggtgatactgtgggtgatccgttcaaggacacctcggggccgtcactcaacattctaatcaagctgatgagtgtcgtatcgcttgttcttgctccgtggtttattgcctga

SEQ ID NO: 267418 - DNA, 925 bp, Unknown
  Bacterial polypeptide expressing nucleotide sequence isolated from the Sargasso Sea
acaatgttctcagcccgtgtgaaagaagaaaaagacgttgcaccagcattgaaaagacttttaattgttgctacagcattgagtgcactggtgatgttatttgtttcactatgggccctaccggagtcatttgaaataaatgatgaaatatatacaaaccttgatgtctatttctgctatttaacaggtacagttgcaggattgcttgttgggctcttgacagaatactatacatcacatgattttaaacctgttcgcgaagtagcaaagtcatcagaaactggagcagcaacaaatataatttttgggttagctcttggatatcacagcgcaactggctctattttactactagcgatcagcattttcttacccttcactcttgcaggtatgtatggagtagctatagcggctataggcatgttaagcacgctagtagtcggcctaacaatagatgcttacggacctgttgccgacaacgcagggggaattgctgaaatgacaggtatgggggaaaacattcgtgataggacagacgtactggattccgccggtaatacaactgctgcaattggaaaggggtttgccattggttctgctattttaacatcattggctcttttctctgcttttctaacaagggccgatcttctggacccaagcgcaaaagttatggagagcataaatttgcttgaccctcttgtgctgacgggtttatttgtaggggcaatgttgccattccttttctcagcaatgacgatgaagtctgtaggcaaagctgcatttgacatgattgaagaagtaagacgacaattccgaacaattccaggaattatggatggaaaagccgagccagattatgagaaatgcgtggaaatttctacaacagctgctttgcgcgaaatgatagctccaggtattctaa

SEQ ID NO: 267419 - DNA, 946 bp, Unknown
  Bacterial polypeptide expressing nucleotide sequence isolated from the Sargasso Sea
tatgcttgttggtttaggctacctaattggcgcaactttatcaggtatagctggatatgttggaatgttagtttcagttcaagcaaatgttaggacagctgaagcatctagaaaaggtttagctagtggtttgtcagtagcatttaaatctggagctgtaactggaatgttagttgctggtttagctttgttatcaatagccgtttattattatttattattaaaatttaatgttgatgagagagaaattgtaaatgcgttagttgctcttggatttggtgcatcattaatttctatttttgcgagacttggtggaggtatttttacaaaaggtgctgatgttggagctgatttagttggaaaagtagaggctggtataccagaagatgatccaagaaatcctgctgtaatagctgataatgttggtgataatgtaggtgattgcgctggaatggctgctgatttatttgaaacttatgcagtaactatcgttgcaacaatggttttatcttcaatattttttccaggagatttatccatgatgatttatcctctaacaattggtggagcatgtattttaacctcaattattggaacttttttcgttaaacttggaagaagtaaaaatgtgatgggagcgttgtataaaggatttgttgtatcagctttagcttctttagttattttatatccagtaactaattatgttctaggtttggaaaattcttatgatttaaataacaaatcattttcaggaatgagcttatattattgcggagtgattggattaattattacaggattattaatttgggtaacagaatattatacaggaactaattatagacctgtaaaaagtgttgcaagttcttctacaacaggacatggaactaatgtaatacaaggtttggctatttcattagaggctacagcaataccagcatta

SEQ ID NO: 267420 - DNA, 466 bp, Unknown
  Bacterial polypeptide expressing nucleotide sequence isolated from the Sargasso Sea
tatgataaatattggtgaaaacgataaatggacagataaggataaaaaaatatttgattctgctgatgggaaagcagaatatagtaagtgtgttgatatatcgactcaatctgctattaaggaaatggtgttgcctggcctcctggctgttttaacacctgttattgtagggtttatgtttggagctgaaactttgggtggtctgctagcaggcgttacagtaacaggagtattaatggcaatttttcaatctaactctggtggggcatgggacaatgcaaaaaaaatgattgaagaaggagttgaaatagatggcaatgagtatggaaaaggatcagaaacacataaagcagctgttgttggagacactgttggagatccatttaaggatacatctgggccatctttaaatattttaataaaactaatgtcagtagtgtcacttgtgattgcgccattgatttga

SEQ ID NO: 267421 - DNA, 797 bp, Unknown
  Bacterial polypeptide expressing nucleotide sequence isolated from the Sargasso Sea
ctataatttggttggagctatatgttcatctgtagcaggttttattggtatgtatgcagcaactaaagcaaatgttagaacagcaactgcagctcaaaaagatggtccagcagcagcattatcagtttctttttacggtggctcaataatgggtttatgtgttgcatcattaggcctgataggtttagggggcttatattatttttatataccagctgaaatcgatcctcataaacttgaaggttttgctatgggagcatctgtagtagcccttttttcaagagtaggcggaggaattttcacaaagagtgcagatgttggggctgatcttgttggtaagattgaggctggcattcctgaagatgacccaagaaatccaggcgttatagcggataatgttggcgataatgttggtgatgttgctggaatgggctcagatatatttgagtcatattgtggctcaatgattgcatcaatagctatagcttatactctaggcaatcaggacatgatgatgcttcctctggctttggctgcgactggcttgattgcttcaataatcggaatatttatagttaagcttcagtctgcaaaagcaccagcgagtgcattaagatccggaactcttttagctccagtaatatttgtcgctatggcttatttcattatcaatttttttgatggagtgggaatgaatgtatggtggtgtgtgattgccggagctgtgggcggggtcttaattgggcttattaccgaatattacacaggcggcaacccggttaaaaaaattgctgaat

SEQ ID NO: 267422 - DNA, 508 bp, Unknown
  Bacterial polypeptide expressing nucleotide sequence isolated from the Sargasso Sea
catgtcaatgcaagcagttggtagagctggaggagctgttgtaatagaagttagaagacagttcaaaaaaataccaggtataatgaaacgtaaaagaaaacccgactatggaagattagtcgatttattaaccaaagcagcgattaaggaaatgatagttccgtcattattaccagtgctgtcgccaatagttttatattttttaattttgatgattggaggaatggaagcagcgctatcagcagttggagcaatgttgttaggtgtaataataactggattatttgtagccatttcaatgactgctggcggtggagcatgggataatgctaaaaaatatattgaagatggaaaatttggaggtaaaggatcagaagcgcacaaagcagctgttacaggtgatacagtcggggatccctacaaagatacagcaggacctgcggtaaatcctatgattaaaattacaaatatagtagcgcttttacttttagctgtaatagctcactaa

SEQ ID NO: 267423 - DNA, 626 bp, Unknown
  Bacterial polypeptide expressing nucleotide sequence isolated from the Sargasso Sea
tttttcaaaagttgtaggatctaaattagaaggaatagttgtgacttttgatctatccaatccttttgttgtagttggtttgttagtaggaggtatgcttccatatttatttggatcaatgggtatgcaagctgtaggaagagcaggtggagctgttgtggttgaagttagaagacaatttaaaaaaatccctggtataatgaaaagaaaggcaaaacctgattacggtaaattagttgatttattaacaaaagcagcgattaaagaaatgatagtgccgtctttgttaccggtattatctcctatcgttttatatattattattttgcctattggaggtcaggtagcagctttatcatcagttggcgctatgttgttaggtgtaattataacaggtttatttgttgctatatcaatgactgctggcggcggagcttgggacaatgctaaaaaatatattgaggatggaaattatggtgggaaaggttctgaagcacataaagctgcagttaccggtgatacagtaggtgacccatataaagacactgctggaccagctgttaatcctatgattaaaataacaaatattgttgctttattattactagctgtaattgccggttaaa

SEQ ID NO: 267424 - DNA, 796 bp, Unknown
  Bacterial polypeptide expressing nucleotide sequence isolated from the Sargasso Sea
tactgctattccagctttaataatagttgccggaattttatatactaatagtttagctggtttatacggtatagcaatagctgtcactgctatgcttgcattaacaggtatggttgttgccttagatgcctatggtcccgtaactgataatgctggaggaattgctgaaatgtctaagcttccaaaaaatgttagaaaaactaccgacgcacttgatgctgtaggtaatacaactaaagcagttaccaaaggttatgcaattggatctgctggtttaggtgcattagttctttttgcagcttatacagaggatattaattacttttcaaacgtaagtggttccgcattagaaggtgtaaatgttacatttgatttatcaaatccctttgtagtagctggattattaattggtgggatgctgccttatctctttggttctatgggtatgcaggctgttggaagagcaggcggtgcagttgtggtagaagttagaagacagtttaaaaagattccaggaataatgaaaggtaaaagaaaacctgattatggaaaattggttgatttattaaccaaggctgctattaaagaaatgatattaccatccttattgcctgttttatctccaattgttttatactttattattcttcagattggaggaatagaagcagcattatcctctttaggagcaatgcttttaggtgtaataataactggattgtttgttgcagtttcgatgacagctggcggtggagcatgggacaacgcaaaaaaatatatgaagatggtaattatg

SEQ ID NO: 267425 - DNA, 883 bp, Unknown
  Bacterial polypeptide expressing nucleotide sequence isolated from the Sargasso Sea
tatggaagcttcagcatcaaatatacttcaactgattattttagcaggtttattatcaatagtttatggtttttttacaggtaaaaatattttaagttctagcgctggtaacaaaaaaatgcaggaaattgcttctgctattcaagttggtgctaaagcctacttaaatagacaatataaaactattgctatcgtaggtgtagttgttttagttataattagtttttcatttagtattctggttgggctaggttatttaattggagcagcattatcgggaattgctggatatgttggtatgcttgtatcagttcaagctaatgtaaggactgcagaagcatcaagaaaaggattgtcacaaggtctttcaattgcttttaaatctggggcagtgactggaatgttagtagctggtttagctcttttagcaattgcagtttattattatctactattatctaatggagtagaggaaagagaaatagtaaatgctttggttgcactaggttttggtgcttcattaatttcaatttttgcaagacttggtggtggtatatttaccaaaggtgctgatgtgggtgctgatttagttggtaaagttgaagcaggtattccagaagatgatccgagaaatcctgcagttattgcagataacgtaggtgataatgttggtgattgcgctggtatggcagcagatttatttgaaacttacgctgttacaatagttgctactatggttttatcttcaatattttttcatggtgatcttaatatgatggtttaccctttatctataggtggtgcatgtatattaacatccattattggaacattttttgttaggttaggtaaatctaagaatatttatggctgctttgtataa

SEQ ID NO: 267426 - DNA, 940 bp, Unknown
  Bacterial polypeptide expressing nucleotide sequence isolated from the Sargasso Sea
tttttgtggtgtaatctcagtaatatatggttttatatctagtaaacaaatattgtctgctagtgctggtgataacaaaatgcaagaaattgcgagcgccattcaaataggcgcaaaggcttacttaaatagacaatatactactatagctatagttggagttattgttctgattttaattagttttttattttcaatatgggtaggacttggatatgtaattggagctacactatccggagcggctggttacgtagggatgttaatatcagtacaagcaaatgtaagaacagctgaagcctcaaggactagtttagatgatggactaaaaatagcttttaaatcaggggcagttaccggtatgttggttgctggattagctcttctctcaatatcagtttactattttttgttattaaaattaaacattgatgaacgtgaaattgtaaatgctcttgttgcattaggttttggtgcatctttaatatctatatttgctagattaggtgggggtatatttacaaaaggtgctgatgttggagcagatttagtcggcaaagtcgaagcaggtattccagaagatgatccaagaaatccagcggtgattgcagataatgttggagataatgttggtgattgcgctggtatggctgcagatttatttgaaacctatgctgtaactatagttgcaacaatggttttatcctcaattttttttacaggtaatacaaatatgttaatttatccattaagcataggtggaatttgcatccttacatcaattattggtacttattttgtaaaactcggaaaaagtcaaaatataatgggagctttgtataagggttttattgtgactgctgttttatctttattagcattatacccagttactgatttggttataggtttagacagtcaattcagtgtaaatgataaa

SEQ ID NO: 267427 - DNA, 796 bp, Unknown
  Bacterial polypeptide expressing nucleotide sequence isolated from the Sargasso Sea
tgttgttggtatgagcacttcactaaatgcgataggtgataatataaccggaatgtctttattttattgtggtttattaggcttaataattactggtatgattatttgggttactgaatattacactggtactaattatagacctgttcaaagtattgcaaagtcttcgacaacaggtcatggaactaatgtaattcaaggtcttgcaataagtttagaagctactgcattgccagctctaataattgttgctggtataatcactacatattctattgctggtttgtttgggatagctattgctgttacaacaatgctagctttggcgggtatggttgtggctttggatgcttatggccctgtaactgataatgcaggaggtattgctgaaatgtctgaattagatgaaagtgtcagaaaaacaacagatgcacttgatgctgtaggtaacacaacaaaagccgttactaagggttatgctataggttctgctggtcttggtgcattagttttatttgctgcttacacagaggatgtttctcattatggtttagaagtttcttttgatttgtcaaatccatatgttgttgtaggtttattactaggaggcttattaccatatttgtttggagcaatgagcatgacagccgttggtagagctgcaggttcagttgtagaagaagtcagaagacaatttaaagaaatacctggcattatgaagggtaaaggcaaacctgaatatggcacctgcgtagatattttgactaaagctgcaataaaagaaatgattattcct

SEQ ID NO: 267428 - DNA, 969 bp, Unknown
  Bacterial polypeptide expressing nucleotide sequence isolated from the Sargasso Sea
gtggaaagtagagagttaattaacgctttaatcgctttaggatttggagcatcattgatttctatttttgccagacttggtggaggaatatttactaaaggtgcagacgttggtgcagatttagttggcaaggtagaagcaggaatacctgaagatgaccctagaaatccagcagttattgcagacaatgttggtgataatgttggagattgcgcagggatggctgctgatttattcgaaacatatgctgtaacaatcgttgcaactatggttttagcttcaatattttttcaaaacaatatggatttaatgatttatcctttagctataggaggcggatgtataattgcctcaattataggaactttttttgtaaaattaggaaaaagcaaaaatataatgggtgctttatataaagggtttatagtcactgcaatcatatcattagttttactttatcccattacttcaaaaattattggattagatgaactatttaaagtagggagcaaaacatttagtggattagatttgtactattgtggggtagttggtttaatagtaacaggattaattatttgggttaccgaatattatacaggaacaaactatagaccagttagaagcgtagcaaaatcgtcaacaacaggacatggaactaatgtgatccaaggacttgcggtttccatggaagccacagctttgcctgcattgataattgttgcaggtattattgtaacaaatgaatttgctggtttatttggtatagcaatcgctgttactgcaatgttggccttgaccggcatggttgttgcattggatgcatacggaccagtaaccgacaatgccggaggtattgcagaaatgtcaaaattaccaaagaacgttagaaaaactaccgatgctttagatgcagttggtaatactacaaaagcagttacaaaaggttacgcaatcggttctgctggt

SEQ ID NO: 267429 - DNA, 211 bp, Unknown
  Bacterial polypeptide expressing nucleotide sequence isolated from the Sargasso Sea
tatgacagctggcggtggagcttgggacaatgcaaaaaaatatattgaagatggtaaatatggtggaaagggctctgaagcgcataaagcagcagtaactggtgatactgtaggtgacccctataaagatacagctggacctgcggtaaacccaatgattaaaataacaaatattgtagcattattactgcttgccgtaattgcgggataa

SEQ ID NO: 267430 - DNA, 256 bp, Unknown
  Bacterial polypeptide expressing nucleotide sequence isolated from the Sargasso Sea
aatgttgttaggtgttatcatcacaggtttatttgtagctgtttctatgacagctggaggtggagcttgggataatgctaaaaaatatattgaagatggtaatcatggaggaaaaggttctgaagctcataaagctgctgttacaggtgatacagtgggtgacccttataaagacactgcgggtccagcggttaatccaatgattaaaataactaatatagttgcacttttactattagcggttattgcaggttaa

SEQ ID NO: 267431 - DNA, 843 bp, Unknown
  Bacterial polypeptide expressing nucleotide sequence isolated from the Sargasso Sea
tagccataacaggcttgttaatttgggttactgaatattatactggaacaaattatagacctgttaaaagtgtagcttcatcatcaactacaggccatggaactaacgtaattcaaggtctagcagtttctatggaagctacagctataccagctttaattatagtcggaggtattttgttaacaaattatatcgctggactttttggaatagcaattgcagtaactactatgcttgctttggcaggaatggtagtagctcttgacgcatatggtccagtaacagataatgctggtggtattgcagaaatgtctaatttgccaaaaaacgttagaaaaactactgatgccctcgatgctgttggcaacacaactaaagcagttacaaaaggttatgcaataggatctgcgggtttaggtgctctagttttatttgcagcttatacagaagatattaaacatttttcaaaagttgctggatcaaatttagaaggaattgttgttacatttgatctttcaaatccatttgtggtagttggcttgcttgttggtggtatgcttccatatttatttggttcaatgggtatgcaagccgttggaagagccggtggcgctgtcgtaatcgaagtaagaagacaatttaagaaaatacctggcattatgaaaagaaaagctaaaccggattatggaaaactggttgatttgctaacaaaggcagcgataaaagaaatgattataccgtctttgcttccggtattgtcgccaattgttttatatttatttattttaccagataggcggtcaaggttgcagccttatcatcagttggcgcaatgttgctagg

SEQ ID NO: 267432 - DNA, 790 bp, Unknown
  Bacterial polypeptide expressing nucleotide sequence isolated from the Sargasso Sea
ttgtttggaattgcaattgctgtaacagcgatgcttgcattggcaggcatggtggttgctcttgatgcttatggcccggtgacagacaatgctggtggtatagcagaaatgtcaaacttggatgaaaatgtaagaaaaaccactgacgctcttgatgctgtgggtaatactacaaaagctgtaactaaagggtatgctataggttctgcgggcttaggggcactagtattatttgcagcttatgttgaggacttaaaacttatttcatatttaacccctaactttagcttagaaaatccttatgtggttgtaggtttattaataggtggtttgttaccgtatttattcgcttctatgggaatgatggccgtgggcagagccggaggcgcggttgttgaagaggttagaaagcaatttgctgataacccaggcatcatgacaggtgagaccaaacctgattattcaaggtcggtagatatgctcacaagatcagcaattaaagagatgattattccatcaatgttgccggtactctcaccgattgttctattctttattgtatcaatagttgccgatcaaaatgctgcagtgtcagcagttggggcaatgttacttggtgtaatagttaccggaatatttgttgcaatttcgatgactgcaggaggtggcgcttgggacaatgcaaaaaaatatgttgaggatggtaactttggtggaaaaggatctgaggctcataaagctgctgttactggagatacagtcggtgatccttataaagacactgctggac

SEQ ID NO: 267433 - DNA, 906 bp, Unknown
  Bacterial polypeptide expressing nucleotide sequence isolated from the Sargasso Sea
atacaaatagtttagctggtttatatggtattgcaatagcagtaacagcaatgttagctttaactggaatggtagtagctttagatgcttacggaccagttacagataatgctggaggaatagcagaaatgtctaagctgtctaagaatgtaagaaaaactactgatgcattagatgcagtaggcaatactacgaaagcggtaacaaaaggttatgctataggatctgctggactaggagccttagttttattcgcggcttacacagaggatattaaatatttttctacagtgaaaggttctgctttagagggtgttatagtaacttttgacttgtcaaatccatttgtagttgctgggcttttaataggaggaatgttaccttacttatttggttcgatgggaatgcaagcagttggtagagctggaggtgccgttgtaatcgaggttagaagacagtttaaaaaaattcctggaattatgaaaggaaaaagaaaacctgactatggaaggctagtagatttattaacaaaagcggctattaaagaaatgataattccttctttacttcctgtcttatctcctgtggtactttattttataatcttacaaatcggtggcatggaagctgctctctcttctctaggcgcaatgttattaggagttatcataacaggcttatttgttgctgtatcgatgactgcaggaggcggtgcgtgggacaatgcgaaaaaatatattgaagatggaaactttggtggtaaaggttcagaagctcacaaatctgctgtaacaggcgacacagtaggcgatccttacaaagatacagcaggaccagctgtgaatccaatgataaaaattactaatattgtagctttaatattactagcagttattgctcattaac

SEQ ID NO: 267434 - DNA, 319 bp, Unknown
  Bacterial polypeptide expressing nucleotide sequence isolated from the Sargasso Sea
tgttttatatttcataattttatctataggagggcaagtagctgctcttgctgccgtcggtgcaatgttattgggtgttattataacaggattatttgtggctgtatcaatgactgccggaggtggagcatgggataacgccaaaaaatatatagaagatggtaatcatggaggcaagggatctgatgcacataaagccgctgtaacaggagatacagttggggatccatataaagatactgcaggaccagctgttaatccaatgataaaaattacaaatattgttgctttacttttattagcagttatcgctgggtaa

SEQ ID NO: 267435 - DNA, 616 bp, Unknown
  Bacterial polypeptide expressing nucleotide sequence isolated from the Sargasso Sea
gttgctggatcaaatttagaagggatagtagtaacctttgatttatcaaatccttttgtagttgttggattacttgtaggtggcatgcttccgtatttatttggttctatgggtatgcaagctgtaggtagagcaggtggagcagtagttattgaggtaagaagacaatttaagaaaattccaggaatcatgaaaagaaaatctaaaccagattatggaaagctagtagatttattaactaaagcagcaataaaagaaatgattgtaccatcattgttgcctgtgctatcgccaatcgtattatatttttttattttacctataggaggacaagttgcggctttatcatctgtaggagctatgttgttaggtgttattattacaggtttatttgtagctatatcgatgactgctggaggcggcgcatgggataatgcgaaaaaatatatagaagatggtaattacggaggtaaaggttctgatgctcataaagctgcggtaacaggtgacacagtcggtgatccatataaagatactgcaggtcctgcagttaaccctatgattaaaatcacaaatattgttgctttattacttttagcagttatatcaggataat

SEQ ID NO: 267436 - DNA, 721 bp, Unknown
  Bacterial polypeptide expressing nucleotide sequence isolated from the Sargasso Sea
atttagcattttagtaggtttaggttatttaattggagctgctttatccgggatagcaggatacgttggtatgcttgtttctgtacaggctaatgtaagaacagctgaagcttcaagaaaaggattatcgcaaggactttcaattgcatttaaatctggtgcagttactggtatgttggttgcaggtttagctcttttatctatagctgtatattattatttattattaacttttaatgttgacgaaagagaaattgtaaatgctttagttgctcttggttttggtgcttcacttatttcaatttttgcaagacttggtggaggaatatttaccaaaggtgcagatgttggtgcagatttagttggtaaagtggaagctggtatcccagaagatgatccaagaaatccagccgtaatcgctgataacgtcggcgacaatgttggtgattgcgcaggcatggcagcagatttgtttgagacttacgcagtaacaatagttgctacaatggttttgtcttcaatattttttcatggagatttaaatatgatggtttatcctttatcaattggtggtgcttgcatattaacatctataataggaacattttttgttaaattaggaaattctaaaaacatcatggctgccttatataaaggatttgtagttactgcagtaacttcattagtaattttataccctaattacagtattatgttttag

SEQ ID NO: 267437 - DNA, 733 bp, Unknown
  Bacterial polypeptide expressing nucleotide sequence isolated from the Sargasso Sea
atgaatttagtaccgataatattaggcttttttggtctactagcggcatatctgctctatgcacaagtgaagaagtatcctgctggagagaaaaatttaacagacatctctgatgagatacatcttggcgctatggcgttcatgaaaaaagaatattccatactttttatgttctctcttatactagttttcggcatatatataggacttggattaagtagcacaatagcattcattgtcggtgctttaagttcctcgataactggttttattggcatgtatacagctacaaaggcaaatgtgagaacagctacagctgcacagaattcgggtgttagcgacagtttatcagttgctttcttcggaggatcaattatgggcttaactgtagcggctatgggactgctaggtctagggctgctatatattctgtatggttcagatcctgcaaccgcatcaacaattcatggttttggaatgggggcatcaaccgttgcattattctcaagggttggcggcggaattttcacaaagtccgctgatgttggggcagatctagttggaaaagtagagaaagatattccagaggatgatccaagaaatccaggtgttatagcggacaatgttggagataatgtaggggacgtcgcgggcatgggctcagatatttttgagtcatattgtggagcaataattgcaacaatagcaatagcatcaaccatgctccaatcag

SEQ ID NO: 267438 - DNA, 871 bp, Unknown
  Bacterial polypeptide expressing nucleotide sequence isolated from the Sargasso Sea
gtaatcgttgctataatattatttttaactttagggctatatgtatcaattggttttcttattggagctgttttatctggtatagctggttacataggtatgaatgtttccgttagagctaatgtaagaacaacacaagctgcaacggagggacttcaacctgcacttgacattgcctttaaatctggcgctattactggtttattagttgttggtttaggcttactaggtgttgctgggtattatgcttttttattatctgctaatgttgaaacaagattgctaatagaatctttggttgcattgtcttttggagcttcattaatttcaatttttgcacgtcttggtggtggtattttcactaagggtgcagatgttggtgcagatttagttggcaaggttgaagcaggtattcctgaagatgatccaagaaatcctgctgttattgctgataacgttggtgataatgttggagattgtgcaggcatggctgctgatctatttgaaacttatgcagtaacaatagtggccacaatgctcataggaacaattatgttttctggccaaataaattatgttgaacttccattattaataggtggagtatgtataattgcatcaattattggtgctttttttgtaaggttgggatcatcagagaatattatgggtgctctttataaaggtttcatagtaactgctgttttatctgcaatatttatatattttgcagtagattatatgtttgacgatagtaacttaagcatgccattattttggagctctattgttggtttagttgtaactgcagcaattatttggataactgaatactatacatctactgaatataggcctgtaaaatctatgc

SEQ ID NO: 267439 - DNA, 712 bp, Unknown
  Bacterial polypeptide expressing nucleotide sequence isolated from the Sargasso Sea
aaagcagtaacaaaagggtacgctataggatcagctggccttggagctttagtattatttgcagcatatacagaggatattaaacatttttctaaagttgctggttctaatttagagggaataatagttacatttgatttatcgaatccttttgtcgtagttggtttattaatcggtggtatgttgccatatttatttggatccatgggtatgcaagcagttggtagagctggtggagccgttgttatagaagtaagaaggcaatttaaaaagatacctggtataatgaaacgtaaagctaaacctgactatggaagattagtagacttattaactaaagcagcgattaaggaaatgataattccttcattgttaccagtcttatcaccaattgttttatatataattatttattttatcggaggtcaagttgcagccttatctgcagtaggagcaatgctattgggtgttattataacgggcttgttcgttgcagtttctatgacagccggtggtggagcttgggacaatgctaaaaaatatattgaggatggtaaatttggtggaaaaggatctgaagcacataaagcagcagtaactggtgatactgtaggtgacccatataaggatacagctggacctgcggtcaacccaatgattaaaataacaaatattgttgcattattacttcttgctgtaattgcgggataaa

SEQ ID NO: 267440 - DNA, 690 bp, Unknown
  Bacterial polypeptide expressing nucleotide sequence isolated from the Sargasso Sea
ataccactaaagctgtaactaaagggtatgcaataggttctgctggactcggcgctcttgtactatttgctgcatatgttgaagatttgaagttagtcccaactttaaccccaaatttcagtcttgaaaatccctatgtagtagttggtttattaattggcggtttattgccttatctttttgcatcaatgggaatgatggctgttggaagggcaggtggagctgtcgttgaagaagttagaaagcaattctctgataatccaggtattatgactggtgagtctaaacctgattattcaaaatcggttgatatgttaacccgatctgcaattaaagaaatgattattccgtctatgttaccagtattatctccgattattcttttctttatagtttcaatagtggctgatcaaaatgcagccgtctccgctgtaggtgcaatgctgctgggagtgattgtaaccggaatatttgttgcaatctcaatgaccgccggaggtggagcttgggataatgcaaagaaatatgttgaagatggaaattttggaggcaagggctctgaagctcataaggcggcagtaactggagatacagtcggagatccatataaagacacagccggtccagctgtaaaccctatgataaaaatcactaatattgttgcattgttgttgttagcggcactctaga

SEQ ID NO: 267441 - DNA, 963 bp, Unknown
  Bacterial polypeptide expressing nucleotide sequence isolated from the Sargasso Sea
gcttatttctatttttgcgagactgggtggtggaatttttacaaagggagctgatgttggcgcagatttagttggaaaagtagaagcaggaattccagaagatgacccaagaaacccggcagtaatagcagacaacgttggagataacgtcggtgactgtgcaggaatggcagctgatttatttgaaacttatgcagtaactattgttgctactatggttttatcatcaatctttttccaaaatgatttaatgatgatggtttatcctcttacaattggaggcgcttgtatagttacctctattctcggtactttttttgtaagactgggttcatcaaaaaacataatgcttgctctctacaaagggttcattgttactgcaattacgtctcttctaattttatatccacttacagattatgttttaggtttagataaagtatattcaataggtaataaacaattttctggtttaaatctttattactgtagtgtaataggattgttaatcacaggtcttcttatatgggtaacagaatattatactggcacaaattatagaccagtgaaaagtgttgcagcttcatctaccactggtcatggtactaatgtaatccaaggactggctgtttctatggaagcaacagcaatcccagcactaattattgttggtggaattttattaacaaattatattgctggattatacggaatagctattgcagtaactgctatgttagctcttgctggaatggtagtagcattagatgcttacggaccagttacagataacgctggtggaatagctgaaatgtcaaacttacctaaaaatgtgagaaagactactgatgccttagacgctgttggtaacacgacaaaagccgtaactaaagggtatgcaattggctctgctggattaggagctttagttttatttgcggcatacacagaagacattaaatt

SEQ ID NO: 267442 - DNA, 751 bp, Unknown
  Bacterial polypeptide expressing nucleotide sequence isolated from the Sargasso Sea
atgattggaaccctaactataataataattacaggcttactagccattctatatggctacattgttggcaaacaaattctgttggctaatccaggtaacaaaaaaatgcaagaaatagctaatgctatacaagaaggggcaagagcatatttaaatcgtcaatacaaaactatttcaatagttggtgttgttatcttagttattattactttagcattaggtatttgggtgggtattggtttctttattggatcttttctttctggagtagccggctatgttgggatgttagtatctgtacaggctaatgtaagaacggcagaagcatcaagaaatggtctttcagcaggattaaatataggttttaaatctggtgctgttactggaatgttagttgctggcttagcgttattatctatatcaatttattatttatttcttttaaaaatggaaattcctgaaagggaaattataaacgctttagttggtttaggttttggcgcttctttaatttccatttttgcaagattaggaggaggtatatttacaaaaggtgctgatgtaggagctgatttagttggaaaagttgaagcaggtatacctgaagatgacccaagaaatcctgctgttatagcagacaatgttggggataatgtaggtgactgtgctggtatggctgctgatttatttgaaacttatgcagttactattgttgcaacaataggttttatcttcaattttttttgtaacg

SEQ ID NO: 267443 - DNA, 882 bp, Unknown
  Bacterial polypeptide expressing nucleotide sequence isolated from the Sargasso Sea
ggtatgttggaatgaatatatcggttagatctaatgttcgcacgacacatgctgcaagtaatagcttagctgaaggtttgtctgtttcatttaaagctggtgcagtaactggaatgttagttgcaggttttgcactcctttcaattgctattttctattttgtattacataactctggttcatttccaggaagagagattgttgcacctttagtgtcattaggttttggagcgtcattaatttcaatttttgcaaggttaggcggtggtatttttacaaaaggtgctgatgttggggccgatttagttggtaaagttgaagctggtattcctgaggatgatccaagaaaccctgctgttattgcagataatgtaggtgataatgttggtgattgtgctggaatggcagctgatctttttgagacatatgttgttacggtagtagcaacaatggttttagcttcaatattttttattgaaaactcttatacaatgatgatgtttcccttagcaattgcaggtgtttgtgctcttactagcataattggaacttactttgtaagacttggtaaaaataataatattatggctgctctttacagaggatttgctgtctctgctattctttcagctgtattattatattttgttacagattatattgttggtttaaataatgttttagttgttgaaggaacatccacacagtttacaggaatgtctctttttatttgtgggttattaggattaataattacaggcttaataatatgggttactgaatattatactggtactaattatagacctgtccaaagcattgctcaatcatcaactactggtcatggaacaaatgtcattcaaggtcttgcaattagttaga

SEQ ID NO: 267444 - DNA, 817 bp, Unknown
  Bacterial polypeptide expressing nucleotide sequence isolated from the Sargasso Sea
aatggtaggcattagctctgctattaaaaatggtgcattagcatttttaaatgctgaatacaaattattattctttttcgttattggtgcatccttagcattgttcttcatatcaactcaagttgaaacaacaagttggttaataattccagctttcgtagttggtgctgtattttcaggtttagctggaaatattggaatgagaatagcaactgatgcaaattctagaacaacacaagctgctagaacaagtttacctaaggctctcaatgtagcttttggtggaggaactgtcatgggacttggtgttgctggattagctgtatttggattaagtattttctttttattttttgttaattactttattacagaaggaggaaatttttacactgaaatgacaattgtactggaagctttagcaggattttcactcggagctgaatcaattgccttatttgcaagagttggaggaggaatttatactaaagctgctgatgtaggagcggacttagttggtaaagttgaagctggtattcctgaagatgaccctagaaacccagcaactatagctgacaacgttggtgataatgttggtgatgttgcaggaatgggtgctgatttatttggtagctacgtagcgacagttctagcatctatggttttgggtaattatataattaaggatatgtctgattatggagcaagtcaattttccgatgcttttagtgggatgggaccgaatattattgcctttattcatagctggtgttggtatcatagcgtctataattggaacactatttataaaaattaa

SEQ ID NO: 267445 - DNA, 820 bp, Unknown
  Bacterial polypeptide expressing nucleotide sequence isolated from the Sargasso Sea
attccagaagaccatccattaaaccccgcaactattgcagataatgtaggtgataatgttggtgatgttgctggaatgggagctgatctatttgaatcctatgttggttcaattattggatcgatggtccttggagctaccatattaacggttggtgacgttcctaaatttgatgcatcttttgttatattgccattagttattgcagcttcaggtattattgtttcaattattggcacatttcttgtatcagttaaagaaggcggtagtccgcaaaaagcattaaatattggtgaatttggctcatctgcaattatgattgctgtaatgtattttttaatcacaagtcttttgcctaatacatttaccttaggtggtaatccatataccagcttaggagttttttgggcctcaacgatcggcctacttgcaggtcttggcattggtttgattacagaacattatactggaaccaatacatcaccaactctttcaatagcccgtcaatcattaactggccctgcaactaatatcattgctggtcttggcgttggtatgcagtcaactgctggaccgattttaattattgctgcaggaattgttggcgctcatcattttgcagggctttacggcgttgcaatggcagctttaggtatgcttgctaataccgggattcaacttgcagtagatgcatatggacctatttcagataatgcaggaggcattgctgaaatggcagagcttccagccgaagttcgcgaaagaacagataaattggatgctgtaggcaatacaactgctgcaataggtaagggattgc

SEQ ID NO: 267446 - DNA, 959 bp, Unknown
  Bacterial polypeptide expressing nucleotide sequence isolated from the Sargasso Sea
tctgttgcatttaaatctgggtgctgtaactggaatgttggttgctggtttagcattattgtctatagctgtttattattttttattattaagttttaacatcgatgaaagagaaatagtcaacgctcttgtagctttaggttttggagcatctttaatttcaatatttgcaagattaggtggaggtatttttactaaaggagctgatgtgggtgctgatttagttggaaaagttgaggcaggtattccagaagatgaccctcgtaatccagctgtaattgccgataacgttggagataatgttggagactgtgcaggtatggctgctgatttgtttgaaacttatgcagtcactatagttgctacaatggttttgtcttcaattttctttatcggtgacttaaacatgatgatttatcctttaacaattggaggtgcttgtttaataacttctattattggaaccttttttgttaaacttggaaaagataaaaatgtgatgaatgctttgtacaaaggatttattgtttcggcagtagcttctttaattattttatggccagtaactgattatgtaattggatttactactgaatacactgttaatgataaaactttcaatggtatgagtttgtattattgcggtgtaattggccttgtaataacaggattattaatttggattactgagtattatactggaacaagttatcgaccggtcaaatcagttgctctatcttctacaactggacatggaacaaacgtaattcagggattagctgtttctatggaggcaactgcagttccagcactaataattgtagcaggtattttaattacaaatacaatagcaggactttttggtatagcaattgcagtaacgactatgttagcattagctggtatggttgtagctctagatgcatatggccctgtgaccgataacgctggtggaatag

SEQ ID NO: 267447 - DNA, 817 bp, Unknown
  Bacterial polypeptide expressing nucleotide sequence isolated from the Sargasso Sea
cccgatggcgaggataaggtgaaaaaaataggcgatcagattcatgctggagctctcgctttcatgaaaacagagtataaatatttatccatatttattgcggtaatagtattactagcatggtatgcattgggaccttatacagcaatttctattgttgttggagcaatatgctcatctgttgcaggttttattggtatgtatgcagcaactaaagcaaatgttagaactgcaactgcagctcaaaaagatggtccagcagcggctttatcggtttctttttatggtggttctataatgggtctatgtgttgcatcattgggtctcattggtttaggtggattatattatttctatatcccagctgaaattgatcctcataagcttgaaggttttgctatgggagcatctgttgtagcacttttttccagagtaggtggaggaatttttacaaagagtgctgatgttggagctgatctcgttggtaagattgaagctggtattcctgaagatgatccaagaaatccaggcgttattgcggataatgttggggataatgttggtgatgttgctggaatgggttcagatatatttgagtcatattgcggctctatgattgcatcaatagcaatagcttatacgcttggaaaccaagatatgatgatgcttcctctggctttagctgctactggcttaatagcttcaataatcggaatatttatagttaagcttcagtcagcaaaagcacctgcaagtgcattgagatcaggaactcttttagcgcccagtaatatttgtggctatggcctatttcata

SEQ ID NO: 267448 - DNA, 521 bp, Unknown
  Bacterial polypeptide expressing nucleotide sequence isolated from the Sargasso Sea
tttatttggtgcattaagtatgactgctgtaggaagagctgcgggctcagttgtattagaggtcagaagacaatttaaagaaatacctggaataatggaaggtaaaggaaagcctgaatatggaacatgtgtagatatactaactaaatctgccataaaagaaatgatcattccatcaatgttgcctgtcttatctcctattgcagtttactttgtaattttattaattgctggtcaaactgctgctctgtcttgtttaggcgcactattgttaggtgtcattataactggattatttgtagccataagtatgacagcaggtggtggcgcatgggacaacgcaaaaaaatttatagaagatggaaatcatgggggaaaaggtagtgaagctcacaaagccgcagttactggtgatactgttggtgatccatataaagatactgccggtcctgcagttaaccctatgattaaaataacaaatattgtagccctgttattattggcagctatttcaatataat

SEQ ID NO: 267449 - DNA, 793 bp, Unknown
  Bacterial polypeptide expressing nucleotide sequence isolated from the Sargasso Sea
tatgccagcattcataccaccacttttaggtctcataggtcttcttatcgccttaggaatatttagggttgttcttagctatccagaaggaaatcctgaagtaaagaaaatcggtgacatgattcattcaggcgcaatgagttttatgaaaactgagtatatgtatttggttgttttcgtccttgttttagctgttttagttttctttgccctgggctgggaaacagcaactgcagttttagttggtgcttcaagttcagctttagctggatttattggaatgtatgccgcaactaaagctaacaccagaacagctgcagcagctcaagatagtggagcagcttcagctttaactatttctttttacggtggatcaataatgggtctctgtgttgcttctttgggtcttcttggcttgggagggttattttattttctaggagagggtcattaccttgaaggatttggaatgggagcttcagtagtagcactattctcaagggttggtggaggaatttttaccaaaagcgctgatgtcggagctgaccttgttggaaaagtcgaagcaggaataccagaggatgatccacgaaatccaggagtaattgctgataatgttggagataacgttggtgatgttgctggaatgggctcagatatttttgaatcatattgcggctcaatgatcgcaactatagcaattgcttacactatgacagaagcaaataatgggcctttgatgagcttacctctagcattagcatctattggtttaatatcatcaattttaggt

SEQ ID NO: 267450 - DNA, 697 bp, Unknown
  Bacterial polypeptide expressing nucleotide sequence isolated from the Sargasso Sea
aggttatgctataggatcagcaggactaggagcccttgtgttatttgctgcttatactgaagacattaaacatttttcaaaagttgcaggttcaaatcttgaaggtattgtggttacttttgatttatctaatcctttcgtcgttgtaggtttattaattggtggtatgcttccttatctctttggttcaatgggaatgcaggcagtaggtagagctggaggagcagtagttattgaagtaagaagacaattcaaaaaaattccaggtataatgaaacgtaaatcaaaacctgattatggcagattagttgatttgttaacaaaagctgcaattaaagaaatgattataccttcattattgccagtactttctccaatagtactttatttaattatattacctattggtggtcaggtcgccgcactgtcttcggtaggtgctatgctattaggtgtaattataacaggtttatttgttgcagtatccatgactgcaggcggtggtgcttgggataatgcaaagaaatatatagaagatggaaagtttggtggtaaaggatctgaagctcataaggctgctgttactggagatacagttggagatccatacaaagatacagcgggtccggctgttaacccaatgattaaaattacaaatattgtagcattactgttacttgctgttattgctggctaa

SEQ ID NO: 267451 - DNA, 664 bp, Unknown
  Bacterial polypeptide expressing nucleotide sequence isolated from the Sargasso Sea
agacaattcagggaaatccccggaataatggaaggcaccggtaccccagaatatgctaaatgtgtagatatatcaaccaaggctgctttaaaagagatgttattacctggattaataaccataataacaccaattatcatagggttgatgtttggagctgagccacttggtggatatatggctggagtttgtgttagtggtgttatgtgggccattttccaaaataattctggtggagcatgggataacgctaagaaatcatttgaagccggagttgaaattaatggtgaaatgacgtacaaaggctctgatgctcacaaagctgcagtcaccggagatacagttggagatccatttaaagacacttctggaccatcaatgaatatattaatcaaattaacatgcttagttggactagtaatagcccctatattgggtaatcatgattctgaatcagccttgttggattttaataatgaaaatcttgagattaaaattcaggagaataaaaagaaagaatactcagttgaaattaaggctgaaaatgaaaaaacaaaagagttattaattgaggttaaaatttctggaaatcaaaaaaatgtaatgagcgcagttgaaaatattactcctgaaatcaatcaaattatagatattgattcttaat

SEQ ID NO: 267452 - DNA, 769 bp, Unknown
  Bacterial polypeptide expressing nucleotide sequence isolated from the Sargasso Sea
gctctttacaaaggttttatagcaacagctatattgtctttagttgttttatatccagtcacagaatatgttattggttttgataaaaattatgtagttggttctaatatatttactggattaaacttatactattgtggggtaataggtttaataataactggactacttatatgggtaactgaatattatactggtacctcttatagacctgttaaaagtgttgcagcttcttcaactactggacatggaactaatgttattcaaggacttgctgtttcaatggaagcaacagctataccggctttaattattgttgctggaattctattgacaaattatattgctggtctttttggtattgctattgcagttacaacaatgctcgcattagcaggaatggtagttgctcttgatgcttatggaccagttactgataatgctggtggaattgctgaaatgtcaaatttacctaaaaatgttagaaaaacaacagatgcattggatgccgtaggaaatactacaaaagctgtaactaaaggttatgctataggttcagctggattaggtgcacttgttttatttgctgcttataccgaagatattaaacatttttctaaagttgcaggatcaaaattagagggcatagtagtgacttttgatttatcagatccttttgtagtcgttggattattaattggtggaatgttgccttatctttttggttctatgggtatgcaagctgttggtagggcaggtggagcggttg

SEQ ID NO: 267453 - DNA, 771 bp, Unknown
  Bacterial polypeptide expressing nucleotide sequence isolated from the Sargasso Sea
tttgctctaatatggatagtttttgatttagcatcaggtattggttttttaattggggcatttttttctggtgctgctggttacgttggtatgaatatctcagtaagatctaatgtcagaacaactcatgcagctagtaaaagtcttgcacaaggcttatcggtgtcttttaaagctggggctgtaactggtatgttagttgccggttttgcacttctttcaattgcaattttctattttgtcttgcacaactctgggtcattcccaggtagagagattgtagctcctttagtatcactaggatttggagcatcattaatttcaatttttgcaagacttggtggaggcattttcactaagggagctgatgttggagcagatttagttggtaaagtagaagctggtattccagaagatgatccaagaaatcctgcagttattgcagataatgttggtgacaacgtcggtgactgcgcaggaatggctgcagatcttttcgaaacttacgtcgtaactgttgtagcaacaatggttttagcttctatattttttatagagaactcctatacaatgatgatttttcctctagctattgcaggtgtttgtgcattaacaagtataattgggacatattttgttaggcttggaaaaaataataatattatggctgctctttatagaggatttgcagtttcagctatcttatctgctattttattatattttgtcactgattatatagttggattagataatgttttagttgttgaa

SEQ ID NO: 267454 - DNA, 345 bp, Unknown
  Bacterial polypeptide expressing nucleotide sequence isolated from the Sargasso Sea
aatgctgccagttcttctctccaatagttttgtatataataattcttattattggaggcaaagaagccgctttatcagcacttggtgcaatgttattaggagtaattgtgactggattatttgttgcaatctcgatgacagcaggtggtggagcctgggacaatgcaaaaaaatatattgaagatggaaattttggaggcaaaggatcagaagctcacaaagctgctgtaacaggagatacagtcggcgacccatacaaagatactgcgggaccagctgttaacccaatgataaagataacaaacattgtagcacttttacttttatctgttattgcgcactaaa

SEQ ID NO: 267455 - DNA, 898 bp, Unknown
  Bacterial polypeptide expressing nucleotide sequence isolated from the Sargasso Sea
gtgcaaagcatatttagcaagacaatacaaaactattgctattgttggtgctgtagttttagtaattgttagtattgcatttagtccactagtaggtcttggttatttaattggtgctgctctatcaggtattgcagggtacgttggtatgttagtttctgtagaagctaacgtaagaacagcagaggcatctagaaaaggcttagctcaaggtctatccgttgcatttaaatcaggtgctgtaactggaatgttggttgctggtttggcgctattatctatagctgtttattattatatattattgaaatctaatgttgatgaaagagaaattgtaaatgctttagttgcattaggttttggtgcttccttaatttctatctttgcaagattaggtggtggaatttttacaaaaggtgcagatgttggtgctgatttagttggaaaagttgaggctggaattccagaagatgatcctagaaaccctgctgtaattgcagataacgttggtgataacgtaggagattgtgctggtatggcagctgatttgtttgaaacttatgcagttacaattgttgcaacaatggtattatcttcaattttctttgttggtgatcttaatatgatgatctaccctttatctattggtgcagcatgtttgttaacatctattattggaacatttttcgttaaacttggaaaaagtaataacgttatgaatgctttgtataaaggatttgttgtttctgcagtagcttctttgataatattatggcctgtcacagatcacgtaattggttttacaaatgaatatacagtaaataataaaatttttaatggaatggatctatattattgtggtgtaataggcctagttatcactgggttattaatctgg

SEQ ID NO: 267456 - DNA, 565 bp, Unknown
  Bacterial polypeptide expressing nucleotide sequence isolated from the Sargasso Sea
tccatatgttgttgtaggtctattaattggtggtatgttaccatatttatttggatctatgggaatgcaggctgtaggtagagcaggtggtgctgttgttatagaagttaggagacaattcaaaaaatatccaggaataatgaaaaagaaacaaaaacctgattatgctaaattggttgatttattaactgtagcagcaatcaaagaaatgatcattccatctttattacctgttttgtctccaatagttttatattttataatttttgcaattggtggccaagtagctgctttagcttctgttggtgcaatgctacttggtgtaattataacaggtctatttgttgctgtctcaatgacagccggaggtggagcttgggataatgctaaaaagtatatcgaagacggaaaccatggtggaaaaggctctgaagcccataaagcagcagtaacaggtgatactgttggtgatccctataaagacactgcaggcccagctgttaatccaatgattaagattacaaatattgttgctcttatgttgttggcagtaatagcaggttaa

SEQ ID NO: 267457 - DNA, 837 bp, Unknown
  Bacterial polypeptide expressing nucleotide sequence isolated from the Sargasso Sea
ttcagagttggtggtggtatctatacaaaaagtgcagatgtaggagctgacttagtaggtaaagtagaagcaggcatacctgaagatgatccaagaaatcctggagttattgcagataatgtgggtgataacgtaggtgacattgctgggatgggatctgatatctttgaatcttattgtggctctatggttgcatgtatagctatagcttcaacattcacaatattagacagagaaggcatgatgtttttgccattagctcttgcgtcgataggactaatttcctctgttctaggcatcattattgtaaggttattctctagctcttctcctgctttagccatgaggattggtacaattgcagcacctattatttttgtaatagcagcttattttgtgattaatctcctagtacaagagacaggaacaaatatttggttagcagtggtatgtggttcagcaggagggatagcaatagggctaattactgagtactacactggatccacacctatagtaaaaattgcagagtcaggtcagaccggaccagcaacagttatgatcacaggattatcggtaggaatgcaatctgtagtggctccaatagcttgtttagccttaatcattttcatttctacacaacttactggactatatggagtcggtattgcagctgtaggtatgttgtcaacagtggggataactatggctatagatgcttatgggcctgtagctgacaatgcaggtggaattgcagaaatggctggtatgccatctgaaacaagagaaatcactgatgaactagatgaacaagggaatacgacagctgcaattggt

SEQ ID NO: 267458 - DNA, 919 bp, Unknown
  Bacterial polypeptide expressing nucleotide sequence isolated from the Sargasso Sea
ctatgatggtgcgatggctttcctttgggcagaataccggttactatccggtttcattgttatcgtggcaatagcacttctccttgggggggaggaaaatggtctcggtatggagaccatgatcgcattcatcataggggcgctctgcagcgtggctgcaggattctctggaatgcgctctgcaactagcgcaaatggccgaactgcacaggctgctgctgatggtggccaatcagccgcactaaccacatcatacaatgggggtgcagtgatgggtctggcagttggaggattggggctagccggaatctcactgatgtactacctaactcaaaccgagttcctgacagtggaaaacattgctggattcggaatgggggcctcttcgatagcacttttcgctagagttgggggcggcatctacaccaaggctgcagacgttggtgcggatcttgtcggcaaggttgaggcgggaattcccgaggatgacccaaggaaccctggcgttattgcggacaacgtcggagataacgtcggagacgttgcgggaatgggagctgatatcttcgaatcattcgtaggtagcattatcgcagcaatggtaattgcagctgcaatggataatgccgatgtttcagcggactacctgatgattccaatcgtactggctgtggtcgggtacatcgcttcgattattggagtattctccattactgcgatgcagaatatggatcctggagcagcactaaggaataccacattcatagccgctgcacttttcatcggtggaggctacttagtcctagaatatctcgatctgccaacaacagtaatccaagccgtcgccataggctctctagttggaattctaattggactagttactgagtactacaccggaattgaagatgtattcttc

SEQ ID NO: 267459 - DNA, 646 bp, Unknown
  Bacterial polypeptide expressing nucleotide sequence isolated from the Sargasso Sea
tatactgaagatcttgatcattttgcaaaagatcccagtagtcccttatatggaatagaagtttcatttgatttatcaaatccctatgtagttgttggactactcttaggtggtttattacctttcttgtttggagctttaagtatgacagcagttggacgagctgctggatcagttgtattagaagtaagaaggcaatttaaagaaatcccaggtattatggaaggtaaaggtaaacctgaatatggtacttgtgtagacattcttacaaagtcagcaataaaagaaatgattgtaccatctatgttgccagtactatcaccgattgttgtatattttgttattttaattattgcaggtcaatcagcagctctatcttgtctgggcgcattattacttggagtaattataacagggttatttgtagcaataagtatgactgctgggggcggtgcttgggataacgcaaaaaaatatattgaagatggtaatcatggaggaaagggtagtgaggctcataaagcagcagtaacaggagataccgttggtgatccatacaaagatacagcaggccctgcagtaaatccaatgataaaaattacaaatattgtagctttattactcttagcagcaatatctttataaa

SEQ ID NO: 267460 - DNA, 901 bp, Unknown
  Bacterial polypeptide expressing nucleotide sequence isolated from the Sargasso Sea
ttaaattcaatttttgctagactaggtggaggaatttttacaaaaggtgcagatgttggtgcagatttagttggaaaggtagaagccggtataccagaagatgaccctcgtaatcctgcagttatagcagataatgtaggcgacaacgtcggtgattgcgcaggaatggcagctgatttatttgaaacttatgcggtaacaattgttgctactatggttttagcatcgatattttttcctgactcatccaatatgatggtttatcctttagcaataggtggttcttgtataatcacttcaataatagggacatggtttgttagattgggtaaaagtaaaaatattatgggtgctttatataaaggttttattgcgacggctatactctccttattaattctatatcctctaacaaacgctactttaggattaaacgaaacttattcttattcaaacataactttttcgggttttgatctatatatatgtgcagtaattggattaataattacaggtttgataatttggattacagaatattatactggaactaattttagaccagttaaaagtgttgctcaatcgtctactactggacatggaacaaatgtaattcaaggactagctatttctatggaggccacagctatacctgctttaattatagtcgtaggtattataagtacttttaagtttgcaggactttttggaatagcaatagcagttacttcgatgttagccttaactggtatggttgttgctttagatgcttacggcccagttacagataatgctggtggtattgcagaaatgtcgaaacttccgaaaaatgttagaaaaacaactgatgctttagatgcagttggaaacacaacaaaagcagtcactaaaggttatgcga

SEQ ID NO: 267461 - DNA, 889 bp, Unknown
  Bacterial polypeptide expressing nucleotide sequence isolated from the Sargasso Sea
ggtttttttacaggtaaaaacattttaagttctagtgctggtaatcataagatgcaggagattgcttcagcgattcaagtaggggctaaggcctacttaaatagacaatataaaacaattgcagtagtaggtatagttgttctaattataattagtttttcatttagtattttggttggaataggttatttaattggagctgcattatctggtatagctggatatgtaggtatgttagtatcagttcaagcaaatgttagaactgctgaagcatcaagaaaaggtttatcgcaaggtcttgcaattgcatttaaatctggagctgtaacaggtatgttagttgctggtttggctcttttatcaattgctgtatattattatttattattatcttttggtgttgaagaaagagaaattgtaaacgctttagttgcgttaggttttggtgcttcattaatttcaatttttgcaagacttggtggtggaatttttaccaaaggtgcagacgttggtgcagatttagttggtaaagtagaggccggcattccagaagatgacccaagaaatcctgctgtaattgctgataacgtaggcgataatgtaggagattgtgcaggtatggcagctgatttatttgaaacttatgcagttacaatagttgcaactatggttttatcatcaatatttttccatggtgatcttaacatgatggtttaccctttatcaattggtggagcttgtatattaacctctattattggaacattttttgttaaattaggaaaatcaaagaatattatggctgcattatacaaaggttttattgttactgctgtaacctcgttaataattttatatcctaattaccagattatgttttgggattaga

SEQ ID NO: 267462 - DNA, 330 bp, Unknown
  Bacterial polypeptide expressing nucleotide sequence isolated from the Sargasso Sea
tttcacccattgtcttatatatgtttattttaccaattggcggaaaggaagctgcattatcagctgtaggtgcaatgttactaggagttattattacaggtttatttgttgctatatcaatgacggcaggtggtggtgcatgggacaatgcaaaaaaatatattgaagacggaaattttggtggtaaaggatcagaagcacataaagctgctgtaaccggcgatactgttggcgatccatataaagacacagcgggaccagcagttaatcctatgataaaaattactaatattgttgcattattattgttagcagtaattgctggataga

SEQ ID NO: 267463 - DNA, 397 bp, Unknown
  Bacterial polypeptide expressing nucleotide sequence isolated from the Sargasso Sea
ggaatacgcaaagtgtgtggagatctccactcagtctgctatccgtgaaatgatggctccgggcctgctggcgatcatcacgccggtagtcgtgggctacttcttcggcgcggaaaccctgggcggcctgctggctggcgttacggtttctggtgttctgatggcgatcttccagtctaacgctggtggtgcctgggacaacgccaagaagatgttcgaaggtggcgtgaccatcgacggtgttgaatacaagaaaggcaccgacgctcacaaagcggctgttaccggcgataccgttggtgatccgctgaaagacacctcaggtccttcgatcaacatcctgatcaaactgatgagcgttgtagctctggttgtatacccgctgatcagcggctga

SEQ ID NO: 267464 - DNA, 667 bp, Unknown
  Bacterial polypeptide expressing nucleotide sequence isolated from the Sargasso Sea
tttgcagcttatacttcagatttaaactatttcagcagtaatccttcacagtttccatattttgcgggtgttgaattaaatttctctctagaaaatccatatgtagttgttggattacttttaggaggtttattgccatatctttttggggcactttctatgacggctgtaggaagagctgcaggttcagttgttattgaagttaggagacaatttaaggaaattaagggtataatgacaggaaaaggaaagccagattatgctagagcagtagatttgttaacaaaagctgccattaaagaaatgattgtaccttctttgcttccagtcttagctccagttatattttattttgtaatattttatatcaccggaggtgataaatcggctgctttttctgccgttggagcaatgttgttaggtgttattgtaacgggtttatttgtagcgctttcaatgacagcaggaggaggagcatgggataatgcaaaaaaatatattgaagatggtaaccatggaggtaaaggctctgaagctcataaagcagctgtaactggagatacagtaggggatccttataaagataccgcgggaccagctgtaaatcctatgataaagataactaacatcgttgctttaatgttgttagctattttagctcattaat

SEQ ID NO: 267465 - DNA, 646 bp, Unknown
  Bacterial polypeptide expressing nucleotide sequence isolated from the Sargasso Sea
atggaagcatcagcattaaatatacttcagataattattttggcaggtctattatcaattgtttacggtttttttactggtaaaaacattttaagtgctagtgctggtaattctaaaatgcaagaaatagcgtctgctattcaaattggtgctaaagcatatctaaatagacaatataaaaccattgctgttgttggtgttgttgtattagttataattagttttgcctttagtattttagttggaataggttatttaattggtgctgctttgtcaggtatagcaggttatgttggtatgcttgtatcagttcaagctaatgtaagaactgctgaagcctcaagaaaaggattatctcaaggtcttgctatcgcttttaaatccggagcagtaactggtatgctggtggcaggtttagcacttttagcaattgctgtttattattatttgcttttatcttttggagttgatgaaagagaaattgttaatgcattagttgctttaggatttggagcttctttaatatcaatttttgcaagactaggtgggggaatttttacaaaaggagcagacgttggtgcagatttagtaggaaaagttgaagccggtattccggaagatgatccaagaaatccagcggttatag

SEQ ID NO: 267466 - DNA, 315 bp, Unknown
  Bacterial polypeptide expressing nucleotide sequence isolated from the Sargasso Sea
gattattccgtctttgttaccagttctgtccccaatagttttatatataattattttacctataggtggtcaagttgctgctttatcttcagtgggcgccatgttgttgggagttattataacaggtttgtttgttgccgtatccatgactgctggtggtggggcttgggataatgctaaaaagtatatagaagatggaaaatttggaggaaagggatctgaagcacataaagctgctgttactggtgatacagttggcgacccttataaagatactgctggaccagctgtaaatccaatgattaaaattacaaa

SEQ ID NO: 267467 - DNA, 814 bp, Unknown
  Bacterial polypeptide expressing nucleotide sequence isolated from the Sargasso Sea
gttcatgataaacatttttcaggaatgtctctatttatttgtggaattttaggattgataattactggattaattatttgggtaacagaatactatactggtacaaattatagaccagtccaaagtattgctcaagcttcaacaactggtcatggaacaaatgttattcagggtcttgctattagtctcgaatctacagctttacctgctattataattgttgcagggataatattaactcattctattgcaggtctttttggtatagcaattgcagttacaactatgttagcacttgcaggtatggttgtagctttggatgcctatggtcctgttactgataatgctggcggtattgctgaaatggctaatttagatgataatgttagaaagacaactgatgctcttgatgctgttggtaatacaacaaaagctgttacaaaaggttatgctattggctctgctggacttggtgcattagttttatttgctgcatatactgaagatttagaacattttgcttcagatccaaatgcctctttatatggagtagaagtttctttcgatttatcaaatccctatgttgttgttgggctgttattaggaggtttattgccattcttatttggagctttaagtatgactgctgttggaagagctgctggatctgttgttctagaagtaagaagacaattcaaagaaataccaggtattatgaagggtgaaagcaaacctgaatatggtacgtgtgttgatatacttactaaatctgcaataaaagaaatgataattccttcaatgcttcctgtattat

SEQ ID NO: 267468 - DNA, 739 bp, Unknown
  Bacterial polypeptide expressing nucleotide sequence isolated from the Sargasso Sea
atggatattatagcgatcacattggcgtgcggcgtatgcgcacttatatatggaatttgggcagggcaaagaatcttctctgcggatgcaggttcggataaaatgaaggaaatcgccgaagcaatacaagaaggagctacggcttacttgaatcggcagtactctaccataacaatggtcggtataatcgttgccataattttatttttcacgctcggtttatatgtatcttttggattcattctcggcgcaattctttctgggattgctggctatattggtatgaatgtatctgtgagagcaaatgtccgaaccacggaggctgcgaaaaccagcatcgaaagtgctctagatattgctttcaaatcaggtgcgataacgggtatgctggttgttggcctaggattgctaggagtggctggatatttttggtttttgtcggcaatgaacgttgatcagcgcttgttgattgagtcactcgttgccttatcatttggagcgtctctaatttctatctttgcaagattaggtggcgggatcttcactaaaggcgcagatgttggagcggatttagttggcaaagtagaagcaggtatccccgaagatgatcccagaaaccccgcggtcatagctgacaatgtgggtgacaacgtgggagattgtgcgggaatggcggccgacttatttgaaacttatggtgttacgattgttgcaaccaatgttaattgcctcgatatcg

SEQ ID NO: 267469 - DNA, 853 bp, Unknown
  Bacterial polypeptide expressing nucleotide sequence isolated from the Sargasso Sea
tggtcacgggactaacgtgatacaaggtttagcaatttctatggaagctacggctattcctgctctaataattgtagttggaatcataagtacttataattttgcaggtttgtttggtatagcaatcgcagttacttcaatgttagctttaactggtatggtcgttgctcttgatgcatacggaccggttacagataatgctggtggaatagctgaaatgtctaaacttccaaaaaatgtacgaaaaacaactgatgcattagatgcagtagggaatacaacaaaagccgtaactaaaggatacgctattggttctgcaggcttaggtgcattagttttatttgcggcatacactgaggatataaaatactactcaatggacaaaacttcttcattatatcaaacagaagttagttttgatttatctaatccttatgttgttataggtttattaattggcggtttattaccatatctatttggatcaatgggtatgcaagctgttggaagagccggaggcgctgtagttatagaagtgagaagacagtttaaaaaaattcctggaattatgaaaggaaaaagaaaaccagattatggaagattagtagatttgcttactaaagcagcaattaaagaaatgattgttccatctctacttccagttttatctccaatagttctttatattataattttatttattgcaggaaaagttgcggctttagcagccttgggagcaatgttactaggagttatagtcacaggattgtttgtagcaatttcaatgacagctggtggcggagcatgggacaatgcaaaaaaatatatagaagatggaaattttggtggtaaa

SEQ ID NO: 267470 - DNA, 370 bp, Unknown
  Bacterial polypeptide expressing nucleotide sequence isolated from the Sargasso Sea
agcaattaaagaaatggtaatcccatcattattgccagttttatcgccaattgttttatatttaattattttgccaattggaggtcaagttgcagcattatcatccgttggagcaatgctgctaggagtaataattactggattatttgttgcagtttcaatgacagcaggtggtggcgcatgggataatgcaaaaaaatatattgaggatggtaaatttggtggtaaaggatcagaggcacataaagcagctgttacaggtgatacagtaggagatccatacaaagatacagcaggaccagcagttaatcctatgataaaaataacaaatattgtagcattattgcttttagctgttattgcaggataa

SEQ ID NO: 267471 - DNA, 736 bp, Unknown
  Bacterial polypeptide expressing nucleotide sequence isolated from the Sargasso Sea
attagcatgaagttttttggcgaaaacaatggagatcctattgcaattgaaagaataagagttttttattctgtattaattggattagctgttggaggattaattgctatgttaacggaatattatactgcaatgggtaaaaaaccagttatggggattattaaaaactcttctactggtgcagctactaatattattgctggtctttcattgggaatgatgtcaacatttgcaccaatcattctttttgctggtgcaatttggggagcttatgcatgtgcaggtttttacggagttgctattgcagcatctgctatgatggctacaacagcaatgcaattagccattgatgcttttggacctattgccgataatgctggtggaattgctgaaatgtctgaattagagcccgaggttagggaaagaacagatatattggatgccgtaggtaatactacagctgctgtaggtaaaggttttgccattgcttctgcagctttaaccgcgctagctctttttgcagcctatgtcacttttactggaattgaggggattaatatttttaaagcaaaagtattggctgcactatttataggaggcatgattccagtagtgttttcagcaatggctatgagctctgttggtaaagcagctatggcaatggttaaagaagtaagacgacagtttaaagaaatccctgggatcatggaaagtaaagcagagcctgagtacgata

SEQ ID NO: 267472 - DNA, 952 bp, Unknown
  Bacterial polypeptide expressing nucleotide sequence isolated from the Sargasso Sea
tcaatgacggggccagcaacgaatattatagctggtttaggtgttgggatggagtcaacagcgataccaattatcattatatctgtcagtataatgggagcatattattttgctggtttatatgggattgcaatggctgcattggggatgctagcaaatacaggaattcaattagcagtagatgcatatggtcctatttcagataatgctggtggcatcgcggagatggccgaacttccaagtgaggtccgcgagagaacagataagcttgatgctgttggtaatacaacagctgccattgggaagggctttgcaataggatctgcagctttaacagccctagctctatttgctgcttatatggttaaaactgggatttcaactattgatatatcaaatccaatggttatggctgggttatttattggtggtatgttaccattcctattttcatcaatggctatgggcgcagttggtcgagcggctatggctatgattgaggaagtcaggagacagtttagagaaattcctgaactaaaaaaggcattagaaattatgaaccttaaagataaaaatgattggaatgatgaagatcatagaatatacactaatgcattgggtaaggctgagcatggtcgctgcgttgaaatttcaactgaatctgcaattaaagaaatgatagttccaggtcttttagccgttattactccagttttaattgggtttgtaccacggttttttggaagcgaccaggggcctgaaatattaggaggtcttcttgctggtgtaacagtaacaggggtgctaatggctattttccaatcaaactctggtggggcatgggacaatgcaaaaaaaatgatagaagagggcattgttatcaatagtcaagaactcaaaaaaggttcagaagctcataaagctgccgttgttggagatacagtaggtgacc

SEQ ID NO: 267473 - DNA, 280 bp, Unknown
  Bacterial polypeptide expressing nucleotide sequence isolated from the Sargasso Sea
tggtggagtcctagctggagttacggtttcaggagtcctgatggcaatttttcaatctaatgctggtggtgcttgggataatgcaaaaaaaatggttgaagagggaattacagtaaatggtgaggttttacaaaaaggatctgaaacacataaagccgccgtagttggtgatactgttggagatccttttaaggatacatctggcccatcattgaatattttaattaaactgatgtcagtggtatcgctggtcatcgcaccgctaatagcgatagcgtaa

SEQ ID NO: 267474 - DNA, 494 bp, Unknown
  Bacterial polypeptide expressing nucleotide sequence isolated from the Sargasso Sea
cgttggaagagcaggaggtgcagttgtagtagaagttagaagacaatttaaaaaaatcccaggtattatgaaaagaaaagcaaaacctgattatggtaaattagtagatttattaactaaagctgcaattaaagaaatgatagtcccatctttactacctgtattatcaccaatagttttatatttatttatcttacctattggtggtcaagttgctgcattatcttctgttggagcaatgttattaggtgtaattattaccggattatttgttgcaatttcaatgacagcaggtggtggcgcatgggataatgctaaaaaatatattgaagatggcaattttggtggcaaaggatccgaagctcataaagccgctgttacaggtgacacagttggcgacccatataaagatacagcaggtccagctgtaaacccgatgatcaaaattacaaatatagttgcattgttacttttagctgtaattgctggataaa

SEQ ID NO: 267475 - DNA, 827 bp, Unknown
  Bacterial polypeptide expressing nucleotide sequence isolated from the Sargasso Sea
ctcattgatttttatttatccagtaactcaaatagtattaggcgacatgtcaaaagaatttacttttggtgatacgacgttttctggaacttctctctatatttgttcaataattggaattgtaattacaggacttcttatttggataactgaatattatacaggaacaaattatagacccgttcaaagtgttgcaaaagcatctacaactggtcatggaacaaatgtaattcaaggactagcggtttctatggaggcaacagcacttccagcattagttattgtaattggtatcgtaatgacatttcagttggctggtttgtttggaatagcaattgccgtgactgcaatgcttgcactagctggaatggtcgttgcgcttgatgcatatggtcctgtcacagataatgctggcggtatagcagaaatgtcaaatttagatgaaaatgttagaaaaactacagatgcgcttgatgcagttggaaatactacaaaagcagttacaaagggctatgcaattggctcagcagggttaggtgcgcttgttttgtttgcagcgtatgtggaagatttaaaattagttgaatacttaacacctgattttagtctggaaaatccatatgttgttgtcggattattaattggtgggctattaccatatttgtttgcatcaatgggaatgatggctgtaggtagagcaggtggcgcagtagttgaagaagttagaaaacaatttgctgataatcctggtatcatgacgggagactcaaaacctgattattctcgatcagttgatatgctcactcgttcagcaattaaagagatga

SEQ ID NO: 267476 - DNA, 659 bp, Unknown
  Bacterial polypeptide expressing nucleotide sequence isolated from the Sargasso Sea
cgtagttggcgctgcctgttcttcgttagcaggatttattggaatgtatgcagcgactaaagcaaatgtcagaactgcaactgcagctcaacaagatggtgcagccgcagcattaagtgtttctttttatggtggttcggtcatgggattatgtgttgcctctcttggtctaattggcctagggggcctcttctatttctttagcgaatctcatgttcatgctcttgaaggatttggaatgggcgcatcagtggtagccttattctctcgtgttggtgggggtatttttacaaagagtgccgatgttggagcggacttggtaggtaagattgaagcaggaattcctgaagatgatccaagaaatccaggagttattgcagataacgttggtgataatgttggtgatgtagctggaatggggtcagatatttttgaatcctattgtggatcaatgattgcctctattgctatagcctacactttgggctctaaggaaatgatgatgtttccattggctttaacttcaattggtttaatagcttctattattggaatcataatagttaaattgcaatctgctaaagcgcctgcaagtgccttacgttctgggactctattggcaccggcaatatttattgtaatggcatattttttaacaa

SEQ ID NO: 267477 - DNA, 829 bp, Unknown
  Bacterial polypeptide expressing nucleotide sequence isolated from the Sargasso Sea
atgactggtatttttaatcttattatagcagcaggactattagccatcctatatggttatatagtaggaaaacaaatactatccgccagtcctggaaattctaaaatgcgagatatagctggagctatacaagaaggggcaagagcttatttaaatcgacaatataaaactattagtatagtgggattcataattctaattgtaatcacatttattttaggagtgtgggttggattaggttattttattggagctttcttatctggggcggctggttatgtaggtatgctagtatcagtacaggcaaatgttagaacagccgaagcttctagaaagggtttatcagcaggtctaaacatagggtttaagtctggcgcaataactgggatgttagttgctggtttagcattgttatctatatcagtttattacctgttattactaaaattaaacgttgaaagtagagagataattaatgcattagttggtttaggttttggagcatctctaatatcaattttcgccagactaggtggaggtatattcacaaaaggagctgacgttggagctgatcttgttggaaaagttgaggcaggaattccggaagacgatccaagaaatcctgctgtaatagcagataatgttggagataatgttggtgattgtgcgggaatggccgctgatttatttgaaacttatgcggtcaccatagttgctacaatggttttatcatccatattttttatagataatttgaatatgatgttatacccgttatgtattggtgcttcatgcattttaacttctataataggaaccttttttgtaa

SEQ ID NO: 267478 - DNA, 273 bp, Unknown
  Bacterial polypeptide expressing nucleotide sequence isolated from the Sargasso Sea
tatcttgtttgggagcattattgcttggtgtaattataacaggattatttgtagcaataagtatgactgctggaggcggtgcctgggacaatgctaaaaaatatattgaagatggtaatcatggaggaaaaggtagtgaggctcataaagcggcagtaactggagacactgttggagatccttacaaagacactgcaggacctgcagttaatccaatgattaaaattacaaatatcgttgctcttttacttttagcagcaatatcattataaa

SEQ ID NO: 267479 - DNA, 703 bp, Unknown
  Bacterial polypeptide expressing nucleotide sequence isolated from the Sargasso Sea
aataatattttccggaatattagccgtgggctatagctatctattgtccggccaaattttatcttcaagtgctggaaatgaaaagatgagagatatagctggagcaattcaaattggtgcaaaggcctacttaaatagacaatataaaacgatagcaatagtaggtttaatagttttgattattgttacttatttctttaattttttagttggatttggatatttgattggggctacgttatcaggtattgcaggttatgttggtatgctaatctcagttcaagctaatgtaagaaccgcagaagcatctagaaaaagtttacaagcaggtttaagtattgcttttaaatcaggtgctattacgggcttattagttgcgggtttagctcttttatcaattgcgatttattatcttattttagtaaacctaaatactgatagtagagacattataaacgctttagtagcattgggtttcggtgcatcattaatttcaatctttgcgagattaggtggtggaatttttacaaaaggagctgacgttggagcagatttggttggcaaagttgaagctggtataccagaagatgatccacgtaatcctgctgttattgcagacaacgttggggacaacgttggtgattgcgctggaatggcagccgatttattcgaaacttatgcagtaacaatagttgcaaccatg

SEQ ID NO: 267480 - DNA, 601 bp, Unknown
  Bacterial polypeptide expressing nucleotide sequence isolated from the Sargasso Sea
atggctggacttttacttggtgcaatgttaccatttgttttttcccctctctcgatgaaggcagttggtaaagcagcaatgagtacgatagaagaagtaagaagacaatttacagatttaccaaaattgaaagctgcacttgaaataatgagaaagtatgattcagatttgtcaaaggcgtctaaagaagacttaaagatctttaatgatgctgacggtgttgcagagtatagtaaatgtgttgaaatttctacacaagcagcattaagagagatggtacttccaggcttaatggcaatatcagttccagttattattggatttgctggtggtgctgagatgcttggtgggctattagctggagttacatcatgtggtgttttaatggcaatttttcagtcaaatgctggtggtgcatgggataatgcaaaaaaaatgattgaagaagatggtaggaagggttctgaagctcataaagcagcagttgttggtgatactgttggtgatccctttaaagacacttctggtccatcactaaacattcttcttaaattaatagccgttgttgcccttgttattgcaccactacttgttggttaaa

SEQ ID NO: 267481 - DNA, 859 bp, Unknown
  Bacterial polypeptide expressing nucleotide sequence isolated from the Sargasso Sea
gctgttattgctgataatgttggtgataatgtaggtgactgtgcaggaatggctgctgatctttttgaaacatatgcagtcacaatcgtggctactatggttttagcatcaatattttttcccaacgataacggcatgatgatttatcctttagcaataggaggctcatgtattcttacatcaatagcaggcacatggtttgtaagattgggcaaaagtaagaatataatgggagctttatataaaggttttattgctacagcattactttctcttttaatcttatatccggttacaaaatctatcattagttttgaccaatcatacattgtaaataataaaagttttaatggttttgatttatatatttgtgctgttgcaggtcttgtaattacaggtttaattatttgggtgactgaatattatactggaacaaattacagaccagtcaaaagtgttgcaaactcatcaactactggacatggaacaaatgttattcaaggcttggctatttcaatggaagctacagcaattccagcgataattatagtggtaggaattctttttacaaataatcttgcaggactttacggaattgctatagcagttacatctatgttagctttaactggaatggttgttgctttggatgcctacggtcctgtcacagataatgctggtggtatagctgaaatgtctaaacttccaaaaaatgttagaaaaactactgatgcattagatgctgttggaaacactaccaaagcagtcacaaaaggatacgcgattggatctgcaggattaggagcacttgttctattcgctgcatatactgaggatataaagttttatgctaatgata

SEQ ID NO: 267482 - DNA, 904 bp, Unknown
  Bacterial polypeptide expressing nucleotide sequence isolated from the Sargasso Sea
tggtgaaatattgttaactaatcatattgctgttttatatggtatcgcaattgcagtaaccacaatgcttgcacttgctggtatggttgtagctttagatgcatatggacctgttactgataatgctggaggaattgctgaaatgtctaatctcccaaagaacgttagaaaaacgactgatgcattagatgcagttggaaatacaacaaaggcagtaacaaaaggttatgcgataggatcagctggacttggagctttagttttattcgctgcctatacagaagatattaagcatttttctaaagttgctggttcaaatttagagggtataatagtcacatttgatttatctaacccattcgttgttgttggtttattaattggtggaatgctcccatatttatttggatctatgggtatgcaagcagtaggtagagcaggtggtgctgtagttattgaagttagaagacagttcaaaaaaataccaggtattatgaagcgtaaagctaaaccagattatggtaaattagtggatctattaacgaaagctgctattaaggaaatgataattccatcattgctgccagttttatctcctatagttctttacataattatttattttattggtggacaagtagcagcattatcagctgttggtgcaatgctattaggagttattataacaggattatttgttgctgtttcgatgacagctggaggtggagcttgggataatgcaaaaaaatatatcgaagacggaaagtttggcggtaaaggatctgaagcacataaagctgcagtaacaggagatactgttggtgacccttataaagatacggcaggcccagctgtaaatcctatgattaaaattacaaatattgtggctctattgctactagct

SEQ ID NO: 267483 - DNA, 961 bp, Unknown
  Bacterial polypeptide expressing nucleotide sequence isolated from the Sargasso Sea
agaatgcaagaaatagctgaggcaatacaaataggagctaaggcatatttaaatagacaatataaaacaatcgcaattgttggttttattgttctagctatagttacttatttttttaattatttagttggaattggatattttattggtgcttttctatcaggtgttgctggctatgttggtatgcttatatctgttaaagcaaatgttagaactgctgaagcttcaagaacaagcttacaatcaggtttaacaattgcttttaaatctggagctataacaggtttgttagttgcgggtttagctttattagcaataactatttattatataatattaataaacctaaatgttgatagcagagaaatcataaacgctttagtagctttaggttttggagcttctttaatttctatttttgctagacttggtggtggaatttttacaaaaggagcggatgttggagcagatttagttggtaaagtagaagctggtatacctgaagatgacccaagaaatccagctgtaatagctgataatgtaggtgacaatgtaggagattgtgctggaatggctgctgatttatttgaaacctatgccgttactatagttgctactatggttttagcatcaatattttctccgcaagattataatttaatggtttatcctctggctattggtggagcttgcataattacatctataattggaacatggtttgtgaaacttggaaaaagtaaaaatataatgggcgctttatataaaggttttattgttacagcaattacctctttaattgttttatatcctgttactgaatctatagttggcttgaatagcacttacaataacaatgctggagcaatttttacaggctttaatctctatatttgtggtgtagttggatttgttattactggtttgttaatttgggtaacggaatactatacaaggaaca

SEQ ID NO: 267484 - DNA, 641 bp, Unknown
  Bacterial polypeptide expressing nucleotide sequence isolated from the Sargasso Sea
tgaagatattaaacatttctctaaagaagcaggttctgctcttgaaggaatagttgtaacttttgatttatcaaacccctatgttgttgttggtttattaattggaggaatgttaccttacttatttggttctatgggtatgcaagctgtaggaagagcaggtggtgctgtcgtagtggaagtaagaagacagtttaaaaaatttccaggaatcatgaaaagaaaacaaaaacctgattatgcaaaattagttgatttattaactgttgcagccattaaagaaatgataattccatcattattacctgttttatctcctgtagttttatattttataattctatcaattggtggtcaagtagctgctttagctgcagtcggtgcaatgcttttaggagttattataactggattgtttgtggcagtctctatgacagccggtggtggagcgtgggataatgctaaaaaatacattgaagatggaaatcatggaggaaaaggttcagaggctcacaaagctgctgtaactggagatactgttggagatccatataaagatactgcaggcccagctgttaatccaatgattaaaattacaaatattgtcgctttattattattagctgttatcgcttcataag

SEQ ID NO: 267485 - DNA, 958 bp, Unknown
  Bacterial polypeptide expressing nucleotide sequence isolated from the Sargasso Sea
tttgacttatatgtatcaattggtttcataattggagctgttctctctggcatcgctggttacataggtatgaatgtttccgtaagagcgaatgttagaacaacacaagctgcaacagaaggtttgcagtctgctttagatatagcttttaagtctggagctataactggcttattagtagttgggttaggtttgcttggcgttgcaggttactatgcttttttattatcagctaatgttgaaacaagaaaattaattgaagctttggtcgcgttatcctttggggcatctttaatttcgatttttgctcgtcttggcggtggtatttttactaaaggtgcagacgtaggtgcagacttagttggtaaagttgaagctggcattccagaagatgatccaagaaatcctgctgttattgctgataatgttggagataatgttggtgattgtgctggtatggcagctgatctatttgagacttatgctgttacaatcgttgctactatgctaataggaacaatttcgtttgctggtcaaacaaactatgtagaactccctttatttataggtggagtttgtataattgcatcaataattggtgctttttttgttaggttgggatcttctgagaatataatgggtgctctttataagggatttattgttacagcagttttgtctgcaatttttatttattttgctattgactatatgtttaacgattctgctaaaagtatgcctttattttggagctctattgttggtttagttgtaaccgctgcaattatttgggtgacagaatattatacatcgacggaatatagaccagtaaaatccattgctcaatcttcagagactggtcacggtacaaatgtgattcaaggcttagcaatttcaatggaagctactgcagttccagctataataatagctctaggtatagtattttcatttaatc

SEQ ID NO: 267486 - DNA, 898 bp, Unknown
  Bacterial polypeptide expressing nucleotide sequence isolated from the Sargasso Sea
ttacatgccaataatcatgtcagttttaggacttgcatatgtttttgtgagaagatcttgggtaatgaagcaggatgcgggagatggaaaaatgaaagaaatttctgatcatatttatgaaggtgcattagcctttttaaatgctgaatatcgtttattatcagtatttgttattgttgtaagtgcagttctagcaggtatttcattcattgtgccaacaacgcatatcttaattgttgtttcatttatttttggagcatttttctcagcatacgcaggaaatataggtatgaaaattgcaaccaaaacaaatgtaagaactactcaagctgctaagacttctttaccaaatgcacttaaaatttcatttgctggtggtactgtaatggggttaggagttgcaggtttagctgtcctaggtctaacagctttttttataatattttttaaccattttatgggtggagtttgggctgctactgattatggttctgcaagtgataccatgactatagttcttgaaacgcttgctggattttcattgggggcagaatcaattgctctatttgcaagagttggtggtggaatttatacaaaagctgccgatgttggtgccgacttagttggaaaggttgaagctggtattccagaagatgaccctagaaatcctgcaacgattgccgataatgtaggagacaatgtaggagatgttgctggtatgggagctgatttatttggatcatatgtagcaacagtattggctgcgatggtacttggaaattatgttattacagacatgggaggttcaatcaatgatgcttttggaggaattggaccaatcttattgccaatggcaattgctggtttaggcattataatctcactaatagggacatta

SEQ ID NO: 267487 - DNA, 817 bp, Unknown
  Bacterial polypeptide expressing nucleotide sequence isolated from the Sargasso Sea
aatgtaattcaaggtttagctgtttctttagaagccactgcattgccagcattaattattgtattgggaatattatttacaaatcatattgcaggtttatttggaatagcaatatcagtaacaacaatgttagcgctagcaggcatggtcgttgcgttagatgcttatggtcctgtcactgataatgcgggaggaatagcagaaatgtctaatcttcctaaaagtgtaagaaaaacaaccgatgctcttgatgcagtaggaaatactacaaaagctgtaaccaaaggatatgctatagggtcagcaggattaggggccctagttctatttgctgcatatacagaagatattaaattcttttctaagatgagcggatcatctctagaaaatgtttcagtaagttttgatctttcaaacccgtttgtagttgtaggattattaataggcggaatgttaccctatttatttagctcaatgtcgatgcaagcagttggtagagcgggtggagctgttgttattgaagtaagaagacaatttaaaaaaatacccggtattatgaaacgtaaaagaaaacctgattatggtaaacttgtagatttattaaccaaagcagccattaaagaaatggtaataccatcattacttcctgttttgtcacctttgattttatattttataatttcattagttgctggaactgaagctgctttgtcctcagttggagctatgcttttgggagttattataacaggtctctttgttgctatatcaatgaccgctggtggtggcgcttgggataatgctaaaaaatttatag

SEQ ID NO: 267488 - DNA, 922 bp, Unknown
  Bacterial polypeptide expressing nucleotide sequence isolated from the Sargasso Sea
gaagatgatcctagaaacccagcagtaatagcagataatgttgtgataaatgttggagattgtgcaggtatggcagcagatttgtttgagacatatgcagtaacaattgtagcaactatggttttatcttctattttttttcacggagatcttaatatgatggtttatcctttatccattggtggtgcttgtatattaacatcaataattggaacattttttgtaaaattaggtaaatccaaaaatattatggccgcattatacaaaggttttattgtaacagctgtaacatcattaataattttatatccaataactgattatgttttaggtttagataataattattcaatttcaaacaaatcatttacaggaatgagtttatatgtttgtggcgtcataggtttgattataactggtttattaatttgggttactgaatattacacaggtactaattatagacctgttaaaagtgttgcatcatcttccacaacaggtcatggaacaaacgttattcaaggcttagctgtatcaatggaagctacagcaatccctgcattaattattgttggaggtattctgttaacaaattatattgctggactttttggtatagcaatagctgtaaccactatgctagctttagcaggcatggtagttgctctagatgcttatggtccagtaactgacaatgcaggtggtatagctgaaatgtcaaatttacctaaaaatgtcagaaaaactaccgatgcacttgatgccgttggcaatacaactaaagcagtgaccaaaggatacgcaattggatcagctggtttaggagctttagttttatttgcagcttatacagaggatattaaacatttttctaaagttgccggatccaaattagaaggtattgttgttacatttgatttat

SEQ ID NO: 267489 - DNA, 706 bp, Unknown
  Bacterial polypeptide expressing nucleotide sequence isolated from the Sargasso Sea
acaagctggattgaaaagcaggatcagggcacgaagaaaatggtagtaattggctccagtatagctgatggtgcgatggcgtttctaagggcagaatatcgagtcctttcagtttttgttatcgctgttgctattattttaggagttgcaaataaaaacaacccagaatcaagtgtgttcattgcattttctttcttaattggtgcagtggcgtctggcttagctgggttccttggtatgagggttgcaaccaaatcaaataacaggaccactaatgctgcacgagataatctagaaaaagctcttaatgttgcattcagcggcggttctgtaatgggtttgagcgttgttgggttaggcgtattaggattaggggggctgtttctactttacactaatatgtatggttctgattttcaaagtataggcacggttttgaatgttttatctggtttttcactcggagcctcctccatagctttatttgcccgtgttggtggtggtatttatacaaaagcagcagatgtgggtgcagatcttgttggtaaggttgaagcagggattccagaagatcatccattgaatccggccactattgctgacaatgttggagacaatgttggagatgttgcagggatgggtgcagatctttttgaatcttacgttggttcaatcatcggctcaatggtattgggtgctagcattc

SEQ ID NO: 267490 - DNA, 624 bp, Unknown
  Bacterial polypeptide expressing nucleotide sequence isolated from the Sargasso Sea
tatttgttggtggtatgttaccatttctattttcctcgatggccatgagtgctgtcggtagagcagccatggctatgattgaggaagttagaagacaattcagggaaatccctgagttaaaaaaggcactagaattaatgaatcttaaagataaaaaagattggagtgaccaagatcataggatgtataatgatgcaatgggaaaggctgagcatggtcgctgtgtcgaaatttctactgaatcagcaattaaagaaatgataatccctggccttttagcagttatcactccagttttaattggtttcggaccaaggttttttgggagcgatcaaggtcctgaaatactaggaggtcttcttgccggtgtaacggtgacaggagtgcttatggctattttccagtcaaattctggaggagcttgggataacgcaaagaaaatgattgaagaaggtatagtgattaatagccaagaattgaaaaaaggatcggaggctcataaagctgctgttgtaggtgatacagttggtgacccgttcaaggacacatcaggaccgtcattaaatattttgattaagttaatgtcagtggtgtcattagttattgcaccattaattaaatagg

SEQ ID NO: 267491 - DNA, 550 bp, Unknown
  Bacterial polypeptide expressing nucleotide sequence isolated from the Sargasso Sea
ggattattaattggtggaatgttaccttatctttttggttcaatgggaatgcaagcagttggtagagcaggtggtgctgtagttgtagaagttagaagacagtttaaaaaatttccaggcattatgaaaagaaaacaaaaacctgattatgctaagttagtagatttacttactgttgctgcaatcaaagaaatgatcgtaccatcattgctaccagttttatcaccagtagtattatattttataattttatcaattggtggacaagtagctgctttagcggcggttggtgctatgttgctcggagttataattacaggattatttgtagctgtttcaatgaccgcaggtggtggagcatgggataatgcaaaaaaatatattgaagatggtaatcatggtggaaaaggttctgaagctcataaagctgcagtaactggtgatactgttggtgatccttacaaagacacagctggacctgcagtaaacccaatgattaaaattactaatatagtagctttacttcttctagctgttatcgctggttaat

SEQ ID NO: 267492 - DNA, 836 bp, Unknown
  Bacterial polypeptide expressing nucleotide sequence isolated from the Sargasso Sea
aatgtcactttttatatgtggtttactaggtctgattattacaggcttaatcatatgggtaactgaatactatacaggtacaaattacagaccagttcaaagtattgctcaatcatctactactggccatggaactaatgtaatacaaggtcttgcaataagtttggaagcaactgctttgccagctttaattattgtggctggtattatatccacttattcactagctggtttatttggtattgccattgctgttaccactatgttagctttagctggtatggttgttgcactagacgcttacggacctgtaacggacaatgcagggggtattgcagaaatgtcaaacctagatgaaaatgtaagaaagacaactgatgcacttgatgcagttggaaatacaactaaagctgtaaccaaaggttatgcaataggatcagcaggattaggagcgttagttctatttgctgcttatactgaggatcttgatcattttgccaaagattcaagtagtcctttatatggaatagaagtttcttttgatttatccaatccttatgtagttgttggtttattattaggaggattattacctttcttatttggtgctttaagcatgactgcagttggtagagcagctggctcagtagttttagaagtaagaagacagtttaaagaaattcctggtattatggaaggtaagggtaagccagaatatggtacgtgtgttgatatacttactaagtctgcaattaaagagatgattataccatcaatgttacccgtattatcacccattgttgtctatttcgttatattatttattgctggtcaag

SEQ ID NO: 267493 - DNA, 919 bp, Unknown
  Bacterial polypeptide expressing nucleotide sequence isolated from the Sargasso Sea
atagctggtgatggtacgaatgtcattcaagggcttgcaatttcaatggagtctacagctttgccagtattattaatctctgcttctataattgctgcattttctcaagcaggtttatttggaattgcaattgctgcaactacaatgcttgctcttgcaggaatggtagtagcattagatgcttatggacctgtcaccgataatgcgggaggtattgctgaaatgtctgaccttcctgaaaatgtcaggaatataacagatactttagatgctgttggtaatacaactaaagcagtaactaaggggtatgctattggctctgctggacttgctgcacttgttctatttgctgcatatacttctgatctagatcattattttccaaatttaacaggtttagaattttctcttaaggatccatatgttgttattggtttatttgttggaggaatgcttccatacttatttggtgcattaggtatgcaagcagttggaagagctggccaggctgttgttctagaggtccaaagacagtttaaagaaaaaccaggtataatggagcgaaccgagaaacctgaatatggtgtcctagttgatatgttgacaaagtcagcaatcaaggaaatgattattccttctttacttccagtattagctcccattttactctattatgtagtttcactgacctcaggaggacctgcgcaaggctttattgcattgggtgctatgttgttaggtacaattgttacagggctttttgtagcaatatctatgacttctggaggaggtgcttgggataatgccaagaaatatatagaagatggacaactaaaagacgaagatgggaatgttcaaggtaagggaacagatgcacataaggcagctgttacaggagatacagtggagatccttataa

SEQ ID NO: 267494 - DNA, 646 bp, Unknown
  Bacterial polypeptide expressing nucleotide sequence isolated from the Sargasso Sea
taaaagtattttaagttcaagtgcaggtaatgctaaaatgcaagaaattgcatcagccatacaaattggtgcaaaagcatatttaaacagacaatataaaactattgcaattgtaggagttgtagttttagtaattgtgagtttttcttttagtattctggttggtttaggttatcttgtaggcgcaactctctcaggtattgcaggttatgtgggaatgttagtttctgttcaagcaaatgttcgaaccgcagaagcatcaagaaaaggtttagatagtggtttaaatgttgcattcaaatcaggagcagtgacaggtatgctagttgctggtttagccttattatcgattgcagtttattattatcttttattaaaatttggaattgatgagagggaaatagtgaatgctctggtggcactaggttttggcgcatctttaatttcaatttttgctagattaggtggaggcatattcacaaaaggtgctgacgttggtgcagatctagttggaaaagttgaggctggaatcccagaggatgatccgagaaatcctgctgttatagctgataatgtaggagacaatgtaggagattgtgcaggtatggcagctgacttattcgaaacatacgcggtaacgattgtt

SEQ ID NO: 267495 - DNA, 688 bp, Unknown
  Bacterial polypeptide expressing nucleotide sequence isolated from the Sargasso Sea
aatgccgtactcattaatttcagttattcttggtttgttaggtttgctttcagcttatttagtttatttgaaggtaaggtcttcctcagagggtgaagggcgtgttaaagaaatcggagatgagattcacctcggcgcaatggtctttatgtctgcagaatataaaagactagctgttttttgtctagtatgtattgctgccttatatttttcactaggatggcaaacttctatatcttttttacttggagcattatgctcaggtacagcgggttttataggtatgtactcagcaacaaaggctaacgttagaactgcagttgctgctaaagaaaaaggtgcctcagaagccttaaatattgctttttttggcggttctattatgggtttaacagttgccgcaatgggtttatttggtgtaggaattttgtttcattattttgcaggtgatatcaaaaccatccatgctattgagggttttgcaatgggtgcatcatcagtagcactgttttctagagtaggcggtggaatatttacaaagagtgctgatgttggtgcagacctagtaggtaaagttgaagcaggaattccagaagatgatcctcgaaatccaggtgttatagctgataatgttggagacaatattggagatgttgcgggaatgggttcagatatttttgaatcatat

SEQ ID NO: 267496 - DNA, 906 bp, Unknown
  Bacterial polypeptide expressing nucleotide sequence isolated from the Sargasso Sea
gctcaaggcctttctgttgcttttaaatcaggtgctgtaacaggtatgcttgttgctggcttagcattattgtcaatagctgtttattactatctattattaaaattaaatgttgatgaaagagaaattgttaatgctcttgttgcactaggtttcggtgcttctttaatttcaatttttgcaagattaggtggtggaattttcacaaaaggtgctgacgtaggtgctgatttagttggaaaagttgaggctggaataccggaggatgatccaagaaacccagcagttattgctgataacgttggagacaatgtgggtgattgtgcgggaatggctgctgatctatttgaaacttatgcagtgactatagttgctacgatggttttatcttctatcttctttgttggagatttaaacatgatgatttatcctttaagcattggtggtgcatgtatactaacttcaattcttggcaccttttttgtaaaacttggtaaagataaaaatgtgatgaatgctttatacaaaggtttcattgtatctgcagtagcatcattagtaattttatggcctgtgacagattatgtaataggttttacaaatgaatatacagtgaatggtaaaacttttaatggtatgaacttgtattattgtggagttgttggtttagttattacaggtttattaatttggataacggaatattatacaggaactaattatagaccagttaaatctgttgctttatcttcaactactggacatggaacaaacgtaattcagggtttagcagtatcaatggaagctacggcaattccagctctaattattgttgcaagtattcttattactaatgcagtcgcaggtttatttgggattgctatagccgtaacaactatgcttgca

SEQ ID NO: 267497 - DNA, 850 bp, Unknown
  Bacterial polypeptide expressing nucleotide sequence isolated from the Sargasso Sea
catggtacaaatgttattcaaggcttagctgtttcgatggaggccacagcacttccagcattgattattgttgccggaattttatacacaaatagtttagctggtttatacggcatagctatcgctgtaacagctatgctagctctcacaggtatggttgttgcgttagatgcttatggtccagtaactgataatgcaggaggtatagctgaaatgtctagacttccaaaaaatgtaagaaaaactacagatgcattagatgcagtaggaaacacaacaaaagcagttactaaaggttacgcaattggatctgcaggtttaggtgctttagttttattcgcagcatacactgaagatataaaatatttttctactgttaaagattctacattagaaggtgttaatgttacttttgatttatctaacccatttgtagtagcaggtttactaataggaggtatgcttccttatttatttggctctatgggaatgcaagctgttggcagagctggtggcgccgttgttattgaggtaagaagacaatttaaaaaaataccaggaatcatgaaaggaaaaagaaaacctgattatggtagacttgtagatttattaactaaagcagcgataaaagagatgataattccttcactattaccagttttatctccagtaattttatattttgtgatcttacaaataggaggtttagaagcagctctttcatctttaggtgcaatgcttttgggagtcataataactggtttgtttgtagcagtttctatgacagctggcggcggtgcttgggataatgcgaaaaaatatattgaagatggaaatttggaggcaaagg

SEQ ID NO: 267498 - DNA, 946 bp, Unknown
  Bacterial polypeptide expressing nucleotide sequence isolated from the Sargasso Sea
tggattgctggatatgtaggaatgctagtttctgtagaggcaaatgtacgtacagcagaagcatctagaaaaggcttagctcaaggcttatctgttgcttttaaatctggcgctgtaactggaatgttggttgctggtttagcattattagccatagctgtttattattatttacttttaaaatttaaaatagaagagagagaaattgtaaatgcattagtcgccttaggttttggagcatctttaatttctatttttgcaagattaggtggtggaatttttacaaaaggagctgacgttggagctgatttggtcggtaaagttgaagctggaattcctgaggatgatccaagaaatcctgctgttatagctgataatgttggtgataatgtgggtgattgtgctggtatggccgcagatttatttgaaacttatgcagtaacaattgttgcaactatggttttgtcttcgattttctttgttggagatttaaatatgatgatttaccctctaacaattggtgcagcatgcttgataacttcaataattggaacattttttgtaaagcttggaactaataataacgttatgaatgctttgtataaaggatttatagtttccgctgtagcctcattagcaattttgtggccagtcacagatcttgtcattggttttactaatgaatatacaataaatgacaaaacttttaatggaatggatttatactattgtggtgtcataggacttataataactggattattaatttggataactgaatattatacaggtacaaactatagacctgttaaatctgttgctttatcctctacaactggtcacggtactaatgttattcaaggattagctgtatctatggaagcaaccgctatacctgcattaataattgttgctggaattttgattacaaattttatagctggtc

SEQ ID NO: 267499 - DNA, 667 bp, Unknown
  Bacterial polypeptide expressing nucleotide sequence isolated from the Sargasso Sea
agcattagttctttttgcagcatatacagaggatataaaatttttctcaaaagtacctggatcttcacttgaaggaattaatgtaagttttgatttatcaaatccatttgtagttataggattattagttgggggtatgctaccttatttatttggatcaatgggtatgcaggctgttggaagagcaggaggtgctgttgttattgaagttagaagacaatttaaaaaaatacccggaattatgaaaggtaaaagaaaacctgattatggaaaattagtcgatttattaactaaagcagcaattaaagaaatgattttaccttctcttttaccagtgctttcaccaattgttttatatttaattatttatttaattggggggcaggaagctgcattatcatctgtaggagcaatgctattaggggtgatagtaactggattatttgttgcaatttcaatgaccgcaggtggcggagcttgggataatgcaaaaaaatttatcgaggacggaaactatggtggtaaagggtcagagtctcataaagctgctgttactggagatacagttggtgatccttataaagataccgcaggtcctgcagttaatccgatgattaaaattacaaatattgtagctttacttttattagcagtcattgcgcattaa

SEQ ID NO: 267500 - DNA, 335 bp, Unknown
  Bacterial polypeptide expressing nucleotide sequence isolated from the Sargasso Sea
ttatcacctattgtttttgtacattgtaatattacctataggaggacaagttgcagcattggcatctgtaggagcaatgttgctaggtgtaattattactggtttgtttgtggccatttcaatgactgcaggtggcggtgcatgggataacgcaaaaaaatatatcgaggatggtaattttggtggaaaaggttctgaagcacataaagctgctgtaacaggagatacagttggagatccatataaagatactgctggacctgccgttaatcctatgatcaaaataacaaatattgttgctttattattattagcagttattgctggctcttaat

SEQ ID NO: 267501 - DNA, 469 bp, Unknown
  Bacterial polypeptide expressing nucleotide sequence isolated from the Sargasso Sea
cttgaaaaatgaaaatgattgggatgaggatgaccgtaatctttatgaagatgcattaaaaaaagctgaacacggacgatgtgttgaaatttccacacaatctgcaattaaagaaatggtagcacctggagtattggctgttattacccctgtcattgtaggattcgcttttggacctcaaactcttggtggattattagcaggagttactgttagtggagttcttatggctatttttcaatcaaatgctgggggtgcctgggataatgcaaagaagatgattgaagaaggaatcaatattgatggagaggtgttaaagaaaggttcagaagcgcacaaagcatcagtcgttggtgatacagtaggagatccatttaaagatacctctggcccttcattgaatattttaatcaaactgatgtctgttgtgtctttggttatagcgccattgctgaagtcattcagttaa

SEQ ID NO: 267502 - DNA, 835 bp, Unknown
  Bacterial polypeptide expressing nucleotide sequence isolated from the Sargasso Sea
gttgtagctttagatgcctatggaccagtaacagataatgcgggaggaatagctgaaatgtcaaatcttcctaaaaatgtaagaaaaactactgatgcattagatgctgttggaaatacaacaaaagcagttacaaaaggttatgcaattggatcagctggtctcggtgctttagtactttttgcagcatatactgaggatattaaacatttttcaaaagaagcaggatcaaaattagaaggaattgttgttacatttgatttatccaatccttttgttgtggttggattattaattggtggaatgcttccatatttatttggatcaatgggcatgcaagctgtaggtcgagcagggggagcagttgtaattgaagttagaagacaatttaaaaaaattccaggtataatgaagagaaaatcaaaaccagattatggaaagttagttgatttattaactaaagcagccataaaagagatggtaataccgtctttactaccagtattatcaccaatagtattatatttaataattcttccaataggaggtcaggttgcagctttgtcatcagtgggagcaatgttattgggtgttattattactggtctatttgttgctgtatctatgactgctggtggtggagcatgggataacgcaaaaaaatatatagaggatggtaaatttggtggaaaaggatctgaagctcataaagctgctgtaactggggatacagttggtgatccttacaaagatacagctggacctgcagttaacccaatgatcaaaattactaacattgtagcattattattattagctgtaattgcaggttaat

SEQ ID NO: 267503 - DNA, 395 bp, Unknown
  Bacterial polypeptide expressing nucleotide sequence isolated from the Sargasso Sea
attagtagatttattaacagttgctgcaataaaagaaatgattttaccatcgcttttacccgttctttcaccagtggtattatattttataattctttctattggtggacaagttgctgctttagcagcagttggtgcaatgttacttggagtaattataactggactttttgttgcagtttcaatgactgcaggcggtggagcatgggataatgcaaaaaaatatatagaagacggtaatcatggaggtaaaggatcagaagctcataaagctgcagtaactggtgacacagttggagatccatataaagataccgcaggaccagctgttaacccaatgattaaaataacaaatattgttgcattattattgttagctgtaattgctggttaat

SEQ ID NO: 267504 - DNA, 913 bp, Unknown
  Bacterial polypeptide expressing nucleotide sequence isolated from the Sargasso Sea
gttggtatgcttatttcagtaaaagcaaacgtaagaactgctgaggcagcaaggaaaagcttacaatcaggcttaacaattgcatttaaatctggggccataacaggtttattagtagctggcttagctttaatatcaattacaatctattatattattttgattagtttaaatataaatgaaagggaaataattaatgctctggtagcccttggtttcggagcttcattaatttctatttttgctagattaggtggaggaattttcactaagggcgcagatgttggtgcagatttagttggaaaggttgaagcgggtatcccagaagatgatcctaggaatcctgcagtaattgcagacaatgttggagacaatgtgggtgattgtgctggaatggcggcagacctcttcgaaacatatgctgtaacaatagttgctactatggtgttgtcatcaattttttttccgaacgaatataatttaatgatttaccctttagctatcggaggagcttgtataataacctcaattataggaacttggtttgtaaaactaggaaaaagcaaaaatattatgggcgctttatataaaggatttattgttacagcgataacatcactcataattctttatcctgttacagattctatagtaggtttatcagaaaagtactctaataatgataaaacttttagtggtttaaatttatatatttgtggagtagttggttttgtaataactgggttgttaatttggatcacagaatattacacaggaacaaattatagacccgttaaaacagtcgcacaatcttctaccacaggtcatggaactaatgtaattcaggggttagcgatatctatggaagctacagctgtaccagcattaattattgtcgctggaattttataca

SEQ ID NO: 267505 - DNA, 622 bp, Unknown
  Bacterial polypeptide expressing nucleotide sequence isolated from the Sargasso Sea
ttcaaaagtaagtggatctgcattagagggtgttaatgtaactttcgatttatctaatccttttgttgtagctggattactgattggaggtatgcttccttatctgtttgggtcaatggggatgcaagctgttggaagagctggtggtgcagttgtgatagaagtcagaagacagtttaagaaaatacccggaatcatgaaaggtaagagaaaaccagattatggtagattagttgatttattaactaaagcagcaattaaagaaatgattattccatcattattacccgtgttatctcctatagttctttattttataattttacaaattggcgggattgaagctgctttatcttcattaggtgcaatgttattaggtgttataattacaggtttatttgtagcagtttctatgacggctggcggtggcgcatgggataacgcaaaaaaatatatagaagatggtaactttggtggaaagggctctgaagctcataaatcagctgtcactggtgatactgtaggtgatccttacaaagatacagctggtcctgcagtaaacccaatgataaaaattacaaatatagttgccttattattattagctgtaattgcgcattag

SEQ ID NO: 267506 - DNA, 235 bp, Unknown
  Bacterial polypeptide expressing nucleotide sequence isolated from the Sargasso Sea
actggtctttttgttgcagtttcaatgactgcaggtggtggagcttgggataatgctaaaaaatatattgaggatggtaaccacggaggaaaaggttcagaggctcataaagcagctgtaacgggagataccgttggtgatccatataaggatacagcaggtcctgcggtaaatccaatgatcaaaattaccaacatagtagctttactattattggctgttatcgctggctaat

SEQ ID NO: 267507 - DNA, 928 bp, Unknown
  Bacterial polypeptide expressing nucleotide sequence isolated from the Sargasso Sea
cttttaaaatttaatgttgataaaagagaattaataaatgcacttattgcattaggatttggtgcttcacttatttctatttttgcacgattaggtggtggaatttttacaaaaggagctgatgtaggtgcagatttagttggaaaagtagaggcaggtattccagaagatgatccaagaaacccagcagtaatagcagacaacgttggagataacgttggtgactgtgcagggatggcagctgatttatttgaaacctatgcagtaactatcgttgctacaatggttttatcatcaatctttttccaaaatgatttaatgatgatggtttatcctcttactattggaggcgcttgtatagttacttcaattcttggcacattttttgtaagattaggttcatcaaaaaatataatgcttgctctttataaagggtttgttgttacagcaattacatctttactactcttatatccacttactgattatgttttaggtttagaaaaagtatactcggttggcaacaaacaattttctggcttaagtctttattactgcagtgtaatcggattagtaattacaggtcttcttatatgggtaacagaatattacactggcacaaattatagaccagtgaaaagcgttgcatcatcatctaccactggtcatggtacaaatgtaatccaaggacttgctgtttctatggaagcaacagcaatcccagcacttattattgttggtggaattttattaacaaattatattgctggattatatggaatagctatcgcagtaactgcaatgttagctcttgctggtatggtagtagcattagatgcctatggaccggtaacagacaatgctggtggaatagctgaaatgtcaaacttgcctaaaaatgtaagaaagactactgatgcttggacgc

SEQ ID NO: 267508 - DNA, 907 bp, Unknown
  Bacterial polypeptide expressing nucleotide sequence isolated from the Sargasso Sea
atgaacgtaactgtcgaaactattttattatatacaattggagctggcttattatcaattgtttatggatttttaactggaaaaaatattcttaattcaagtccaggaaattcaaaaatgcaagagattgcatctgctattcaaataggagcaaaagcttatctagcaagacaatataaaacaattgctattgttggaacagttgttttggtaatagtaagtattgcttttagccctttagttggtcttggttatttaattggtgcagctttatctggaattgctggatatgttggtatgttagtttctgtagaagcaaatgtaagaacagctgaagcttcaagaaaaggtttagctcaaggtctctctgttgcttttaaatctggtgcagttactggaatgttagttgcaggattagcactattggctatagctgtttattattatttattgctaaaatttaatattgatgaaagagaaatagttaatgctcttgtagctttagggttcggtgcatctttaatttctatttttgcaagactaggtggtggaattttcactaaaggtgcagatgttggtgctgatttagttggtaaagttgaagcaggtattccagaagatgatcctagaaatcctgctgtaattgctgataatgttggagataatgttggtgactgcgcaggtatggcagctgatttatttgaaacatatgctgttacaattgttgcaacaatggttttatcttcaatcttttttgttggagatttaaacatgatgatatatccacttacaattggcgctgcttgtttgttaacatctattattggtactttttttgtaaaacttggaagaaataataatgttatgaatgcattatataaaggctttattgtttcagctgtatctc

SEQ ID NO: 267509 - DNA, 460 bp, Unknown
  Bacterial polypeptide expressing nucleotide sequence isolated from the Sargasso Sea
catgagcttactcaacgtcccagcgggtaaagaactgccagaagacatctacgtagttatcgaaatcccggctaacgcagatccgatcaaatacgaagtggacaaagagagcggcgccctgttcgtagaccgcttcatgtctaccgcgatgttctatccgtgcaactacggttacatcaaccacaccctgtctctggacggtgacccggttgacgtgctggtcccaacgccatacccactacagccaggcgcagtgattcgctgccgtcccgttggcgtgctgaaaatgaccgacgaatccggtgaagatgcgaagctggttgcggtaccgcacaccaagctgagcaaagaatacgatcacatcaaagatgtgaacgacctgccagagctgctgaaagcgcagatcactcacttcttcgagcactacaaagacctcgaaaaaggcaagtgggttaaagtt

SEQ ID NO: 267510 - DNA, 838 bp, Unknown
  Bacterial polypeptide expressing nucleotide sequence isolated from the Sargasso Sea
aatgttattaaattaccagggctcagttattgcagcacttttaggccttgcgcttgctgcatattttgcaaatagaattttatcaattgaagttacagataataaagttcaaagtttatccgatgcaattagaaaaggctctatggcatttttaaaacgtcaatactcatgggtaagtatttttgttgttgttttagcagtattaatttccacattaactgaatggggatatccttttgggtctctagcatttgttggaggagctctattttcatcacttgccggttttattggtatgaggattgcaactgctgcaaacggtaggactacagaagccgcaagagatggcggcaccttaaaagcattaccagtagcgtttagaggtggtgctgttatggggttttcagttgcaggacttggtttattaggagtagctttaggttactgggtattcatagacattatggatcttgaaaatggctatgatattcttgctgcgattggacttggcggatcttcaatagctctttttgctagagttggtggtggaatttatacaaaagctgctgacgtaggtgctgacttagttggtaaagttgaagctggaattccagaagatgatccaagaaacccggcaacaattgcagataatgttggagacaatgttggcgacgttgcaggaatgggagcagacctttttgagagctatgttggatctctagtagctccactagcatatgctgcaatagttttcagcagcacagacgtcctaccatcattacttttctttccactagctgtcggaacaatcggaatgttagcatcaattgtttcctca

SEQ ID NO: 267511 - DNA, 151 bp, Unknown
  Bacterial polypeptide expressing nucleotide sequence isolated from the Sargasso Sea
aaaggtgcagatgtaggagctgatttagttggcaaagttgaagctggaattcctgaagatgaccctagaaacccagcagttatagctgataatgttggagataatgttggagattgtgctggaatggcagctgatttatttgaaacttatg

SEQ ID NO: 267512 - DNA, 886 bp, Unknown
  Bacterial polypeptide expressing nucleotide sequence isolated from the Sargasso Sea
gaagatgatccaagaaatccagctgttatagctgacaatgttggagataacgttggtgattgcgcaggtatggcagctgatctttttgagacatatgctgtaactattgttgctaccatggttttatcatcaattttttttgttggtgatttaaatatgatgatttatcccttaagtattggtgccgcatgtttgttaacttcaatactaggtactttttttgtaaaattaggtaaaaccaaaaatgtaatgaatgccttatataagggattcatagtatctgctgtagcgtcattaattattttatggcctgtaacagaccatgtaattggttttacaaatgaatatacagtaaatggtaaaacttttaatggtatgaacttgtactattgtggagttattggtttagtaattacaggattattaatttggataactgaatattacactggaacaaattacagacctgttaaatctgttgctttatcatcaacaactggacatggaacaaatgttattcaaggattggctgtatcaatggaagctacagcaattccagcgttaataattgttgcaggtattttaattactaactcagtagctggtttatttggtattgctatcgcagttactaccatgcttgctttagctggtatggttgttgctttggatgcttatgggcctgtaacagataatgctggcggtatagctgaaatgtcaaatttagataaaaaggtaagaaaaaccacagatgcgctagatgcagttggtaatacaacaaaagctgtaactaaaggttatgcaattggatcagctggtttaggtgctttggttttatttgctgcctacacagaagatattaaacattctcaaaagaagctggtca

SEQ ID NO: 267513 - DNA, 861 bp, Unknown
  Bacterial polypeptide expressing nucleotide sequence isolated from the Sargasso Sea
gatgggagctctatataagggttttgttgctacagctatttcatctttaataatattatatccgataactgattatgtaattggttttaatacgagctatgatgtaaatggaaatacttttaatggaaaagatctttattattgtggaattataggtttagttataacagggttaattatatggattaccgaatattatacaggcactaactataggcctgtaaaaagtgttgcaagctcctctacaacaggacatggtacaaatgttattcaaggtttagctgtttctatggaagcaacagcagttccagctttgataattgtagctggtattttactcactaattcaattgcaggattatttggcatagcaattgctgtaactacgatgttagctttagctggtatggtcgttgccttggatgcttacggtcctgttactgataacgctggtggaatagcagaaatgtcaaaattaccaaataatgtaagaaaaacgacggatgcattagacgctgttggaaacacaactaaagctgttactaaaggatacgctattggatcagctggactaggagcgctagttttgtttgctgcatacacggaagatattaaacatttttccaaagaagctggatcaaaacttgagggaattatagttacttttgatttgtctaatccctatgtagtagttggtttattaattggtggaatgttaccatatctatttggatcaatgggaatgcaagcagttggaagagcaggtggtgctgttgttattgaggtacgtaggcaatttaaaaaatttccaggaattatgaagagaaagcaaaaacctgactatgcaaaattagttgattt

SEQ ID NO: 267514 - DNA, 223 bp, Unknown
  Bacterial polypeptide expressing nucleotide sequence isolated from the Sargasso Sea
gtagctatttctatgaccgctggtggtggagcttgggacaatgcaaaaaaatatatagaggatggaaactttggaggcaaaggttcagaggctcataaagctgcagttacaggtgatacagttggtgatccttataaagacacagcaggtccggctgttaatccgatgattaagataacaaacattgtagctttacttttgttagctgttatagctggataag

SEQ ID NO: 267515 - DNA, 817 bp, Unknown
  Bacterial polypeptide expressing nucleotide sequence isolated from the Sargasso Sea
ctgtggaattattggactaataattactggtttattaatatgggttaccgaatattatactggaacggattatagacctgtgagaagtgtagctggatcttccacaactggacatggaactaatgttatacaaggcttagcaatatcattagaagcaaccgctatacctgctttaattattgtagcaggaatattattaacaaatcatatagccggactctatggaatagcaattgctgtaacaacaatgttagccttagctggaatggttgttgctttagatgcttatggaccagttacagataacgcaggtggaattgctgaaatgtcaaaattacctaacaacgttagaaaaacgacagatgctttagacgcggtaggtaatacaactaaagcagtaactaaaggatatgcaattggttcagctggattgggtgctttagttctttttgctgcatataccgaagatatcaaacacttttcaaaagtagcaggctctaagttagagggtattgtagtaacttttgatttatcaaatccttatgtcgtagttggtctattaattggtggaatgttaccttacttgtttggatctatgggtatgcaagcagttggtagagctggaggagctgttgtggttgaagtaaggagacagtttaaaaaatatccaggtattatgaaaagaaaacaaaaaccagattatgctaaactagtagatttattgacagtggcagcaattaaagaaatgataataccatcattattaccagttctatcgccaataattttatatattataatttatactattggagga

SEQ ID NO: 267516 - DNA, 532 bp, Unknown
  Bacterial polypeptide expressing nucleotide sequence isolated from the Sargasso Sea
atgcttccttacttatttgcggcactaggaatgacagcagttgggcgtgcaggctcagctattgttgaggaagtaagaaagcagtttaaggaaaaaccaggaattatgactggagaagataaacctgattatagttcagctgttgatctactaacaaaatctgcaattaaagagatgattgtgccatctttactacctctattatcaccgatagtccttttttatactgttaattttattgctacaaaaagtgatgcattttcagctcttggagcaatgcttctaggcgttattgttacaggattatttgttgctctttctatgactgctggaggtggtgcttgggataatgcaaaaaaatatattgaagatggtaattatggtggaaaaggctctgaggctcataaagctgcagtaacgggtgatactgttggcgatccttataaggacactgcaggaccagctgttaaccctatgattaagataactaatattgtagctttattactattggcagttttagcgcattaag

SEQ ID NO: 267517 - DNA, 895 bp, Unknown
  Bacterial polypeptide expressing nucleotide sequence isolated from the Sargasso Sea
gatgctagcaaatacaggaattcaattagcagtagatgcatatggtcctatttcagataatgctggtggtatcgcagagatggctgagcttccaactgaagttcgagaaagaacagataaacttgatgctgttggcaatacaacagctgctattggtaaagggtttgcaataggctctgcagctttaacagcgttagctctttttgctgcatatatggttaaaacgggaatttcaactattgatatatctaacccgatggttatggctgggttgtttattggtggtatgttaccatttctattttcatcaatggcaatgggtgcagttggtcgagcagctatggctatgattgaggaggtcagaagacaatttagagaaatccctgagctaaaaaaggcgctagaaatcatgaacctaaaagataaaaaagactggactgacgaagatcacaaaatctatactgatgcattaggaaaagctgaacatggacgttgtgttgaaatctctactgaatcagcaattaaagaaatgattgttcctggccttttagcagttattactccagttttaattgggtttgtaccgcggttttttggaagcgatcaaggacctgaagtattaggtggccttcttgctggggtaacagtaacaggggtgttaatggctatttttcagtcaaattctggtggagcatgggataatgcaaagaaaatgattgaagagggaattattgtcaatggccaagaaattaaaaagggttctgaggctcataaagcggctgttgttggtgacacagtaggtgatccttttaaggatacctccgggccatcattaaatattttaattaagttaatgtcagtggtgtcctttagtattgcaccattaattaaataa

SEQ ID NO: 267518 - DNA, 220 bp, Unknown
  Bacterial polypeptide expressing nucleotide sequence isolated from the Sargasso Sea
ttttgttgcaatttcgatgacagcaggtggcggagcttgggataatgcgaagaagtatgttgaagatgggaattttggaggtaagggttcagatgcacataaagccgcagttacaggagacacagtaggtgacccttataaagataccgcaggcccagctgtaaacccgatgattaaaatcacaaatatagttgccttacttttactggctgcactttaa

SEQ ID NO: 267519 - DNA, 690 bp, Unknown
  Bacterial polypeptide expressing nucleotide sequence isolated from the Sargasso Sea
agcatatctagcaagacaatataaaacaattgcatttgttggtgttgttgttttagttattgttagtgtagcattcagtccattagttggacttggttatctaattggtgcagcattatctggaattgcaggatatgttggaatgttagtttctgttgaagctaatgtaagaactgctgaggcatcaagaaaagggcttgctcaaggtttgtctgtagctttcaaatcaggtgctgttactggtatgttggttgctggtttagcattattagctatagctgtttattattattttctattaagaaatggtgttgatgaaagagaaattgttaatgcacttgttgcattaggatttggtgcttctttaatatctattttcgcaagattaggtggaggtatttttactaaaggagcggatgttggtgctgatttagttggaaaagttgaggctggaattccagaggacgatcctagaaaccctgctgttatcgcagataacgtcggggataacgtaggtgattgtgctggtatggctgctgatttatttgaaacatatgctgttacaattgttgctacaatggttttatcttcaattttctttcatggtgatattaatatgatgatttatccgcttactattggtggagcttgtattttaacatccataataggaactttctttgttaaact

SEQ ID NO: 267520 - DNA, 964 bp, Unknown
  Bacterial polypeptide expressing nucleotide sequence isolated from the Sargasso Sea
acaagtttacaaaaaggtttaaccatggcctttaaatctggcgctataaccggtttgttagttgcgggtttagctttgctatcaatttcaatttattacggagcattattatcttttaatattgatgatagagaaacaattaatgctttaattgctttaggatttggtgcatcattaatttctatctttgctagattaggtggtggcatctttacaaaaggtgctgatgtaggtgctgatttagttggaaaagttgaagccggaataccagaggacgatcctagaaatccagctgttatagccgataatgttggagacaatgtaggagattgtgctggaatggctgctgatctttttgaaacctacgcagtaactattgttgcaacaatggttctttcttcaatattttttcaggataatacagctatgatgatttatcctctagctattggtggaggatgcataattgcctcaataataggaacttttttcgtaaaacttggcaaaagtaaaaatattatgggagccctttataagggtttcattgttacagcaattatttcattagttttactttatccaattacctctcatgtcattggtttagaaagtttattcaatgttggtgataaaagttttacaggttttgatttatactattgtggcattattggtttagttgttactggattgattatttgggttactgagtattataccggtacaaattatagaccagttaaaagtgtcgcaaaatcttctacaacaggacatggaacaaatgttattcagggtttagctatttcgatggaggccacagcgttaccagcactaattattgttgctggaattttagccacaaatgagctagcaggattatttggtatagcaattgccgttacagcaatgttagcattaacaggaatggtagttgctttagatgcatatggccctgtcacagata

SEQ ID NO: 267521 - DNA, 851 bp, Unknown
  Bacterial polypeptide expressing nucleotide sequence isolated from the Sargasso Sea
tatggttcttgcttcaatattttttacaggagatttagttactacaatgatgatgtatcctttgtcaattgcaggggtttgcacaatagctagtattattggaacctattttgtcaaacttggtaaaagtgaaaatattatggtcgcattgtataaaggtttttttgtttcagcaatcctctcagctgtattattatattttattactgatcatgttgtaggtatgggaactacacttaatgaaataggaaatgatataacgggattatcattattttattgtggtattcttggtttaataattacaggcttaattatttgggtgactgaatattacacaggaacaaattatcgacctgtacaaagtatatctaaagcttctacaacaggacatggaacaaatgttattcaaggacttgctattagtttagaagcaactgctttacctgctttaattattattgctggaataattgcaacttattctttagctggtttatttggaatagctatttctgtgactacaatgcttgctttagcaggtatggtagttgcattagatgcttatggtccagtgacagataatgctggaggaatagcagagatggcagagttggatgaaagtgttagaaaaactactgatgcattagatgcagtaggtaatacaactaaagctgttacaaaaggttatgctattggttcagcgggattaggagcattagttctttttgctgcttatacagaagatgtttctcattatggtttggaagtttcatttgatttatcaaatccatacgttgttgtaggacttcttttgggaggattacttccttatttattggagcaatgag

SEQ ID NO: 267522 - DNA, 934 bp, Unknown
  Bacterial polypeptide expressing nucleotide sequence isolated from the Sargasso Sea
gctgataatgtcggtgataatgttggtgattgtgcaggtatggcggctgatttatttgagacttatgccgtaacaattgtagcaactatggttctcgcaactatattttttacaggagatattgctcatcagatgacaatctatccgatggcaataggagggagctgtttggtggcttcaattatgggtactttttttgtaagactaggttcctctcaaagtattatgggtgctttatataaagggttcattgcatcagcaatattatctttaatatttatttaccctgtaacacaaattgtcttaggcgatatgtctaaagaattcacttttggtgaaacgactttttctgggacctctctatatatttgttcaataattggaattgtaattacaggtcttcttatttggataactgaatattatacaggaacaaattatagacctgttcaaagtgttgcaaaagcatctacaaccggtcatgggacaaatgtaatacaaggacttgcagtctctatggaagcaacagcgctcccagcattagtcattgtaatagggatcgtgatgacatttcagttggctggtttgtttggaatagcaattgcagtaaccgctatgcttgcactcgctggaatggtagttgcacttgatgcatatggtcctgtcacagataatgctggtggtatagcagaaatgtcaaatcttgacgaaaatgtcagaaaaactacggatgcgcttgatgcagttggaaatacaactaaagcagttacaaagggctatgcaattggctctgcagggctaggtgcgcttgttttgtttgctgcttatgttgaagatttaaagctaatagaaagtttgacgccaaactttagcctagaaaacccatatgtagtggtcggattattgattggtggtctattgccatatttattgc

SEQ ID NO: 267523 - DNA, 609 bp, Unknown
  Bacterial polypeptide expressing nucleotide sequence isolated from the Sargasso Sea
aaagcactcgaaattgcgttttctggtggttctgtaatgggaatgggtgtggttggtttaggtgtattaggagttggttctctatttattatttatagaccaatgtttactgacataaataccgtaatacaagttttgtctgggttctcccttggtgcttcatctattgcattatttgccagagtcggtggtggaatatataccaaagctgcagatgttggggctgacttggttggaaaagttgaagctggaatccctgaagatcatcctttgaatcctgcaactattgctgataatgttggagataatgttggagatgttgctggaatgggagcagatttatttgaatcttttgtaggatcgattataggggcaatggtattaggcgcagcctttgttggtttaaacgaattttctggaattgaaattaatgcggtattacttccattatttatagctgcatccggaatcatcatgtctataataggaactttctttgtaaaggttaaagaaggtggtgatccacataaggccttaaatacgggtgaattcgtttcagctggattaatgattgccgtaacttgggttttaatccaatatttactacca

SEQ ID NO: 267524 - DNA, 679 bp, Unknown
  Bacterial polypeptide expressing nucleotide sequence isolated from the Sargasso Sea
cctataactgactcttcaattggtcttgataaaatttatacttttaaagaaacctcattcactggtttagatttatatatatgcgctgttgcaggattagtagtaacaggtttaattatttgggtaactgaatattacacaggaaccaattatcggccagtcaaaagtgttgcaaagtcttctaccactggacacggaacaaatgtaatccagggtttagcaatttctttagaagctacggccttacccgctataattattgtaattggtatattatatacaaatcatttagcaggattattcggaattgctatagcagtaacatcaatgctagcgctgacgggtatggttgtcgcattagatgcatacggaccagtaacagataatgctggtggcatagcagagatgtcaaaattaccaaaaaatgtaaggaaaacaactgatgcacttgatgctgtcgggaatactactaaagctgtaacaaaaggatatgcaattggctctgcaggtctaggtgctttagttctttttgcagcatacactgaggacattaaatattattcaaatgacaatacatcttcattatacggtttagtagttgattttgatttatcaaacccttttgtagttgtcggattattattaggtggactattaccttatttgtttggatctatgg

SEQ ID NO: 267525 - DNA, 705 bp, Unknown
  Bacterial polypeptide expressing nucleotide sequence isolated from the Sargasso Sea
ccaaaaaatgttcgtaaaactacggatgctcttgatgcagttggtaatacaacaaaagcagtaaccaaaggttatgcaataggatctgctggtcttggagcattagttctttttgcagcatatacagaggatattaaacatttttcaaaagttgcaggatcaaatttagaaggtatagctgttacttttgatttatctaatccctacgtagttgttggactgcttataggtggtatgcttccttatttattcggatctatgggtatgcaagcagtgggtagagcaggtggtgcagttgtcattgaagttaggaggcaatttaaaaaaatacctggtattatgaaaaggaaagctaaacctgattatggtaagcttgttgatttactaacaagagctgcaatcaaagaaatgataataccatcattattaccgattttatctccaattattttatacgtggtaatttattttataggtggtcaagtagcagcattatcatctcttggagcaatgttattaggagttattataacaggtctatttgttgctgtttcaatgactgcaggaggtggagcttgggataatgctaagaaatatattgaagacggaaaatttggaggaaaaggttcagaagctcataaagctgctgtaactggtgatactgttggtgatccatataaagatactgcagggcccgctgttaat

SEQ ID NO: 267526 - DNA, 856 bp, Unknown
  Bacterial polypeptide expressing nucleotide sequence isolated from the Sargasso Sea
gtgattgggtttggagatattagcaatgctagctttagcggtatgtcattatatatttgtgcaattgttggattagtaattacaggtcttcttatttggattactgaatattatacaggaactaactatagaccagtccaaagtattgccaaagcttccaccacaggacatggaacaaatgttattcaaggtttagctgtttctatggaggcgacagcacttcctgcaattgtaattgtcattggaattgttttaacatttcaacttgcgggtctgtttggtattgctattgcagtaacatcaatgcttggattagctggaatggttgtagcacttgatgcctatggacccgtgacagacaatgcaggtggtattgctgaaatgtcagatcttgatgaaagcgtgagaaaaactactgatgctctagatgcggtaggaaatacaactaaggctgttactaaaggatatgcaattggatcagctggtttaggtgctcttgttctttttgcggcatacgttaatgatcttcaaacagatcaccttagtcatatcactccaaatttcagccttgagaatccttacgttgtagttgggttattaattggaggtttattgccctacctttttggatcaatgggaatgatggcagttggaagagctggaggagcagttgttgaagaagtgagacagcaattttctgataatcctgggattatgacaggcgattctaagccagattattctaagtctgttgatttgttaacaaagtctgcaatcaaagaaatggttgttccttcaatgcttccagttttatctcccaattgtgctatatcttttagtttctttgtagcagatc

SEQ ID NO: 267527 - DNA, 825 bp, Unknown
  Bacterial polypeptide expressing nucleotide sequence isolated from the Sargasso Sea
tgcctatataacagcaggattgtttggtctagcgattgcagctacgacaatgttagctttagctggaatggtggttgcactagacgcgtatgggcctgtcacagataacgcaggtggaattgctgagatggctgatctgcccgaggatgtgagacgaactactgatgcactggatgccgttggaaatacaaccaaggccgtaacaaaaggctatgccatcggctcggcaggtttggctgctctcgtcttatttgcagcctatacagaggatcttggtcattacttccctcaactggaaattagtttcgaattgcagagtccgtatgttgtgattggtttgttcttaggcggattgttgccgtacctttttggagcccttggtatgatggcggtaggccgtgctggtggtcaagttgttgtcgaggtccgtcgtcaatttaaagaaatccccgggattatggaggggacggcaaggccagaatatgggaaagcagtcgatcttttaacaaaggctgccataaaggagatgatcattccttccctgttgccagtccttgctccaatagtcgtatatgttgttatctgggctgttgctgggcaaggagaagcctttacaactcttggagcaatgctgttaggaacgatagtgacaggaatttttgtggctatttctatgacttcgggtggcggcgcttgggataacgcaaaaaagtatatagaagatgggaatcacggcgggaaggcgtcggaggcccataaagcgtcagttactggtgataccgtgggagatccgtacaaggatacagcagggcctgcagttaaccc

SEQ ID NO: 267528 - DNA, 783 bp, Unknown
  Bacterial polypeptide expressing nucleotide sequence isolated from the Sargasso Sea
acatttaatgtcggagacaaaaattttactggttttgatttatattattgtggtgttattggattagtagtaacgggtttaattatttgggtaactgaatattatacaggaacaaattatagaccagttagaagcgttgctaaatcttcaactactggacacggtacaaatgttattcaaggtttggcagtttcaatggaagctacagctttacctgcgttaataattgtggctggaataattgctacaaatgaattagctggattatttggtatagcaattgctgttactgccatgcttgctcttacaggaatggttgttgcgctagacgcatatggtcctgtaacagacaatgctggtggaattgcagaaatgtcaaaattaccaaaaaatgttagaaaaactaccgatgcccttgatgcagttgggaatactacaaaggcagttacaaaaggatatgcgattggttcagctggcttaggagcattagttttgtttgctgcgtataccgaagatataaaatttttttcaacagtacctggttctaaactggaaggtgttaatgttagttttgacctatcaaatccatttgttgttataggtcttttggtagggggtatgttaccttacttatttgcttcaatgggaatgcaagcggttggtagagccggtggtgcagttgttattgaagtaagaagacaattcaaaaaaatacctggaattatgaaaggcaaaagaaaacctgattatggaagattagtagatttgttaacaaaagccgca

SEQ ID NO: 267529 - DNA, 895 bp, Unknown
  Bacterial polypeptide expressing nucleotide sequence isolated from the Sargasso Sea
aattcaatagctggattatttggtatagcaattgctgtaactacaatgcttgctttagcaggaatggttgtagcacttgatgcatatggacctgttacagataatgctggtggaattgcagaaatgtctaatttaccaaaaaacgttaggaaaactacagatgcacttgatgccgtaggcaatacaacaaaagctgttacaaaaggatatgcaataggttctgcaggtttaggggcgttagtactatttgctgcttacactgaggacataaaatatttttctactgtaagtggatctaaattagagggcatagttgtatcttttgacttatcaaacccttttgtagttgtaggtcttcttataggtggaatgctaccttatttatttggatcaatgggcatgcaagctgtaggaagagcagggggtgccgttgttgttgaagtaaggagacaatttaaaaaaattcctggcattatgaaaagaaaggcaaaaccagattatggaaaattagttgatttattaactaaagctgcgataaaagaaatgatcataccttcgttgttgccagtgctatccccgatagttttgtacataattattttacctattggaggtcaagttgcagctttgtcatcggttggtgctatgctacttggtgtaattattacaggtctttttgtggctgtttcaatgacagcaggtggtggggcatgggataatgcaaagaaatatatagaagatggtaattttggtggcaaaggttctgaagcgcataaagctgcagtaacaggtgatactgttggagacccttataaagacactgctggacctgctgtaaatcctatgattaaaataactaatatcgttgctttgttacttttagcagttattgcag

SEQ ID NO: 267530 - DNA, 866 bp, Unknown
  Bacterial polypeptide expressing nucleotide sequence isolated from the Sargasso Sea
tgttacagcagcaattatctggatcactgagtattatacctcgacagagtatagaccagtaaaatcgatagcgcaatcatctgaaacaggtcatggaacaaacgtcattcaaggtctagctatttcaatggaagctactgcagttcctgctataataattgctttgggaataatattttcttataatcttgctggaatttatggaatagcattagctgcaacaacaatgttagctttagcaggtatggttgtggctttggatgcatatggtcctgtaactgataatgctggtggtatcgccgaaatgagtggtctagatgatgatgttagaaaaacaacagatgctcttgatgctgtaggaaatactacaaaggcagttactaaagggtatgcaataggttctgctgggctagcggcattagtattatttgctgcatacacgtatgatttagaacactattttccagatattgaaatatcatttttactttcagatccatatgttgtagtaggtttaattattgggggtatgttaccttatttatttggttctatggggatgcaagcagttggacgagcaggtggcgctgttgtagaagaagttcgaagacagtttaaagaaatgcctggaataatggaaggtaaaacaagaccagattatagtagagctgttgacatgttaacaaaatctgcaattcgtgaaatgataattccttctttattaccagtattggctccaattgttgtttattttgttatttctttatacgatcaaagcgctgcattaactactgttggctctatgttattaggaactatagtgactggattgtatgtagctatttctatgactgcaggtggtggcg

SEQ ID NO: 267531 - DNA, 901 bp, Unknown
  Bacterial polypeptide expressing nucleotide sequence isolated from the Sargasso Sea
attattatcgcaggaataatagcaacttattctttagctggtttatttggaatagctattgcagtaactacaatgcttgctttagcaggtatggtagttgcattagatgcatatggtccagttacagataatgctggaggaatagcagaaatggcagaattagatgaaagtgttagaaaaactactgatgcattagacgcagtagggaacacaactaaagcagtaactaaaggttacgctattggttcagcaggattaggtgcattagttctttttgctgcatatactgaagatgtttctcattatggattagaagtttcttttgatttatcaaatccatatgttgttgtaggacttcttttgggaggattactaccttatttatttggagcaatgagtatgaccgcagttggaagagcagctggatctgtcgtagaagaagttagaagacaattcaaagaaattcctggcataatggaaggtaaaggaaaacctgaatatggtacttgtgtagatattttaactaaatctgcaattaaagaaatgattataccatctatgctgccagttttatctcctatagtagtttattatgtaatactgtttattgccggacaaactgcagcacttgcatgtttaggagcattattattaggagtcattgttacaggtttatttgtagctatcagcatgactgctggaggtggtgcatgggataatgcaaagaaatatattgaagatggaaatcatggtggaaaaggtagtgaagcgcataaagctgctgttacaggcgatactgttggagatccttataaagatacagctggaccagcagtaaacccgatgattaagataacaaatatagttgcattattattattggcatctatttcattataaa

SEQ ID NO: 267532 - DNA, 924 bp, Unknown
  Bacterial polypeptide expressing nucleotide sequence isolated from the Sargasso Sea
tcaccctcttaatcctgcaacaatcgctgataatgtaggtgacaatgttggagacgtggctggaatgggggctgacttatttgaatcatacgttggttcaattataggttcaatggttcttggtgcaagtattttatcttttggcggttttgatgtttcatttgttgttttgcctttgttgatagcagcatcaggtgtagtggtttcgattattggaacttttttagtctccgtgaaagagggtggtaatcctcagagagcattgaatgttggtgaatttggatcatctgctataatggttgttattatgtatctcttaataacaaattttctaccacaaacatttactttgggtggaaatgattatacaagtttaggtgttttttgggcttcgacaattggtttagttgctggtttaggcataggcctaatcacagaacattatactggaactaacacttccccaacgctctcaattacgcgacagtcattaacaggccctgctacaaatattatagctggtcttggagtaggtatgcaatcgacagctggaccaatttttataatttcaggtggaattgttggggcgtattattttgcaggattatatggaattgcaatggcagctctaggtatgcttgcaaataccggtatacaactagcagtagatgcatatggaccaatttccgataatgctggtggaattgctgaaatggctgaacttccagctgaggttagagatagaactgataagttagatgcggttggtaacactacggcagcaataggaaaaggatttgctatcggatctgctgcactaacagcacttgcgctttttgctgcttttatggttcaaacgggtatcgaatcaattgatatagccaatccaatggttatggctggcctgtttgttggaggaatgtt

SEQ ID NO: 267533 - DNA, 703 bp, Unknown
  Bacterial polypeptide expressing nucleotide sequence isolated from the Sargasso Sea
gatggctgttggaaatacaacaaaagcagttactaaaggctatgcaattggctcagcaggtcttggagctttggtattgtttgctgcttatgttgaagatttaaaacttataccagagttaactcctgactttagtctggaaaatccatatgttgttgtaggtcttttaattggtggtttgcttccttatttatttgcctccatgggaatgatggcagttggaagagcaggcggtgctgtggttgaagaagtaagaaagcagttttccgataatccaggaattatgacaggtgaagtaaagccagattactcaaggtcagtggatatgttaactagatcagctatcaaagaaatgataatcccctcgatgttaccagtattatcaccattagtactttattttattatatcaatcgtagctgaccaaaatgccgctgtttcatgtgttggtgcaatgcttttaggagtaattgttacaggaatttttgtagctatttcaatgactgcaggtggtggagcttgggataatgcaaagaagtttgttgaagatggaaattttggaggtaagggttcagaagctcataaagcagcagtaactggagacactgtaggtgacccttataaggatactgcaggcccagcagttaatcctatgataaagattactaatatagtcgccttacttttgctggctgctctatag

SEQ ID NO: 267534 - DNA, 795 bp, Unknown
  Bacterial polypeptide expressing nucleotide sequence isolated from the Sargasso Sea
tatagctgataatgttggggataatgtgggagactgcgcaggcatggcggctgatttatttgagacttatgccgtaacaattgtagcgacaatggttctagctactatattcttttctggtgaaattgcccacatgatgactatttaccctatggcaataggaggtagctgtttggtagcttcaattataggtactttttttgtaagactaggttcctctcaaagtattatgggtgcgttatataaaggctttatagcatcagcaatactctcattgatttttatttatccagtgactcaaatagtattgggtgatatgtcaaaagaatttacttttggtgaaacgacattttctggaacttcactttatttgtgttcaataattggaattgtgattacgggacttcttatttggataactgaatattatacaggaactaattatagacctgttcaaagtgttgcaaaggcatccacaactggtcacgggacaaatgtaatccaaggactggcagtttctatggaagcaacagcgctcccagcattagttattgtaatcggtattgtaatgacttttcagttggctggcttatttggaattgcaattgctgtaactgcaatgcttgcactagctggaatggttgttgcgcttgatgcatatggtcctgtcacagataatgctggtggtattgcagaaatgtcaaatttagatgaaaatgtaagaaaaactactgatgcgcttgatgcagttggaaatacaacaaaagcagttacaaagggctatgcaatcggctc

SEQ ID NO: 267535 - DNA, 322 bp, Unknown
  Bacterial polypeptide expressing nucleotide sequence isolated from the Sargasso Sea
atcgttttatatttaataatatttgcaatcggtggtcaagttgctgctttagcctctgttggtgcaatgttgttaggtgttattattactggtttgtttgttgcagtttctatgacagcaggtggaggcgcctgggataatgctaaaaaatatattgaagatggaaatcatggtggaaaaggctcagaggctcataaagcagcagtaacaggtgacacggtaggtgacccttataaagatacagcgggtccagcagtaaacccaatgattaaaataacgaatattgtagctttacttttattggcagttatcgctggctaat

SEQ ID NO: 267536 - DNA, 817 bp, Unknown
  Bacterial polypeptide expressing nucleotide sequence isolated from the Sargasso Sea
tatggtcctgttacagataacgcttggtggaatagcagaaatgtcaaaactaccaaaaaatgttagaaaaactaccgacgctctcgatgctgttggtaatacaacaaaagctgttactaaaggatatgcaattggttcggcgggattaggtgctttagttctgtttgctgcttacacagaagatattaaatttttctcaactgtttctggttcttcattagaaggtattaatgtaagttttgatttgtctaacccatttgttgtaataggtttattggtaggtggtatgcttccttatttatttggctcaatgggcatgcaggcagtcggaagggctgggggtgctgtagttatagaagttagaagacaatttaaaaaaatacctggaattatgaaaggaaaaagaaaacctgattatggaaggttggttgacttattaacaaaagctgcaattaaagaaatgattataccatcattattaccagttttatctccaatagttttgtatttaataattttttcaattggtggtatggaagctgcactatcatccgttggagcaatgttactaggagttatagtaaccggattatttgttgcaatttcaatgactgctggtggtggtgcatgggataatgcaaaaaaatttattgaggacggtaattatggtggaaaaggatctgagtcccataaagctgcagttacaggtgatacagttggtgacccctacaaagatacagcaggacccgcagtaaatcctatgataaaaataacaaatattgttgcgcttttattattagctgtaattgctcactaa

SEQ ID NO: 267537 - DNA, 817 bp, Unknown
  Bacterial polypeptide expressing nucleotide sequence isolated from the Sargasso Sea
tatgaactcttcaattgaaactattttatattatactatatttgcaggatttctatcaattttgtatggatatattactggtgttaacattattaaatccagtgcaggaaataataaaatgcaagaaattgcatcagcaattcaaattggcgctaaagcatatttaaatagacagtataaaacaattgcaatagtaggagttgtagttttagttattataatttttgcatttagttttttagttggattaggttattttataggtgcaactttatctggaattgctggttatgtaggaatgcttgtttcagttcaagcaaatgtaagaactgctgaagcatctagaaaaggtttatcaaatggtttatctgttgcttttaaatctggtgcaattacaggaatgttagttgcaggattggcattgttatctataaccgtttattattttattttactaaaatttggtattgatgaaagagaaattgttaatgcacttgttgcattaggttttggtgcttctttaatttcaatatttgctagattgggtggaggaatttttaccaaaggtgctgatgttggagctgatttagtaggtaaagttgaagctggaattcccgaagatgacccaagaaacccagcggtaatagcagataatgtaggtgataatgttggtgattgtgctggtatggcggctgatttatttgaaacatatgcagttactattgttgccacaatggttctttcttcaattttctttcatggtgatattaatatgatggtttatcctttaacaattggaggagcttgcataattact

SEQ ID NO: 267538 - DNA, 758 bp, Unknown
  Bacterial polypeptide expressing nucleotide sequence isolated from the Sargasso Sea
tatggaaaattcaacagatacaattttaatttataccatcatatcaggtttattagcgattgcttatggctattttactgggaaaaatattttaaatcaaagcgcaggaaactcgaaaatgcaagaaattgcagcagctatacaagtgggagctaaagcctatttaaatagacaatataaaactattgctatagttggtttagttgttttagttattatcaccattgcctttagtcccttagttggtgttggatatcttataggagcggctttatctgggattgcaggttatgttggtatgttagtttctgttcaagccaacgtaagaacagcggaagcttctagaaaaggtttagcccaaggtctctctgttgcctttaaatcaggtgctgtaactggtctcttggttgctggtttagctttattatctatagctgtttattattatttattattaaaatttaatgttgaagaaagagagttaatcaatgctttaatagctttgggatttggagcatcattaatatcaatttttgctagattaggtggaggaatttttacaaaaggcgctgatgtaggtgctgatttagtgggcaaagtagaagctggtattccagaagatgatcctagaaatccagctgtaattgctgataatgtaggagataatgtaggtgattgcgctggaatggctgcagatttatttgaaacttatgcagtaacaattgttgctactatggttttatcttcaattttttttc

SEQ ID NO: 267539 - DNA, 810 bp, Unknown
  Bacterial polypeptide expressing nucleotide sequence isolated from the Sargasso Sea
cagtaacagataatgctggtggaattgcagaaatgtctaatttaccaaaaaatgttagaaaaactactgatgcattagatgcagtaggaaatacaacaaaagcagttacaaaaggatatgcaataggatcagctggtttaggcgctctagtattgtttgctgcttatacagaagatatcaaacatttttcaaaagttgctggttcaaagttagaaggaattgttgtaacatttgatttatcaaatccatttgtagttgttgggttactagttggtggtatgcttccgtatttatttggttcaatgggaatgcaggccgtaggaagagcgggtggagctgttgtagttgaagttagaagacagtttaaaaaaattcctggaataatgaaaagaaaatcaaaaccagattatggtaagttagttgatttattaaccaaagctgcaattaaagaaatgatagtgccatctttgttgccagttctatctccaatcgttttatatttatttattttaccaatcggtggtcaagttgcagcattgtcttcagttggagcaatgttgttaggagtcatcataactggtttatttgttgctatatcaatgacagctggtggcggagcttgggataatgcaaaaaaatatattgaagatggaaattttggaggaaaaggatcagaggctcataaagctgctgtaacaggagacactgtgggagacccttataaagatacagcaggcccagcagttaatcctatgataaaaattacaaatatcgtagcattacttctactagctgttatagcgggttaat

SEQ ID NO: 267540 - DNA, 896 bp, Unknown
  Bacterial polypeptide expressing nucleotide sequence isolated from the Sargasso Sea
aggtcttggaactcttttttatgtgttaagtggtgatgctcactctattgaaggcttcgctatgggtgcttccatcgttgcgctcttctcaagagttggtggaggaatctatacaaaaagtgctgatgtcggtgcagatctggtaggaaaagttgaagcaggtattccagaagatgatcctaggaatccaggagtaatagcagacaatgtaggagacaatgtaggagatatagctggaatgggatcagatatattcgaatcctattgtgggtctatggttgcttgtatcgctatagcttcgacctacctaataacttctgaattttcacaagctgataaagatggaatgatgtttttacctttggctttagcctcaataggtttaatagcatctattctaggaatcgttatagtaagactattttcaaaatcctcaccagccaatgctatgagatggggaactatgggagcaccattaatcttcattattgctgcttattttttaaccaatgctttagttggaactaatggtgtcgatgtatggttggccgtagtttgtggctcggtaggggggatagcaattggtttaattactgaatattacacaggatctagtcctgtaattaagatagcggaagctggacaaactggttctgctactgtcatgatcacaggtctctcagtaggcatgcaatctgtcgtacttcctatagcctgtatcattcttattatctttatttcaactcaattaacagggctttatggcgtaggtattgccgcagtaggcatgttatctacagtcggtattacaatggcaatagatgcatatggacctgttgctgataacgcaggaggaattgcagaaatggctggtatgccaactgaaactagagtga

SEQ ID NO: 267541 - DNA, 904 bp, Unknown
  Bacterial polypeptide expressing nucleotide sequence isolated from the Sargasso Sea
ccacaagattacaatttaatggtttaccctttagcaataggcggagcttgtattatcacatcaataattggtacttggtttgtaaaattaggaaaaagcaaaagtattatgggtgctttgtacaaaggttttatagtaacagcagtaacttctttattagtaatgtatccagtaacagaatcaataattggtataaaaagcacttataacaataatgctggagcaatttttactggtttagacctttatatttgtggtgttgtaggatttgtaattacaggtttgttaatttgggtcaccgaatattatactggtactaactatagaccagttaaaacagtcgctaagtcatctacaactggacatggaacaaacgtaattcaaggtttagcaatttcaatggaagctactgctataccggctctaataattgttgcaggaattttatacacaaacagcttggctggcttgtatggtatcgcgatagccgtaacagcaatgcttgccttaacaggtatggttgttgcattagatgcttacggaccagtcacagataacgctggtggaattgcagaaatgtcgaagttaccaaaaaatgtaagaaaaaccacagacgcattagacgcagtgggaaatacaacaaaagctgtcacaaaaggttatgcgataggttcagctggacttggagcattggtacttttcgcagcttacactgaagatattaattatttctcaaaagtaagtggatcagcacttgagggagttaatgtaacttttgacctatctaatccttttgtggttacaggtttattaattggaggaatgcttccatacttatttggctctatgggtatgcaggcagtaggtagagcaggaggtgcagtagttattgaggttagaagac

SEQ ID NO: 267542 - DNA, 652 bp, Unknown
  Bacterial polypeptide expressing nucleotide sequence isolated from the Sargasso Sea
gcagcgtacacagaagatattaaattcttttcaaactccctgggctcaaaactagaaaatgtggtcgtaagcttcgatctttccaatccttttgtagtagtaggtttattggttggtggtatgttgccctatctctttggatctatgggtatgcaagcagtcggaagagcaggcggtgctgttgttatagaggtaagaagacaatttaaaaaaatacctggtataatgaaaagaaaagcaaaacctgattatggtaaacttgtagacttattaactaaagctgcaataaaagaaatgataataccatctcttttacctgttttgtctccgattattttgtatctagtcatttatcaaattggtggtcaagttgcagcattatcttctgtgggcgcaatgttacttggtgtaattattactggtctctttgtggcaatttctatgactgcaggtggtggtgcttgggacaacgcaaaaaaatatattgaagacggaaatcatggaggaaaaggatctgaagcccataaagcagccgtaacaggagatacagttggtgatccatataaagatacggcaggaccagcggtaaatccaatgattaaaattacaaatatagttgctcttctgttattagctgttattgcaggttaat

SEQ ID NO: 267543 - DNA, 887 bp, Unknown
  Bacterial polypeptide expressing nucleotide sequence isolated from the Sargasso Sea
ttcggctttggtgccgcgcttctggccatgtttatgcgtgtcggtggcggcatcttcacgaaggccgccgatgtcggtgcagatctcgtcggcaaggtggagcagaacattcccgaggacgatccgcgtaacgcagcgacgattgcggacaacgttggcgacaacgtcggtgactgcgcaggcatggccgccgacctcttcgagtcctacgcggtggtcttggttgccgcattgattctcggcagcgctgcgttcggtgaattgggcctcgtcctcccgctcgtgatccccgccatcggcgtgatcaccgcggttataggcatcttcaccgtgtcgcctcgcccctcggaccggtcgggcatgtcgtcgatcaaccgaggcttcttcatctctgcggcgatctccgcgatcttggtggtcgccgcggtattcgtgtgggtgccgagtagttggagcgacatcgatggcgatttcgcccgcgaggccgctgatgcgggaattggaatcagcccgcaattgttcgttatcggcgctgtattcgtcggcatcgtccttgcggcggtcatccagcagctcaccgcctacttcaccgagaccaaccgacgtcccgtggacgacgttgcgaagacgtccatgaccggaccggcgacggtcattctgtccggcatctcactcggcctggagtccgccgtctacacggcgctggtaattggcgccgcggtgtacggagcgttcctgctcgggtccggcattatcggcctcagcctcttcgcgatcgctctggcgggaacgggtctgttaaccaccgtgggtgtcatcgtgtcgatggacaccttcggcccggtgtcggacaacgcgcagggcattgcggaaatgtccggcggatg

SEQ ID NO: 267544 - DNA, 734 bp, Unknown
  Bacterial polypeptide expressing nucleotide sequence isolated from the Sargasso Sea
ggtggaggaatttttacaaaaggtgcggatgttggtgccgatttagttggcaaagtagaagcaggtatacctgaagatgatcctagaaacccagctgtaatcgctgataatgttggtgataatgttggagattgtgctggtatggcggcagatttatttgaaacttatgctgtaacaattgttgctacaatggttctctcgtcaatattttttattggagacttcagcatgatgatttatcctttggctattggtggtgcatgtatacttacatctatattaggaactttttttgtaacgctcgggagtgataaaaatataatgaaggctatgtataaaggatttgtcataactgctataagttctctagttatcttatatccaattactaaacatgtaattggttttactaatgagtacattgttaacgaaaaatcatttactggattaagcttatatttttgtggaataataggtctagttataacaggattaattatatggattactgaatattatacaggtacagattacagaccagttaaaagtgtagctcaatcctcaacaacaggtcatggaactaatgtcattcaaggattggcagtatcaatggaagcaaccgctattcctgcattaataattgttggtggaatattattgactaatcatattgctggcttgtatggcattgctattgctgttactacaatgcttgcgctcgctggtatggttgt

SEQ ID NO: 267545 - DNA, 790 bp, Unknown
  Bacterial polypeptide expressing nucleotide sequence isolated from the Sargasso Sea
aatgggagcttcttcagttgctttattttctcgtgtaggcggtggaatttttactaaaagcgcagatgttggagctgatcttgttggtaaagtagaagcagggatacctgaagatgatccaaggaatccaggtgtgattgcagataatgtcggagataatgtaggagatgttgccggaatgggttcagacatatttgaatcatactgtggatcaatgattgcttctattgctttagcagcatcaatgacatctgcgactattacaaaacttggtggtgatcaatatatgttgcagctaatgcctttagctctagcttcactgggtcttgtctgttcaattattggtattttgatggttcgattattttctgataaaagccctgaaattgctctaagatttggaactattggttcagcagtcgtgtttattatcgcgtcattctttctagttaaatatttaggtgtttcatctggtgtttgggcagctgttttaattggatctattggtgggattatcgtgggacttgttacagaatattatactggaggtgctccagttaagaaaattgctaaaggtggagaaacaggctctgcaactattatgattacagggttggctactggcatgcaatcagtagctattccagtttttacaatcgtatgtattatttttacttctaattattttgctggattatacggtgttggaattgctgctatcggtatgttgagtacggttggaataacaatggcaattgatgcttatggacctgttgctgataatgctggg

SEQ ID NO: 267546 - DNA, 892 bp, Unknown
  Bacterial polypeptide expressing nucleotide sequence isolated from the Sargasso Sea
cccgtgcttttagctaacggataccaaaatgtacaagcgcttgatttatttcttgctactgtagtaggtttagtttcaggaattttaatcggagtattaacagaatattatacttcagatcatcagaaaccatcacaaaatgttgcagcttcaagtgaaactggatcagcaacaaatattatttctggtttggctaatggaatgttttcaactgccttaccagtattagtaattgcactttccatccttgggtcatatcactttgctcatttatatggtatcgctttagctgcgcttggtatgttatcaacaattggaattcaattagcagttgatgcttatggtccaattgcagacaatgctggtggtatcgctgaaatggcagaacttccaaaagaagttcgcgaaagaactgataagcttgatgcagtgggtaatactaccgcagctattggtaaaggttttgcgattgggtctgctgctttaacatctttagcgctatttgcagcatttagagaaacagttggtggcttaaccttagatattaataatcctcaagttatggcaggtctattaatcggatcatcattaccatttgtattttcagctcttgcaatgcaggcggttggcgatgctgcttttgaaatgattgaagaggttagaagacaatttagagaaatcaaaggcttgcttgatggaaaagcaaaagcagattacgctaaatgtgttgatattgctactacagctgcaatcaataaaatggtactacctggagcattggcagtgttcacgccaattatatttggcttagtattaggtcaaaaagaaatgcttggtggtattttagctggagtgacagtaactggagttttactagcaatctttatgtcaa

SEQ ID NO: 267547 - DNA, 715 bp, Unknown
  Bacterial polypeptide expressing nucleotide sequence isolated from the Sargasso Sea
acagacgcactagacgcggtaggcaatactaccaaggcagtaacgaaaggttatgcaataggatcagcaggattaggtgctttagtgttgtttgcggcttatgttgaagatttaaaactaattcctaacctaactccaaactttagccttgagaatccatatgtcgtggttggtctgctaattggaggacttttgccatatttgttcgcttctatgggaatgatggctgttggaagagcaggaggagctgtagttgaagaagtaagaaaacagtttgctgaaaatccaggaattatgacaggtgaatcgaagccagattactcaagatctgttgacatgttaactaagtcagccattaaggaaatgattattccatccatgctaccggttttatcgcctttaatcttattttttattgtttctttagttgcggatcagaatgcagcagtttcagctgtaggagcaatgttattgggtgttatagtaacggggatatttgttgcaatttcaatgactgctggtggaggcgcatgggataatgcaaaaaaatttgttgaagatggcaattttggtggaaaaggatctgaggcacataaagctgctgttacaggtgatacagttggcgacccttataaggatacagccggtccagcagttaatccaatgataaaaataacaaatattgtagcgctgttactgttagccgcactataat

SEQ ID NO: 267548 - DNA, 721 bp, Unknown
  Bacterial polypeptide expressing nucleotide sequence isolated from the Sargasso Sea
tgatccaagaaatcctgctgtaatagctgataatgtcggagacaatgttggagattgtgcaggcatggctgcagatttattcgaaacctatgctgttactattgttgcaacaatggtattggcttcaatttttttccaaaacaatgcaagcatgatgatttatccattagcaattggaggagggtgtatcatagcatctataattggaactttttttgtgaaattgggtaaaagtaaaaatattatgggcgctctttataagggatttattgtaactgcaatagtatctttaatattattatatcccattacctcaaatactattggtttagatcaagtttttaatgttggaaataaatcatttgatggtgcagatttatattattgtggagtgattggtctggttgttactggattaattatttgggtaacagaatattatactggaacaaattttcggcctgtaaaaagtgtagctaagtcttccacaacaggacatggaacaaatgttatccaaggtcttgctatatcaatggaagcaacagcattacctgcgcttattatagttgccggtataataaccactaatgaattagcgggcctttttggtatcgctattgctgtaaccgctatgttggcactgactggaatggttgttgcactggatgcttacggtccagtgacagataacgctggtggtattgctgaaatgtctaagtta

SEQ ID NO: 267549 - DNA, 718 bp, Unknown
  Bacterial polypeptide expressing nucleotide sequence isolated from the Sargasso Sea
ggcaggcttggaccctgaagttcgggaaagaactgatgctcttgatgcattaggaaacacaaccgcagcaacaggcaagggatttgctattggctcagcaatattgacagctcttgcattaatgtctgcatatgggcaagtgacgggcgtaacatcctttgatataggaaaagttgatgtattaagtggcgtattaattggggccttgctcccattcgttttttctgggctaacgatgcaagctgtcgggagtgctgcaggagctatgattgaagaagttagaaggcaatttagagagattaaaggtctaagagaaggaaaaaagggcgttaaacccgatgctgctagagcggtagaaataagtacaacgggttctttaaaagctatgatattgccaagtattcttgcgataatttcacctatacttattggcttatttttaaaagcagaggctcttggaggaatgctggcagggtcaattgtttccggttttttacttgctatttttatggcaaatgcaggtggagcatgggacaatgcaaaaaaatatattgagcttggtaatcatggaggaaagggatccgatgctcataaagctgcagtaactggagatactgtcggtgatccttttaaagatacatcagggccgtcaataaacatactattaaaattaatgacaatagttgctttggtatttggaccactttttattggttaa

SEQ ID NO: 267550 - DNA, 266 bp, Unknown
  Bacterial polypeptide expressing nucleotide sequence isolated from the Sargasso Sea
agttggtgcaatgttgttaggtgtcataataacaggtctgtttgttgcagtttcaatgactgcaggtggtggtgcttgggataatgcaaaaaaatatattgaagatggaaatcatggtggaaagggttctgaggctcacaaagctgctgtaacaggtgatactgtgggtgatccctataaggacacagctggtccagctgtaaatccaatgatcaagataactaatatagttgcattattattattagcagttatcgctggctaat

SEQ ID NO: 267551 - DNA, 670 bp, Unknown
  Bacterial polypeptide expressing nucleotide sequence isolated from the Sargasso Sea
aggcgctctcgttttatttgctgcttatactgaagatataaaacacttctcaaaagaagctggatcagcacttgaaggtattgttgtaacttttgatttatcaaatccatatgtagttgtcggattattgattggtggaatgttaccttacttatttggttcaatgggtatgcaagcagttggaagagctggtggtgcagttgtggttgaagttagaagacagtttaaaaaatttccaggtattatgaaaagaaaacaaaaacctgattatgctaaattagttgatttattgacagtagctgcaattaaggaaatgattattccatcattgctcccagttctgtcacctattgttctttatttcataattttatctattggaggtcaagttgctgctttagctgcagttggtgcaatgttacttggtgttattatcacaggtctttttgttgcagtttcaatgacagcaggaggtggagcatgggataatgcaaaaaaatatatcgaagatggcaatcatggaggaaaaggatctgacgcacataaggctgcagttacaggagacacagttggagatccctataaagatactgcaggtccagctgttaaccctatgattaaaatcaccaatattgttgctttacttttattagctgttatcgctggttaa

SEQ ID NO: 267552 - DNA, 802 bp, Unknown
  Bacterial polypeptide expressing nucleotide sequence isolated from the Sargasso Sea
ttgtcatcaacaaccgggcatggtacaaatgttattcagggattggctgtatcaatggaagctacagcaattccagctttaataattgttgctggcattttaattactaactcagtagctggtttatttggtattgctattgcagtaactactatgcttgcattagctggtatggttgttgctttagatgcatatggacctgtaacagataatgctggtggtatagctgaaatgtcaaatttagataaaaaggttagaaaaactactgatgcccttgatgcagttggaaacacaacaaaagctgtaacaaaaggctatgcgattggatcagctggtttaggtgctttggttttatttgctgcttacacagaggatattaaacatttttctaaagaagctggttcagctcttgagggtattgttgtaacttttgatttatcgaatccttatgttgttgttgggttgttaatcggtggaatgttaccttatttatttggatccatgggaatgcaagctgttggtagggcaggaggagctgtagttgttgaagtaagaagacaattcaaaaaatacccaggtataatgaaaagaaagcaaaaacctgactatgctaaattagtagacttattgacagtggcagcaattaaagaaatgattattccatctttattaccagtgctttcaccagttgtattatatttcataattttagcaattggtggacaagttgcagcactagctgcagtaggtgcaatgttgttaggtgttattattactggtttgttcgttgccgtttcaatga

SEQ ID NO: 267553 - DNA, 697 bp, Unknown
  Bacterial polypeptide expressing nucleotide sequence isolated from the Sargasso Sea
aatgctttagttgctttaggtttcggtgcgtctctaatttcaatttttgcaagacttggtggaggtatttttaccaaaggtgcagatgttggtgcagatttagtaggaaaagttgaagcaggtatccctgaagatgatcctagaaatcctgctgtaatagcagataacgtgggcgataacgttggtgattgtgctggtatggcagctgatttatttgaaacatatgcggtaacaatagttgctactatggttttatcttcaattttttttcatggagatcttaatatgatgatttaccctttatcaattggtggagcttgcatattaacatctattattggaacattttttgttaagttagggaaatctaaaaatatcatgactgctttatacaaaggttttgttgttacagcagttacgtcattaataattttatatccagtcacagattatgttttaggattagaaaatacttatacattttctaataaatcattttcaggaatgagtttatatctatgtggagttataggattagttataactggtttattaatttgggtaacagaatattatactggaactaattatagacctgtaaaaagcgttgcttcttcatcaacaacaggtcatggaactaatgtaattcaaggtttggcagtttcaatggaagctacagcaataccggctttaatta

SEQ ID NO: 267554 - DNA, 685 bp, Unknown
  Bacterial polypeptide expressing nucleotide sequence isolated from the Sargasso Sea
tggctctgctggattaggagctttagttttatttgcagcttatacagaagatataaaatttttctcagagcttccaggatctaaattagaaaatgttgttgtaagctttgatctttccaatccttttgtagttgttggtctattagttggtggtatgttgccgtatctttttggatctatgggtatgcaagctgtaggaagagcagggggtgcagttgtaatcgaggttagaagacaatttaaaaaaatacctggtataatgaaaagaaaagctaaaccagattatggaaagttagtagatttattgactaaagcagcaataaaagaaatgataataccttctctattacctgttttatctccaatagttttgtatttaataatttatcaaattggtggtcaggtagctgcgttatcatctgtaggtgcaatgttactaggagttataattacaggtctttttgttgcaatttctatgactgctggtggtggagcatgggacaatgcaaaaaaatatattgaagatggcaatcatggtggaaaaggttctgaagctcataaagctgcagttactggtgatacagttggggatccttataaagatacggcaggtccagcagttaatccaatgataaagattacaaatattgtagctctattacttttagcggttattgcaggttaa

SEQ ID NO: 267555 - DNA, 177 bp, Unknown
  Bacterial polypeptide expressing nucleotide sequence isolated from the Sargasso Sea
aaaaatatatagaagatggtaattttggtggaaaaggttcagaagctcataaagctgctgttacaggagacactgttggtgatccttataaagacacagctgggccagcggtcaatccaatgataaagatcacaaatattgttgcattattattattagcggttattgcttcttaga

SEQ ID NO: 267556 - DNA, 678 bp, Unknown
  Bacterial polypeptide expressing nucleotide sequence isolated from the Sargasso Sea
ctggtttaggagctttagttttatttgctgcctatactgaagacattaagcatttttcaaaagttgctggatctaatttagaagggattatagtaacgtttgatttatcgaatccctttgtagttgttggattgcttgtaggtggtatgcttccgtatttatttggttctatgggtatgcaagctgtgggtagagcaggtggcgcagtagtaattgaggtaagaagacaatttaagaaaattccaggaatcatgaaaagaaaatctaaacctgattatggaaagctagtagatttattaactaaagccgcaataaaggaaatgattgtaccatctttattgcctgtattatctcctattgttttatatttttttattttaccaataggggggcaggttgcagctttatcttctgtaggcgctatgttactgggtgttattattactggtttgttcgttgcgatatcgatgactgctggtggcggagcatgggataatgcaaaaaaatatattgaagatggtaattatggtggaaaaggttctgaagctcataaagctgctgtgacaggtgatacagtaggagatccatacaaggatacggcaggaccagcagttaacccaatgataaaaattacaaatatagttgccttactacttcttgcggtcatatcaggctaat

SEQ ID NO: 267557 - DNA, 808 bp, Unknown
  Bacterial polypeptide expressing nucleotide sequence isolated from the Sargasso Sea
gaaagtttaggaaaaggactaaatgttgcgtttaaagcaggcgcagttacagggatgcttgttgctggtttagctttactatcaatctctgtttactatgctgttttagatacatattctgtatcagacgaaacacttaagcacgctcttgttgccttggggtttggtgcatcacttatatcaatatttgcaagacttggagggggaatttttacaaagggagctgatgttggagctgacctagttggtaaagttgaagctggtattccagaggatgatccaagaaacccagcagtaattgctgacaatgtaggtgataacgtaggtgattgtgcaggtatggcagcagatttatttgaaacttatgccgttacaattgttgccactatggttcttgcaaccattttcttttcaggtgagattgcacagatgatgactatttatcctatggcaattggtggaagctgccttgtggcatcaattattggtacattcttcgtaagattgggctcctctcaaagtataatgggtgcgttatataaaggttttattgcttccgctatattatccctaatttttatttatcctgtaacacagattgtcttaggagatatgtcaaaagaatttacttttggtgatacaactttctctggttcctctttatatatttgttcaattatcggaattgttattacaggacttttgatatggattacagaatattataccggtactaattatagacctgttcaaagtgtagctaaagcttcaaccacaggccatggtacgaatgtaattcaaggcttag

SEQ ID NO: 267558 - DNA, 718 bp, Unknown
  Bacterial polypeptide expressing nucleotide sequence isolated from the Sargasso Sea
acgacaaaagctgtaactaaaggttatgcaattggttcagctggattgggtgcattagttttatttgcagcatacacggaggacataaagcatttttcaaaagaagcaggatctgcattagaaggaattgtagttacttttgatttatccaacccttatgtggttgttggtttattaattggtggaatgttaccatatctttttggttcaatgggtatgcaagctgttggaagagcaggaggagctgtcgttgtagaagtaagaagacaatttaaaaaattccccggtataatgaaaagaaaacaaaaacctgattatgcaaaactggtagatttattaacagtagcagcaattaaagaaatgattattccttcattactacctgtcctttcaccagttgttttatattttattattttttcaattggtggtcaggttgcagcattagctgcagttggagctatgttactcggagtaattattacaggtttatttgttgctgtttctatgacagctggaggcggtgcttgggataatgcaaaaaaatatattgaagatggaaatcatggaggaaagggttcagaggctcacaaagcagctgtaactggtgatacagtaggagatccgtataaggatacagcgggtcctgcagtaaatccaatgattaagattacaaatatagttgcgttattgttgttggctgttatcgctggctaat

SEQ ID NO: 267559 - DNA, 736 bp, Unknown
  Bacterial polypeptide expressing nucleotide sequence isolated from the Sargasso Sea
catggcagcagacttatttgaaacatatgctgttacaattgttgcaacaatggttcttgcaacaattttctttagtggtgcagttgctgaaatgatgacaatttatcctatggcaattggtggtagttgtttggtggcttcaatcataggaactttttttgtaagacttggacgttcacaaagcataatgggcgctctctataaaggatttattgcatctgcgatattatcattaattttcatttatcctgttacccaattagttttaggagatatgtctacagagtttaattttggaaataccgccttcacaggcgtgtctctttatatatgtgcatttgtgggaataattattactggcttattaatttggataacagagtattatacagggactaattatcgtcccgttcaaagtgttgctaaggcatcaactactggacatggtacaaacgttattcagggccttgcagtctccatggaagctacagccttgccagcaatagtaatcgtagtaggaatagtttttacatatcaacttgcaggtctttttggaattgcaattgctgttacggctatgttagccttagcgggaatggtcgttgcactagatgcgtatggtccagtaactgataatgctggaggtattgcagaaatggcgaatcttgatgaaagtgtcagaaaaactacagacgctcttgatgccgttggaaatacaactaaagctgtaactaaa

SEQ ID NO: 267560 - DNA, 838 bp, Unknown
  Bacterial polypeptide expressing nucleotide sequence isolated from the Sargasso Sea
gaaggcaatggtaaagttaaagaaattggtgatgaaattcaccttggcgccatggtatttatgtcaagtgaatataaaaggttaagtctattttgtttggtttgtatagttgctttacttttttcactaggttgggagacagctatatcattttttgttggggccgcatgttcaggaactgcagggtttattggaatgtatacagctacaaaagcaaacgtaagaacagcagttgccgctaacgaaaaaggtccatctgaagcattaaatgtagctttttttggaggatcaattatgggtttgactgtagcctcaatgggattgtttggcataggtatcctcttttactactttggaggtagttctgaaacaatccattctatagaagggtttgctatgggcgcctcttctgttgctttattctcccgtgttggtggtggtatatttactaaaagtgctgatgtaggtgctgatttagttggaaaagttgaagctggcataccggaagatgatcctagaaatccaggagtaatcgctgataatgttggagacaatgttggggatgttgctggaatggggtcagatatatttgaatcttattgtggatcgatgattgcatcaatagctttggctgcttctatgacctctgctacgataaataatttaggcggagatcaatcattacttcaattactaccattagtattagcttctgttggattaatatgctcattagttggcattgcaatggtaagaattttttcgacaaaaactcctgagatagccctaagatttggaacaatcggttcagccgttttttttataatagcttcatatt

SEQ ID NO: 267561 - DNA, 207 bp, Unknown
  Bacterial polypeptide expressing nucleotide sequence isolated from the Sargasso Sea
ccgctggtggtggagcttgggacaatgcaaaaaaatatattgaagatggaaactttggaggcaaaggttctgaggctcataaagctgcagttacaggtgatacggttggtgatccttataaagatacagcaggcccagctgttaatccaatgattaagataacaaacattgtagccttacttttattagcagttatagctggataag

SEQ ID NO: 267562 - DNA, 819 bp, Unknown
  Bacterial polypeptide expressing nucleotide sequence isolated from the Sargasso Sea
tatggctgctttatataaaggattcgtagttactgctataacgtcattgataatattatatccattaacagattatgttttaggtttggacaaaatttataaaataggttcaaaagaatttactggtcttagtttatattattgtggtgtaatagggcttgtaatcacaggattaatcatttgggttaccgaatattatactggaacgggttacagacctgtaaaaagtgttgcacaatcatctacaactggacatggcacaaacgtaatccagggtttagctgtttctttagaggccacagcgattcctgcactcataattgtttctggtatattgatcacaaattatatagcaggtttgtttggtatagcgatagctgtaacttcaatgttagcattggctggaatggttgttgcacttgatgcgtacggtcctgtaacagataatgctggtggaattgcagaaatgtcaaaattgcccaataacgtcagaaagactacagatgcattagatgctgtcggaaatacaactaaagctgtaacaaaaggttatgcaattggatcagctggtttaggtgctttagttttgtttgcagcttatacagaagatattaaacacttttctaaaattgcaggatcaaatttggaaggtatagttgttacattcgatttatcaaatccatttgttgtagttggattattagttggtggaatgttgccctatctatttggctctatgggcatgcaagctgttggtagagcaggtggtgcagttgttgttgaagttagaagacaatttaaaaaatttccgggaataat

SEQ ID NO: 267563 - DNA, 753 bp, Unknown
  Bacterial polypeptide expressing nucleotide sequence isolated from the Sargasso Sea
tgttgtagtcttggttattgttagtattgcttttagcccacttgttggtttaggttatttaattggtgctgccttatctggaattgctggctatgttggtatgctagtttcagtagaagcaaatgtcagaactgcagaggcatcaagaaaaggtttagcagagggactttctgttgctttcaaatctggtgctgttacaggtatgttagttgcaggtttagccctattagcaattgcagtttattattttttattactaaaatttgaagttgatgagagagaaatagttaatgcgcttgttgcattaggatttggtgcatcattaatttcaatttttgcaagattaggtggtggaatatttaccaaaggtgctgatgttggtgctgatctagttggtaaagtagaagctggaataccagaagatgatccaagaaaccctgctgttattgcagataatgttggagataatgttggagattgcgctggtatggctgcggatttatttgaaacatatgcagttactattgttgcaacaatggttctttcatctatttttttcattggtgatctaaatatgatggtttatcctttaacaattggtgccgcatgtttaattacatcaattattggaactttctttgtaaaacttggaaaaaataacaatgtaatgaatgctttatataagggttttatagtatctgcggtagcttcactattaattctttggccagttaccgattatgtaattggttt

SEQ ID NO: 267564 - DNA, 394 bp, Unknown
  Bacterial polypeptide expressing nucleotide sequence isolated from the Sargasso Sea
atgtgttgatatactaactaaaacggcaattaaagaaatgataattccttcaatgcttccagtattgtctccaattttagtttatttcataattttatttatttcaggacaagaaaatgcgcttgcgtgtgtaggagctttattgttaggtgttattataacaggactttttgttgcaatcagtatgactgcaggtggcggagcttgggataatgcaaaaaaatatattgaagatggaaattatggaggaaaaggtagcgaagcacataaagcagctgttactggtgatacagtaggtgatccttacaaagacactgcaggtcctgctgttaatccaatgataaaaatcacaaatattgttgccttacttttgatagcatctttatctctataa

SEQ ID NO: 267565 - DNA, 772 bp, Unknown
  Bacterial polypeptide expressing nucleotide sequence isolated from the Sargasso Sea
aaatttaccaaaaaatgttagaaaaactacagatgcgttagatgcagttggaaacacaactaaggcagttactaaaggatatgcgataggttccgctggattaggagcactggttttatttgctgcatatacagaagatattaaacatttttctaaagttgctggatctaagctggaaggaattgttgtaacattcgatttatcaaacccatttgttgtagtcggattattagtagggggcatgcttccatatttatttggttcgatgggaatgcaggctgtaggaagagctggtggagctgttgttcttgaagttagaagacaatttaaaaaaatcccaggtataatgaaaagaaaatcaaaacctgattacggaagattagttgatttattaacaaaggcagctattaaagaaatgataattccttcattgctaccggtattatcgccaattgttttgtacctgtttattttaccaataggtggacaggttgcggccttatcttcagttggagcaatgttgttaggtgtaattattacagggttatttgtagctatttctatgacagcaggtggaggagcatgggacaatgcaaaaaaatatatagaggatggatactatggcggcaaaggatcggaagcacacaaagcggcagttactggcgacactgtaggtgatccatataaagatacagctggtccagcagtaaatccaatgattaaaattactaatatagtagctttgttacttcttgctgttatagcaggttaa

SEQ ID NO: 267566 - DNA, 910 bp, Unknown
  Bacterial polypeptide expressing nucleotide sequence isolated from the Sargasso Sea
cacaggtcacggtacaaatgtaattcaaggattagctgtttctttagaagctacagcattgcctgcgctgataatagtaggtggaattttatttactaatcatatagctggtttatttggaatagctattgctgttacaacaatgttagcattagccggtatggttgtagctcttgatgcttatggaccagttactgataatgctggcggtatagcagaaatgtcaaatcttccaaagaatgttagaaaaactacagatgcattagatgcggtaggaaacacaactaaagctgttacaaaaggctacgcgataggatcggctggattaggtgctttggttttgtttgctgcatacactgaggacattaaatttttttctaaagtgcaaggttcttctttagaaaacatcactgtaaattttgatttatctaaccctttcgtagtggtgggcttattgataggcggtatgttaccttatttatttggttcaatgtcaatgcaagctgttggtagagctggaggagcagtagtaattgaagtaagacgtcaatttaaaaaaatacctggtattatgaaacgtaagaaaaaacctgattatggaaaattagtagatttgttgactaaagctgctattaaagaaatgataataccatccttattaccagtcttatcaccaataattctatactttgttattttattgattggtggtatggaagctgcactatcagcagttggtgccatgttgttaggtgtaattgttactggtttgtttgttgcaatatcgatgacagctggaggtggtgcttgggacaatgcaaagaaatatattgaagatggaaattttggtggcaaaggatcagaagctcataaagctgccgtgacgggagacacagttggagatccttac

SEQ ID NO: 267567 - DNA, 787 bp, Unknown
  Bacterial polypeptide expressing nucleotide sequence isolated from the Sargasso Sea
ttatgttcgggaattgctgggtttattggtatgtattcggctacaaaagctaatgttagaacggcagtagctgcaaaagaaaaaggagcggctgaagccttgaatatagccttttttggaggttcaattatgggacttactgttgcggctatgggcttatttgggattggtatattattttattattttgcagaaaatgctgaaaccatccatgcaattgaagggtttgcaatgggagcttcatcagttgctttgttttcaagagttggtggaggtattttcacaaaaagtgcagatgtgggagcagacttagttggaaaagttgaggcaggtattccagaagatgatcctagaaatccagcagttattgctgacaatgttggagataacgttggtgatgtagctggtatgggatcagatatttttgaatcatattgtggatccatgattgcttgtattgcgcttgcagcttcgatgacaagccttacaataacaaaccttggtggtaatcaaacaatgttgcaattcatgcctttagctttggcttctttaggcttagtatgttcattgttaggtataattactgtaaggattttctcctctaaaagtcctgaaacggctcttagatatggcacaattggttctgcagtaatatttgttataacatcatattttttaattaattttatgggtgtttcatcaggtgtttggattgctgtattagttgggtctgtaggagggatagttgttggattaataactgaatattacactggagggagtccag

SEQ ID NO: 267568 - DNA, 721 bp, Unknown
  Bacterial polypeptide expressing nucleotide sequence isolated from the Sargasso Sea
tattttacaggaaaaaatattttagcttcaagtactggaaactccaagatgcaagaaattgcatctgcaattcaaattggtgcaaaggcgtatttaaacagacagtataaaaccatcgcaatcgttggtttggtagttcttgttattataagtttttcatttagcctcttagtgggtttaggttacttaattggtgctgcattatctggtattgcaggatatgtaggaatgctggtttcagttcaagctaatgttagaactgctgaagcatctagaaaaggtctgtcaaaaggtttatcaattgcgtttaagtctggtgcagtgaccggcatgttggtggctggattagctctattatcaatagcagtttactattatttacttttaaaatttaacgttgataaaagagaattaatcaatgcacttatcgcattaggatttggagcttcacttatttctatatttgcacgattaggtggtggaatttttacaaaaggtgctgatgttggtgcagatttagttggaaaagtagaggcaggtattccagaagatgatccgagaaacccagcagtaatagcagataacgttggtgacaacgttggtgattgcgcaggtatggcagctgatttatttgaaacttatgcagtaacgatagttgctacaatggttttatcctcaattttttttcaaaatgatttaatgatgatggtttatcctctta

SEQ ID NO: 267569 - DNA, 751 bp, Unknown
  Bacterial polypeptide expressing nucleotide sequence isolated from the Sargasso Sea
gcaattgtaacttatttttttagttatctagttggaattggttatttcataggagcatttctatctggtgttgccggttatgttggaatgcttatatcagttaaagctaatgttagaactgctgaagcagcaaggaaaagcttacaagctggcctaacaattgcatttaagtctggtgcaataacaggattattagttgcaggattagctttaatagcaattactatttattatattattttaattaatctaaatgttgataacagagaaattattaatgcgctagttgctctgggttttggagcatcacttatttcaatttttgcaagacttggaggaggaatatttactaaaggagcagatgttggagctgatttagttggaaaagtagaagcaggaattccagaagatgatcctagaaacccagccgttatagccgacaacgtgggtgacaatgtaggagactgtgcaggaatggctgcagatttatttgaaacttatgcagtaactatagttgcaaccatggttcttgcttcaatattttttcctaataattataacttaatggtttatcctttagctattggtggagcttgtatcatcacttcaataattggcacttggtttgttaaacttggaaaaagcaaaaatattatgggagctctttataaaggatttattgtaacagccattacatcgttaattattttatatcctgtgacagactctattataggattaacagaaaatt

SEQ ID NO: 267570 - DNA, 415 bp, Unknown
  Bacterial polypeptide expressing nucleotide sequence isolated from the Sargasso Sea
cggaacagtaaagccagattattcaaaagccgtagatttgcttaccaagtctgcgattaaggaaatgatagttccttccttacttccagtgcttgtgccagtcgtcttggcagttcttatgaatatcatgatgccagaagacggaggcattaaagcacttggcggactattgatcggaacaattgttacaggaatatttgttgcaatctcaatgaccacaggaggtggggcttgggataatgctaagaaatacgtggaagatggtcattgtggcggcaagggatctgaggcacataatgcttcaatcactggtgatacagtaggagatccttataaagataccgctggaccagcaatcaatcctttgattaagatcattaatatcgttgcattattgttaatcccattgctctaa

SEQ ID NO: 267571 - DNA, 886 bp, Unknown
  Bacterial polypeptide expressing nucleotide sequence isolated from the Sargasso Sea
aaatgaattagcagggttatttggtattgcaatagctgtgacagcaatgttagctctaacaggaatggttgtggctttagatgcttatggtccagttacagacaacgctggtggaatagctgaaatgtctaagctaccaaaaaatgttagaaaaactacagacgcacttgatgctgttggtaatacaactaaggctgttaccaaaggatatgcaattggttcagcaggcctaggcgcattggttctttttgctgcgtacacagaagatattaaattcttttctaaagtttctggttctacacttgagggaataaatgtaagttttgatttatcaaatccatttgtagttataggtctattggtaggtggaatgttaccttatttatttggatcaatgggtatgcaagcagtaggtagagcaggtggagcagttgttattgaagtaaggagacagtttaaaaaaataccaggcattatgaaaggtaaaagaaaacctgattatggaagattagttgatttattaacaaaagccgcaatcaaagaaatgattgtaccttcacttctaccagttctttctccaatagttttatatggaattatttattttattggtggtttagaagcggcattatcatcagttggagctatgctgcttggagttatagttacaggtttatttgtggctatttcaatgacagctggcggtggtgcttgggataatgcaaaaaaatttattgaagatggtaactacggcggcaaaggatctgaatcacataaagctgctgttactggtgatacagtaggtgatccctataaagacactgcgggccccgctgttaacccaatgatcaaaattacaaatatagtcgctcttttacttttagcg

SEQ ID NO: 267572 - DNA, 322 bp, Unknown
  Bacterial polypeptide expressing nucleotide sequence isolated from the Sargasso Sea
atttgctttatatataattatttattttataggtggacaagtagcagctctatcttctttgggagctatgctattaggtgttatcattacaggtctttttgtagctgtttcaatgactgccggtggcggtgcatgggataatgcaaaaaaatatatagaggacggaaaatttggtggtaaaggatctgaggctcacaaagctgctgtaacaggtgatactgttggtgatccatataaagatacagctggtccagctgtcaatccaatgataaaaattacaaatatagtggctttactgttattagctgtaattgctggttaa

SEQ ID NO: 267573 - DNA, 988 bp, Unknown
  Bacterial polypeptide expressing nucleotide sequence isolated from the Sargasso Sea
atagtatccttaatattattgtatcccattaccttaaatacaattgttttagatcaagtttttaatgttggaaataaatcatttaatggtgaagatttatactactgtggagtgataggtttagttgttactggattaattatttgggtaacagagtattacactggaacaaattttagacctgtaagaagtgtggcaaaatcttctacaacaggacatggaacaaatgttattcaaggtctcgctgtatcaatggaagcaacagcactacctgcattaataatagttgcgggtatcatagctaccaatgaattagcgggtctttttggtatagctattgctgtaaccgctatgttagcactgactggaatggttgttgcattagatgcttatggtcctgtcacagataatgctggtggtattgctgaaatgtctaaactaccaaaaaatgtaagaaaaaccacagatgctttagatgctgtgggaaatactacaaaagcagttacaaaaggttatgcaataggatcagcaggtttaggggcgttagttttatttgcagcatacacagaagacataaaatttttttctactgtttctggttcaagtttagaaggaatagatgtaagttttgatttatcaaatccttttgttgtaattggattgttggtcggtggaatgttaccttatttgtttggatcaatgggcatgcaggccgtaggtagagctggtggagctgtggttatagaagtaagaagacagtttaaaaagattcctggtattatgaaaggtaagagaaaaccagattacggtagattagtagatttacttactaaagctgcgatcaaggaaatgatagttccatctcttttaccagttttgtcacctatagttttatatttagttatttattcaataggcggactagaagctgcactatcgtctgttggcgcaatgcttctgggggtaatagtgacagggttatttgtgc

SEQ ID NO: 267574 - DNA, 280 bp, Unknown
  Bacterial polypeptide expressing nucleotide sequence isolated from the Sargasso Sea
gctgcattggcagccgttggagcaatgttattaggtgtaattattacaggattattcgttgctgtttcaatgacagcaggtggtggagcatgggataatgctaagaaatatattgaagatggtaaccatggtggaaaaggttctgaagctcacaaagctgctgtgacaggtgatacagttggtgatccttacaaagatacagctggtcctgccgttaatccaatgataaaaattacaaatattgttgctttattattattagctgtaattgcaggttaat

SEQ ID NO: 267575 - DNA, 403 bp, Unknown
  Bacterial polypeptide expressing nucleotide sequence isolated from the Sargasso Sea
catgagctacgacaagatccccgccggcaaagacattcccaacgacatctacgtcgccatcgaaatcccagccaaccacgcgccgatcaagtacgagatcgacaaggacagcagcgcgctgtttgttgaccgtttcatggccaccccgatgttctacccggccaactacggctacatccccaacaccctggcagacgacggcgacccgctggacgtgctggttgttaccccgcacccggttgctccgggctcggtcattcgtgcccgcccggttggcgtgttgcacatgactgatgatggcggcggagatgccaaactgatcgccgtaccgcacgacaaactgaccgtgctgtaccgtgacatcaaggaatacaccgacctgccggaactgctgattcagcaa

SEQ ID NO: 267576 - DNA, 712 bp, Unknown
  Bacterial polypeptide expressing nucleotide sequence isolated from the Sargasso Sea
tatgtctgttgataccatcttattatacacaatttttgctggaattttatccattgtatatggatttgttacaggatcttcaattttaaatgcaagtgcaggaaatgcaaagatgcaagaaattgcttctgctattcaaattggagcaaaagcatatttaaacagacaatataaaacaattgctattgttggagttgttgttttagttattattagttttgctttttcattattagtaggaattggatatttaataggagcagcattatctggtatagcaggttatgttggtatgttagtttccgttcaagctaacgtacgtacagctgaggcatcaagaaaaggtttatctcaaggtctttcgatagcatttaaatccggagcaatcacaggaatgttggttgctggtttagcgttattagctattgcagtttattactacatattattgtcaactggtgttgacgaaagagaaattgtaaatgcattagttgctctaggttttggtgcttctctaatatctatatttgcaagattaggtggtggtatttttacaaaaggtgctgatgttggtgcagatttagttggaaaagtagaagcaggtattccagaagatgatcctagaaatccagctgttattgcagataatgtaggtgataatgtgggagattgcgcaggtatggcagcagatttatttgaacatatgctgtaa

SEQ ID NO: 267577 - DNA, 344 bp, Unknown
  Bacterial polypeptide expressing nucleotide sequence isolated from the Sargasso Sea
cttattgcctgttctttctccaataatattatactttctaattttacaaattggtggcttagaggcagcactctcgtcattaggagcaatgttattaggtgtaattattacagggttgtttgttgcggtatccatgacagcagggggaggagcatgggataatgcaaaaaaatatattgaagatggaaattttggcggaaaaggatctgaggctcataaatcagctgtaacaggtgacactgttggtgacccttacaaggataccgcaggacctgcagtcaatcctatgattaaaattactaacatcgtagcattattgttactagcagttattgctcattagt

SEQ ID NO: 267578 - DNA, 532 bp, Unknown
  Bacterial polypeptide expressing nucleotide sequence isolated from the Sargasso Sea
atgagcttaagtcaggttgccgcaggtaaaaatctgccagatgaaatcaatgtcatcattgaaattccggccaatgccgatccaatcaaatacgaagtagacaaagacacaggcactgtctgggttgaccgttttatggctactccaatgttttatccttgcaactatggttttgtaaaccacactctgtcgttagacggtgacccggttgacgttttagttcctacgccttacccactggtaccaggtgctgtgatcaaatgtcgtcctgttgctgtattaaaaatggcggacgagtcaggcgaagatgcaaaagtattggcagtgccaatcagcaagctgactaaaatttatgacaacatccaggatctggacgacgtaccagaactgctgaaaaaccagatccagcatttctttgaacgttataaagagttagagccaggtaaatgggtgaaagtgattggctggggcgacaaagctgaagccaaagctgaaatcgtcagttcatttgaacgcgctcagcagaagtaat

SEQ ID NO: 267579 - DNA, 2047 bp, Unknown
  Bacterial polypeptide expressing nucleotide sequence isolated from the Sargasso Sea
aatgcttttaaactatcaaggatctatagttgcggcaattatgggcttgcttttggcagcctattttgcaaatagaatattgtctataaatgtttctgatgaaaaagttagtaatctttccgatgcaatcagaaaaggatccatggcattcttgaaaagacaatattcatggataagtatttttgtcatagttttagctattttaatcccaactcttactgatctcggagtttggggatctgtatctttcattggcggtgcattattttcatcgttagctggatttattggaatgagaatagcaactgcagctaatggaagaacaacagaagctgcaagagacggaggaacgctaaaggctttaccagtcgcattcagaggtggagcggtgatgggtttttcggttgctggcttaggtttgttgggagtaggtcttggatattggatttttgttgacttattggaacttgaaaatgcttatgatattttggccgcaatcggtttaggaggttcttcgattgctctttttgcaagagttggaggaggaatttacacaaaagctgctgatgttggagctgatttagttggaaaagtagaggctggaattccagaagacgatcctagaaatcctgcaactattgctgataacgttggtgacaatgttggagatgtagctggtatgggtgcagacttatttgagagctatgttgggtcactagtcgcgccattagcttatgctgcaatagtattttctaattcagatacattgccttcactattattttttccacttgctgttggcactattggaatgctagcttcaatcgtttcctcatttcttgtagtaccaaaagagggaaaacttgcacaagctttacatagaggaacttattctgcggcagctttaaccgcaataggagttttctttctttccaacacaatgttttcggattactctgaaaacccaatcggcctttttttctcagtaataattggtttattagtaggaataactgtaggtcaaatttcagaatggtttacatcagatcatcactcaattgttaaaaacatagctgatcaagcaaagacgggaccggccactcttgtactttcagggatatcagaaggcatgagatctgcagctttctccgtaattgttgttgtttttggagtttttggagcttatacagcaggagattgggctttaggtgatggtggtggaatatacggagttgcagttgcagctattggagttttagcaacattgggtatcaccgtagcagtggatgcttacggacctattgcagacaatgcaggaggtatagcagaaatggcccatttggatcctgaagtaagaaaagccacagatgaattagattctctaggaaacactaccgcagctatcgcaaaagggtttgcaattggatcagctgctgtaacagccctagctttattttctgcatttgtacaaagtgcaggattggctgaatctggattaaacattacaaaagtagaagttactcttggattgtttctaggtgggatgttcccatttttatttgcagcaatgacaataaatgctgtaggaagagctgccttcaaaatgattgaagaggtaagaaggcaatttagagaaatacctggattaagagaaggtaaagagggtgtcgttcccgaatatgaagagtgtgtagacattgctaccacagcggcattaagggaaatgctgcttccaggcggattagcaattgttttacctctagtaatcgggttttggaataaagaagccttaggtggttttttagctggcgctctcgtaactggatttttgcttgcgatatttatggctaactccggtggcgcttgggacaatgcaaaaaaatatattgaagcaggtggcggtgctggtaagggatctgaagaacataaggcagctgttataggggataccattggagatccattcaaagatacctcaggaccggcaatgaatatcgttattaaagtaatgacaatagtaagtcttatatttgcatcagctttttga

SEQ ID NO: 267580 - DNA, 2119 bp, Unknown
  Bacterial polypeptide expressing nucleotide sequence isolated from the Sargasso Sea
tatggactatatatatcttatccctgcagctggaattgttgcattaatgtttgttgttataaagaatcaatgggttgccaaaaaagaaattggtaacgctaaaatgaaacgaattgcagataatattgccgatggtgcaatggcatttttaaaagcagagtataaaattctgtctgtttttgttttatttacctctgttctattagcatataaaggaattaatgaaggtagtagttggttagttgcagtatcatttattgtcggtgcattatgttcaggattagctggatatataggaatgaaagttgctactaaagctaatgtaagaacaacaaatgcagctcaagattcattaggtaaagccttagaaatagcattttcaggtggatctgtaatgggaatgggtgttgtaggtcttggtgtactgggtataggatctctttttattctatatgaaccaatgtttgatgatattaatacagtgattcaggtgatttctgggttttctcttggagcatcttcaattgctttatttgcaagagtaggtggaggaatttatacaaaagctgcagatgttggggctgatttggtaggtaaagtagaggctggaataccagaagatcatccactaaatcctgcgacaattgctgataatgtgggagacaatgtaggagatgtagctggaatgggtgctgatttatttgaatcatttgtaggttctattattggtgcaatggtcctaggtgctgcttttgttggattaactgaattctctggagtagagcttaatgcggttttacttccactatttattgcagcttcaggtattataatgtcgataatcgggaccttctttgtcaaagtgaaagaaggaggcagcccacataaagcattaaatgcaggagaatttatatcagcagtattaatggcttttgtgacatttctactgattcaaaacttactcccagagtcatgggtaatgaataatgttgagtttacatctcttggagttttttatgcaacaattagtggtctagctgcaggtcttcttgttggtaaagtaactgagtattatacagcaactggtaaaaagcctgttctatcaattgtaaatcaatcagaaactggtgctgcaacgacaattatttcaggacttggcgttggtatgatttcaactgctcttcctataatttttatttgtgctgctatccttatttcacatcattatgcaggactttatggaattgctatagctgctgttggaatgttagcaaatactggaattcagttagctgttgatgcttatggtccaatttctgacaatgctggaggtatagctgaaatggctgaattagatccaatagtaagagaaagaacagataagctagatgcagtgggtaacacaacagctgcaattggtaaaggttttgcgattgcatctgcagcattaactgcattagcattattcgctgcatttatgcaaacagcagagattaattcaatagatatttctaaacctatagtaatggcaggtttattactaggtgctatgcttccatttgttttttctgcactttcaatgaaagctgttggaaaagctgcaatgagtatgattgaagaggttagaagacaatttaatgatcttccaaaattaaaagctgcattagaaattatgagaaaatatgattccgatttatctaaagcatcagatgctgatatgaaaatttttaatgaagctgatggagtagctgagtatagtaaatgtgtagagatttctacgcaagctgcattaagagagatggtcctgcctggaataatggcaatatctgtacctgttataattggttttactggtggtgctgaaatgctaggaggtctattggctggcgttacttcatgtggagtattaatggctatatttcaatcaaattctggaggtgcttgggataatgcaaagaagatgattgaagaagatgggagaaaagggactgaagctcataaagctgcagttgtaggagatactgttggtgatccatttaaggatacttcaggaccttctttaaatatcttattaaaattaattgcagttgttgctcttgtaatagctcctttactttaa

SEQ ID NO: 267581 - DNA, 1030 bp, Unknown
  Bacterial polypeptide expressing nucleotide sequence isolated from the Sargasso Sea
ataaaggttgataatgaagaagttctaaacataggtaatcttattaaagaaggagcaatggcattcttaaaacgagaatatactgttctttcaatatttgttctagctgtttttgtaatactggtagtctttattgatttagatctgcttggaattattggaacaagccaaggcaatattaatatgtcaatatcatatcttattggagcagtaggttctgcactagctggatattttggtatggctgctgcagtaagaggaaattcaagaacaacagaagcttctcaaaaaagcttaaataatggattaagggttgcattcagtacaggtgcagtgcctggttttgctgttgttggaataggtttattaggagtatctgtactatacctaatatttgaaagcgcaactgtaatagctggatttggttttggtgccagtagtgtaggtttatttgcaagggttgcaggtggtgtttatacaaaagctgctgatgtaggagcagacttagtaggaaaagttgaagctggattacctgaagatgacccaagaaacccggcaactattgctgataatgttggagatatggttggagatactgcaggaatgagtgctgacttatttgaatcatatgcgggatcactaattgcaactatcgcactagccgtagcagcaacaaaaagcatgacaagtgatttagttgttcttccaataatagtctctagtatcggtgttttagcatctgtaattggtacttttttagtaaggaccaaagaaggtgcatctatgaacaacttattatggagttttagaataggaatttttggggctactatacttggagttattggagctggattatacatttcagcaaaagatatggacttcaacctattatgggtaatattattcggtaacttactgggtattatagttggaactgcaactgagtattttacatcttacgaatataagcctgtaaaatggatggcttctcaagcagagacaggagctgcatcagtaattattgctg

SEQ ID NO: 267582 - DNA, 322 bp, Unknown
  Bacterial polypeptide expressing nucleotide sequence isolated from the Sargasso Sea
tattgttgtctattttgttatattatctatagctggtctagcagcggcattatcctgtttaggagctttgttattgggagttattataacaggtttgtttgttgctataagtatgactgcaggtggcggcgcatgggataatgcaaaaaaatacattgaagatggtaatcatggaggtaagggaagtgatgctcataaagcagctgtaactggagatactgtaggagatccttataaggatactgctggcccagctgttaatccaatgattaaaattacaaatattgtagctcttttacttttagctgcaatatcactataa

SEQ ID NO: 267583 - DNA, 747 bp, Unknown
  Bacterial polypeptide expressing nucleotide sequence isolated from the Sargasso Sea
ataatgcagggggaatagctgaaatgtcagagatgggagaagaaactcgtaaaattactgattctctagatgaagtaggaaacacaacagcagctattggaaaaggttttgcaattagtgctgctgctttagctgctcttgcacttataagtgcttatatcgaaaaaattgcttcaaaaagtgaaaactttgttttggcaattaacgacccgctagtcctagcgggaatgtttctaggtggaatatttccttttttagtgagctcactaacaatgagagctgtcggagatgctgcgtttgaaatgattaaagaaatacgacgtcaatttaaggaaatacctggcttactagaaggcaaagctaaacctgatactgctacttgtgtggacatcgcaacaaaagcagctttaagaaaaatgatagctcctggagcgcttgctgttctcgctcctgttgtggtaggctttttagctggaccaaaagccttaggtggtatgctcggaggagcactaatatgctgcgtaatgatggcgctaatgatgtcaaatgctggcggtgcatgggataatgcgaaaaaatacgtcgaaaaaggtaatttaggtggcaaaggctctgatgttcataaagctgctgtagttggtgatactgtaggtgatccactaaaagacacttctgggccatcaatgaacatcttgattaacgttatggctatagttagcttggttatagctcctctactaatctaat

SEQ ID NO: 267584 - DNA, 955 bp, Unknown
  Bacterial polypeptide expressing nucleotide sequence isolated from the Sargasso Sea
atgatttctggtctttcggttggaatgcagtctgttgtaattcctatcttaattttggcaacaattatttttatttctacaacattatttgatttatatggagttggcattgcagcagttgggatgcttgctacagttggcataacaatggcaattgatgcatatggtcccgttgcagataatgcaggtggaattgcagagatgtcaggaatgggagaagatgttagagaaattactgattctcttgatgagcttggaaatacaactgcagccatcggtaagggatttgcgataggtgcagctgccttggctgcattagctataatcgcagcttttgttcaagtagttggtgtaaacaatgacggattccagttgattttatctgatccaattgttttagttggaatgtttattggaggctccatcccattcttagtttcctcaataacaatgactgccgtaggtgatgcagcatttgagatgattaatgagataagaagacagtttagagagattccaggaatattagaaggcacaggagagccagacactgacaaatgtgttgagattgctacaagagcagcacttcagagaatgcttttaccaggagtaattgcagtttcaatgcctccattagttggtttcttattaggagcaaaagctcttggcggaatgttagctggaggtttgcttggttgtgttcttcttgctctaatgatggctaatgctggaggagcttgggataatgctaagaaatatattgagaaaggaaatcttggtggaaaaggttcagatacacatgctgctgcagttgtgggcgacacagttggagacccttttaaagatacttcgggacctgcgatgaatatcttaattaatgtaatggcaattgtaagcttagttattgctggccttctaccagttgatggcctaatagttaccttatttaattaag

SEQ ID NO: 267585 - DNA, 2002 bp, Unknown
  Bacterial polypeptide expressing nucleotide sequence isolated from the Sargasso Sea
atgcaaacaagttttgaatttatttatctaataatttttgctggaatattagcagtaggatatagctatttgttatcaggacaaattttatcatcgagccctggcaactctaaaatgcaagaaattgcagacgcaattcaagtgggggctaaagcatatctaaatcgtcagtacaaaactatcgcaattgtaggcttgattgttttgttgattgtaacttatttttttaatttacttgttggtttaggatattttattggagcagctttatcaggtgtagcaggttatgtaggtatgcttatttcagttaaagcaaatgttagaactgctgaagcttcaagagataatttacaatcaggactatctatagctttcaagtcaggagctataacaggtttattggttgcaggtttagctttattagctataacaatttattattttatacttttaagatttaatgtagacagtagagagataattaatgcactagtcgcacttggatttggtgcatcattgatttctatttttgcaagattaggcggaggtatttttaccaaaggagcagatgttggcgctgatttagttggtaaagtagaagctggcatccctgaggacgatccaagaaatccagctgtgatagcagacaatgttggtgataacgttggtgattgtgcaggtatggctgctgatctttttgaaacatacgctgttactgtagttgctactatggttttgtcttcaatattttttgttaatgattttaacatgatgatatatcctttagcgataggtgcctcatgtatatttacttcaattgttggaacttggtttgtaagactcggaaagagcaaaaatataatgactgctttgtataaaggatttgtagcaactgcattattatcattattaattttatatccagtaacagactctgttataggtttaaaaaatgtttatacagttaacgagaactcattcactggcttaagcttgtatatttgtggtgtagcaggacttattataactggattaattatttggattactgaatattacacaggcacaaattttagaccagtaagaagtgttgctaaatcatctacaacaggtcatggcacaaatgttatacaaggtttggcaattagcatggaagctactgcaattccggctttaataattgtaattggtattttgtttacaaaccatcttgctggtttatttggaatagctattgccgtaacttctatgttagctcttacaggaatggttgttgccttagacgcttatggacccgtaactgacaatgctggcggtattgctgaaatgtcaaaactaccaaagaatgttcgtaaaactactgatgcattagatgcagtaggaaatactactaaagctgtaacaaaaggatatgctataggttcagctggtctaggagctttggttttatttgcggcttatacagaagatattaaatttttttcaaaggtagaaggttctgctttagagaatattaatgtaagttttgacttatctaatccatttgttgtggtgggtttattagtaggaggaatgcttccttatttatttggatcaatgggaatgcaagccgtaggaagagcaggtggtgcggtagttatagaagtcagaagacagtttaaaaaaattccaggaattatgaaaggtaaaagaaaaccagattatggtaagttagtagatttattaactaaggctgcaataaaagaaatggttgtaccatcattattgccagttttatctccgataattttatatttaataattttaccaattggtggtattgaagcggctttgtcatcactaggtgcaatgctgttaggcgtaattgtaactggtctttttgttgcagtctctatgaccgctggaggtggagcttgggataatgcaaaaaaatatatagaagatggaaattttggaggaaaaggatcagaagcacataaagcggctgttaccggtgatactg

SEQ ID NO: 267586 - DNA, 316 bp, Unknown
  Bacterial polypeptide expressing nucleotide sequence isolated from the Sargasso Sea
cttatactttattatttatggaattggtggtcaagtagcagcacttgcatctgttggtgcgatgttgctaggagtaattattacaggtttatttgttgcgatatctatgacagctggaggtggtgcttgggacaatgcaaaaaaatatattgaagacggtaattttgggggaaagggttctgacgctcataaagcagcagtaacaggtgatactgttggtgatccatataaagatactgctggacccgctgttaatccaatgataaaaattacaaacattgtcgcattattactattggctgtgattgctggataa

SEQ ID NO: 267587 - DNA, 1080 bp, Unknown
  Bacterial polypeptide expressing nucleotide sequence isolated from the Sargasso Sea
taactggactaataatatgggttactgaatactacactgggaccaattatagacctgttaaaagtgttgcatcatcctctacaactgggcatggtacaaatgtaattcaaggtttagctgtatcaatggaggctacagcaattccagctataattattgttggaggaattttattaaccaaccatattgctggtttatatggaatagctattgctgttaccactatgcttgcattagctggtatggttgttgctttagatgcatacggtcctgttactgacaatgcaggtggtattgctgaaatgtcaaatttaccaaaaaacgtaagaaaaacaactgacgcattagatgctgtaggtaacacaaccaaagctgtaacaaaaggatatgcaataggatctgcaggtttaggtgctttggttttgtttgcagcatatacagaggatatcaaacacttttcaaaaatagctggatcaaaattagagggcgttacagtaacttttgatttatcgaatccattcgtagttgttggtttattagttggcggtatgctgccttatctttttggatctatgggcatgcaagcggtcggtcgagcaggtggcgctgtagtagttgaagtaagaagacaatttaaaaaaattccgggcattatgaaaagaaaggccaaacctgactatggaagattagttgatcttttgacacaagctgcaattaaagaaatgataattccatctttattaccagtgctctctccaattgttttatatttcattatctttgcaataggtggtcaagttgcagccttagcagctgttggtgctatgttgttaggagttataattacaggattatttgtagcaatatctatgacggcaggtggaggagcatgggataatgcgaaaaaatatatagaagacggaaattatggtggaaaaggttcagaggcacataaagctgcagttacaggcgacactgtgggtgatccatataaagatacagctggacctgcagttaatcctatgattaaaattaccaatattgtagcgcttttgcttttggcagttttagcaggataaa

SEQ ID NO: 267588 - DNA, 1402 bp, Unknown
  Bacterial polypeptide expressing nucleotide sequence isolated from the Sargasso Sea
atgactgaaggtcaagcattatggattgcattatctgcttcgatagttgcaatcgtttgtggagttgttttttcactccaaatcatgaaggaatctgatggcaatgatcgaatgagagaaattgccggagcgattcaggaaggagctcaagcttatctaaatagacaatattccacaattgcgattgttggagtggtcatatttatactattgggtataagtggaattggttggtcaagtgcaattggctttgcaattggtgctgttttctcaggcttagcaggatatatcggcatgagtatttccgtcagagcaaatgtgagaactgctcaagctgcacaccaaggaatgaatgcagcactatcaatggcctttagaggcggcgcagttactggcttgcttgtcgttggtcttggtcttttaagtattgcaggttactacctcattcttacatcatctggtgtatctgttgatgacagcttgcatgcattaatcggattggcttttggaggctctctgatttctatttttgcaagacttggcggaggaatcttcaccaagggtgctgacgtaggtgcggaccttgtcggtaagattgaagctggaattccagaagatgatccgagaaatcctgccgttattgcagataatgttggtgacaatgtcggtgactgtgctggtatggcagcagacctttttgagacatatgcagtaaccatcatagctactatgctgcttggcggtttggtcttcagtggtgcagaagcaactaatgctgttatgtatccacttgttttgggggcggtatcaattgttgcctctgtaatcggagcattatttgttaaagcgaaagatggtggcagtgtcatgggagcgctctataagggtgtgattatctctggtttacttgctgcaattgctttctacccaatcaccggaatgatgggaatggacatgggcctattttggtctgcgatcattggattagtcctgaccgcttttatggtattggtaacagaattctataccagtactgagtatagtcctgtgcaaaaaattgctgaggcttcaactactggacatgcaaccaatatcatcgccggacttggggtttcaatgaagtcgacagctcttcctgtactggcagtttgtttcagtatctggggcgcttatgctttaggtggtctttatgggattgcaattgctgcaacatcaatgttgtctctaactggaatgattgtagctttggatgcatttggtcccattactgataacgcaggtgggattgctgaaatggcagaattaccttctgaaattagaggtatcacagatccattggatgcagtaggaaatacaacaaaagctgtaacaaagggttatgcaattgttcagcgggtctgct

SEQ ID NO: 267589 - DNA, 889 bp, Unknown
  Bacterial polypeptide expressing nucleotide sequence isolated from the Sargasso Sea
atgaactcatcagtcgaaactattcttttatatactatagcagcaggttttttatcaattgtatacggattttttactggaaaaaatattttaaattctagtgctggaaattcaaagatgcaagatattgcatcagcaattcaaataggagcaaaagcttacttggcaagacaatataaaactattgcaattgttggtgttgttgtattagtaattgtaagcgtcgcttttagtccgcttgttggattaggttatttaattggtgcagctttatcaggaatagctggatatgttggaatgttagtttctgtccaagctaatgttagaaccgctgaagcatctagaaaaggactggctagtggtctttctgttgcttttaaatctggtgctgtaactggtatgttggttgctggtttagcgcttttagcaatagctgtttactactatttattattaaaatttaatattgatgagagagaaattgtgaatgctttagtggctttaggttttggtgcctctttaatttcaatttttgctagattaggagggggaatttttactaaaggtgcagacgttggtgctgacttagtaggaaaagttgaagctggtataccagaggatgatcctagaaatcctgctgtaattgctgataacgtaggtgataatgttggagattgtgctggtatggctgcagatttatttgaaacttacgctgtcactattgttgcaacgatggttttatcctcaatattttttccaggagatatgtctatgatgatttaccctttaactattggtggtgcatgtattttaacatcaataattggaaattttttgttaaacttggtggaagcaacaaatgttatgggggctttatataaaggatttg

SEQ ID NO: 267590 - DNA, 808 bp, Unknown
  Bacterial polypeptide expressing nucleotide sequence isolated from the Sargasso Sea
atgagcataattaatttaataatcttctccggcgtactatcaataatttatggtttttgggcaggtaattcagttttaaagtcaaacgcgggtaatgaaaaaatgcaggaaatttcagctgcaatacaggaaggagctcaagcatatttgaatagacagtatacaacaattgcaattgttggagtggcaatctgtatattgttatatttattttttagagatttttgggtagttggtggatacttaattggggctattttatctggtgcagccggatatattggtatgataatttctgtaagggctaatgtaagaactgcccaagcagcaacaataagtctaggtgatggtttaggtgttgcattcaaggcaggtgcggtaacaggaatgctagtggctggattagcacttttatcaatatcagtttattatgcaatattagactcttattcagtatcagatgaaacattaaaacatgccttagtcgcattaggttttggagcttcattgatttcaatttttgcacgtttaggtggaggcatttttacaaaaggagcggatgttggagccgatttagttggcaaagttgaagctggcatccctgaggatgatccaagaaatccagctgttatagcagataatgttggtgacaatgttggggattgtgctggcatggcagcggacttatttgaaacttacgcagtaacaattgttgcaactatggttcttgcaacaatattctttaccggtgaagtagctcacatgatgactatatatccgatggcaattggaggtagctgcttagttg

SEQ ID NO: 267591 - DNA, 1173 bp, Unknown
  Bacterial polypeptide expressing nucleotide sequence isolated from the Sargasso Sea
atcccggcgcgtggttttacttttacctgtgcggtttgattggcatcgcgtgcgcgtacacgttcgtcttcatcgcgcagtattacaccgattacaagtactcgcccgtgcgcgtgatcgccgaggcgtcgacgacgggacacggcaccaacatcatcgccggcatcggcgtcggcatggaatccaccgccgcgccagtgatcgtcatctccatcgccatcatcagcgcatactggtgcggaaactggagtgggatcacaaactcgaacggtgaagcgatcggtggtctcttcggcaccgccgtggcgacgatgggcatgttatcgacggcggcatacgtgctcaccatggacgtcttcggcccgattgccgacaacgccggcggcatcgtagagatgtctgaacaacccgagagcgtgcgcgacatctgcgacgagctggacgcggtcggaaacacgacgaaggcgacgacgaaggggtacgccatcggatccgccgccttggcctcgttcctgttgttctccgcctttatggacgaagtctccgccttcaccgggaaaccgttcgatcaagtcgacatcgccatcccggaggtgttcgtcggtggtttactcggcgccgcgctcgtctacttgttctccgcgtggtccatcaccgcggtcggaagatcggcgcaagaagtcgtacgcgaagttcggcgacaattcgccgagcgaccgggcatcatgacgcacgaggagactcccgattacgcgcgatgcgtcgccatcgtcgccgcgagcgcgttgcgagagatggttcgtccgggcgctctggccgtcttgagcccggtcgtcgtcggcatcgtcttcaaaaacgtcggctacgccacgggtcaggaattactcggcgtcaaatccgtcgccgcctttttaatgttcgccaccgtcgccggcatcttgatggcgctcttcctgaacacggcgggcggcgcgtgggacaacgcgaaaaagtacgtcgaaaccggggcgcacggcggcaaaggaagcgaagcgcacaaggcggcggtgtccggcgacacggtcggtgatcctttcaaggacacggccggtccgagcattcacgtgctcatcaaaatgctcgccaccatcacgctcgtcatggcgcccatgttcctcgacggcgtcgcttaaa

SEQ ID NO: 267592 - DNA, 1381 bp, Unknown
  Bacterial polypeptide expressing nucleotide sequence isolated from the Sargasso Sea
attggaaaatttatatttaataatacttgttggaatagttgctgtgatttacagctactttttgagtaaacaaattatttcatctaatcctggcaatagtaaaatgcaagaaattgctcaggctattcaaattggagctaaagcatatttaaatagacaatataaaacaatagcgattgttggcctgatagttttagtgattataagttatttttttagtttacttgtaggtcttggttattttattggagctttgttatcaggcgttgctggttatgttggaatgttaatttcagttcaagcaaacgttagaacagcggaagcatccagaactagtttgcaaaaaggtttaaccatggctttcaaatctggagctataactggattattagttgctggtttagctttattagctatttcaatttattattgggctttgatatctttcaatgttgatagcagagaattgataaatgcattaatagctttaggttttggtgcatcattaatttctatttttgctagactaggtggtggaatttttacaaaaggtgctgatgttggagctgatttagttggaaaagtagaagcaggtataccagaagatgatccaaggaatccggctgtaattgctgataacgtcggtgataatgtgggtgattgtgctggaatggccgctgatttatttgaaacttatgcagtaactattgttgcaacaatggttttatcttccatatttttcccaggagatttatcaatgatgatatatccattaacaattggtggggcatgtattttaacttcaattattggaacttttttcgttaaacttgggcgaagtaaaaatgttatgggagccttgtataaagggtttattgtatcagccttagcttctttgattattttatatccagtaactgattacgttcttggtttagaaaattcttatgatttagataataaatcattttctggaatgagcttatattattgtggaattataggattaattattacaggattattaatttgggtaacagaatattatacgggaaccaactatagaccagtcaaaagtgttgcaagttcctctacaacaggacatggaaccaacgtaattcaaggtttagcaatttctttagaggctacagctataccagctttaataattgttgctggtattttgcttacaaaccatatcgctggtttgtatggtatagcaattgctgtaacaactatgttggcattagcaggaatggttgttgctttagatgcttatggaccagtaacagataatgctggtggtattgctgaaatgtcaaaattacctaaaaatgttagaaaaacaacagatgcattagatgctgttggtaatactaca

SEQ ID NO: 267593 - DNA, 1529 bp, Unknown
  Bacterial polypeptide expressing nucleotide sequence isolated from the Sargasso Sea
tgatcctcataagcttgaaggttttgctatgggggcatctgtagtagccctcttttctagagtaggcgggggaatttttacaaaaagtgcagacgttggagctgatcttgttggtaagattgaggcaggaatacctgaggatgacccaagaaatccaggtgttatagcagataatgttggtgataatgttggtgatgttgcaggaatggggtcagatatatttgaatcatattgtggttctatgattgcatctatagctatagcttataccctaggtaacaaagatatgatgatgcttcctttagctttagcatcgactggtttaatagcgtcaataattggaatatttatagttaagcttcagtctgcaaaagcacctgataaagctttaagatctggcacaatgttagccccagcaatatttgtggcaatggcttatttcataatagattcttttgatggagtgggtatgaatgtatggtggtgcgtaatagctggtgcagtaggcggagtattaataggactcattacagaatattacacaggcggaagtccagttaaaaagattgctgaatcaggagaaactggttctgcaactgtaatgatttcagggttatcagttggaatgcaatcagttgtaatacctattggtattttagctgggattattcttatctcaactcaattgtcaggtatttatggagttggaattgcagctgttggtatgcttgcaactgtaggtataacaatggcaatagatgcatatggaccagttgcagataatgctggtggtatagctgaaatgtcaggtatgggcgaagaggttagagaaattactgattctttagatgagttaggaaatactactgctgcaattggaaaaggctttgcaattggagctgcagctttagcagccctagctataatttcagctttctcggctgtggtagcagatgcaaatcctgaattttcattagcacttacagagccaattgttttagttggaatgtttattggagtatgtatacctttcttagtttcttcaataaccatgacagcagttggagatgcagcttttgaaatgattaatgaaataagaagacagtttaaagagataccaggattaatggagggtacagcagagccagactctgaaaagtgtgttgaaattgctacaacagcggcccttaagaaaatgatgttgcctggaataatagctgtatcaatgccaaccattgttggttttgggttaggtgcacaggctttgggtggaatgcttgctggtggattgcttggttgtgtttcattagcgctgatgatggcaaatgctggcggggcttgggataatgctaagaaatatgttgagaaaggtaatttaggaggtaaaggttcagacactcatgcagctgctgtagttggagatacggttggagacccatttaaggatacctcaggaccatcaatgaatattcttattaatgttatggcaattgttagtttggttatcgcgccactcttaagcatttaat

SEQ ID NO: 267594 - DNA, 1328 bp, Unknown
  Bacterial polypeptide expressing nucleotide sequence isolated from the Sargasso Sea
cttattatcagtaaatgttgaaacaagattactcatagaatctttagttgctttatcttttggtgcttcattgatttcaatttttgcccgtcttggtggtggtatttttacaaaaggtgcagatgttggtgcagacttagttggtaaagttgaagcaggtattcctgaagatgatccaagaaatcctgctgttattgctgataacgtaggtgataatgttggtgattgtgctggaatggctgcggatttattcgagacttatgctgttacaattgtagctacaatgctaataggcactattatgttttctaaccaaacaaactacgttgaacttccattacttattggtggtgtctgtataattgcttctataataggcgctttttttgtaaaattgggatcctcagaaaatattatgggtgccctgtataagggtttcattgtgacagcagttttatcagcaatatttatttattttgcagttgattatatgttttacgatagtaaagaaggtatgtcattattttggagctctattgttggtttaattgtaaccgcagctattatatggataactgaatattatacatctacagaatacaggcctgtaaagtcgatagctcaatcatctgagactggtcatggtacaaatgttatacagggtttggctatctcaatggaagcgactgcagttccggcaataataatagctttgggtattatattttcatataatttagccggcatttatggtattgcattagcagcaacaacaatgttagctctagctggtatggttgtagctttagatgcatatggtccagttacagataatgctggtggtattgctgaaatgagtggtttagatgaagaagtaagaaaaactactgatgcattagatgctgttggtaatactacaaaagctgttactaaaggttatgctattggttcagcaggtttagctgcattagttttatttgctgcttatacatatgatttagaacattactttcctgattttgaagtttcatttttactttctgatccatatgtagtggttggtttaattataggaggtatgttgccatatctttttggttcaatgggtatgcaagctgtaggtagagctggtggatctgttgtagaagaagtaagaaggcaatttaaagaaatgcccggtattatgaaaggaactacaaggcctgactatagtcgtgctgtagatatgcttaccaaatctgcaattcgagaaatgattattccttcgttattgccggttcttgcacctattgtagtatattacgttattgctttttatgatcaaacag

SEQ ID NO: 267595 - DNA, 1025 bp, Unknown
  Bacterial polypeptide expressing nucleotide sequence isolated from the Sargasso Sea
agttagaagcgtagcaaaatcgtcaacaacaggacatggaactaacgtgatccttggacttgcggtttctatggaagccacagctctgcccgcattgataattgttgcaggtattattgtaacaaatgaatttgctggtttatttggcatagcaattgctgttactgcaatgttggccttgactggcatggttgttgctttggatgcatatggaccagtaaccgacaatgccgggggtattgcagaaatgtcaaaattaccaaagaacgttagaaaaaccaccgatgctttagatgcagttggtaatactacaaaagcagttacaaaaggttatgcaatcggttctgctggccttggagccttagtcttgtttgcggcatatactgaagatataaaattcttttctaatgtatctggttcaccacttgaaggtataaacgttagttttgatttatctaatccttttgttgtaattggtctactggtaggtggaatgttaccttatttatttggatcgatgggaatgcaagctgtcggtagggcaggtggtgctgttgtaattgaggttagaagacaatttaaaaaaatacctggaataatgaaaggcaaaagaaaaccagattatggaagattagttgacttattgaccaaggcagcaattaaggaaatgattgttccatctcttttacctgttttatcaccaatagtattatattttattatttatttaattggcgggttagaagcagcactttcatcagtcggtgctatgcttcttggtgtaattataactggtttatttgtagctatttcaatgacggcaggcggtggagcttgggataatgcaaaaaaatatatagaggatggtaattatggtggcaaaggatctgaaactcacaaggctgctgtgactggagatactgttggagatccatataaagataccgctgggcctgcggttaacccaatgattaaaattactaatattgttgcacttcttttgttagcagtaatttctcattagc

SEQ ID NO: 267596 - DNA, 1029 bp, Unknown
  Bacterial polypeptide expressing nucleotide sequence isolated from the Sargasso Sea
gatgaatgctttatacaaaggttttgtagtttcagctgtttcgtcactaataatactttatccagtaactgattatgtattaggtttagacaatacatataatttagaaaataaagttttttcaggcatgagtttatactattgtggaattataggtttagtaataacgggcttattaatttgggttactgaatattatacaggaactaattacagacctgttagaagtgttgctagttcatccactacaggtcatggaactaatgttattcaaggattagctgtttcactagaagctacagcaattccagccttaattattgttactggaatattagcaaccaatcatattgccggtctttatgggattgctattgcagtcacaactatgttggctttagctggaatggttgttgcactagatgcttatggtcctgttactgataatgcaggtggtattgctgaaatgtctaaattgccgaacaatgtgagaaaaactacagatgcacttgatgcagttggaaatacaacaaaggctgtaacaaaaggatatgctataggttctgcaggattaggagctttagttctttttgcagcatatactgaagatataaagcacttttctaaagaagcaggatctgcacttgagggaattgttgttacttttgatttatcaaatccatatgttgttgtaggtttattaattggtggaatgcttccatatttgtttggttcaatgggtatgcaagctgttggtagagcaggcggtgctgtagtggttgaagtaagaagacaatttaaaaaatatccaggtataatgaagagaaaacaaaaacctgattacgcaaagcttgttgatttattaactgtcgctgcgattaaagaaatgattataccatcattattaccagtgttgtcaccaattgtactatactttattattcttgccattggtggccaggtagctgcattagcttcggttggagcaatgttgttaggtgttattataactggattatttgtagctgt

SEQ ID NO: 267597 - DNA, 1353 bp, Unknown
  Bacterial polypeptide expressing nucleotide sequence isolated from the Sargasso Sea
tatgagcggaacagtcgaaacaatactattatacacaattggagctggtttattatctatcgtttatggatttttaactggtaaaaatattcttagttcaagtgcaggaaatgcaaaaatgcaagatattgcatctgcaattcaaattggtgcaaaagcatatttagcaagacaatacaaaactattgctattgttggtgctgtagttttagtaattgtgagtattgcatttagtccactagtaggtcttggttatttaataggtgctgctttatcaggtattgcaggatacgttggaatgttagtttctgtagaggctaacgtaagaacagcagaagcatctagaaaaggtttggctcaaggtctatctgttgcatttaaatcaggagctgtaactggaatgttggttgctggtttagcattattatctattgctgtttattattatattcttttaaaatcaggtgtagatgaaagagaaattgttaatgctttagttgctttaggttttggtgcttctctaatttctatctttgcaagattaggtggaggaatttttacaaaaggtgctgacgtaggtgctgacttagttggaaaagttgaagctggaattccagaagatgacccaagaaaccccgctgtaattgcagataacgttggagataacgttggagactgtgcaggtatggctgctgatttatttgaaacttacgctgttacaattgttgcaacaatggttttatcttcaattttctttgttggtgatctaaatatgatgatttatccattatctattggtgctgcatgtttgttaacatctattattggaacattttttgttaaacttggaaaaagtaataacgttatgaatgctttgtataaaggatttgttgtttcagcagtagcttctttaataatattatggcctgttacagatcacgtaattggttttacaaatgaatttacagtaaatgataagacttttaatggaatggatttatattattgtggtgtcattggacttgttatcactggattattaatctggattactgaatactatacaggaacaagttatagaccggttaaatctgttgcattatcatcaacaactggtcatggcactaatgttattcaagggttagctgtttctatggaagcgactgcaataccagcattaataattgttgctggaattcttattacaaattctattgctggactttttggtattgcaattgctgtaactactatgcttgcattagcaggtatggttgttgctttagatgcgtacggaccagttactgataatgctggtggtatagcggaaatgtctaatcttgataagaaagt

SEQ ID NO: 267598 - DNA, 1374 bp, Unknown
  Bacterial polypeptide expressing nucleotide sequence isolated from the Sargasso Sea
ttggaattgttatttttgtattaatttggctagtatttggcctatcttccggtctgggtttcttaattggtgcaattttttcaggagctgcaggctttgtgggtatgaatatttctgttagatctaatgtaagaactacacaagcggcaagctcaagtttggcagagggactatctgtttcattcaaagctggagcagttacaggtatgttagtcgcgggatttgctttattatcaattgcgctctattattttgctttagataattccggtttatttcctggtagagaaattgttgctccattggtatcattaggttttggagcatccttaatttcaatttttgctagattgggtggagggatttttacaaaaggagcagatgtaggggctgaccttgttggtaaagtagaagcaggtatccctgaagatgatccccgtaatcctgcagtgatagccgataacgtaggtgataacgtaggtgactgtgctggtatggctgctgacttattcgaaacatatgtagttacagtagttgctacaatggtactttcttcaatatttttttctgacctttcttctatgatgatgtacccgctagccattgctggtgtttgcaccttggcgagtattgttggaacatattttgtcaggttaggtaaaagtgaaaatattatggctgcattgtataaaggttttgcagtttctgcaattttatcagctttacttttatattttataactgatcatgtgataggtttaagttcagttttcactgttgataataaatcatttactggaatatctcttttttattgtggtttattaggtttgatcattactggtttaattatttgggttactgaatattatacaggaactaattatagaccagtacaaagtattgctcaagcttcaaccactggtcatggaacaaatgttatacaaggtcttgcaataagtttagaggcaactgcgcttcctgcaattataattgtagcaggtataataattacgcattcacttgctggattatttggaatagcaattgctgtaacaacaatgctagcattagcaggaatggttgtagcacttgatgcatatggtccagttacagataatgctgggggaattgcggaaatgtcagaattggatgataatgttagaaaaactactgacgctttagattcagttggaaatacaactaaagctgtaacaaaaggatatgctattggttctgcaggattaggcgcacttgtattatttgcagcttacacagaagatcttgagtattttgcaaaagatcctaatagccctttgtcttttgaaaaattggaaacgttacttttgatttatcaaatccatatgttgtagt

SEQ ID NO: 267599 - DNA, 1332 bp, Unknown
  Bacterial polypeptide expressing nucleotide sequence isolated from the Sargasso Sea
tggaaaagtcgaagcaggaataccagaggatgatccacgaaatccaggagtaattgctgataatgttggagataacgttggtgatgttgctggaatgggctcagatatttttgaatcatattgcggctcaatgatcgcaactatagcaattgcttacactatgacagaagcaaataatgggcctttgatgagcttacctctagcattagcatctattggtttaatatcatcaattttaggtatcttaattgttagagctcaatctgcgaaagcacctgctgcagcactgaggactggaacaataggctccccagttatttttatagctttagcatttgggttaattacatacttagatatttcactaaatgtttggttttgtgtacttacaggagctgtaggcggtgtattaataggacttataacagaatactatactgggagcacgcctgtagaaaagattgcaaaatctggtgaaacaggatctgcaactgtaatgatttctggtctttctgttgggatgcagtcggttgtaattcctatcttaattctggcaacaattatttttatttctacaacattatttgatttatatggagtaggtattgctgcagtagggatgcttgctacagttggtataacaatggcaattgatgcatatggtcctgtcgctgataatgctggtggaattgcagagatgtcaggaatgggagaggatgttagggaaattactgattctttagatgagcttggaaatacaactgcagctattggaaaaggatttgcgataggtgcagctgccttggctgcattagctataattgctgcttttgttcaagtagtcggtgtaaataatgatggattccagttgattttatctgatccaatagtcctggtaggaatgtttattggaggctcaattccatttttagtttcctcaataacaatgactgccgtgggtgatgcagcatttgagatgatcaatgagataagaagacaatttagagagattccagggattctagaaggtacaggagaaccagatactgacaaatgtgttgaaattgctacaagagcagcacttcagagaatgttattacctggagtcattgcagtttcaatgcctccattagttggtttcttattaggagcaaaagctctaggcggaatgttagctggtggattacttggttgcgttcttcttgccttaatgatggctaatgccggaggcgcttgggataatgctaagaaatacattgagaaaggaaatcttggtggaaaaggctcagatactcatgctgctgcagttgtgggagatacagttggagatcc

SEQ ID NO: 267600 - DNA, 979 bp, Unknown
  Bacterial polypeptide expressing nucleotide sequence isolated from the Sargasso Sea
tatggccggttacagatcatgtgattggttttgcaatgaatatactgtaaatgataagacttttaatggaatggatctatattattgtggtgttataggcttagttattactggattattaatctggataactgaatattatacaggtacaagttatagaccggtaaaatctgttgccttatcatcaaccacaggtcacggtacaaatgttattcaagggttagctgtttcaatggaagcaactgctatccctgcattaataattgttgctggtattcttattacaaattctattgctggattattcggtattgctatcgcagttactactatgcttgcattagcaggtatggttgttgcattagatgcatacggaccagttacagacaatgcaggaggaattgctgaaatgtctaatcttgataaaaaagttagaaaaacaacagatgctttagatgctgtgggtaacacaacaaaagcagtcacaaaaggttatgcaattggctcagctggtttaggtgcgttagttttatttgctgcgtatacagaagacatcaaacacttttcaaaagaagctggttctgcattagaagggattgtagttacttttgatctatcaaatccttatgtagttgttggattattaattggtggaatgttaccatatctttttggttcaatgggaatgcaagctgttggaagagcaggaggtgcagttgtagttgaagttagaagacaatttaaaaaatttccaggtataatgaaaagaaaacaaaaacctgattacgcaaaattagtagatttacttaccgtagcagctatcaaggaaatgataataccatcattgttaccagttttgtcacctgtagttttatattttataattctatcaattggtggacaagttgcagcactagctgcagttggggctatgttacttggtgtattatcactggtttgtttgttgcagtatcaatga

SEQ ID NO: 267601 - DNA, 895 bp, Unknown
  Bacterial polypeptide expressing nucleotide sequence isolated from the Sargasso Sea
actgggtaaaaatattttaaactcaagtgcaggtaatgccaaaatgcaagatattgcatctgcaattcaaattggagcaaaggcatatttagcaagacaatataaaactattgctattgttggtgctgtagttttagtaatcgtaagtattgcatttagtccactagtaggtcttggttatttaataggagctgctttatcaggtattgcagggtatgttggaatgttagtttctgtagaagctaacgtaagaacagcagaagcatctagaaaaggtttggctcaaggtctttctgttgcatttaaatctggtgctgtaactggaatgttggttgctggtttggcactattatctatagctgtttattattatattttactaaagactggtgtagacgaaagagaaattgtaaatgctttagttgcattaggatttggtgcttctctaatttctatttttgcaagattaggtggaggaatttttacaaaaggtgcagacgtaggtgctgacttagttggaaaagttgaagctggaattccagaagatgatcctagaaacccagctgtaatcgcagataacgttggggacaacgtaggagactgtgctggtatggctgctgatttatttgaaacttacgccgttacaattgttgctacaatggttttatcttcaattttctttgtaggtgatcttaatatgatgatttaccctttatctattggtgctgcatgcttgttaacatcaattgttggaacattttttgttaaacttggaaaaagtaataatgtaatgaatgctttgtataaaggatttgttgtttctgcagtagcatctttagtaattttatggccggttacagatcatgtgattggttttgcaatgaatatactgtaa

SEQ ID NO: 267602 - DNA, 1064 bp, Unknown
  Bacterial polypeptide expressing nucleotide sequence isolated from the Sargasso Sea
agctcgatcgcattgttcgctcgtgtgggtggtggtatctacaccaaggcggcagacgtgggcgcggatttggtcggcaaagtcgaagcggggattccggaagacgacccgcgtaacccggccagtatcgcagacaacgtcggtgacaatgttggagatgttgccgggatgggcgccgatatcttcgagtcgtatgtcggctcgatcatcgcaaccatcgcgatcgcggcgacagcaaactcaggattgctcgatctgctcggcggacgggctcaggatgcatcacttattcagatcctggctatgcagctgccgattgcaatagcgatgattggtctcgtttcctcactgctcggtgtcctttcgatgcggtttttgcgaaatataggtccggctgcagcgcttcgtaatgtgccgctcatatcggcagttctgatgttcgccggaagctactattttatcaattcagtcggtctgtcgcagcagatcttttacgccgtgtgtttcggtggtgtcacgggtatcgcgatcggcctgatgacggaatattacactggtggtgcaccaatccgccggatcgccaccgcttcagagacgggtcctgcaaccaacatgatcgcgggcctcgccgttggaatggagagcacgatgctcccgatcttggcgatctgcgcggcgatcggttttggctaccacttcgccggtctgtatgggatcggcatcgcgtccgtcgggatgctttcaactgtcggtgtgacgatggccgtcgatgcgtacggtccgatcgcagacaatgccggcggtatctccgagatggccgaactcgggccagacactcggaagatcacggacggtttggactcgatcgggaacaccacggcggcgatcggtaagggtttcgcaattggatcggctgctctgacggcactcgccctgttctcagcttacactgctgcggtcggtcttgagtcgatagatctcaccaaaccgattgtcgtgatcgggttgtttgttggtggtgcggttccgttctttgtggccgctctgacgatgacgtccgtcgg

SEQ ID NO: 267603 - DNA, 1207 bp, Unknown
  Bacterial polypeptide expressing nucleotide sequence isolated from the Sargasso Sea
gaaagactattaattgttgctactgccttgagtgcactggtgatgttatttgtttcactctgggcccttccggagtcttttgaaatcaataatgaaatttatacaaaccttgatgtctacttctgctatttgacaggaacagtggccggattactggtaggactattgactgaatattacacttcacatgattttgaacccgtacgcgaagtggcaaaatcatccgagactggcgcggcaacaaacataatatttggacttgctctgggctatcacagcgcaacaggctccattttaatgcttgcagtcagcatattcttaccatttacgcttgcgggaatgtacggagtagctgtggctgcaataggcatgttaagcaccctcgtggtggggctcacaatcgacgcatacggaccagttgctgacaacgcaggtggaattgctgaaatgacaggtatgggagaaaacatacgcgacaggacagacgtactggattccgctggaaacacaaccgcggcaataggaaagggttttgccattggttctgctattttaacatctctggctctcttttcagcttttctgaccagagcagatcttctggatccgcaggcaaacataatggatagtataaacctgcttgaccctcttgtgttgacgggattattcgtaggggcaatgttaccatttcttttctcagcgatgacgatgaagtctgttggcaaagctgcttttgacatgattgaagaagtacgcagacaatttcgtacaattcctggaatcatggatggaaaagctgaaccagattatgagaaatgcgtggaaatttcaacaaatgctgctttgcgtgaaatgatacctccgggtattctaattatggggacacctcttctggtggggttcctttttggagtgccagctgttgcaggcatattagcagggtcactggtttccggtggtgtgcttgctatttcttccgcaaactctggaggtgcatgggataacgcaaaaaagtatattgaaaaaggtaatttcggaggtaaaggtacagagactcataaggccgctgttgtaggagacactgtaggtgacccattcaaagacacttctggtccagcactgaatatacttattaagctatcagctatcctcagcttggttttcgttccgttttttattaactatgggggattactgacacggtgat

SEQ ID NO: 267604 - DNA, 1356 bp, Unknown
  Bacterial polypeptide expressing nucleotide sequence isolated from the Sargasso Sea
tttttgcgcgctgaatatcgtgttttaagtttttttgtattaattgttgctttgcttctaggttttgcaaatgcaggtcgtcaagattctagcgcatttatttctttatcttttgtttctggagccattgcatctggattagctggctttataggaatgaaagtagcaactaaggcaaataaccgaacaaccaatgcggcgagaactagtttagagagcgctttaaatgtagcgtttacaggtggttctgtaatgggattaagtgtggtaggattaggtttaataggtttagggtcattgtttctattatatcaaaatatttttgttagtgattataataaagtaataacagttatttctggtttctcattaggtgcttcatccattgcattgtttgctcgtgttggtggcggtatttatacgaaagcagctgatgtaggcgcagatctcgtaggaaaagtagaagctggaatacctgaagatcatcctttgaatccagctacaattgctgataatgttggagataacgtaggcgatgttgcaggtatgggagcagatttatttgaatcatatgttggctcaattattggatcaatggttttgggagcaagtataattgtaatgggaggatttgatattagctttgttttattgcctttgctaattgctgcttccggaataataatgtctattattggcactttttttgttcgagtcaaagaaggtggcgatccacagaaagcattaaataaaggagagtttggttcatcgattatattaataggtataatttatctattagttaaaagtattctaccagagagctttacacagaatgaaattatttattcaaatatgggtgtatttatcgctaccactattggattatttgctggtttaggaattggattagttaccgaacattatactggcaccaatactaagccaacaaactcaatagtagaacagtctttaactgggccagcaactaatattattgcaggtttaggagtaggaatgcaatcaactgcaataccaattttaattatagctgcaagtattattggagcctatcaatttgcgggtctttatggtatagcaatggctgctcttgggatgcttgcaaataccggcattcaattagcggttgatgcttatggcccaatatcagataatgctggtggaattgctgaaatggctgatttaccaagtgaagttagagatcgcacagataagcttgatgctgttggtaatacaactgcagccataggaaaaggatttgctataggatcagctgcattaacagcattggctttatttgcagcatttatggtacaaacaggtatagataaaata

SEQ ID NO: 267605 - DNA, 1201 bp, Unknown
  Bacterial polypeptide expressing nucleotide sequence isolated from the Sargasso Sea
tcattaatcttgctttatccaattacatcacatgttattggattagaaaatatatttagtgtaggagataaaagcttttcgggcatggacttatattactgtggagttgtaggtttagcagtaactggattaattatatgggtcactgaatattatacaggtacaaattacagacctgtaaaaagtgttgctaagtcttcaacaactggtcacggaacaaatgtgattcaaggcctagctgtatcgatggaagcaacagctctaccggcaattataatagttgctggaataataattactaatcaattagctggtttatttggaattgcaatcgctgttacagcaatgttagcattaactggaatggttgttgcattagatgcttatggaccagtaacagataacgctggcggaatagccgaaatgtctaaattaccaaaaaatgttagaaaaactacagacgctttagatgctgtaggaaatactacgaaagctgtgaccaaaggttatgctattggatcagctggtttaggtgcattagttttatttgctgcatacaccgaagacattaaatttttttctaaagtatcaggatcatctttagaaggtattgatgtgagctttgatttatctaatccatttgtagttataggattattatttggaggaatgttaccttatttatttggatctatgggaatgcaagctgttggaagagcaggcggagcagtggttattgaagtaagaagacaatttaaaaaaatccctggaatcatgaaaggaaaaagaaaacctgactacggtcgattagttgatttgttaactaaagctgcaattaaagaaatgatagtaccatctttattacctgtgctttcaccaataattttatatttagttatctattctattggtggattagaagcagctttgtcttctgttggagctatgcttttaggagtaatagttacaggtctttttgttgcaatatcaatgacagctggcggtggagcctgggataatgctaaaaaatttattgaggatggaaattacgggggaaaaggctctgaatctcacaaggctgcagttaccggtgatactgttggagacccgtataaagacacagccggtcctgcggtaaatccaatgattaagattacaaacattgtagctcttttgctgttagctgtaatatcacattaaa

SEQ ID NO: 267606 - DNA, 1218 bp, Unknown
  Bacterial polypeptide expressing nucleotide sequence isolated from the Sargasso Sea
actgggcttaatttatgcgcaagtaacttactggaacataaggtcattgccgaggggtaatgatacgcaaagaaaacttggtgtcacaatctataatggtgccatgtctttcatcaaacaagaatatagatacatagttatatttgtagttgtagttggtgcactattattttatttcttaggccaacagactgctttatgctattttgctggtgcaattctttctatgacatgtggttgggcaggaatgacatcggcatgtattgctaactctagaacagcagaagcggctaacacttctggtcaagggtcagctttaacaactgccttcaaaggtggtagtgtaatgggattttctgtagctagcttggggattctaggtgtaagtggagcctttgcaatatattttgtattaaatggggtaaatgacatgaacttagcaaactttgcaactaatattggtggttttgcaatgggtgcaagctcggttgccctttttgctagagttggtggtggaatttatacaaaagctgctgatgttggagccgatctagttggtaaagttgaggctggcatacctgaagatgatcctagaaatcctgcaactattgcagacaatgttggtgataatgttggtgatgtagctggaatgggcgctgacttgtttgagtcctatgttgggagtgtaattgcaacaatagtgattgcatcaggactagggatggctacaaatcaaactttggcgatgtattcatttccaataattttgattattgtggggactatagcctcttatattggaacaaaagttgtagatattttaaaggattctgaaccatcaggtgttttaaggaaagcatctctgacagctggaatactttttttagtatttgcatatttttctttaaatgccgtgggtggaagtgtaggaattgattcttcactactgactaatatttttatttgttcaataataggtcttttctcaggatcactaataggtggtattacagaatattatacctctggcaaaccagtttctgatattgctgatgcatcggaaaaaggtggagttgctactaatattattagcggcttatcaattggaatgctaagtaccgctttaccaattcttgtaatagttattgcaatattttcatcatatcaatttgcagatctatatggaatcggtattgcagctgtgagcatgcttgcaac

SEQ ID NO: 267607 - DNA, 744 bp, Unknown
  Bacterial polypeptide expressing nucleotide sequence isolated from the Sargasso Sea
tatgaatgcagaaactatattaggctacacaattttatcaggactattatctattgtttacggatttgttactggtaaaaatattttaaattccagcgcaggtaacgcaaaaatgcaagaaattgcatccgcaatacaaataggcgccaaggcttatttaaatagacaatacaaaacaattgccattgttggagttgttgtattagtaattataagctatgcatttagtatattagttggattaggttacttaattggagcgacattatctggtatagcaggatatgttggaatgttagtttcagtacaagctaatgttagaactgccgaagcatcaagaaaaggattaaatgcaggtctcgatgttgctttcaaatctggtgcagtaacaggaatgttagttgcaggcttagctttattatctatagctgtctattattacttattattatcatttaatgttgatgaacgagaaattgtaaatgcattagttgctttaggttttggagcttcattaatttcaatatttgcaagattaggtggtggtatttttacaaaaggtgcggatgtaggtgcagatttagttggaaaagttgaagccggtattcctgaagatgatccaagaaacccagcagtaatagctgataatgttggagataatgtgggagattgtgcaggaatggctgctgatttgtttgaaacttatgcagtaacaattgttgctacaatggttctttcatcatt

SEQ ID NO: 267608 - DNA, 844 bp, Unknown
  Bacterial polypeptide expressing nucleotide sequence isolated from the Sargasso Sea
tatgttagctggagctttagctatgttattttctttttggaaaacaacatggattaacaaccaaagtcaaggtaatgaacgcatgaagtctattggtgctagtatagcagaaggtgcaatggcatttctcagggctgaatatcgtatcttagccgtttttgttatagcagttgcttttatccttgggtatgccaattcaggtagagctgattcaagcgcaatgatatctttatcatttgttgtcggcgcactagcgtcaggcttagcagggtttcttggtatgaaagttgctaccaaagcaaataatagaaccactcacgctgctgaaatcagtttggcaaaagctcttaacgttgcatttagcggtggttcagttatgggtttaagtgtagttggtttaggtgttttaggtcttggcgggttgttatatcttttttcaaatatgtatggctttgaaaaaccatcggtcgtttctatggtgttaaatatcttatcaggtttttcactaggagcatcatcaattgctctatttgcccgagttggtggaggaatatataccaaagctgctgatgttggggcagatttagttggcaaggtagaagcagggataccagaagaccaccctcttaatccagctactattgcagataatgttggtgataatgttggtgatgtggcaggaatgggggccgatttatttgagtcatatgttggctcaattattgggtccatggttctaggctctagtatcctcgttgctggagggatggatttaaattttgttattctccccctattcatcgctgcttcaggtattatagtatccattttagggacctttatg

SEQ ID NO: 267609 - DNA, 963 bp, Unknown
  Bacterial polypeptide expressing nucleotide sequence isolated from the Sargasso Sea
aatggaaatcattcacttaataattggtgcaggtattcttgcggttgtttatggggttgtgacatcaatttcagtgctttcagctgatacaggaaacgaaaaaatgcaagaaattgctggtgccattcaagaaggtgcaagtgcatacttatctagacaatattcaacaattgcccttgtaggaattgtcattttaataatttcgtattttcttcttggtttagaagtttctattggcttccttattggtgcagttttatctggaattgctggatatattggtatgcttgtttcagtaagagcaaatgtaaggactacacaagcttcttcaaatagtttagctgaaggtttgagtattgcttttaaatcaggtgctgtaacaggtatgcttgttgctggtttagctctacttgctgttgctgtgtattattatgttttgactaatttttggattcctcaaaacgagagagttgttatagacgctttagtagcgctgggatttggctcatctttaatttctatttttgcaagacttggcggtggtatttttacaaaaggtgctgatgttggaggtgatttagttggaaaagtagaggctggaattcctgaggatgatcctagaaatcctgcaactattgctgataatgttggtgataatgtaggtgactgtgctggcatggcggcagatctatttgaaacctatgccgttacagttgttgctacaatggttttagcctcaatattttttgctggcaatgagacaatgatgatttatcctctatcaatatgtggagcatgtgtaataacatctattcttggaacttactttgttaaattaggaaaaaataactcaattatgggagctctttatagaggttttattgcaactgctattctttcattaattattttatattttgttacagatttagttgttggttttgatacagttctttctgtagc

SEQ ID NO: 267610 - DNA, 1051 bp, Unknown
  Bacterial polypeptide expressing nucleotide sequence isolated from the Sargasso Sea
tatgtctgttgataccattttattatacacaattttcgctggaatattatccattgtatatggatttgtaacaggatcttcaattttgaatgcaagtgcaggaaatgcaaagatgcaagagattgcttctgctattcaaataggagctaaagcatatttaaacagacaatacaaaacaatcgctatagtcggcgtcgttgttttagttattattagttttgctttttcattattagtcggaattggatatttaattggtgcagctttatctggtatagctggttatgttggaatgttagtttctgttcaagctaatgtgcgtacagctgaagcatcaagaaaaggtttatctcaaggtcttgcaatagcatttaaatctggtgcaattacagggatgttggttgctggtttagcattattatcaattgctgtttattattacatattattatctgctggtgttgacgaaagagaaattgtgaatgctttagtagccttaggttttggtgcatcattaatatcaatttttgcaagattaggtggtggaatttttacaaaaggagctgatgtcggtgcagatttagtaggaaaagtagaagctggaattccagaagatgatcctaggaatcctgctgttattgcagataacgtaggtgataatgttggtgattgcgctggtatggcggcagatttatttgaaacatatgcagttactattgttgcgacaatggttctttcatcaatattctttgtatcagatttaaatatgatggtttacccgttaagtattggtgcggcttgtatcttaacgtctatagtaggtactttttttgtaaaacttggacaatcaaaaaatataatgaatgcattgtataagggttttgttgctacagctattttgtctttaattattttatatcccataacagactacgtcattggattagataccaactattctgtaaatggagtttcttttaatgggatgagtttatattattgtggtgttataggtttaattatcaccggacttttaatttggatcactgaa

SEQ ID NO: 267611 - DNA, 1345 bp, Unknown
  Bacterial polypeptide expressing nucleotide sequence isolated from the Sargasso Sea
tttggaaaacttaagtttaattatattagcgggtcttcttgcggtagcatacagttatattttgagtaaacagattatttcatctaatactggaaataaaaaaatgcaggaaattgctgaagcaattcaaataggcgcaaaagcctatttaaatcgtcagtataaaacaattgctatagtaggttttattgtcttattagttatcagttatttttttagtttattagttggtcttggttattttattggagcactattatcaggagtcgctggatatcttggtatgttaatctcagtagaagcaaatgtaagaactgcggaagcctcaagatcaagtttacaaaaaggtttaactatggcctttaagtccggagccataacaggattacttgttgctggtttagccttattagccatatcagtttactattgggttttgatctcgtttaatgtcgatagcagagaattgataaatgcattgattgctttaggatttggtgcatctttaatatctatttttgctagacttggcggaggtatatttacaaaaggagcggatgttggtgcagatttagttggtaaagtagaggcaggtatacctgaagatgatccaagaaatcctgctgtaatagctgataatgttggagacaacgttggagattgtgcaggtatggccgcagatttattcgaaacctatgctgttacaattgttgcaacaatggtattggcttcgatttttttccaaaacgatgcgagtatgatgatttatccattagcaattggaggaggatgtataattgcatctatagttggtactttttttgtaagattaggaaagagtaaaaatattatgggagctctatacaaaggttttatagtgactgctatagtatcattaatattattatatcctattacctcaaatacaattggtttagatcaagtttataatgttggaaataaatcatttaatggtaaagatttatactactgtggagttataggtttaattgttacaggattaatcatttgggtaacagagtattataccggaacaaattttagacctgtgaggagtgtagctaagtcttcaacaacaggacacggaacaaatgttattcaaggcctcgccgtatcaatggaagcaacggcattgcctgcattaataatagttgcgggtatcatagctacaaatgaattagcaggtctatttggtatcgctattgctgttactgctatgttagcactgacaggaatggttgttgcattggatgcttatggtcctgtaacagataacgctggtggtattgctgaaatgtctaagctaccaaaaaatgtaagaaaa

SEQ ID NO: 267612 - DNA, 997 bp, Unknown
  Bacterial polypeptide expressing nucleotide sequence isolated from the Sargasso Sea
aatgacaacactgcaggtattaattgttttatgcggtctagcagccgtactatatggcctagtaacatctaggcaaattttatcacttggttcaggaaatgataaaatgcaagaaattgctggcgcaattcaagaaggtgctagagcttatttaaacagacagtacatgacaatagctattgtgggagttgttatttttgctcttatatggatagtttttgatttggcatctggaattggctttttgattggagcttttttctctggtgctgcaggttatgtaggaatgaatatatcggttagatctaacgttcgtacaacacatgcagcaagtaatagtttagctgaaggtttatcagtatcttttaaagctggtgctgtaactggaatgctagttgcaggatttgcacttctttctattgcaattttttattttgttttgcacaactctggttcatttccgggtagagaaattgttgctcctttagtttcatttggatttggagcttcactaatttcaatttttgctagactaggtggaggtatatttactaagggcgctgatgttggagcagatttggttggaaaagttgaagctggcattcctgaagatgaccctcgaaatcctgctgttattgcagacaacgttggagataatgttggtgattgcgcaggcatggctgcagatctttttgagacttatgttgtaacagttgtagctacaatggttttggcatcaatatttttcatagaaaattcttatacaatgatgatatttcctctagctattgcaggagtttgtgcattaacaagtataattggcacttattttgttagacttggtaaaaataacaatattatggcggcactttatagaggatttgcagtatcagctattttatctgcagtattattatattttgttactgattatattgttggtttaaagaatgttttagttgttgaaggaacttccactcaattcacaggaatgtca

SEQ ID NO: 267613 - DNA, 2038 bp, Unknown
  Bacterial polypeptide expressing nucleotide sequence isolated from the Sargasso Sea
tttgcctatagaggtaattataccaattattgcagcaattgcatcatttgcagttgcagccggatatactggctgggttgccaaacaaaatcctggtacaaaacaaatgcaggaaatatctgaagccgtaagagttggtgcagcagcatttttgagacgtgaaatgagaattattgttccaatagcaattggattatctgttatcattggatttttcattggtgattcaaacggaattgcttttgcagtaggtgcaacactttctgcagttgcaggatttatctcactaaaagttacagtaaaggctgcagtaagagcagcacatgcaacaggttccggtttaggaaaaacttttgctattacatttagaggcggcgcaacagtaggtcttgcagttcctgcaatggcattagctgcaaccgcaattttgtatatgatttatccaaacccaattactattgccggtatcggaattggtgcaagtctaattgcattgttcattagaatcggtggtggaattttcacaaaggctgcagacatgggtgcagacttggtaggaaaagtagaagcaaacattcctgaagatgacccacgaaatcctgctacaattgcagataacgtgggtgataacgtaggagatgcagcaggcatgggttcagacgtatacgaatcatacattgtaacaattttagcatcattactaattgcagcactaatcggttcaccagaaaactttgcatatccaatcctaattggagcatctggattagtagcatcaatcattggtactgcaacaattggttcaagaaagattactgatgtgatgaagccgctgaatatttcattttatgtttcagcagcaatagcaattgcactaaactttgtattcactcaaatagttttaggagacactccaattgcttatgcattatttggcgctacagttatcggtgtaattctggttccagttatacaaaaaattacagactattacacaaacgcaaactcaaaacctgttgtagaaatctctgaatctgcaaagtggggttatgcatcattaacattaatgggaattatcaaaggattacaatcaaccggaccattcatgattgcactagttgcagcaattatcgtttcatttgcaattacatctgcagcagcaccagaaggtactgacccactactatacggaatctttggaacttcgctaactgcaatggctatgctatctcttgcaggaattgttctttcaattgacgcatttggtccaattgcagacaatgcaggcggtattgtagaaatgacagaaatgggtgaagaaaatcgtaaaatcactgatgaaattgacgcagtcggaaatacgacaaaggctgtaaccaaaggctttgcaattgcaagtgcagcactagcagcattagcaatgattcaagcattccaattcgaagcatcacactatttccaagacgttgtaattgattatggtctatcaaacccatctgtaattgtaggtctcttagttggtggattaattccatttatcatcacaggtcaattaatcagcggcgtagaacgcgcagcaaagaaaatggtctatgaagtaagaagacaattcaaagaagatcctgaaattttaaccggtaaatcaaaacctgattatgcaaagtgtgtagatgtagcaacacttgcatcaattggtgaattatggaaatcagcatcaatcgcagtagcagcaccaatcattgtgggcattctattaggtccatctgcagttgcaggtctcttaatgggagcagtcgtttctggaatattcttagcatatcacttggcaaacaccggtggtgcatgggataacgcaaagaaactcattgaaatgaaaggtgaaaagggtactgaagaacacaaagtcgcagtagtcggtgatattattggtgatccttacaaagacacagcaggtcctgcactaaacacagtaatcaaactcttaaacacaattgcaatcgtattcgtaccagtattctttgcagttattgtattatag

SEQ ID NO: 267614 - DNA, 1228 bp, Unknown
  Bacterial polypeptide expressing nucleotide sequence isolated from the Sargasso Sea
aaaggttttatagtaactgctatagtatcattaatattattgtatcctattacttcaaatacaattggtttagatcaagtttttaatgttggaaataaagcttttaatggtacagatttatactcatgtggagtaataggtttagttgttactggattaattatttgggtaacagagtattataccggaacaaattttagacctgtaagaagtgtagccaagtcttctacaactggacacggaacaaatgttattcaaggccttgctgtatcaatggaagcaacagcattacctgcattaataatagttgcgggtatcatagctactaatgaattggcaggtctttttggtatcgctattgctgttaccgctatgttagcattgactgggatggttgttgcattagatgcttatggtcctgtaacagataacgctggcggtattgctgaaatgtctaaactgccaaaaaatgtaagaaaaactacagatgctttagatgctgtaggaaatactacaaaagcggttacaaagggttatgcaataggatcagcgggtctaggggcgttagttttatttgcagcatatacggaagatataaaatttttttctactatttctggttcgaggttagaaggaatagatgtgagttttgatttatcaaatcccttcgttgtaattggattattggttggtggaatgttgccttatttatttggatcaatgggcatgcaagctgttggtagagctggtggagctgtagtgatagaagtaagaagacaatttaaaaaaattcctggtattatgaaaggtaaaagaaaaccagattacggtagattagtagatttacttactaaagctgcaattaaggaaatgatagttccatctcttttaccagttttgtcacctatagttctatatttagttatttatttaataggcggattggaagcagcactatcgtctgtcggagcaatgcttctaggagtaatagtgacagggttatttgttgccatttcaatgacagctggcggtggagcttgggataatgctaaaaagtatatagaagatggtaattatggtggcaaaggttcagagtcccacaaagcggcagtaactggagacacagttggggatccttacaaagatacagcaggtcccgcagtaaatccgatgataaaaattactaatattgttgcgctcttacttttggccgttatatcacattagt

SEQ ID NO: 267615 - DNA, 1054 bp, Unknown
  Bacterial polypeptide expressing nucleotide sequence isolated from the Sargasso Sea
tgaatactacacaggtactaattatagacctgtaaaaagtgttgcatcatcttccacaacaggtcatggaacaaacgttattcaaggtttagctgtatcaatggaagctacagcaattccagcattaattattgttggaggtattctgttaacaaattatattgctggactttttggtatagcaatagctgtaaccactatgttagctttagcaggtatggtagttgctctagatgcttatggtccagtaactgacaatgctggtggtatagctgaaatgtcaaatttacctaaaaatgtcagaaaaactaccgatgcacttgatgccgttggtaatacaactaaagcagtgaccaaaggatatgcaattggatcagctgggttaggagctttagttttatttgcagcctatacagaggatattaaacatttttctaaagttgcaggatctaaattagaaggtattgttgttacatttgatttatcaaatccttttgttgtagttggattattagtaggaggaatgttgccgtatttatttggctcaatgggaatgcaagccgtaggtagagcaggaggagctgttgtaattgaagttagacgtcaatttaaaaaaatcccaggaattatgaaaagaaaatcaaaaccggattacggtagattggttgacttacttacgaaagcagcaattaaagaaatgattgtgccatcgttattacctgtattatcgccaattgttttatatttatttattttaccaataggtggtcaggttgctgcgttatcagcagtcggcgctatgttattaggtgttattattacaggattgttcgttgctatatcaatgactgctggtggaggtgcttgggataatgcaaaaaaatatattgaagatggaaattttggaggaaaaggctctgaagcacataaagcagcagtaacaggtgatacagtgggtgatccttataaagatacagcaggaccggcggttaatcctatgattaaaattacaaatatagttgcacttcttttgctagctgtaatagcaggataa

SEQ ID NO: 267616 - DNA, 1507 bp, Unknown
  Bacterial polypeptide expressing nucleotide sequence isolated from the Sargasso Sea
gctgtaatgggatttacagtcgctggactaggacttcttggtgtagcggtaggatattgggttttcattgatattttagaattgccaaatggttatgatgttttagcagcaattggacttggaggttcctcgattgctctttttgcaagagttggtggaggaatatatacaaaagcagcagatgtaggcgcagatctagttgggaaagttgaagctggtataccagaagatgatccaagaaacccagcaacaatagctgacaatgtaggagacaatgtaggagatgttgcaggtatgggagcggatctttttgagagctatgtaggttccttagttgctcctcttgcatatgcagcaatagtatttagtggccaaaatgttttaccttcattattattttttccattagcagttggaacgattggtatgggagcttctatagtttcctcttttcttgttaaaccaaaagaaggaaaattagctcaagctttacatagaggaacttatagcgctgcagctttaacaactttaggcgtttactttcttagtgatagcatgttttcttcatattcagaaaattcaataggactcttttttgctgtaataataggacttgcggtgggattgttagtcggccaaatttcagaatggtttacatctgatcattattcaatagtaaaaaatatagctgatcaagctaaaacagggcccgcaacactagtattgtctgggatttcagaaggaatgcggtcagctgctttttctgtaatagttgtagtttttggtataggaggagcttatacagcaggggactgggctttaggatctggtggtggaatttatggtattgcgatagctgcaataggcgttttagctactttaggaataacagttgctgtagatgcttatggaccaatagctgataatgccggaggtattgctgagatggcacaccttcctccagaagttagagaagccactgatgaattagactcacttggaaacacaacagctgcaattgctaaagggtttgcaatcggttccgcggctgtcacagctttagcattattttctgcttttgttcaaagtgcaggcttaagcgaaattggattaaacataacgaaggtagaagttactgctggattatttttagggggaatgttcccgttcctttttgctgcgatgacaataaatgctgtagggagggctgctttcaagatgattgaagaggtcagaagacagtttaaagaaatacctggacttagagaaggcaaagaaggagcaaagcctgactacacaagatgtgtagacattgcgacttccgctgctttaaaagaaatgttgcttccaggaggtttagctatagcattaccattgattattggattttggaataaagaagccctaggtggtttcctagccggatctcttgtaacaggtttcttgttagcaatattcatggctaactcagggggtgcttgggacaacgcaaagaaatatatcgaag

SEQ ID NO: 267617 - DNA, 1489 bp, Unknown
  Bacterial polypeptide expressing nucleotide sequence isolated from the Sargasso Sea
gttgtcatatttatattaatgggtgtcagcggaattggttgggctagtgcaattggttttgcaattggtgccatattctccggtctagccggatacattggcatgagtatttcagtcagagccaatgtcagaactgctcaagcagcacaccaaggaatgaatgctgctctatccatggcatttagaggcggtgctgttaccggtcttctcgttgttggtctaggtctattaagtattgccggttactacctcattctgacatcttcaggtatttccgttgatgacagtctgcatgcattaataggattagcatttggtggttcactgatatctatatttgcaagacttggtggtggaatatttacaaaaggtgccgatgttggcgctgaccttgttggaaaaattaatgctgggataccagaggatgatccaagaaacgcggcagtgattgcagataatgttggagacaatgtaggagactgtgcaggtatggcagcagacctttttgaaacatatgcagtcacgatcatcgcaaccatgctcttgggtggtttattgttcagcggagtagaagcgactaatgcaataatgtacccacttgtattgggtgctgtctctatagtcgcatcggttgtaggagcactatttgttaaggccaaagaaggcgggagcgtaatgggggccctttacaaaggtgtcattatctctggactgcttgctgccatcgctttctatccaataactgggatgatgggaatgagtatgggtcttttctggtcggcaatcattgggcttgcattaactgcttttatggtgatagtaacagaatattatacgagcacagaatataaccctgtaaagaaaatagcagaagcatcagagactggtcatgcaacgaatatcatagcgggattgggtgtttcaatgaaagccactgcacttcctgtactggctgtttgcttgagtatttgggctgcttatatgcttggcggtctctatggaatagcgattgctgcgacatcaatgctctctctaacaggaatgattgttgcattggatgcatttggtcctattacagataatgctggggggattgctgagatggcagaacttccacctgaaatcagagggattactgatcctttggatgctgtaggtaatacaacaaaagctgtcacaaaaggttatgcaattggatcagcaggactagctgcattggtcttatttgccgatttcacagcaaatctagaggctgaaggaaaaatggttcagttcatgctgaatgatcctgcggtaatcatcggattattcataggtggaatggttccatatcttttcgctgcccttgcaatggaagccgtcgaacgagctgcaacctcggtagtagaagaagttgaaagacaatttgaggaacctggaatcatggaaggaacagtaaagccagattattcaaaagcagtcgatttgcttacccaggtccgcgattaag

SEQ ID NO: 267618 - DNA, 1369 bp, Unknown
  Bacterial polypeptide expressing nucleotide sequence isolated from the Sargasso Sea
gttgtagttctaattattattacaatattgtttagccctttagtgggattaggttatttcattggagccgcattatcaggtattgcaggttatgtcggcatgattgtatctgttcaagcaaacgtcagaactgcagaggcttcaagaaaaagtttggctagtggtttatctattgcgtttaaatcaggagcagttactggtatgttagtagctggactagctttacttgcaatagccgtatattatttttttttagtaaagaatggtgttgacgagagagaaatagttaatgctttggtcgcattaggctttggtgcatcattaatctcaatttttgcaagactgggtggaggaatttttacaaagggagcggacgttggtgctgatttagtaggcaaggttgaagctggtatacctgaggacgatccaagaaatccagctgtgatagctgacaatgttggtgataatgttggagattgtgcgggtatggcagctgatctttttgaaacttacgctgtcactattgttgctacaatggttctttcatctatattctttgtaaatgattttaacatgatgatctatcctttagcaattggaggtgcttgtattttaacgtcaattcttggaacttttttcgttactcttggaagtgataaaaatattatgaaagcaatgtataaaggatttgtgataacagctattagttcattggtagttctatttccaataaccaagcatgttataggctttacgacggaatatgtagctaatggaaagtcattcaatggtttaagtctatatttttgtggtatcattggtttagttataacaggattaataatttggattacagaatattatacgggaactgattacagacctgttaaaagtgttgctcaatcatcaacaacaggacatggtacaaatgttattcaaggtttagctgtttctatggaagcaactgctgtacctgcgttaattattgtaggtggtattttatggaccaatcaaattgctggtctttatggtatagcaattgctgtaactactatgcttgcactagctggtatggttgttgctttagatgcttatggacctgttactgataatgctggaggtattgcagaaatgtcaaatcttcctaaaaatgttcgtaaaactactgatgctttagatgctgttgggaataccactaaggctgtaacaaaaggctacgctattggttctgcaggtcttggagcattagttctttttgcagcatatactgaagatattaaacatttctcaaaagttgcaggttcaaatttggaaggtataactgtaacttttgatttatctaatccttatgtagttgttggattactta

SEQ ID NO: 267619 - DNA, 1784 bp, Unknown
  Bacterial polypeptide expressing nucleotide sequence isolated from the Sargasso Sea
agcatggtatgcattgggaccttatactgcaatttctattgttgttggagcaatatgctcatctgttgcaggttttattggtatgtatgcagctactaaagcaaatgttagaactgcaactgcagctcaaaaagatggtccagcagcagctttatccgtttctttttatggtggttctataatgggtctatgtgttgcatcattgggtctcattggtttaggtggattatattatttctacatcccagctgaaattgatcctcataagcttgagggttttgctatgggagcatctgttgtagcacttttttccagagtaggtggaggaatttttacaaagagtgctgatgttggagctgatctcgttggcaagattgaagctggtattcctgaggatgatccaagaaatccaggcgttattgccgataatgttggtgataatgttggtgatgttgctggaatgggttcggatatatttgagtcatattgtggctctatgattgcatcaatagcaatagcttatacgcttggaaaccaagatatgatgttgcttccactggttttagctgcgactggtttaatagcttcaataattggaatatttatagtaaagcttcagtctgcaaaagcacctgcgagtgcattgagatctggaactcttttagcgccagtaatatttgtggctatggcctatttcataattgattcttttgatggagtagtaatgaatgtatggtggtgtgttattgctggagctgttggcggtgtattaattggacttattacagaatattacactggtggaggcccggtaaagaaaattgctgaatcaggagaaactggttctgcaacagtaatgatttcaggtttatcattaggaatgcaatcagttgtgatacctattgttattctagccggcattatcctttcttcaactcaactatcgggcatttatggtgtaggaattgctgctgttggtatgcttgctactgttggaataactatggcaatagatgcatatggaccggtagctgacaatgctggtggtatagctgaaatgtcaggtatgggtgaggaagtaagagaaattacagactctcttgatgaattaggaaatactactgctgcaatcggaaaaggttttgcaattggagctgcagcgttagctgctttagcaataatttcagctttttctgctgtagtaggtgtagcaaatcctgaattttcattagcacttacagagccaattgttttagttggaatgtttataggagtttgtataccgtttttagtttcttcaataactatgacggctgttggtgatgcagcatttgaaatgattaatgagatcagaagacaatttaaagaaatttctggcttaatggaaggcacagctgagcctgactctgaaaaatgtgttgagatagcaaccaaagctgcattaaagaaaatgatgttaccaggagtaattgcagtttctatgccagctattgttggttttggtcttggtgctcaagctttaggaggcatgcttgctggtgggctgttaggatgtgtatctctcgcacttatgatggcgaatgccggaggcgcatgggataatgcaaaaaaatatgttgagaagggtaacctaggtggcaaaggttctgatactcacgcagcagctgtagtaggtgataccgtaggtgatccttttaaagatacgtcaggaccatcaatgaatattttaataaatgtaatggctatagttagccttgtaattgcgccattattaagcatataaa

SEQ ID NO: 267620 - DNA, 1522 bp, Unknown
  Bacterial polypeptide expressing nucleotide sequence isolated from the Sargasso Sea
attcttacagtcatttctgggttttctttaggtgcatcttcaattgcattatttgctagagtaggtggaggaatctatacaaaagcagctgatgttggtgcggacctagttggaaaagttgaggctggtattcctgaggaccatccacttaatcccgccacaattgctgataatgttggagataatgttggagatgttgcaggtatgggtgctgatttatttgaatcttacgtcggctcaattattgggtccatggttttaggagcaagtatactagttgcaggttcttttgaaataaattttgttaccttaccccttacaattgccgcttcaggtataattgtatccatccttggtacatttatggtttcagtcaaagaagggggagatccgcaaagagcattaaatattggtgaattcggttcttctgctattatggttgcaattatgtactttttgataaataatctgctaccagcatcatttcaacttaataacatagaatatactagaatgggtgtcttttttgcgtccacaattgggttgttagctggattaggtataggtcttattaccgagcattatacagggactaatacaggtccaactaattcaataaccaggcaatcattaactggtccagcaacaaatattattgcagggctaggagttggaatgcaatcgactgcgtttcctatattaattattgctgctggaataatgggagcatatcattttgctggattatatggaattgctatggcagcattgggtatgttagctaatacaggaattcaactagctgtagatgcgtatggtccaatttctgataatgctggaggtatagcggaaatggctgagctgccaaaagaagtacgtgaacgtactgacaaattagacgcagtaggaaatacaacggcagctataggtaaaggatttgctattggctctgcagcgttaactgcactggcacttttttctgcatatatggtacaaacgggaatcagtaaaattgatatttcaaatcccatggtaatggcaggactttttgttggtggaatgttacctttcctattttcttcaatggcaatgaatgctgttggtcgtgctgcaatggcaatgattgaggaagttcgacgacaatttaaatctatacctgaattatcaaaagctttagccataatgaacaaatataaagacggtgataagtggactgatgatgataaaaaaacgtttgaagaggctgatggcaaggcagaatatgggaagtgtgttgaaatttctacaacttcagcgattagagaaatggtttttcccggtattcttgcaatattatccccagttattgttggctttatttttggtccagaaactttaggaggtctgcttgctggtgttactgtttcaggtgtattaatggctatttttcaatcaaactctggtggggcttgggataatgcaaaaaaaatgattgaagaaggaataaatgttgatggagttttgcatggtaaaggttccgatg

SEQ ID NO: 267621 - DNA, 1599 bp, Unknown
  Bacterial polypeptide expressing nucleotide sequence isolated from the Sargasso Sea
actgcgggaagcatctagaaaaggtttagcaagtggtctatctgttgcttttaaatctggtgctgtgacaggaatgttggttgctggtttggcattattgtcaatcgcagtttattattatttattattaaaatttaatgttgatgaaagagaaattgtaaatgctttagttgctctaggatttggtgcatccttaatatcaatttttgcaagactaggtggagggatattcacaaaaggagctgatgtaggagccgacttagttggaaaagttgaagctggcataccagaggatgatcctcgaaatccagctgtaattgctgacaatgttggtgataacgtaggtgactgtgcaggtatggcagctgatttatttgaaacatatgcagttaccattgttgctacaatggttttatcatctattttttttcagggtgatatgtctatgatgatttaccctttaactattggtggagcttgtattttaacatctatattaggtactttttttgtaaaattaggaaaaagtaaaaatgtaatgaatgccttatacaaaggttttgtagcttcagctgtttcgtcattaataattctttatccagttactgaccatgtattaggtttagacaatacatataatttagataacaaagttttttcaggtatgagtttgtactattgtggaattataggtttagtcataacgggcttattaatttgggttaccgagtattacacaggaactaattacagacctgttagaagtgtagctagttcatctactacaggtcatggaactaatgttattcaaggattagctgtatcactagaagctacagcaattccagccttaattattgttactggaatattagcaaccaaccatattgctggtctttatggaattgcaattgctgttacaactatgttggctttagctggaatggttgttgcgctggatgcttatggtcctgttactgataatgcaggcggtatagctgaaatgtctaaactacctaacaatgtgagaaaaactaccgatgcacttgatgcagttggaaatacaacaaaagctgtaacaaaaggatatgctataggttctgcaggattaggagctttagttctttttgcagcatatactgaagatataaagcacttttctaaagaagcaggatctgcacttgagggaattgttgttacttttgatttatcaaatccatatgttgttgtaggtttattaattggtggaatgcttccatatttgtttggttcaatgggtatgcaggccgttggtagagctggtggtgctgtggtagttgaagtaagaagacaatttaaaaaataccctggcataatgaagagaaaacaaaaacctgattacgcaaagcttgttgatttattaactgttgcagcaattaaagaaatgattataccttcattactaccagtattgtctccaattttactatactttattatttttgctataggtggccaagtagctgcactagcttcagttggcgcaatgttattaggtgtaattataactggattatttgttgctgtttcaatgactgcaggtggtggtgcttgggataa

SEQ ID NO: 267622 - DNA, 2014 bp, Unknown
  Bacterial polypeptide expressing nucleotide sequence isolated from the Sargasso Sea
tatggaaagttttattattggcccaatgactccttggggtcctgttgtaactggcttaataggcctagtttttgcttttgttttgtatggattaattatgaaatatccagcaggcaaagattctgtagttaagatcggagatcagatccatctaggggctaaagtctttatgttcactgaatacaaaattttgacaccagtggttatagctttagtagtagcttgtggcttttctccacttggttgggatacagcaattgcaatagcggttggagcgttatcttcggcgatcgcaggatttataggaatgtattcagcaacacaagcaaatgtgagaactgcaacagcagcagaaaattctggacaagaacaagctttatcaatttctttctttggtggatcaatcatggggctctgcgtagcatctatggggttagttggtcttggtggcctttatttctactttagtggagttatagaagatcccaatgaacttgctaaagcattagaaggtttcggtgtcggagcttctgccgtagcattattctcaagagttggtggaggaatcttcactaaaagtgctgatgttggcgctgatctagtaggaaagatagaagctggtattcctgaagatgaccctaggaaccctggggttattgcagataacgttggagataatgttggcgatattgctggtatgggctcagatatatttgaatcatactgtggagcaatgattgcatcaattgctattgctgcaactatgggcaataccgatttaatgtttttgcctttatggcttgcagcttcaggattattctgttctttactaggtataggtattgttagaactcaagtttctagatcaccagcagttgctttgagatgggggacattcctatctccagtcttatttttattatttgctggtatgagtatttactattcacctgctatagagatgaattatttttattctgtacttacaggagcagttggcggcatcttaattggtttaataactgagtactatacaggtggagagacagagaattcaccagtaggtaaaattgctaagtctggtgaaacaggcccagctacagtcatgattgctggcttaagtgtaggtatgcagtcagttgtattgcctttatttgttattgcaggaattgttgggctatcaacatacttttcaggcctttatggagttggtattgcagcagttggcatgctatcaactgtcggtatcactatggcaattgatgcttatggcccagtagcagataatgctggtgggattgctgaaatgagcggcatgaaaagcgaagttagagaaattacagactcgcttgatgaattaggaaacacaacagcagcaataggcaaaggttttgctattggagcagcagcccttgcagctcttgcaattatcgcagcatatatgcttgcaactggtgtagaatcactttctttagatgaccctaaagtcttaatgggcatgtttatcggtggctcaattccatttttagtctcttcaataactatgactgcagttggcgatgcggcttttgaaatgatagaagaaattagaaggcaattcagagaaattccaggtttgcttgaaggtaaggctgaaccagataatgcaaagtgtgtagatatagctacaaaagcagctttaaataagatgttattaccaggagcaattgcaattggttcaccagtcgctgttggttttattttaggtccagttgttttaggcggtatgttagcaggagctctattaggttgtgtcttgatggcattaatgatggctaatgcaggcggcgcttgggacaatgctaaaaagtttgttgaaaaaggtaactttggtggcaaaggaacggatacacacgcagctacagtagtcggtgatacagttggagatccatttaaagatacttcaggaccatcaatgaatattcttattaatgtgatggctatcgtaagtcttgttatcgcaccacttttataa

SEQ ID NO: 267623 - DNA, 2047 bp, Unknown
  Bacterial polypeptide expressing nucleotide sequence isolated from the Sargasso Sea
atgcttttaaattatcagggctctatatttgctgctattttaggtttagttttagcagcctattttgcaaacagaattttagctataaacgtttctgatgaaaaagtaagtaatctatcagatgctataagaaaaggctcaatggcttttttaaaaagacaatattcttggattagtatttttgttttagtcttagctatcttgattcctactcttactgaccttggtgtttgggggtcagtatcatttattggtggtgcagcattttcttctttagctggatttattggaatgagaatagcaacagctgcaaatggcagaacaactgaggctgcaagagacggtggaacattaaaagctttgccagttgcatttagaggaggagccgtaatgggtttctcagttgctggtttaggactgttgggagtaggtcttggatattggatttttgttgaactcctagaacttgaaaacgcctatgatattttggcagcaataggactaggaggttcttcgatagctctttttgcaagagtaggtggaggaatttatacaaaagctgcggatgttggcgctgatttagttggtaaagttgaagctggtattcctgaagatgaccctagaaatccagcaacaattgcagacaatgtaggtgataatgttggcgatgtcgctggtatgggagcagatttgtttgaaagttatgtcggatctcttgttgcaccattagcatatgccgcaattgtatttgctaattcggaagcattgccctctctcttattttttccacttgctgtaggaactataggaatgttagcttccatagtttcctcatttcttgtcgtccctcaagagggaaagttagcacaagcactacacagaggaacttattcagctgcagctttgacagcaggaggtgtattttttctttctaatacaatgtttgccgattactctgaaaatcctattggtctatttatttcagtaatcattggattattagttggaataactgttggtcagatttcagaatggttcacatcagatcatcattcaatcgttaagagtattgccgatcaagctaagacaggtcctgcaacccttgttctttcaggaatttcagaaggtatgagatctgccgctttttcagttattgttgtagtttttggtgtctttggtgcttacacggcaggtgattgggctttaggggccggcggcggtatttatggagtcgctgtggcagctattggagttttggcaacattaggtattactgttgctgttgatgcttacggaccaatagctgataatgctggcggtattgcagaaatggctcatttagatcctgaggtaagaaaagctacagatgaattagattctctaggaaacactactgcagctatcgcaaaaggatttgcaattggatcagctgctgtaacagctttagctttattttctgcttttgttcagagtgctggtttagccgagtctggattaaatattacaaaagtcgaagttactcttggtttgtttttgggaggtatgttcccatttttatttgcagcaatgacaataaatgctgttggaagagctgcatttaagatgatagaagaagtaagaagacaatttagagagatacctggcttaagagaaggtaaagaaggtgttgttccagagtatgaagagtgtgttgatattgctactacagctgcactaagagaaatgttattacctggcggactagcaattgttttgcctttagtaataggattttggaataaagaagcactaggaggatttcttgctggagcacttgtaacagggtttctgcttgcaatattcatggccaactcaggtggcgcatgggataatgcaaaaaaatatattgaggcaggtggaggtgccggtaaaggttcagatgagcataaggccgctgttataggtgacacaattggagatccatttaaagatacttctggtccagctatgaatattgtcattaaagtaatgacaatcgtaagtcttatattcgcatctgcattttgat

SEQ ID NO: 267624 - DNA, 1889 bp, Unknown
  Bacterial polypeptide expressing nucleotide sequence isolated from the Sargasso Sea
aatggacccttggggaccatttgcaacaggctttatagggctaatattcgcatttattttatatggattaataatgaaatttccggctggtaaacaatcagtcgtaaaaattggagatcaaatacatctaggagctaaagtattcatgataactgaatacaaaatccttgctccagtagttctagccttagttttagcttgcggactttcaccactaggctggtacacagccttagcgatcgcagttggcgcactttcatctgcaattgcaggattcataggaatgtactcagcaacaaaagctaatgtaagaacagctacagctgcagaaaatcatggtcaagaacaagctttatcaatatctttttttggtggttcaatcatgggactgtgtgttgcatcaatggggttagttggcttaggtggattgtttttctacttctctggagcaatggatgatctcgataaaattgcaaaagccctagaaggttttggtgttggtgcttcagcagtagctttattttcaagagttggtggaggaatttacacaaaaagtgcagatgttggcgctgaccttgtaggaaaaattgaggctggaatacccgaagatgatccaagaaatccaggtgttatcgcagataatgttggcgataatgttggcgatattgctggaatgggttcagatatttttgaatcttattgcggtgcaatgattgcatcaatcgcaattgcagcaacaatgttagatccaaatttgatgtttttacctttatggcttgcagcctctgggttattttgctctttgattggtataggtattgtaagaacacaagtgtctagatcacctgcagttgcactaagatggggaacgtttttgtcaccagtaattttccttatatttgctggtgtaagtatttactactctcctatagaaatgaaatatttctattctgtgcttactggagcggttggtggaattttaattggactcattactgaatactacacagggggggatacagaaaattctccagttggcaaaatagcaaaatctggtgaaactgggccagcaactgtaatgattactggtttaagtgtagggatgcaatcagtagttctgcctttatttgtaattgcaggtatagttggattatctacatatttctcaggtttatacggcgtaggcattgcagcagttggaatgttgtcaacagtaggaattacaatggcaatagatgcatatgggcctgttgcagataatgctggcggtattgcagaaatgagcggtatgaaaagtgaagttagagaaataacagattcattagatgaacttggaaatactacagcagcaataggaaaggggtttgcaattggagcagcagctcttgcagcattagcgattattgcagcttacatgttagctgctgatgtagagcagctttcattagatgatccaaaagttttaatgggcatgtttattggaggctcaattccattcttggtttcatcaattactatgacagcagttggggatgcagcatttgaaatgattgaagaaattagaagacaatttagagaaattccaggcttactggagggaaaagccgaaccagataatgcaaagtgtgtagatatagcaactaaagctgctttaaataaaatgttattgcctggagcaattgcaatactgtcaccagtaattgtaggttttgttttaggaccaattcatcttggcggcatgttagctggagcattactaggatgtgttttaatggctctgatgatggctaatgctggaggcgcttgggataatgctaagaaatttgttgagaagggtaactttggtggaaagggtactgatacacattcagcaaccgttgtaggtgata

SEQ ID NO: 267625 - DNA, 1381 bp, Unknown
  Bacterial polypeptide expressing nucleotide sequence isolated from the Sargasso Sea
aatggttttagcctcaatattttttgctggcaatgagaccatgatgatttaccctctatcaatatgtggagcatgtgtaataacatctattctcggaacttactttgttaaattaggaaaaaacaactcaattatgggagctctttatagaggttttattgcaactgctattctttcattaattattttatattttgttacagatttagttgttggttttgatacagttctttctgtagccggacagagttttagcggtttagatttatacatatgtggtgttatgggtcttgctataacaggacttattatttggatcacagaatattatactggagtagattacagaccagttaaatcaattgcaaaatcatctgaaacaggtcacggaacaaatgttatacagggtttagctatatctatggagtctactgctcttcctgctttagtaattgtattcggaattattgttacttattctctagcaggtcttttcggtattgctgttgcggttactacaatgcttgctcttgctggaatggttgttgctttggatgcatttggtcccgttactgataatgcaggcggcattgctgaaatgtcagaattacctgaggaagtaagaaatacaactgactcattagatgctgtaggaaatactacaaaagctgttacaaaaggttatgcaattggatcagctggtttaggagctttggtcctctttggcgcttatacagcagatttagaatatttttcttctaatgctactgaaggtagttatttctttggtgttgcacctgatttttcattgtctaacccttatgtagttgttggtttattagttggaggtatgcttccgtatttatttgccgctttaggtatgacagcagttggcagggcaggctcagctattgtagaagaggttagacatcaatttaaagagaaacctggaataatgactggtgaagacaaacccaattataagtcagctgttgatttattgacaaaagcagcgattaaagaaatgatcgtgccgtctttattacctttattatcaccagttattcttttttatattgttaattttattgctacaaagagtgatgctttttctgcattaggcgctatgcttcttggtgtcattgttactggtttatttgttgctctttctatgactgctgggggtggtgcttgggataatgcaaaaaaatatattgaagatggtaatcatggcggtaaggggtctgaagcacataaggctgctgttactggtgatactgtaggtgatccatataaggatactgccggaccagctgttaacccaatgattaagattactaatattgttgcattattattattagcagttttagctcattaa

SEQ ID NO: 267626 - DNA, 1057 bp, Unknown
  Bacterial polypeptide expressing nucleotide sequence isolated from the Sargasso Sea
gatgaatgaaggtcaagctttatggattgctttaactgcatcagtggtagcaattatttgcggagttgttttttcactccaaatcattaaagaatcagacggcaatgaccggatgagagagattgcaggagcaattcaagaaggagctcaagcttatctgactagacaatattcaacaattgcaatcgtaggagttgtcatatttatattaatgggtgtcagcggaattggttgggctagtgcaattggttttgcaatcggtgccatcttctctggtctagccggatacattggcatgagtatatcagtcagagccaatgtcagaactgctcaagcagctcaccaaggaatgaatgctgctctatccatggcatttagaggcggtgctgttactggactgctcgttgttggtctcggtttattaagcattgctggatactacctcattttgacatcttcaggcatttctgttgatgacagtctgcatgcattaataggattggcatttggtggttcactgatatctatatttgcaagacttggtggtggaatatttacaaaaggtgccgatgttggcgctgacctagttggaaaaattaatgctgggataccagaggatgatccaagaaacgcagcagtgattgcagataatgttggagacaatgtaggagactgtgcaggtatggcagcagacctttttgagacatatgcagtcacaatcatcgcaaccatgctgttgggtggtttattgttcagcggagtagaagcgaccaatgcaataatgtacccacttgtattgggtgctgtctctatagtcgcatcggttgtaggagcgctatttgttaaggccaaagaaggtggaagcgtaatgggggccctttacaaaggtgtcattatctctggactgcttgctgccatcgctttctatccaataaccgggatgatgggaatgagtatgggtcttttctggtctgcaatcattggtcttgcattgactgcttttatggtaatcgtaacagaatattatacgagcacagaatataaccctgtaaagaaa

SEQ ID NO: 267627 - DNA, 2020 bp, Unknown
  Bacterial polypeptide expressing nucleotide sequence isolated from the Sargasso Sea
tatgattacaggacaattcattcccataatcttcggtctgggtggcttaataactgcgtacttactttataaattcgtcttaaaattccctgctggtgaaggcaagattgttgaaatttcagatcaaattcatcttggtgctatggccttcatccgtaaagaatatagtattctacttatctttgcgcttatacttattgctggtatatattatgggcttggcgttgcaagtacgatatcattcatcataggcgcagtttgctcatccgctacagggtttataggcatgtatactgcaacaaaagctaacgtcagaacaacaaatgctgcaaataaaactggattgtcggatagcttagttatagccttctttggaggctcaataatggggcttactgtcgcagcgatggggcttttaggtctaggtgtattgtactttctatatgggggcgataaagaaacagcctccgttatacatggttttgggatgggagcatccactgttgctttattttcgagagtaggtggtggcattttcacaaaatctgctgatgttggtgcagatttagttggtaaagtcgaagcaggaatacctgaggatgatcctcgcaatccaggagtgattgctgataatgttggtgataatgttggtgatgttgctggaatggggtcagatatttttgagtcatattgtggttcgattattgctacaattgctattgcatcaacactaagtttaacaatcatcgatactctgggcccacaagaatctctaatgtttcttcctttagcgcttgcatctctcggtttaatttgctcaatcgcaggaatactaattgttaaaattcttgcaaaaagtacatcaacagaaaaaataagtagcgcacttagaggtggtacattttcagcagctataatatttattatttcctcctatttcttgataaacttattgaacttaaattcatatatttggctggcagttctatctggtgcagttggtggtgtaataataggattagtaactgaatactacacaggcagcgcacctgttcgtaaaattgcaagtcaaggtaaaacaggatctgcaaccgtcatcacaacaggcttcgcaacaggtcttgagtcagtagtcgttcccataattgcaattgctttcattatttttatttcgaatgaatttgctaatttgtatggagttggcatagcggcagttggtatgctagccactgtaggtataacaatggcaatagatgcatacggacctgtcgcagataacgcaggcgggattgctgagatggctggtcttggtgaaggtacaagaaaaataacagatagtctagatgaagttggaaatactactgcagctattggcaaaggttttgcaatcggagcagcagcactagctgcgcttgcaattatcactgcttttgttcaagaagtaaatcatgggagagaaatcccaataaaattactgctcactgataccaatgtattaataggtttatttattggagggatgattccttttcttgttgcttcattaacaattacagcagtgggtgatgctgcttttgagatgattacagaaattcgtcgacaatttaaagagattccgggattgcttgaaggcacaggaaaaccagataatggacgctgcgtagaaatagcaactacagctgcgttaaaaagaatggtgctccctggagcaatagcaatctttgcgccagtagttattggttttagttttggtgcagaaatgctcggtggcttacttggtggaggtttactgagttgtgtattacttgctctgacaatgtctaatgctggtggggcatgggataatgcaaaaaaatatgtcgaacaaggcaatttgggtggaaaaggttcagaaactcataaagctacagttgtgggtgataccgttggtgatccattaaaagatacctctggaccttccatgaatattttgattaatgtaatggcaattgtgagtttggtgattgctccgctattgtaa

SEQ ID NO: 267628 - DNA, 2104 bp, Unknown
  Bacterial polypeptide expressing nucleotide sequence isolated from the Sargasso Sea
atggaaatcattcacttaataataggagcaggtgttttagctgtagtctatggtattgttacatcgatttcagtgctttcagcggatactggaaatgaaaaaatgcaggaaattgctggcgctatccaagagggtgcaagcgcatatttatctaggcaatactctactattgctatagttggtttagtgatattagtaatttcatattttttacttggattagaggtttctataggttttcttattggagcagtgttatccggaattgctggatacattggaatgcttgtatcagttagagcaaatgtaagaacaactcaagcggcctcaaacagtttggctgaaggcttaagtattgcattcaaatcaggggccgtaacgggtatgcttgttgcgggtctagcattacttgccgttgccgtttattactatgttttaacaaatctatggattcctcaaaataacagaatagttatagacgctctagtggctttaggtttcggttcttctttaatttctatttttgctagacttggaggcggtatttttacgaaaggtgccgatgttggaggtgatttagttgggaaggttgaagccggaatacctgaagacgaccctagaaatcctgcaacaattgcagataatgttggtgataatgttggcgattgtgctggtatggcagctgatttatttgaaacttatgctgtgacagttgttgccacaatggttttggcctcaatattttttgcaggaaatgaaaccatgatgatttatcctttatcaatatgtggtgcttgtgtaattacatctattcttggaacatattttgttaaattaggaaaaagcaactctattatgggtgctctttataaaggatttattgcaactgcaattctttcattagttgttctttattttgttactgatttagttgttggttttgggacctctctcactatatcaggaaagagttttaatggtttagatttgtacatgtgtggtgtaacaggattagcaataacaggtttaatcatttggattacagaatattatacaggcgtagactatagaccggttaaatcaattgcaaaatcttctgaaacaggacatggaacaaatgtcattcagggcttagcaatttcaatggaatcaacagctcttcctgctttagtgattgtttttgggattattattacttattcattagctggtcttttcggtattgctgttgcggtaactacaatgttggcgcttgcaggtatggttgttgctttagatgcttttggtcctgttacagataatgcaggcggaatagccgaaatgtcggatcttcctgaagaagttagaaacacaactgattctttagatgctgttggtaataccacaaaagcagttacaaaaggttatgcaattggatcagctggcttaggtgcattagttctttttggcgcttacactgcagacttagaatatttctcatctaatgctgctgagggaagttatttctttggagtgaatcctgacttttctctttcaaacccttatgtagttgttggcttattagttggtggtatgcttccttacttatttgcggcactaggaatgacagcagttgggcgtgcaggctcagctattgttgaggaagtaagaaagcagtttaaggaaaaaccaggaattatgactggagaagataaacctgattatagttcagctgttgatctactaacaaaatctgcaattaaagagatgattgtgccatctttactacctctattatcaccgatagtccttttttatactgttaattttattgctacaaaaagtgatgcattttcagctcttggagcaatgcttctaggcgttattgttacaggattatttgttgctctttctatgactgctggaggtggtgcatgggataatgcaaaaaaatatattgaagatggtaattatggtggaaaaggctctgaggctcataaagctgcagtaacgggtgatactgttggtgatccttataaggacactgcaggaccagctgttaaccctatgattaagataactaatattgtagctttattactattggcagttttagcgcattaag

SEQ ID NO: 267629 - DNA, 1081 bp, Unknown
  Bacterial polypeptide expressing nucleotide sequence isolated from the Sargasso Sea
tttgataagttcatttgaaggcgtagaaatgagtgtatggtggtgtgttatttcaggagcagttggtggagtgttaataggtctgattactgaatattatactggtggaagtcctgttagaaagatagctgaatctggagaaacgggatctgctactgttatgatctctggactttcagtaggaatgcaatctgttgttgttccaataattatattagcagcaattatttttgtttcaactcaactttcaggagtttatggtgttggtatagcagcagttggtatgcttgctactgtaggcataacaatggcaattgatgcatatggtcctgttgctgacaacgcaggaggcatagcagagatggctggtatgggtgaagatgttagagaaataactgattctttagatgaactaggcaatactactgctgcaattggtaaaggatttgcaattggggccgccgcacttgcagcacttgcaattatttcggcatattcagaagtagtttctgcaaatgataacaattttaatttagctttaactaatccaattgttctcgtaggaatgtttattggtgcttgcattccttttcttgtttcatcaattacaatgactgctgtcggagacgctgcgtttgaaatgataaatgaaattagaaggcagttcagagaaatctcaggattaatggaaggtcaagcagaccctgactctgaaaaatgtgttcagatagctacacaagccgcacttaaaaaaatgatgttaccaggcgttatagctgtgtcaatgcctgctattgttggctttggtcttggcgcacaagcacttggcggtatgttggctggtggtttacttggttgtgtatctttagcccttatgatggcaaatgctggtggagcatgggataacgcaaaaaaatatgttgaaaaaggaaatcttggtgggaaaggatctgagactcatgctgcagcagttgttggtgatactgtaggagatccatttaaggatacatctggaccctcaatgaatattctaataaatgttatggcaatagtgagcttggtaattgcaccattactctag

SEQ ID NO: 267630 - DNA, 1288 bp, Unknown
  Bacterial polypeptide expressing nucleotide sequence isolated from the Sargasso Sea
gttgggaggtctttttttattttactctaacttgtataatgtagatcacacaaatataaccactgtattgaacatattatctggcttttctcttggggcatcttctattgccttatttgctagagttggtggaggtatatatacaaaagccgcagatgttggtgctgatttagtagggaaggttgaagctgggatacctgaagatcaccctcttaatcctgccacgatagctgataatgtgggagacaatgtaggtgatgttgctggtatgggagctgacttattcgaatcttatgtcggatctataataggctctatggtccttggttctagtattgttgttgccggtgcagttggggggtttgatattaactttatcttactacctcttttgattgctgcatcaggaattattgtatcgattgttggaacttttatggtgtctgttaaagaaggtggagaccctcaaactgctcttaatagaggtgaatttggcagcgctttcatcatggttgctattatttatcttttaattcaaaattttcttcctgctgttttttcccaaggaggtgaaacttttagtaatatgggtgttttttatgcaacagtgattggtttagtggctggtcttggaatcggtatgattacagaacactacacaggtacaggcacatctcctgtacggtctattgctcagcaatcacttactggtccagcaacgaatataatagcaggcttaggagttggtatgcaatctacagcaataccaattttaataattgcatctgctataattggggcgtatcactttgcaggtctttatggaattgctatggctgctttaggtatgttagctaatactggaatacaattagcagttgatgcctacggccctatctctgataatgctggtggaatagcagagatggcagaactcccagaagaagttcgtaatcgtactgataaacttgatgcagtcgggaatacaactgcagctattggtaaaggatttgctattggctctgctgcattaactgcccttgctttgtttgcggcctttatggttcagaccgatatccaatctattgatattgcagacccttgggttatggctggtttatttgtgggagggatgctaccattcttgttttcttcaatggccatgggcgcagtaggtagagctgcgatggccatgatagaagaggtaagacgtcaattcagagagattccagaattaaaaaaagcacttgaattaatgaacttgaaaaatgaaaatgattggggatga

SEQ ID NO: 267631 - DNA, 504 bp, Unknown
  Bacterial polypeptide expressing nucleotide sequence isolated from the Sargasso Sea
gtatgacagctgttggtcgagctgcctcttcagtggttgaagaagttcgtcgtcaatttagagaagatgcagggattttaaaaggcacctcaaaaccaaactatgccagggcggtagatatgctaactaaatctgccatcaaagaaatgattgttccatcgatgctcccagtactggcgccagttttctgtttctttgttattaatgtaattgatggaaaatcttctgctttttctgccctcggggcaatgctattaggtacaatcatcacagggcttttcttggcaatttcaatgactgcagggggtggtgcatgggataatgctaagaagcttattgaagacggacaatttggtggaaagggatcggatgctcacaaagcatcagtcactggagatacggtaggcgacccatataaagatacagcaggccccgcaattaatcctatgataaaaattactaatatagttgctttgctacttctcgccatattagctcattaag

SEQ ID NO: 267632 - DNA, 883 bp, Unknown
  Bacterial polypeptide expressing nucleotide sequence isolated from the Sargasso Sea
ttgcaagtgctattcaaagaaggtgcgggggcatatctaaaaagacaatatgcaactatttccgttgttggtgtaatcatatttttactggttgcgtacttattggatccgattgtagctgttggtttcgcaattggcgctatcctatctggaatagcagggttcgtcggaatgctaatatctgtgagggcgaatgtaagaactgcccaagcggcatcggaggatctatcaaaaggtttatcaatagcattcaaggctggttctgtgacaggtatgttagttgctgccctcgcactgcttgctgttagtgtatatttctttattttaacaaatatgctcaatcattcctttgatagtagggttataattgacgcccttgttgccctaggatttggtgcgtctttaatttcaatttttgcaaggcttggtggaggtatttttacaaaaggtgcagatgtaggcggtgatttagttggtaaggttgaagctgggatacccgaggatgaccccagaaatcctgcaaccatagcagataatgttggtgataatgtaggtgactgcgctggtatggctgcggatctatttgaaacgtatgcggtcactattgtcgctactatggttttagcctcaatttatttttcaagctcagtatactttgaacagattatgctatacccgctcgcaataggagctacatgtattttaacatcaattgttggtactttttttgtaaagcttggcaaaaataggtcaataatgggcgcattatataaaggtttttttgttacgggcgctctatcactggcccttttatggccgctcactaataatctaattggtatggagaccattctcgagacatcttttatcaagttctctggaa

SEQ ID NO: 267633 - DNA, 892 bp, Unknown
  Bacterial polypeptide expressing nucleotide sequence isolated from the Sargasso Sea
tgtatcccgatcgcaattctcgctactattatattcgtatcaactagtcttgctgatgtctatggtgttggtattgccgcagttggcatgcttgcaaccgttggtattaccatggcaatcgatgcttatggacctgttgcggacaacgccggtggaatcgctgaaatgtcaggcatgggtaaaaaagtaagagatatcactgattcattggatgaattaggtaatacgactgctgctattggaaaagggtttgcaattggggcagctgctttggcagctcttgcaattatttctgctttttcagctgttgtaactgtaaataatcctgaattctcgctttcactttctgatccaattgttcttgtcggcatgttcattggtgcatgcgttcccttcttagtctcttcaattaccatgactgcagtgggtgacgccgcatttgaaatgattaatgagataagaagacaatttaaagaaataaaaggtttgatggaaggcaaagcagatcctgactctgaaaaatgtgttgaaattgcgaccacagcagctcttaaaaaaatgatgcttccaggtgtcattgctgtttctatgccagcaatagtagggtttggccttggtgcacaagccttaggtggaatgttggctgggggtttgctgggttgtgtttccttggcattaatgatggctaatgccggaggtgcttgggataatgcaaagaaatttgttgaaaagggaaacttcggtgggaaaggatctgatactcatgcagctgcagttgtcggagacactgtgggagatccctttaaagatacctcaggcccgtcaatgaatattcttattaacgtaatggcaattgtcagcttagttattgctccattacttagcatctaga

SEQ ID NO: 267634 - DNA, 1272 bp, Unknown
  Bacterial polypeptide expressing nucleotide sequence isolated from the Sargasso Sea
tattagttatgcttttagtatcttagtaggcttgggttatctaattggtgctactctttctggacttgcaggttatgttgggatgttagtttctgttcaagcaaatgtcagaactgcagaagcttctagaaagggtttatcgaacggcctatctattgcttttaaatctggagcggttactggaatgcttgttgctggtttagctttattatctattgcagtttattattattttttattaaaatttaatgttgaagaaagagaattaataaacgcactaatagctctaggctttggtgcttctttaatctcaatttttgcaagacttggtggcggtatatttacgaaaggagcagatgttggtgctgatttagttggtaaagttgaggctggtattcctgaagacgatccaagaaacccagcggttattgctgacaatgttggcgataatgtgggtgattgtgctggtatggcagctgatctttttgaaacctatgctgtaacgattgttgcaacaatggttttgtcatctatattttttcaaggtgatatgaatatgatgatatacccattaaccattggtggtgcatgtattctaacatcgattttaggaacattttttgtaagtttaggaagttctaaaaatataatggcagctttatacaaaggatttattgttactgcaatttcttctttagctatactatatccagtgacagattatgtaataggatttgacacaatgtattccactggtgataaatcatttaatggcatgagtttatattactgtggagtaatcggacttattattacaggtcttataatttggataacagagtattatacgggcacaggttataggccagttcaaagtgttgcttcatcatctaaaacaggtcatggtactaacgtaattcaaggattggcggtttcaatggaggcaaccgctataccagcattaattattgttgctggaatattattaactaattctattgctggtctctatggaattgcaatagctgtgaccactatgttagcgcttgctggaatggttgttgcattagatgcatatggacctgtaactgataatgctggtggaattgctgaaatgtcaaatctacctaagaacgtaagaaaaacgacagatgctttggacgctgttggcaatacaacaaaagctgtaactaaaggttatgctataggttcagctggtcttggtgccttagttctttttgcagcttatactgaggatataaaacatttttc

SEQ ID NO: 267635 - DNA, 1024 bp, Unknown
  Bacterial polypeptide expressing nucleotide sequence isolated from the Sargasso Sea
atgaatttaataccgataatattaggctttaccggtctactagcggcatatttactctatgcacaagtaaagaaatatcctgccggagaaaaaaacttgacagatatctcagatgagatacatctcggcgccatggcgttcatgaaaaaagaatattccatactttttgtgttctctctaatacttgttttcgggatatatataggacttggattgaacagcaccatagcattcattgtcggtgcattaagttcctcaataactggttttataggcatgtatacagctacaaaagcaaatgtaagaacagctacagccgcacaaaattcgggtgttagcgacagtctatcagtcgcattcttcggaggatcaattatgggcttaactgtggcggctatgggattactaggtttgggactcttatacatcctctatggttccgatcccgcaactgcatcaacgatacatggttttggaatgggggcatcaaccgtagcattattctcaagagttggcggtggaatttttacaaagtctgcagatgtaggcgcggacctagtaggtaaagtagaaaaagatatcccagaggatgatccaaggaatccgggcgtaatagcagataatgttggagataatgtgggtgacgttgcaggtatgggttcagatatatttgagtcatattgtggagcaataattgcaactatagcaatagcatcaaccatgcttcaatctgatttaattgaacttgggtcaagggaaatactcatgtcactcccgctcgcacttgcatctcttggtttattatgttcaataattggaatattaatcataaaaatcttagcttcaagaaagggtagtaatgagacaaatatcgcaaattctcttagagggggaacatttgcatcagcaatttcattcatagttctagcatacttcgtaattatatcactaggggttacagaaaacgcatggtatgcggttctctctggaacgattggtggaattattattggtcttgttacgg

SEQ ID NO: 267636 - DNA, 889 bp, Unknown
  Bacterial polypeptide expressing nucleotide sequence isolated from the Sargasso Sea
gtttgcttgagtatttggggcgcttatatgcttggttttctctatggaatagcgattgctgcgacatcaatgctctctctaacaggaatgattgttgcattggatgcatttggtcctattacagataatgctggggggattgctgagatggcagaacttccacctgaaatcagaggaattactgatcctttggatgctgtaggtaatacaacaaaagctgtcacaaaaggttatgcaattggatcagcaggactagctgcattggtcttatttgcagatttcacagcaaatctagaggctgaaggaaaaatggttcagttcatgctgaatgatcctgcggtaataatcggattattcataggtggaatggttccatatcttttcgctgcccttgcaatggaagccgtcgaacgagctgcaacctcagtagtagaagaagttgaaagacaatttgaggaacctggaatcatggaaggaacagtaaagccagattattcaaaagctgtcgatttgcttaccaagtccgcgattaaggaaatgatagttccttccttgcttccagtacttgtgccagtcgtcttggcagttcttatgaatatcatgatgccagaagatggaggcattaaagcacttggtggactgttgatcggaacaattgttacaggaatatttgttgcaatctcaatgaccaccggaggtggagcttgggataatgcaaagaaatacgtggaagatggtcattgtggcggcaagggatctgaggcacacaatgcttcaatcactggtgatacagtaggagacccttataaagatactgccggcccagcaatcaatcctttgattaagatcattaatatcgttgcattattgttaatcccattgctctaat

SEQ ID NO: 267637 - DNA, 532 bp, Unknown
  Bacterial polypeptide expressing nucleotide sequence isolated from the Sargasso Sea
atgagcctgaacctggtcccggctggcaagagcctgcccgacgacatctacgtcatcatcgaaatcccgcagaatgccgacccgatcaaatacgaagtcgacaaggacagcggtgccatcttcgttgatcgcttcatgtctaccccgatgttctacccgtgcaactacggttacgtgaacgccaccctgtctctggatggtgatccggtcgacgtgctggtgccgactccctacccgctgctggccggctccgtcattcgctgccgcccggtcggcgtgctgaagatgaccgacgaatccggtgaagatgccaagatcgtggccgttccgcactccaagctgaccaagcagtacgatcacatcaaggatgtgaacgatctgcccgagctgctgcgcgcccagatccagcacttcttcgagcgctacaaagagctggaagcaggcaagtgggtcaaggttgaaggctggggcgacaaggccgctgccgaagccgagatcatcagctctgccgagcgttacgctgccaaataag

SEQ ID NO: 267638 - DNA, 1525 bp, Unknown
  Bacterial polypeptide expressing nucleotide sequence isolated from the Sargasso Sea
ttgccgtcttggtggtggtattttcactaaaggtgctgatgttggtgcagatttagttggcaaggttgaagcaggtattcctgaagatgatccaagaaatcctgctgttattgctgataacgttggtgataatgtaggtgattgtgctggtatggctgctgatctatttgaaacttacgcagtaacgatagtggctacaatgctcataggaacaattatgttctctggccaaataaattatgtcgaacttccattatttattggtggagtatgtataatcgcatctattattggtgctttttttgtaaggttagggtcatcggaaaatattatgggtgctctttataaaggtttcatagtaactgctgttctatcagcaatatttatttattttgcagttgattacatgttcgacgatagtactgaaagcatgccattattttggagttctattgttggcttaattgtaactgcagcaattatttggataactgaatattatacatctaccgaatatagacctgtaaaatctattgctcaatcatctgagactgggcatggtacaaatgttatccagggcttggcgatttcaatggaagcaactgctgttccagcaattataattgctttaggtattgttttttcttataaccttgcaggaatatatggaattgctttggctgcaacaacaatgttagctcttgcaggcatggttgtagccttagatgcgtatggaccagtaactgataatgcaggcggtattgctgaaatgagtggtctagaagacgatgttagaaaaactactgacgctcttgacgctgtaggcaacacaacaaaagcagttacaaaaggttatgctattggttctgctggattagctgctttagttttgtttgctgcttatacatatgatttagaacactatttcccagatttggaaatatcatttctattatctgatccatatgttgtagttggtctaattattggaggtatgctcccatatttatttggttctatgggtatgcaagctgtaggacgtgctggcggggctgttgtagaagaagtaagaagacaatttaaggaaatgccaggtattatggaaggaaaaacaagaccagactatagtagagctgttgatatgctaactaaatctgcaattcgcgaaatgattgttccttctttattaccagtgttagcaccaattgttgtatactttataatttctttatatgaccaaagtgcagcactaacaacggttggatcaatgttgttaggtacaattgttactggtctttatgtagcaatttctatgactgcaggtggtggtgcttgggataatgctaaaaaatatatagaagatggtaatcatggaggtaagggttctgaagctcacaaggctgcagtgactggcgacacagttggtgacccttataaagatactgcgggtccagcagtaaacccaatgattaagattataaatattgtagcaattttattacttgctgccattggcacacattaa

SEQ ID NO: 267639 - DNA, 1516 bp, Unknown
  Bacterial polypeptide expressing nucleotide sequence isolated from the Sargasso Sea
gatcacccacttaatcctgcaactattgctgataatgttggagataatgttggagatgttgcgggcatgggagcagatttatttgaatcatatgttggtgcaattttaggatcaatggttttaggttggggtttgcatggaagcgaggcagcagtttatttgccattatacattgctggatcaggcattttggtttctattatcggcacatttatggtttccgttaaagaaggtggaaatcctcaaaaagcattaaatattggagagtttggatcttcagctatcatgataggagttatgtattatttaataactacagtgctgccaagtggtgttgatatgacagcaacaaatggtgaagtaattacttttacagctcttggtattttttatgcaacagtaattggtttgttggctggtttaggaattgggttaatcacagaacattatactggtacaggaacatcgccagtgcagtcagttgcagatcaatctattacaggttcagctactaatatcattgcaggtttaggtgttggtatgcagtctacagcaattcctacagtgattattgcagcagcaataatgggtgcttatcattttgcaggtttatatggtattgcaatggcggcacttggcatgcttgctaatacaggtattcaattagcggtagatgcatatggaccaatatctgataatgctggtggtatagctgaaatggcagaattagatcctgaagttagagaaagaacagataagcttgatgcagttggaaatacgacggcagcaattgggaaaggattcgcgattggttcagctgcattaacaacgctagccttatttgcatcttttagaacagtagcaggcatagattcaattgatttgacagatccaaaggtgatggcaggattatttattggaggaatgctaccatttttattttcttcaatggcgatgggagcggttggtcgtgcagctatgtctatgattgaagaagtgcgtcgacaatttagagatattcctgaattgaaagctgcattagaagtgatgaataagggtgatgaatcatcatggactgatgaagataaatcagtgtatgaaaaaggtcttgatagtgcagaacatggtaaatgtgttgagatttctactcaagcagcgattaaagaaatgatgttgccaggtttacttgcagttttaactccaattgttattggagcattttttggtccagaagcactaggtggattattagcaggtgttacagtttgtggtgtacttatggctatttttcaatccaatgctggtggtgcatgggataatgcgaaaaaaatgatagaggaaggaattcaaatcaatggtacagaatatggtaaaggttctgatcctcataaagcagcagttgtaggtgatactgttggagatccatttaaagatacatcgggtccatctttaaatatattaattaagctaatgtcagtggtttcattagttatagcaccaattttatttggttagt

SEQ ID NO: 267640 - DNA, 1057 bp, Unknown
  Bacterial polypeptide expressing nucleotide sequence isolated from the Sargasso Sea
ctgaatattatacttggaaccaattatagaccagttaaaagtgttgcatcatcttcaacaactggacatggaaccaatgtaattcaaggattggctgtttctatggaagctacagcaattccagctttaattattgttggtggtatattattaacaaattatattgcaggactttttggtatagcaatcgcagtaacaacaatgctagctttagctggtatggtagttgctttagatgcgtatggaccagtaacagataatgctggaggaattgcggaaatgtctaatttaccaaaaaatgttagaaagactacagatgctttagatgctgttggaaatacaactaaagctgttacaaaaggttatgctataggctcagctggactaggtgctttagttttgtttgccgcttatacagaagatataaaacatttttcaaaagttacaggatctaaattagaaggaattgttgttacttttgatctatcaaacccatttgttgtagtaggattattagttggaggaatgctgccttatttatttggatcgatgggtatgcaagccgttggaagagcaggcggtgctgttgtagttgaagttagaaggcaatttaaaaaaattccaggtattatgaaaagaaaagcaaaacctgattatggtaaattagttgatttattaactaaagcagcaatcaaagaaatgattattccatctttgttaccagttttatcaccaatagttttatatttatttattttaccaatcggtggtcaagttgcggcactgtcctcagtaggagcaatgttgctaggcgttattataactggattatttgtagcaatatctatgacagcaggtggtggtgcatgggataatgctaagaaatatattgaagatggtaattttggtggaaaagggtcagaggctcataaagctgctgtaaccggagacacagttggcgatccctataaagatacagcaggacctgctgtaaacccaatgataaaaataacaaatattgttgctttgcttttgcttgccgttattgctggttaag

SEQ ID NO: 267641 - DNA, 994 bp, Unknown
  Bacterial polypeptide expressing nucleotide sequence isolated from the Sargasso Sea
tatgtcagttgataccattttattatatacaatttttgctggaatattatccattgtatatggatttgtaacaggatcttcaattttgaatgcaagcgctggtaatgcaaaaatgcaagaaattgcttcagctattcaaataggggcaaaagcttatttaaacagacaatataaaactatcgctatcgttggtgttgtagttttagttatcattagttttgctttttcattattagttggaattggatatttaattggtgctgcattgtcaggtatagctggatacgttggaatgttagtatctgttcaagcaaatgtccgtacagcagaggcctcgagaaaaggtttatctcaaggtctttcaatagcatttaaatctggagcaatcacaggaatgctagttgctggtttagctttattagctatagctgtttattattatattttattatcagcaggtatcgatgaaagagaaattgtaaatgcactagtggctttaggttttggtgcttctttaatatctattttcgcaagattaggcggtggaatttttacaaaaggagccgatgttggtgcagatttagttggaaaagtagaggcaggtattccagaagatgatcctagaaatccagctgttattgcagacaacgtaggtgataatgtaggagattgcgcaggtatggcagctgatctttttgaaacatatgcagttacaattgttgcaactatggttctctcgtcaatattctttgtgtcagatttaaatatgatggtttacccattaagtattggtgcagcttgtattttaacatctattgtaggtactttttttgtaaaacttggacaatcaaaaaatataatgaatgcattatataaaggttttgttgctactgctattttatctttaattattttatatccaataacagactacgttattggattagatactaactattctgtaaatggtgtttcttttaatggtatgagttta

SEQ ID NO: 267642 - DNA, 1501 bp, Unknown
  Bacterial polypeptide expressing nucleotide sequence isolated from the Sargasso Sea
ggcggtatctatacaaaagcagcagatgttggtgctgatttggttggaaaagtagaagcaggaatacccgaagatgatcctagaaacccagcaacaattgcagataacgttggagacaatgttggtgatgttgcaggaatgggtgcagatctttttgaaagctacgttggatctttagtagcgccgttagcttatgcagctattgtatttgctggaactgatgttttgccttcgctactatttttcccactagcagtaggaaccataggtatgttggcatctatcgtttcttcttttcttgtagtacctaaggaaggcaaattagctcaagcacttcacagaggaacctactcagctgcaggaataactgctattggtgtgtattttctatcagatacgatgtttgctgatttttcagaaaatccaataggattatttatatcagttatcatcggtttgctcgttggtattactgttggtcaaatatcagaatggtttacctctgaccactattcaattgtaaaaaatattgcagatcaagctaaaactggaccagcgacagtagttttatctggaatttctgaaggaatgcgatctgctgcattctcagtagtggtagttgtcattggtgttggtggagcttatacatctggagcatgggctttaggagagtctggcggaatctatggtgttgccgttgcagcaattggtgttttggcaacactcggaataactgttgcagtcgatgcttatggtcctattgcagataacgcaggtggtattgcagaaatggcacatcttgatcctgaagttagaaaagctacagatgaactcgattcattaggaaacacaacagctgccattgcaaagggatttgcaattgggtctgctgctgtaacagcattagctttattctctgcatttgtgcaaagcgcaggtctgactgaactcgatattacgcaagtagaagttacagcaggattgtttttaggtggaatgtttcctttcttatttgctgcaatgacaattaatgcagtaggaagagctgcatttaaaatgattgaagaagtcaggcgtcaatttagagaaatacctggattgcgtgaaggaaaagaaggtgtaactcctgaatatgaagaatgtgttgatattgcaacttcagcagctttaaaagaaatgcttcttccaggcggtcttgcaattgtatcgcctttaattattggtttctggaacaaagaagctcttggtggctttttagctggtgctttagtaacagggttcttacttgcaatatttatggctaactcaggtggcgcatgggacaatgcaaaaaaatatattgaagctggtggcggcgctggtaaaggatctgaagaacataaagcggcagtaattggcgacactataggtgatccatttaaagatacctctggtccggcaatgaatattgttatcaaagttatgactatagtaagtctgatattcgcttctgcgttttaaa

SEQ ID NO: 267643 - DNA, 1420 bp, Unknown
  Bacterial polypeptide expressing nucleotide sequence isolated from the Sargasso Sea
tatgaactataatgttgaaacaatcttaatctacacaattttagcaggtatattatcaatagtttacggatattttacaggaaaaaatattttagctgcaagtacaggaaactccaagatgcaagaaattgcatctgcaattcaaattggagcaaaagcctatttaaacagacaatacaaaactattgcaatagttggtttagttgttcttgttattattagtttctcttttagtttcttagttggtctaggttacttaattggtgcagcattatctggtattgctggttatgtaggaatgttagtttcagttcaagctaatgttagaactgctgaagcatctagaaaaggtctgtcaaaaggtttatcaattgcatttaagtctggtgcagttactggaatgttggtggctggattagctctattatcaatagcagtttactattatttacttttaaaatttaacgttgataaaagagaattaatcaatgcacttattgcattaggatttggtgcttcacttatttctatatttgcacgattaggtggtggaatttttacaaaaggagctgatgtcggtgcagatctagttggaaaagtagaggcaggaattccagaagacgatccaagaaacccagccgtaattgctgacaatgtcggtgataatgttggtgattgtgctggtatggcagctgatttatttgaaacatatgcagtaactattgttgctacaatggttttatcctcaatttttttccaaaatgatttaatgatgatggtctatcctcttactattggaggtgcttgtataataacttcaattcttggcacattttttgtaaggttaggttcatcaaaaaatataatgcttgctctctataaagggttcattgttacagcaattacatctttactagttttatatccacttactgattatgttttaggtttagataaagtatattcaatagaggataaaaaattttctggtttaagtctttattactgcagtgtaattggattagtaataacaggtctacttatatgggtaacagaatattatactggtacaaattatagaccagtaaaaagtgttgcatcttcatctactactggccatggtacaaatgtaattcaaggacttgccgtttcaatggaagctacagcaataccagcattaattattgttggtggaattttattaacaaattatatagcgggcctttatggtatagcaattgcggtgactgcaatgttagctcttgcaggaatggtggtagcattagatgcatacggaccggtaacagataatgctggtggaatagctgaaatgtcaaatttaccgaaaaatgttagaaagactacagacgcattggatgcagttggtaatactacaaaagctgtaactaaaggttatgct

SEQ ID NO: 267644 - DNA, 2041 bp, Unknown
  Bacterial polypeptide expressing nucleotide sequence isolated from the Sargasso Sea
catgatagaaagttatcttgctataccacccattataggagtcttaggcttattagtagctttagggatataccttgttgtaactaattttcctgaaggagaggacaaggtaaagaaaataggagatcagatccatttaggtgctatgaccttcatgaaaacagagtatacctatttaagtatttttgcattagttgtaattattttggtttatttatcattaggccaggacactgcattagccgtattggcaggtgcattatcatcatccatagctggctggataggcatgtactctgcgactaaagctaatgtgagaactgcaactgctgcatctgaatctggagcagaatctgccctctctgtagctttttacggtggttctattatgggcctctgtgtagcctctctaggcttaattggtttaggtactttgtactatgttctcagtggggatgctcactcaatagagggctttgcaatgggagcttcaatagtagctctattttcaagagtaggtggaggtatatacaccaagagcgctgacgtaggagcggatctggtagggaaagttgaggctggtatacccgaagatgaccctcgtaatccaggagtaattgcagataatgtcggagataatgtgggtgatattgctggcatgggttcagatatttttgaatcttactgcggttcaatggttgcttgtattgctatagcatctacttacgcaataactgctgattttgcgcaagctgacaaagaaggaatgatgtttttacctttggcgctggcttcaataggtttaatagcttctatcataggaatagtaatcgttagattattttcaaagtcctcaccagcaaatgctatgagatggggcacaatgggagcgccactaatttttataatagcagcttactacttaactaactctctagttgcaagcaatcctttacctggaagtgatggtcttgatgtatggttggctgttgtttgtggttctgtaggaggcatagctattggtttaattactgaatactatactggttcaagtccggtaataaagattgcagaagctgggcaaactggtcctgctactgtgatgatcacaggactctcagtaggcatgcaatccgttgtgctccctatagcctgtattattcttattatttttatctcaactcagttaacaggtctttatggtgtaggtattgcggcagttggtatgttatctactgttggtattacgatggcaatagacgcttatggaccagttgctgataacgcaggaggaattgcggaaatggctggtatgccgtctgaaactagagttattacagatgagctagacgaacaaggcaatactaccgctgctattggtaaaggttttgctataggagctgcagctttagctgcacttgcaataatttctgcgtttgtagaaacagtctctgcaaatagagcagaacctcttgagctcatattatctaatccgacggttcttataggtattttcattggtggtgctataccctttttaattgcttcgataacaatgacagctgttggtgatgcggcttttgaaatgattaatgaaattagaaggcaatttaaagaaataccaggacttctggagggtaatgctgagccagatacagaaaaatgcgtagacatagctactgcagcagctttgaagaaaatgttattgccaggcattattgcagtatctgctcctcccttagttggattaggcatcggtgcagaggctttaggcggcctgctcgctggtggtcttttagtttgcgttttaatggctcttttcatggcaaatgctggaggtgcttgggacaatgctaagaaatttattgagaaaggtaatttaggaggaaaaggcacagatactcactctgcagctgtagttggagatactgtgggtgatccattcaaggacacctcgggtccttcaatgaatattcttattaatgtaatggcaattgtgagcctggtgattgctcccattattgtaagagccttaagttaa

SEQ ID NO: 267645 - DNA, 1198 bp, Unknown
  Bacterial polypeptide expressing nucleotide sequence isolated from the Sargasso Sea
agatgttggagctgatcttgttggtaagattgaagcaggaatacctgaagatgacccaagaaatccgggtgttatagcagataatgttggtgacaatgttggtgatgttgctggaatgggttcagatatatttgaatcatattgtggttctatgattgcatctatagctatagcttacaccttaggtaacaaagatatgatgatgcttcctttagctttagcatcgactggtttaatagcgtcaataattggaatatttatagttaagcttcaatctgcaaaagcacctgcgagcgcattaagatctgggactcttttagcaccagtaatatttgtggctatggcctatttcataattgattcttttgaaggagttgaaatgaatgtatggtggtgtgttattgctggtgcagtaggcggagtcttgattggccttattacagaatattacacaggcggtagcccggttaaaaaaattgctgaatcaggagaaactggttctgcaacagtaatgatttcaggattatcagttggaatgcaatcagttgtaatacctattggtattttagctgggattattcttatctcaactcaattgtcaggtatttatggagttggaattgcagctgttggcatgcttgcaactgttggaataacaatggcaatagatgcatatggaccagttgctgataatgccggtggcatcgctgaaatgtcaagcatgggcgaagaagtaagagaaatcactgattctcttgatgaattaggaaatactactgctgcaattggaaaaggctttgcaattggggctgcagcattggctgctctagcaataatttcagcattttcagctgtagttgcagatgcaaatccagaattttcactagcactcacagagccaattgttttagttggaatgtttattggagtatgtatacctttcttagtttcttcaataaccatgacagcagttggagatgcagcttttgaaatgattaatgaaataagaagacagtttaaagagataccaggattaatggagggtactgcagagccagactctgaaaagtgtgttgaaattgctacaacagcagcccttaagaaaatgatgttgcctggaataatagctgtatcaatgccaaccattgttggttttgggttaggtgcacaggctttgggtggaatgcttgctggtgga

SEQ ID NO: 267646 - DNA, 714 bp, Unknown
  Bacterial polypeptide expressing nucleotide sequence isolated from the Sargasso Sea
caaaagctgttactaaaggttatgctattgggtcggctggcctcggtgctcttgttttatttgcagcctatacggaagatattaaacatttttcaaaagttgcaggttcaaatttagaaggaataattgtaacatttgatttatcaaatccgtatgttgtcgttggattacttatcggtggcatgttgccatatctttttggttctatgggtatgcaggctgttggaagggcaggtggcgctgtagttatcgaagttagaagacaatttaaaaaatatcctggtattatgaaaaaaaaacaaaaacctgattacgctaaacttgtagacctattaacagttgcagcaattaaagaaatgataattccgtcactacttccggttctatctccaataattttatactttataatattattcataggcggacaagtcgcagctcttgcatcagtaggtgccatgttgcttggtgtgataataacaggtttatttgttgcagtttcaatgacagcaggaggcggtgcatgggacaatgcaaaaaaatatattgaggatggaaactttggtggaaaaggatcagaagcacataaagcagcggttactggtgacacagtaggtgatccttataaagacacagcgggtccggcagtaaatccaatgataaaaattactaacatagtagctttattattattagctgtaattgcaggttaaa

SEQ ID NO: 267647 - DNA, 1303 bp, Unknown
  Bacterial polypeptide expressing nucleotide sequence isolated from the Sargasso Sea
ttttgaatcatactgtggagcaatgattgcatcaattgcaatcgctgcaacgatgggaaatgaaagcttaatgtttttaccgctctctcttgcaactttcggtctattttgttcccttattggaataggaattgtaagaacacaagtttctcgttctccagcagttgcattaagatggggtacattcttctcaccaattctattcttagttattgcatatttttttatcaaatattcgccaggtttggagatacaggttttctattcagtcttaacaggtgcagttggcggtatacttattggacttattactgagtactatacaggtggctcaacagaagattctcctgttggacgaatagcaaagtctggggaaactggacctgcaacagtcatgataactggtttaagtgtcgggatgcagtcagtcgttttacccttatttgtaatcgcagcgatcattggcatatcaacttacttttcaggcctctatggtgtaggtattgctgccgtaggaatgttagctacagtaggaataacaatggctatagatgcttacggtcccgttgcagataacgctggtggtattgcagaaatgagtggtatgaaaaaggaagttagagaaatcacagattcattagatgagcttggaaatacaaccgcagctattgggaaaggttttgctataggagctgcagcgttggcagcattagcaattattgctgcttatatgctggctacagaaattgaatctttatcattgaacgatcccagagttctgatgggcatatttattggcggtacaataccatttcttgtgtcctcaataacaatgtctgcagtaggagaggcagcatttgaaatgattgaagaaataagaagacaatttagggaaataccaggtttactagaaggcaaagccgaacctgataatgccaaatgtgttgatattgctactaaggctgctttgaataaaatgttactacctggagcaatcgctatactatctccggtattaattggtttcttattaggtccagttcatcttggtggcatgctagctggtgcacttttaggttgtgtgttgatggcattaatgatggcaaatgctggaggtgcatgggataacgctaaaaaattcgttgaaaaaggcaactttggtgggaaaggaacagatactcactcagccactgttgtaggagacacggttggcgacccctttaaagacacttcaggtccatcaatgaatatactaataaatgtcatggcaattgtgagtttagtaattgcccctctgctgtag

SEQ ID NO: 267648 - DNA, 1503 bp, Unknown
  Bacterial polypeptide expressing nucleotide sequence isolated from the Sargasso Sea
ttttcactaaagccgccgatgtaggttccgatcttgtcgggaaagtagaagccggcatccccgaagatgatcccagaaacccaggagttatcgctgataatgttggtgataacgtgggtgatgtagctggaatgggagccgacctgtttgaatcttatgtgggatctataatttcagccatagcactggctgcaggtagcatggctttaatcagcagtaaggaagctttactgccccttatgatcgccggggccggaattattgcatcaattctaggaacatttctggtgcggagttctgaaaatgcaaactttggtcaactattatgggcgttgagaaaaggtatattctcttctgccatattagttgcgatcttctcaggcggcattatatatttcctagaaatgtctgatggcgttagcctattcatatgcattattactggactcatagcaggtaccatcataggaactgcgactgaatactacacatcttatgaatacaaaccgaccaaaaatgtagctgaaaatgcccaaacaggcgcagctaccgtgatcatcagtggtttcgcaaccggaatgatgagcactttaatcccagtaattgctatcggagcaactatactgatagcttatgagcttcaagaattctacgggatagcattggctggagtgggattattgtctaccctaggtattacattggccacagacgcctacggaccagtagctgataatgcaggaggcattgctgaacaagctcagttagcaccagaagtacgacagcgtacagatgcattagatgcactaggaaatactacagctgctaccggtaaaggattcgctatcggttccgcagcactaacatctctagcattattagcagcatttgcacaagcagcaggcctgtttgacggagatgggattaatatattaaagcacaccactttagcaggactgcttataggggctatgctgccatttatattctccgctctaactatgaatgcggtaggtagagcagcattctctgtagttaatgaggttcgaagacaattcagggaaattgaaggactgttagatggtaaagctacacctgactatgagcgttgtgttgacattagcaccagaggagcattgaaagaaatgattatccctggtttgcttgctgtgataatgcccatcgcaatcgggctccttttaggagcagaagctctagggggcatgctcataggatctgtagcttcaggcttcatgatagccataacaatggctagtgcaggaggaagctgggataatgccaaaaaatatgtggaactaggacattatggcgggaaaggctccgattcgcacaaagctgcagttgaaggagacgtagtgggtgatccattcaaagacacttcaggaccatctttaaacatattgttaaaattgatggctatagtctctttagttttcgcaccagttttcactgtggtaaccccgataatcttatatatataag

SEQ ID NO: 267649 - DNA, 1984 bp, Unknown
  Bacterial polypeptide expressing nucleotide sequence isolated from the Sargasso Sea
tatggataatttaatcattccaccagctcttggcatattgggtatggtaatggcattcgttgtatataagcttgtcatgaaatatcctgatggcgaagataaagtaaaaaaaataggcgatcagattcatgctggagcactcgctttcatgaagacagagtacaaatatttatccatatttatagcagtaatagtattactagcatggtatgcattgggaccttacacggcaatttctataattgttggcgctatatgctcatctgtagcaggttttattggaatgtatgcagcaaccaaagcaaatgttagaactgcaactgctgcacaaaaagatggtccagcagcagctttatcagtttctttttatggtggctcaataatgggtctatgtgttgcatcattgggtttaataggtttgggtggcttatattatttttacatacctgctgaaattgatcctcataagctcgaaggtttcgctatgggagcatctgtcgtagctcttttctcaagagtaggtggaggaatcttcacaaaaagtgcagatgttggtgctgatcttgttggcaagattgaagctggtattcctgaagatgatccaagaaatccaggcgttatagcagataatgttggtgataatgttggcgatgttgctggaatgggctcagatatatttgaatcatattgtggttcaatgattgcatcaatagctatagcttatactctaggtaaccaagatatgatgatgcttcctttagctttagcggcgactggtttaatagcatcaataataggaatatttatagttaagctccagtctgcaaaagcacctgcaagtgctttgagatctggaacactattggcaccagtaatatttgttgccatggcctattttatagttgactcttttgatggagttgctatgaatgtatggtggtgtgttattgctggagctgtcggtggagtattaattggacttattacagaatattacacgggcggaggtccggttaaaaagattgctgaatcaggagaaactggttctgcaacagtaatgatttcaggattatcagttggaatgcaatcagttgtaatacctattgttatattagctggtattatccttacttctactcaattatcaggtatttatggtgttggcattgccgctgttggaatgctagctactgttggaataacaatggcaatagatgcttacggacctgttgctgataatgctggtggtattgctgaaatgtcaggtatgggtgaggaagtcagagaaattactgattctcttgatgaattaggaaatactactgctgcaattggtaaaggttttgcaattggggctgccgcattagctgcattagcaataatctcagctttttcagctgtgctcaaagttaaatatccagacttttcattagcgctcacagatccaattgttttagttggaatgtttattggtatatgcatacctttcttagtttcttcaataacgatgactgctgttggtgatgctgcttttgaaatgattaatgaaataagaagacaatttagagaaataactggactaatggaaggaactgcagaacctgattcagaaaaatgtgttgagattgctaccaaagcagccttaaagaaaatgatgttaccaggagttattgcagtatcaatgccagctatagttggctttggtcttggtgcacaagctttaggaggcatgttagctggaggactacttggttgtgtttcgctggctctgatgatggctaatgctggaggtgcttgggataatgcaaagaaatatgttgaaaaaggtaatttgggaggaaagggttccgatacacatgcagctgctgtggttggtgatacagttggagatccatttaaggatacatctggaccttctatgaatatacttattaatgtaatggccatagttagtttggttattgctcctcttctaagtatctaa

SEQ ID NO: 267650 - DNA, 1558 bp, Unknown
  Bacterial polypeptide expressing nucleotide sequence isolated from the Sargasso Sea
tatgagcggaacagtcgaaacaatactattatacacaatcggagctggtttattatctatcgtttatggatttttaactggtaaaaatattctaaattcaagtgcaggaaatgcaaaaatgcaagatattgcatctgcaattcaaattggtgcaaaagcatatttagcaagacaatacaaaactatagctattgttggtgctgtagttttagtaatcgtaagtgttgcatttagtccgctagtaggcctgggttatttaataggtgctgctttgtcaggtattgcagggtacgttggaatgttagtttctgtagaggcaaacgtaaggacagcggaagcatcaagaaaaggcttagctcaaggtctttctattgcatttaaatccggtgctgttaccggaatgttggttgcaggtttagcattattatccatagcagtttattattatattttattaaagtctaatgtagatgaaagagaaattgtaaatgctttagttgcattaggttttggcgcatcattaatctcaatttttgcaaggttaggtggtggaatttttacaaaaggtgctgatgttggtgctgatttagttggaaaagttgaagccggaatacctgaagatgatcctagaaaccctgctgtaatcgcagataacgttggagataacgtaggagattgtgcaggtatggctgcagatttatttgaaacttatgcggttacaattgttgcaactatggttttgtcttcaattttcttcgttggtgatcttaatatgatgatttacccattatctattggtgctgcatgcctattaacatcaattgttggaactttttttgttaaacttgggagaagtaataatgttatgaacgctttgtataaaggatttgttgtttctgctgtagcttctttagtaatattatggccagttacagatcacgtaataggttttacaaatgaatttacagtaaatgataaaacttttaatggaatggatttatattattgtggtgttatagggttagttataactggattattgatctggataactgaatactatacaggaacaagttatagaccagttaaatctgttgctttgtcatcgactacaggtcatggtactaatgttattcaaggattagctgtttctatggaagcaactgctattcctgcattgataattgttgcgggtatcttaataacaaatactattgctggtttgtttggtatagctattgctgtaactaccatgctagcattagcaggaatggttgtagctctcgacgcatacggaccagtaactgataatgcgggtggtattgctgaaatgtctaatcttgataagaaagttagaaaaacaacagacgctttagatgcagtaggaaacacaaccaaagctgttacaaaaggttatgcaattggatctgctggactaggtgcactagtgttatttgctgcatatacagaggatattaagcacttttcaaaagaagctggttctgcattagaaagaatagttgtaacttttgatttatctaatccgtatgttgttgtt

SEQ ID NO: 267651 - DNA, 2080 bp, Unknown
  Bacterial polypeptide expressing nucleotide sequence isolated from the Sargasso Sea
tatggatggagaacaactagggatgataggtattgcagcgggtcttttcggacttgtagttgcatttttcctatacaacaaggtgaattcaataaagatcgaaaacgagacggtggcaaagatcactgagcgaatctatgatggtgcgatggcattcctgtgggcggaatacaggttgttatccggattcattgtaatcgtggcaatagcccttctccttggaggagaagaaaacggcctcgggtttgagaccatgatcgcattcatcattggagcgatatgcagcgtagccgcaggattctccggaatgcgatctgcgactagtgcgaacggtcgaactgcacaggctgcagccgatggtggccaatcagcagcactgaccacatcatacaacggaggtgcagtgatgggtctggccgtaggagggcttggtctagccggtatctctctgatgtactacctcactcaaaccgagttcctaacagtggaaaacatagcaggattcggcatgggggcctcctcgatagcactattcgcaagagttggaggtggcatttacaccaaagcggcagacgttggtgcggatcttgttggaaaggttgaggcgggaattcccgaggacgatcctagaaaccctggcgtgattgcagacaacgtcggagacaacgtcggagatgttgctggaatgggcgccgatatcttcgagtcattcgttggtagcattatcgcagcaatggtgatcgcagcagcgagtgaggaccttctaggccctgactacgtgatgattccaatcgttctggcagtagttggttacattgcttccattattggcgtattctccattactgcaatgcagaacatggatccgggagcagcactgaggaataccactttcatagccgctggacttttcatcataggcggatacttagccctggactaccttgagttacccaccaaggtaatccaagctgtggcaataggttcccttgtggggattctaattggactggttactgagtactacaccggaatagaagatgtattcttcttcaaggtacaggcaatcccctacatcggggaagcaagcaagaccgggagtgcgaccaacgccatcgcaggattagcagtagggatgcagtcggtgttcattccagtcctactgatggccgcaggaatcttcggagcaaaccatgtgatggatggcggagatccggggctgtatgggatagcaatggcggctatggggatgctaggcacagttggcgttaccatgacagtggatgcctatggccctgtagcagacaacgccggtggaattgcagaaatgtctggtctaggcgatgatgtcagggagatcacagatgggctcgactcaattgggaacacgaccgcagcaataggcaagggattcgcgattggaagtgctgctttgactgccctcgctcttttcgccgcattcaagaccagtgctaatcttgaggcagcagatctgagcctgactgagcctatggtagtaatcggactcctaatcggggctgccctaccattcgttgtcgcagctatgaccatgaagtcagttgggagagcagccgaggacatgataaccgagattaggagacagttcaaggaaattgacggccttctggagggtcgcgagggagttgagccagacagtgcaacctgcgtggacatctccaccaaggcggccctaagggagatggtgctaccgggcgtagtggccgtatcgagtcctgtagtcattggtttactactaggtagcgcagcactgggtggaactctggcaggggctactgctagcggcgtcctgatggcgctattcatggcaaacgcaggaggagcatgggacaacgccaagaaggcaatagagcaaggacatattgagggcgctgcgaagggcgacgaagctcacagtgctgctgtagtgggagataccatcggagacccattcaaggacactagcggcccatctctgaacatactaatcaagctgatgagcatagtcagcgttgttattgctggaatgctgacaaagggcggggaactaggcactctttga

SEQ ID NO: 267652 - DNA, 824 bp, Unknown
  Bacterial polypeptide expressing nucleotide sequence isolated from the Sargasso Sea
aattccagaagatgatccaagaaatccagctgttattgctgataatgtaggagataatgtaggtgactgtgcgggtatggcagctgatctttttgaaacttatgtagttaccgttgttgcaactatggttttagcttcaatattttttattaataactcatatactatgatgttttacccacttgccatagcaggtgtttgtacattagcgagtatagttggaacttattttgtaagacttggaaaaaataacaatattatggctgctttatatagaggttttgctgtttcggctattttatcagcaatacttttatattttgtaacagactatgttgttggtcttgacaatcaattaattgtagatggaacagatatatcattttctggaatgtcattattcatatgtggtatattgggattaataattactggtctaattatttgggtaactgaatattatactggcactaactacagaccggtacaaagtatagcccaatcttcaaccacgggccatggtacaaatgtaattcaaggtttagcgattagtttagaggctacagcgttacctgcattgattattgttgcaggtattatttcaacatactcattagcaggtttatttggtatagcaattgccgtcacaacaatgcttgctttagctggaatggttgttgctttagatgcttatggacctgtaacagacaatgctggcggtattgctgaaatgtcaaacctagatgataatgtaagaaaaccacagatgctcttgatgcagttggaaatactaccaaagctgtcacaaaaggttacgcaatagg

SEQ ID NO: 267653 - DNA, 193 bp, Unknown
  Bacterial polypeptide expressing nucleotide sequence isolated from the Sargasso Sea
gcatgggataatgcaaaaaaatatattgaagacggtaaatttggaggaaaaggttcagaggcacataaagctgcggttactggagacacggtgggtgatccttataaagatactgcaggcccagcagttaatccaatgataaaaattacaaatatagttgctttattattgttagctgtaattgctagctaaa

SEQ ID NO: 267654 - DNA, 1015 bp, Unknown
  Bacterial polypeptide expressing nucleotide sequence isolated from the Sargasso Sea
gttgcagagtcgtctaccactggacatggtactaatgtaattcaaggtttagctttttcaatggaagcaacagcaatacctgcgataataattgtagcaggaattttattaactaattctattgctggattatttggtatcgctattgcagtgactactatgctggcattggctggaatggttgtagcacttgatgcatatggtcctgtaacagataatgctggtggaattgccgaaatgtcaaatctcccaaaaaatgtaagaaaaactacggatgccttagatgctgttggaaatacaacaaaagcagtcacaaaaggttatgcaataggttcagctggattaggagcattagttttgtttgctgcatatactgaggatattaaacatttctcaaaagaagcaggatctaaattggaaggtattgttgttacttttgatttatcaaatccatttgtagtagttggtttattaattggaggaatgttaccatatctttttggatctatgggaatgcaagctgtaggtagagcaggtggtgcagttgtaattgaagtaagaaggcaatttaaaaaaatacctgggataatgaaaagaaaggctaaacctgattatggcaaacttgtagatttattgactaaagcagcaattaaagaaatggtaatcccatcgttattgccggttttatcaccaattgttttatatttaattattttgcaaattggaggtcaagttgcagcattatcatctgttggagcgatgctgctaggagtaataattactggattatttgttgcagtttcaatgacagcaggtggtggagcttgggataatgcaaaaaaatatattgaggatggaaaatttggtggtaaaggttctgaggcacataaagctgctgttacaggtgatacagttggtgatccttacaaagatacagcggggccagcagtaaatcctatgattaagataacaaatattgttgcattattattgttagctgtaatcgcgggataat

SEQ ID NO: 267655 - DNA, 1303 bp, Unknown
  Bacterial polypeptide expressing nucleotide sequence isolated from the Sargasso Sea
atggaagcttcagcatcaaatatacttcaaattataattttggcaggtttattatcaatcgtttacggtttttttacaggaaaaaatattttaagttcaagtccaggtaatagtaaaatgcaagagatagcatcggctattcaagttggagctaaagcttatttaaataggcaatacaaaactattgcaatagtaggtgtcgttgtactagtaattattagttttgcatttagcatattggttggattaggttatcttataggtgcagccttatctggaattgcaggatatgttggtatgctcgtatcagttcaagcaaacgtaagaactgcagaagcttctagaaaaggtttgtcccaaggtctttcgatagcttttaaatcaggtgcagttaccgggatgttggttgctggtttagcgcttttatctattgctgtttattattatttattattatcatttaatgtagatgaaagagaaattgtaaatgctttagttgcattaggttttggagcatcacttatttcaatttttgcaagacttggtggtggaatttttactaagggtgctgacgtcggtgctgatttggttggaaaagttgaagcaggtatacctgaagatgatcctagaaatcctgctgtaatagcagacaatgttggtgataatgtaggagattgtgcaggtatggcagcagatttgtttgagacatatgcagttacaattgtagcaacaatggttttgtcctctatttttttccacggcgatcttaatatgatggtctatcctttatctataggaggtgcatgtatattaacatcaataattggaactttttttgtaaaattaggtaaatctaaaaatattatgaccgcattatataaaggcttcgtagtgacagctgtaacatcactaataattttatatccaataacagattatgttttaggtttagataataattattcaatttcaaacaaatcatttacaggaatgagtttatatctttgtggtgttataggtttaattataactggtttattaatttgggttacagaatactacacaggtactaattatagacctgttaaaagtgttgcatcttcttctacaacaggtcatggaactaatgttattcaagggttagctgtatcaatggaagctacagcaattccagcattaattattgttggaggtattctattaacaaattatattgctggactttttggtatagcgatagctgtaaccactatgttagctttagcgggtatggtagttgctctagatgcttatggtcccagta

SEQ ID NO: 267656 - DNA, 1171 bp, Unknown
  Bacterial polypeptide expressing nucleotide sequence isolated from the Sargasso Sea
tgagacttatgccgttacaatagtagctacaatggttttatcatctattttttttcaatcagatattagtatgatgatataccctttaacaatcggtggagcatgtataattacttcaattatcggtacattctttgtcaaattaggaaattcaaaaaatgttatgaatgctttatataaaggttttatagcaacagcaattttatctttagtagtattatatcctgttacagattatgtgattggtttagatgccaattatagctttggcgatactacatttacaggaataagtttatattattgtggcgttgttggtttaattataactggattactcatatggattactgaatattacacaggtacagattatcgtcccgttaaaactgtagcagcatcttcaacaaccggtcatggtacaaatgttattcagggtttagctatttctatggaagcaacagctgtaccagcattaataattgttgctggaatactgataacaaatgcaattgctggtttatttggtattgctattgctgtaacaacaatgcttgcattagcaggaatggttgtagcacttgatgcatatggtccagttacagataacgctggaggaattgcagaaatgtctaatctgccaaaaaatgttagaaaaacaacagatgcattagatgcggtgggtaatacaacaaaagccgtaactaaaggatatgctataggatctgctggtttaggcgctttggttttatttgctgcatacacagaggatattaagtatttttcaaaagaggctggttcaaagctagagggaatagttgtctcttttgatttatcaaatccatttgtagttgttggtttattaattggtggaatgcttccatatttatttggttcaatgggaatgcaagcagttggtagagcaggtggtgctgttgtaattgaggttagaagacaatttaaaaaaattcccggaataatgaaacgtaaagcaaaaccagattatggtagacttgttgatttattaactaaagcagcaattaaggaaatggtgataccttcattgttgccagttttatctccaattgttttatatataataattttaccaataggcggtcaagtcgctgctttatcttcagttggagcaatgctgcttggagtattataa

SEQ ID NO: 267657 - DNA, 598 bp, Unknown
  Bacterial polypeptide expressing nucleotide sequence isolated from the Sargasso Sea
tgaaggaatagttgtaacattcgatttatcaaatccttttgttgttgttggtttattagttggcggaatgcttccttacttatttggttcaatgggaatgcaagctgttggaagggcaggtggagctgttgttcttgaagtaagaagacaatttaaaaaatttccaggtataatgaaaagaaaacagaaaccagattacgctaaattagttgatcttttaactatagcagcaatcaaagaaatgataataccttcattattaccagttctttccccaatcgttctatattttattatttattctattggtggccaagttgctgcattagcatctgttggagctatgttgctaggtgtcattataacgggtttgttcgtagcaatctcaatgactgctggtggcggtgcttgggacaacgccaaaaaatatatagaggatggtaattttggaggaaaaggctcagaagcacataaagccgctgttacaggcgatactgttggtgatccttataaagatactgctgggccagctattaacccaatgataaagataacaaatatagttgcgctattattattagctgtaattgcaggttaa

SEQ ID NO: 267658 - DNA, 1769 bp, Unknown
  Bacterial polypeptide expressing nucleotide sequence isolated from the Sargasso Sea
atagcgtctgctattcagataggagctagagcttatttatttcgacaatacaaaacaattggaatagttggaattgttgtacttgtgattattagttacgcatttagtattttagttggtataggttatttaataggtgcaactttatctggtatagcaggttatgttggtatgcttgtatctgtccaagctaacgtaagaacagctgaagcctctagaaaaggattgtctcaaggtctttcaattgcatttaaatcaggagctgttacaggaatgctagttgccggtttggctcttttgtcaattgcagtatattattttttactaatatcatttggagttgatgagagagagatagttaatgcattagttgcactaggttttggagcatcgctcatttcaatttttgctagacttggtggtggaatttttacaaaaggcgctgatgtaggtgcagatttagttggtaaagtcgaagcaggtataccagaggacgaccctagaaatcctgccgtaatagctgataacgtaggtgataatgtaggtgattgtgctggaatggcagcagatttatttgaaacatatgctgttacaatagttgcaactatggtcttgtcttcaatattttttcatggagatctgaatatgatgatttatccattgtctataggaggagcttgtatattaacttcaatatttggaactttttttgttaaattgggtaaatccaaaaacatcatggctgctttatataaaggatttattgttacagccataacgtcattgttagttttatatccaattactgattatgttttaggcttagaaaatacctactctataaatgataaaacattcacgggtttgagtttatatatttgtggtgttatcggactagttattaccggtttaataatttgggtaactgaatattatactggaaccaattatagacctgtaaaaagtgttgcttcatcatcaacaaccggccatggaacaaatgtaattcaaggtttagcagtttcaatggaagccacagcagttcctgctttaataattgtaggaggaatacttttaacaaactatattgctggactttttggtatagcaatagcagtaacaactatgctagcattagccggtatggttgtagcattagacgcatatggtcctgtaacagataatgcaggaggtatagctgaaatgtctaatctacctaagaatgttagaaaaactactgacgcattagatgcagttggtaatactactaaagcagtaacaaaagggtatgcaattggatccgcaggtttaggagcattagttttatttgctgcatatactgaagatattaaacatttttctaaagttgcaggatcaaatctggaaggaattgttgtaactttcgatttatcaaatccatttgtagtagttggattgttagttggtggtatgcttccatacctttttggttcaatgggtatgcaggcagtaggtagagcaggaggcgctgtagttgttgaagtaagaagacaatttaaaaaaattccaggtattatgaaaaggaaatctaaacctgactacggtagattagtagatttactaacaaaagcagctataaaagagatgataataccatctttattaccagttctatcaccaatagttctttacttgtttattttaccaataggtggtcaagtagcagcattgtcttctgtaggcgcgatgttacttggtgtaattataactggcttattcgtggcaatatc

SEQ ID NO: 267659 - DNA, 1056 bp, Unknown
  Bacterial polypeptide expressing nucleotide sequence isolated from the Sargasso Sea
caaatatttggttagcagtggtatgtggttcagcaggagggatagcaatagggctaattactgagtactacactggatccacacctatagtaaaaattgcagagtcaggtcagaccggaccagcaacagtcatgatcacaggattatcggtaggaatgcaatctgtagtggctccaatagcttgtttagccttaatcattttcatttctacacagcttactggactatatggagtcggtattgcagctgtaggtatgttgtcaacagtggggataactatggctatagatgcttatgggcctgtagctgacaatgcaggtggaattgcagaaatggctggtatgccatctgaaacaagagaaatcactgatgaactagatgaacaagggaatacaacagctgcaattggtaaaggttttgcaattggagcagcagcattagctgctttagcaattattgctgcttttgtagctacagtttcttctaatagagaagaacctttagagttattattaagtaacccaatggttcttataggaatgtttataggtggagcaatcccattcttaattgcctcaataacaatgaccgctgtaggtgatgcagcttttgaaatgataaatgaaatcaggaggcagtttaaggaaatacctggtcttctagaaggcaatgcggagccggatactgcgaaatgcgtagatatagcaactgctgcagctttaaagaaaatgttaattccaggagttatagcagtctcagctcctcctttggttgggtttggtctgggagcagagtctctaggtggaatgcttgccggaggactattagcttgcgtattaatggcactttttatggcaaatgcaggtggagcttgggataacgctaagaagtatatagaaaaaggtaacttaggagggaagggaaccgatactcattctgctgcagttgtaggagatactgtaggagatcccttcaaagatacttctggtccttctatgaatatccttattaatgttatggctattgttagtttagttatcgctccactcttgtaac
